United States Patent Application Publication US 2004/0031072 A1 - sequence listing, part 19

SEQ ID NO: 85820 - DNA, 373 bp, Glycine max
  Clone ID: PAT_MRT3847_48509C.1
ttgggactgctacaacaatttatgaagattagggcgatgaacaacatggtggtgctaaaagtgtgtctgctgcttcttttccttgtgggacgttacaagctgcacgcatggaactgagcttattcaaaagtgatcattcatcatcttctgatgatgatgagtattcaatatcatgctgctatctctgcatgtgcacacgcttaatgccttatcaatgctgctgcgaagatattatgctgaattcatgcctctcagattgtaagagctgtatgtgcacacgctcacagccaggacagtgtcgctgtctttacaccaactactactgctacaaaccttgcatgtccagatatgactacaaacactaatagctctc

SEQ ID NO: 85821 - DNA, 279 bp, Glycine max
  Clone ID: PAT_MRT3847_4850C.1
ctcatgctattttcagtcctctcttcatgcaagagtgctgcaccctcagtaatgggggatgatatgatcgacacgtgctgaaccattgctgagggtgcagcactctagaatgaagagggggctagggaagggaatgcaagctgcactaatgctataatcagtcctacagcaatcgagaggatgtccagagacttgtttcacgaggcgattatcacaaacacccctccagatgcgcaataaaaccgatgagatccaattcacgaaaaaaactgtagcata

SEQ ID NO: 85822 - DNA, 212 bp, Glycine max
  unsure (1)..(212): unsure at all n locations
  Clone ID: PAT_MRT3847_48510C.1
gtcnncantcttaccgcggtaacgttaaagcctccgngaaatttcgcgcctccgaaggggntgnagnaaagcaatngtngcgngaaacgcccctngccaancttcccaccgngggccaggaaagggaatggcngtccgccgttaaanctttggtnctaaaggggtactttccagnctntccggcccgcctnctcctacccccccttttnggg

SEQ ID NO: 85823 - DNA, 277 bp, Glycine max
  Clone ID: PAT_MRT3847_48511C.1
agacttggatcctcctagagagggcgcgcctctcttttttttttttttttttttaaaagtaagaaaatgcatatggttgaactcaagggataggtgtagggaatctaaagacttaggccacgaagagcaaacctatcttagacaatgaaacaggttcaagtttggggtggggttagaatcgtacaaacttctcggtctgacctgctttagcgggagcatcaaaatagagggggttgtgtttctaaaaagctggagatagacttgcctacctataacg

SEQ ID NO: 85824 - DNA, 465 bp, Glycine max
  Clone ID: PAT_MRT3847_48512C.1
cccacgcgtccgtacggctgcgagaagacgacagtaggggacatacacacgcatgtacaccttaatgtttatatagggtggtttcttcttggtgttattcttgttctggcttgtgctttaatgcattcttcttcttcttcaaacctcttaataactactgtgccttgaatgttgggtttgagtatatctctttctcctccaaaagtagtgccacttacgtagggcatgatgatgaagaagagtggttttgagaagatggtgatgttgcagaagaacaacaagaacaagggaagctatgatgatgagaaaccaaggagtaagaggtttttggtgaacatcaatatcatggggagtgcatggcctattacgtttgtggtgaatgagaaagagcttgtttctggggtcattgatactgctctcaaatcttattcccgtgaagggaagctttcttttcttggttttgat

SEQ ID NO: 85825 - DNA, 364 bp, Glycine max
  Clone ID: PAT_MRT3847_48513C.1
aagaacagcgtctgattcggcaaaagctgctggaatgcattcagctttggcagatgctgatactgaagttgttgacggactacatgatgtccatctacaaactgtggccgatagtgctatagtgtacgcggtggatgcattggagtgggaagccgatacatagatctgggctcgcatgttcatgtaattaaacgaacgctaattgacctattatgtgctgatggactgaatgcctgaccacatacatcatcctatagcgattatacaggtgatcaggattatattaagtatggaacgtgagatcacggatcataatcacactaccaatgatgcctgtctagaggagatcgtattattggacgaa

SEQ ID NO: 85826 - DNA, 140 bp, Glycine max
  unsure (1)..(140): unsure at all n locations
  Clone ID: PAT_MRT3847_48514C.1
ancgaangtggcctgatggatggnctgctggnacagcagatggtaaacgaagtgcttcaanntgagcagacgcgnnnggngacagagactggngttgaagtnttaacagggaggtgcngacatcacccaangtttttcct

SEQ ID NO: 85827 - DNA, 313 bp, Glycine max
  Clone ID: PAT_MRT3847_48515C.1
tgacatgtgctgctctcttacatctgctcggactgcggctgcagctttgggagttagggtctgcaccctctgattccatggagtgttccttcttcgtttcgccaccttaattggcacatactgcttcttcagcttgagagatggcgcaagaaacctttctattcacatgggagtctgtatacgagggtcatctcgactagctgtgcgaccacatctctgatgcagtgctcaatgcgtgccttgaacaggaccctagattgttgggttgcctggcagacatgctccaataccaacatggtcatggggtttggag

SEQ ID NO: 85828 - DNA, 384 bp, Glycine max
  Clone ID: PAT_MRT3847_48516C.1
ttactttttttcttttcatttcaattgttcattcaggtcattgctcacactgacactgccacccatggggatgcgtgacacattattactcaatcatcgccgctaaatgactcaactagctagctagccagcgggtatactacaacacatagtttcttcagtgggggacaccgccggcagcagcgataggggcatggagccggctgctgtaggccggacatcgccgacagttgctgggctttctgcgccgccaacagccccgcgacctggccgctttgcagctgctgctgcaggatggactggaggaccacgccaaatatccgcctggcaccggggctgaggctccacctggctgagctgctgccaacacctggagccgaattc

SEQ ID NO: 85829 - DNA, 139 bp, Glycine max
  Clone ID: PAT_MRT3847_48517C.1
cacgcgtccggatgaagcagaaaagatgtgcacacatgtcgcacataatactagtaccctccttcttcgattcttaactcttcactaatgctattaacgcctcaccggacacactgattcgatcgtggttctcccatat

SEQ ID NO: 85830 - DNA, 999 bp, Glycine max
  unsure (1)..(999): unsure at all n locations
  Clone ID: PAT_MRT3847_48518C.1
tgacgagtcagatgcagaacatcacagctgcgagcacgcgtgcgcacgctcggaagctggctcgagattggattctctctatatatttcccctcgttcctgtcgtctttttcacccttctcttctctcacaaattcgtcaatcaatctcccaccgagttcccaacatggctgaatcggtggagcttccgagtcgcttggcgattctcccctttcggaacaaggtcctcttgcccggcgccataatcagaatccgctgcacttcccccaccagtgtgaagttggtggaacaagagctttggcagcgagaagagaaggggttgattggcatcctgccggtgcgtgatgttgttgaaattaagccagtgggtcccactgtatctgaaggagctgattcaacaaatcagaactcaaaagttcaaggcggttcattggattctcgtaagcttgatacaaaaaagcagaatgatgttgttcattggcataacaggggggtagctgcccgaccattacatttatccaggggagtggagaaaccaagtgggagggtcacatacacagttgttcttgaaggtttgtgcagatttagtgtccaggaactgagcacgagaggaatataccatactgcgaggataacttcccttgaaatgaccaagactgaactggaacaagtggagcaagacccagatttcataatgttgtctcgccaatttaaagctactgcaatggagcttatttctgttttggagctgaaacaaaaaactggtggtaggacaaaagtccttttggacaacgttccagttcacaagttggctgatatatttgttgctagttttgagataagttttgaagaacaattatctatgctggatttaattgaccccacagtgaggctttcaaaagctactgagttagntgacaggcatttacagtcaatacgtgtagctgagaaaattacacaaaaggttgaaggacanttgtcaaaatctcaaaaagatttc

SEQ ID NO: 85831 - DNA, 361 bp, Glycine max
  Clone ID: PAT_MRT3847_48519C.1
tctttgtcgcgtgcggtgggactggagctgggaggtcatgcttacctctgaggaaacttgctcatcaatgatagtggattggtgatctactgagttgctgcatgatatccgaagctactatttgtggctcttgctccatgattaatgtaaggagacctgttcatgtggaacagcaccatatgttgggctgacagactttagaaaactatacacagatgtggatgcacagacaaacaggctacaaggatatcttgaatacgcgggacttcaatcatagggatgacagatgagacatagtgtccttactgtctggcgatgataaggacgaagatatagctgtcatgatggatccataaaagag

SEQ ID NO: 85832 - DNA, 477 bp, Glycine max
  Clone ID: PAT_MRT3847_4851C.1
aacaaaacaactttgagggtacaacacaatcgaaaatcaattgggccaaaaacattaagggctacaaaaaacattaaaaaggggcaggttttcggagcaaaaagaaaattttctacccattaaaacccaaaaaaacccaactttcatggcaaaggggacacattcaagttcactaattaggcaaaaaataggggcccgaaagcaaaaacaaagttaaattagtttctttgggtctacaggcaggcaaaggctattccaaaaaggcccccttcacaaagagcaaaaccaaccctagttgccttaaaaaaaggtcaaggtcaaggaaccaaaatcgggcggggcgccaggaaaaaaggtggtggctatggggggaatcactttttttgttaaggcaaaaggggatctggtacccaacctggttattcgcttctaaaaaaatctttgaagggattgccttcgggctaggggaaattcatc

SEQ ID NO: 85833 - DNA, 276 bp, Glycine max
  unsure (1)..(276): unsure at all n locations
  Clone ID: PAT_MRT3847_48520C.1
cacacacatagaaactcaacaactagaatgtatatgatgattcttacccacttgttcaaggtcaatttatctgtgctatcaatttctcacgcttccgtagtagactattgcgttgcttactacacatgccccgttggcctggcaacgtgctcatgcatgagcaccgctaaggtcacggatgaccacttcatctacttgggccttggcaccgccgggaacaccanatacatcatcaaagccgatgagactgactccttcgacgcgcaattcaacggc

SEQ ID NO: 85834 - DNA, 327 bp, Glycine max
  Clone ID: PAT_MRT3847_48521C.1
atgtatattttcaagttgattttacttgtggatataaatataaataaaggtaatggaaaaaaggaggaaattaaaagaataatatattatctggttgatgttgatcacgactcaaatcttgattacattaattgctcagaatgcggaaacgcatgtgagtatcgttgctcagagactcatcacaggaagccatgtctgttcttctgcaacaagtgttgtaagacatctttatgtgtcccatcaggaacctatggtcacaaggaggaatgtccttgctatataacaattggaataccaaggaaggaaaacccaagttcccttaattaa

SEQ ID NO: 85835 - DNA, 259 bp, Glycine max
  Clone ID: PAT_MRT3847_48522C.1
aaaaaaaagggggggggccttttttaaccctggtttttttaggttgggggaaaataggggtttaggggaatttccttaaaaatccccccccggggggggcccaaccccctggggggggtctttcttcccttggggaactaggggggcccccctttttgggggggtcggaatttgtttaaaatgcctgaggggcctgaacaaaagggcccggccctggtgcaaaatttgaagtttgggaaggaggggaatctgggccttt

SEQ ID NO: 85836 - DNA, 500 bp, Glycine max
  Clone ID: PAT_MRT3847_48523C.1
cccacccaaaaggaatggttttggtttataaaaccttggccaataaggaaaatttaggggttaacaagtggtttgtgggggaaaaaacccccacaaaaaaaactaccttgggctttttgggtttatttatataaaggaaggtgggggaaggggtttccgggttcctaaaaaaaaggcattcccgggttaaaaattaaccaccctaaaaagttttgtttttttccttgcaaaatttgggaaaatttatttttttccccccggaaaaaactggagcggttggttttttttttttttaaggggggaagccccaaaatttttttccatgaaaaattcggggggttttaaaaccccccctttgattggtaaaaagcccctaagtttattcctttaaggtgaaaactgggcctaaaaaagcaaattttttttaagttaacaaaaaaaccaaatttggggaaaaaaacttttggcccctttcaaatatccccatttttgggaaattt

SEQ ID NO: 85837 - DNA, 138 bp, Glycine max
  Clone ID: PAT_MRT3847_48524C.1
tttctcacgcgtacgaccacgcgtactgaagaggaggtgtgaatggaataagtggtatgctctccaaggaaaccagtggggcattgcagaccttatcggagacaccgatcagagatgctgggacctacgccttatact

SEQ ID NO: 85838 - DNA, 243 bp, Glycine max
  Clone ID: PAT_MRT3847_48525C.1
ctctaacgtgggtctttcctttcccctttctgccgacgatcatgggtgtctcctctagatcagttatggccctttgtgctggtttgtagcttttgctgaataccagtaataatgaagaacgctattggtcaaactgttagggacctgaacagaggagtaaatcagcaagtgctggcagttcctgggcttgaaccgaaagttctcgatgctaccagctatgaaccatggggtcctcatggatca

SEQ ID NO: 85839 - DNA, 162 bp, Glycine max
  Clone ID: PAT_MRT3847_48526C.1
aattcggctcgagttgctttttctctcacattcttgcgcggtctatcacggggcactggtacttatccttatacaatacaccaaggaggcctaatttaacgtgagtgtgagcttaatcaaacccaatccaaaccaaattaaaccatgaaattatcctctttt

SEQ ID NO: 85840 - DNA, 511 bp, Glycine max
  Clone ID: PAT_MRT3847_48527C.1
gctattggttttttgatttattaattttatatggtaacaacttggctccacttgttcttaatcttaagctcctactctgtacgaagaagtacataacgttgtcaatgagatggaagggtggacctagtgacaccaatgctatgtaatttttaacgtaactataaaccgtgaattttgtgctttcaatgaatagaaatcatgcccaattgtttcgaaaaaaaaaaaaaaataaaaattaaaaaaaaaaaaaaaaatcaaaaaaaaaaaaaaaaagggaaccaaaatgtccccactatttttaataaaaaaaaaaaaaaaccaaatatcggaggggggggggttaaaaggaataaaagttaacgtccccttgaaggcaaccaaattttttttttatggggcccctaaaataaattgcctggcccggggtttaacaccgtctcatggggaaaaaccttggctttcccaaattaaacccctttgggaaacgtgccctttttcaccaagtggggct

SEQ ID NO: 85841 - DNA, 143 bp, Glycine max
  Clone ID: PAT_MRT3847_48528C.1
acccgtccttaacctcgaaatacgcctcgaggaaaactctttttctaaagttcaccatcaacctccacggactctttcatggcttgacgttcaaataaaaaacttctaaaacaattaacgagataagtaattttcctcataaa

SEQ ID NO: 85842 - DNA, 1725 bp, Glycine max
  Clone ID: PAT_MRT3847_48529C.1
ggttcaacttccacttgaacttgccgcttcttcaagtcgaagacaacacacccacaagaccgactgaaacgacagcattttttgatctattatggtgaaggggttgcacgggcagaacctccccgcccacgtggcacagctggttgatcagctggagcgccactgcttcgctcccgatggatctctcatctccaagcctctcttcaacgatctccaactcgccagagaggaaatgtgcagggaaagactgcgttacctggaagccatggctatatattctgaggctattgcaatggtggaggagtatcagcaagccatttctgtgtctaaccttggtggaatcagagatactggcaatctttatccacagcttgggttgaagaactctcctcaggtttatcagactttagagcatcaaatggttgttgctgaagcagctcaacgattgagactacctcttatctccaaagatggggaggttcatgatgaagacattgaaaagctaagtgtagtgtctcgaagctctcttgacagtactgttagtggggctaattcttctaactataacactccaagcagctctgttagtggggctaatactgcccttgctgcttcggatccagtggaagtcggagttggtggtgttgccaatcgttttttgggaattacaccttcttatttgtggcaaactcagcatcaaaaagcaccattatccgtggatatgactgaatatcgcctgtctgtttcacgggaggtagaggctcgcttgaagatgaaatgtgaaaaattatcagatgcctttgtattggatgacaatgattcttcatcatctggaagtcatagttcaagttctcggcttccagaaagggtgaaactgttgattgaggagattgaaagagaagaaacagcgctgcgggatgacctttattctgcagatagaaagtttgctgaatattataatgtcttggagcagatacttgcagtgcttattaaacttgtcaaagatttgaagttggagcatcaacataaatatgatgagatgcagaagacttggctctgtaaaaggtgtgagaccatgagtgcgaaattgagtgttctagagcacgttctcttgctcgaaacttacactaaggactctatacctgcccttcataagataaggaaatatcttgttgaggcaacagaagaagcttctattgcatataacaaagcggttacccgcctgcgggagtatcagggtgttgatcctcactttgacaacattgcaaggcagtaccatgatattgtgcagaaattggagaacatgcaatggacaatccaccaagttgaaatggatctgaaacgtttgccagataaacccagcacatagaagttttatgctttgtctccttgttcttggtttgaattctttttgtaaatggtattaaaggcatcaccctcaattaacctaagattcaatctgtgagctttttttaaaaaaataaaaaatatttggattattttgcattaccttacctgatagaggagaaaaaggaaactccaaaacctgctatttctgctagtttaagatgtcaaatagtattgaggtctttattcttttgtatttaatcaaagtatttttgtgtgcgtaggttctaatactcagcttctgaatgacacaaatatgggtggatgcaatgtataagtaaacatgcactaagggaattaaaaaatcgtgcttgcttc

SEQ ID NO: 85843 - DNA, 224 bp, Glycine max
  Clone ID: PAT_MRT3847_4852C.1
catcatcacccaccataattatggagggctgcttttgtattacaagtacagttgatgctatatatacacaactactctaaccctgttgcttgaaaaaacaattccccaacattcaaagctacacttaatcttagccaaaaggcctataaaggtatatatacctttttttttctgatcaagattcaaaccctagatcagtttaaatttcctagctttagttttat

SEQ ID NO: 85844 - DNA, 283 bp, Glycine max
  Clone ID: PAT_MRT3847_48530C.1
ccaaaggctgaatgcaaaaaaaaaaaaaaaaaaaaaaaaagaaaaaaaaaaaaaaaaaaaaaaaaaaaaaaaaaaaaaaaaaaaaaaaaaaaaaaaaaaaaaaaaaaaaaaaaaaaataaaaaaaatataataagaacataataagataataaacaaagtcaaggaaataacatattatgataataaagacgaaaaataaattcttttgaccattgcgttgaagaatcaactacataaagtggaactaatgttaaaacgaagaacaagaataatacggaaaca

SEQ ID NO: 85845 - DNA, 432 bp, Glycine max
  Clone ID: PAT_MRT3847_48531C.1
tttagaaggcaggcaacattttttttggaaacggattcacaaggtgatccccatttcctgagacccattgttagaggatttccgggcacaaaactctaaaaaaaaaagtctcatgagaaaacagaaaataccttaggttttatgctaactaagccggggccatactggggggggaaagcccagacattgctttggacggggtccgcaagggaagaacgtggttcctgggttggaccctgtgtggtgagaacgccctgcacaaagaacccatccgtggaggagagggccggtcacccttttttgagggattggaccttaaccccagcagaagcctttgtgtcttcaaaaaaaacccatagggtcgaagcttccaccagagtggattggtgtagtgacctcacccatgggcccaccggcaaaattattaccctt

SEQ ID NO: 85846 - DNA, 2127 bp, Glycine max
  Clone ID: PAT_MRT3847_48532C.1
atgcttccaaaaaatccaatcttccggtgccgggacactccttccgcaaacgctttcaaaaaacccagacccacgcgcaagcaaaaatccaagaacaaagagaacaatcctcctcctttcaagtccctccttcccccaaaacctccctcttccactcccaaccctaaccctctcaagcgcaaacattccgaccattccgttcccgctgcatccaattccggcgtcaaggttattgtgaggatgaggccttcgtgcagtgacggggacgaaggagattccatagctcagaggatttccagtgattccttgtccatcaacggtcaaaacttcacatttgattccgttgctcactccaatgcaactcaggcacgatttcaattagatatttttgagcttgtcggggcgcctcttgtagagaattgcttggctggatttaatagttctgtattcgcatatgggcagactgggagtgggaagacctataccatgtggggtcctgctgatgctttgtcagatgacaattcagcaagtgatcaacaaggcctcgcgcctcgtgtttttgaaagactcttttccctcataaatgaggagcaaattaagcattctgataagcaactcaagtatcagtgccactgctcttttctcgagatatacaacgagcaaatagcagatctattagatccaaatcaaagaaacctacagattagagaagatgtcaaatctggtgtctatgttgaaaatcttacagaggagcaagtgtgtacgaagaaagatgtggctcagcttttgataaagagtactgcagatggtgtaagcagatttagaacaagtaaaataaatcttgttgatctagctgggtcagaacgacaaaaattaacgggtgcagcaggagaccgtttaaaggaagctggcaatattaatagatcactttcacagcttgggaatttgataaacattctagctgaagtttctcagacaggaaagctgcgacatataccatatagagactccaggttgacatttttattgcaggagtctcttggcggaaatgcaaaattagcattggtttgtgctatttccccagcactaagttgtaagagtgaaactcttagtacattgagatttgcacaacgtgtaaaggctatcaagaataaagcagttgtcaatgaagtaatgcacgatgatgtgaatcaattacgagacgtgatatgccaactcagggatgaactgcatcgaattaaagaaaatggttacagtccaagtgatggaagtcggggtcattcagcagctttgatcagaagaaatggtgatgaggagatggagattgatgaggaagctctctctagccagacagctccaaatttcctaactaaaacggaaaatttagcagtaagcatctgccatggtcttgaaattattgatagccaccatcatgcagagaaggttttggcaggatcgataaggagagaaatggcactagaagagttctgtgcaaagcagacttctgatataatgcagctcaattgcttgttgcaaaagtacaggcaagagagggaatgcaatgccacaatagcacagataagagaagataaaattctacgccttcagagccatattgatggtgttttatccaccaaggagttcatggatgaagagccggtgtcccttgcacatgaaaacaagaatttttaccaatttggggagagggaagtgttgatggaagagatatgtagtttaagaaatcagcttcacttttatgttgactcttcatccaaatccacaagaaagcaatatcctccattgcaatttacttattcatctgaacctaaagagaaacatatccaattgcttgaaaggcatagaaagatccaggatggaattgatgatgtcaaggaagcagcttccggagccggggttagaggtgcagactctaaattcataaatgaccttgctgcagaaatttctgcattaaaagcagaaacagaaaaagaaaaagaaatgaaaatcctaagagatgaaaatagaggtcttcgagctcaactgaaggatactgctgaagcagtgcaagctgcaggtgaacttcttgtgcgacttaatgaagcagaagaaggtgtcattactgcacag

SEQ ID NO: 85847 - DNA, 584 bp, Glycine max
  Clone ID: PAT_MRT3847_48533C.1
aggacgcttgggatctcttctacatacaatgaatctttatataaaatactacaaaaagtatattctactataaacctatagaatagctactattttaaattctaaccgacggaagattacagcgttggtctaccagactgggatggctggcttactacaataggactctgcactggggagaacaactggaccaccctgagcacacgtgcaagcagttgatctccaagctgacggaaaccgttgtggcagccgacaccagcctcgccgacagtttttcaaccagaaagctcccgtgaaggaacacactgtctaaggactggatctgaccgaacgttagcgggagcgcgccacgcatcacaatggaccgatttgtccggataaactgcgccatatactcaccaagattggcgagcacctaacctacgatgatgtgaaacacaaggttcatggcgacgaggttgacggtgacactgctgctgatgattaccgcacgggccgagagaggactgccgatctgggaccatgtgaacgataagctggacatgaacagttgctgcagagacgggggacggggcaaccacgac

SEQ ID NO: 85848 - DNA, 3372 bp, Glycine max
  Clone ID: PAT_MRT3847_48534C.1
atgcttccaaaaaatccaatcttccggtgccgggacactccttccgcaaacgctttcaaaaaacccagacccacgcgcaagcaaaaatccaagaacaaagagaacaatcctcctcctttcaagtccctccttcccccaaaacctccctcttccactcccaaccctaaccctctcaagcgcaaacattccgaccattccgttcccgctgcatccaattccggcgtcaaggttattgtgaggatgaggccttcgtgcagtgacggggacgaaggagattccatagctcagaggatttccagtgattccttgtccatcaacggtcaaaacttcacatttgattccgttgctcactccaatgcaactcaggcacgattacaattagatatttttgagcttgtcggggcgcctcttgtagagaattgcttggctggatttaatagttctgtattcgcatatgggcagactgggagtgggaagacctataccatgtggggtcctgctgatgctttgtcagatgacaattcagcaagtgatcaacaaggcctcgcgcctcgtgtttttgaaagactcttttccctcatgaatgaggagcaaattaagcattctgataagcaactcaagtatcagtgccactgctcttttctcgagatatacaacgagcaaatagcagatctattagatccaaatcaaagaaacctacagattagagaagatgtcaaatctggtgtctatgttgaaaatcttacagaggagcaagtgtgtacgaagaaagatgtggctcagcttttgataaagggtttgttaaacagaagaattggtgcaaccagtataaattctgaaagttcacgctctcatactgtttttacttgtgtggttgaatctcgatgcaagagtactgcagatggtgtaagcagatttagaacaagtaaaataaatcttgttgatctagctgggtcagaacgacaaaaattaacaggtgcagcaggagaccgtttaaaggaagctggcaatattaatagatcactttcacagcttgggaatttgataaacattctagctgaagtttctcagacaggaaagctgcgacatataccatatagagactccaggttgacatttttattgcaggagtctcttggcggaaatgcaaaattagcattggtttgtgctatttccccagcactaagttgtaagagtgaaactcttagtacattgagatttgcacaacgtgtaaaggctatcaagaataaagcagttgtcaatgaagtaatgcacgatgatgtgaatcaattacgagacgtgatatgccaactcagggatgaactgcatcgaattaaagaaaatggttacagtccaagtgatggaagtcggggtcattcagcagctttgatcagaagaagtttgattttattgaagcctgccctcaatcacccattatcactacctcatgttgatgaagatggtgatgaggagatggagattgatgaggaaggtgttgaggatcatgctgtagttctccacaactcaaatggaggttttgctggtttttcagcccctaatggatctattggttctcctagtgctgcaatgaatggtgacagccctgctggcggcatggttaaatgcaaaacatcccccatcctcaaattccgtccttccagcctttcaccaacaatcagaagcagcaggaaaagtttgaggacctcattaaagcagtctccttctgagaataatattcatggtgaaagtgatttagttgatggttcccgttccagactttttttgatgataatgccaaaaaggaaagattatgctatgcttacctgtaataactgtaaaagcagaatgcagcttgatgccaatgagattgccaatagctcaaatgtgcagctggtactgattgatcgcccggagtcaactgataaaccaaagaagcaaattcttaaagcagcagagaaggttttggcaggatcgataaggagagaaatggcactagaagagttctgtgcaaagcagacttctgatataatgcagctcaattgcttgttgcaaaagtacaggcaagagagggaatgcaatgccacaatagcacagataagagaagataaaattctacgccttcagagccttattgatggtgttttatccaccaaggagttcatggatgaagagccggtgtcccttgcacatgaaaacaaggacttgcctgctatcaaaattcaacagcttttaaaggagaaccatgagcatcatttagaagttctgaagatgaagatagagttaaaaagagtacaagatgagttacaagagtatcagaatttttaccaatttggggagagggaagtgttgatggaagagatatgtagtttaagaaatcagcttcacttttatgttgactcttcatccaaatccacaacaaagcaatatcctccattgcaattgacttattcatctgaacctagtttggcagcaaacctcactgccatttcagatttaacagaggctagcactgaggcaaatgcaaatccagaatcgactgaagacagtgccaaagtaaaaattaaacaggaaaaaagtcaatggaccgaggcagaaagcaggtggatttctctaactgaaaaactgagagctgaacttgaagctagtaggtcactagctgaaaagaggaagcaggaactagatactgagaggaagtgtgctgaggaactgaataaaacaatgcaaatggctatagaaggtcatacacgaactttagaacagtatgctgatttagaagagaaacatatccaattgcttgaaaggcatagaaagatccaggatggaattgatgatgtcaaggaagcagcttccggagccggggttagaggtgcagactctaaattcataaatgaccttgctgcagaaatttcagcattaaaagcagaaacagaaaaagaaaaagaaatgaaaatcctaagagatgaaaatagaggtcttcgagctcaactgaaggatactgctgaagcagtgcaagctgcaggtgaacttcttgtgcgacttaatgaagcagaagaaggtgtcattactgcacagaagcgggcgatggatgcagagcaggaagctgcaaaggcctacaaacaaattgataaattgaagaagaaacatgacaaagacattagcacacataataagctacttgccaaaacacgtttgcctaatgaagaaatacaacctaccttggatgacctccttgtcatgcctatttgtgatgacaccaaggtgctgaaaaatgttaatggtcaatttgagttgttttgtaacgaagaggatagtgaacttgcaaatttggcagaccaatcatggttctctgcttatgacacatgcaacatatag

SEQ ID NO: 85849 - DNA, 340 bp, Glycine max
  Clone ID: PAT_MRT3847_48535C.1
cggaactcggaactagaaccgagcacgacccgcccgagccttttctctttttggaggggacgtatacggcaagcgcgtggggaaaatttctaatcacccacagcaagaaatatcctccattaagatgggctatcaaactcaatgattgaattgatcaaggtctaacctatcttaccaacatctcagccttttcctacggcgctagcaattaagtgttgacatgccaaatacaatagacattgatattcatgattcttgtaaaagaaaatatattgaacttatcggacttttttgttcttggaatatccaaaaacaaaaaaaaaaaacgaaaaaacaaact

SEQ ID NO: 85850 - DNA, 394 bp, Glycine max
  Clone ID: PAT_MRT3847_48536C.1
ctctttctcaggtttctgtttaatttcaagttcaagctggtgaaatctcggattagaactcccactctcctatctggtataggatttggtggggggactggtgtatagatttccttactttcactctctccttcacactgatccgcattgccgtccaaagtggcgttatttgaagaacacttgggcgttggcgcaaacgtttgcttcgataattgtttctggagacaacagggtcactgacaaaacaactgttacttgcagagatacgggcatcgtggttgactattacacagtagcatcctcatttagaaaatttctaccgcattacattacgtggcatcttgataccttggtgaactacatgctgccatcctttctcactgctgaaattaaa

SEQ ID NO: 85851 - DNA, 173 bp, Glycine max
  Clone ID: PAT_MRT3847_48537C.1
ctgctaattccatatccccgtattccttcactcttgaacgccgcttgctttccgccagcgcaggatgcgtggctgcgtttccgcgacctgcccacaagaaagctttgacataatctgagtatggacaatccaagggggttcgcaagtttactcagagcgtggctttgcctgag

SEQ ID NO: 85852 - DNA, 231 bp, Glycine max
  Clone ID: PAT_MRT3847_48538C.1
ggccttcagcacttgaagttgacaccttgctgatccccatcatgggaaccatttttcctcatcactctctctctccactcctcactaggggggcgtcaggctcatgaattctcttggctctctctctccagcccaagtcaaattctctcttttgcgccagccccattgattcaagtctcaacaagatcgatacttcatctcgtacagcttcatcgggcacaagttggttgg

SEQ ID NO: 85853 - DNA, 725 bp, Glycine max
  unsure (1)..(725): unsure at all n locations
  Clone ID: PAT_MRT3847_48539C.1
cttcattccataagtgcaaatggcattcatgagcatgcagggtgttgcaatgcattggttctacatttggaaccaaaagaacccaaattcagattgggattcattttccatagccttgatcaaaagatttagagatcgctatggtaaccacttctttgaaagattgagtatcttgaagcaagataaaactgagacaaaaacttgcattgaagaaagggagacttccatagtgttcttgaaagagaggaccaacaatgtaccaaagcttaagaaaatgttacaacagttggcgaagaaataagaaatcaaaccagaacaggatgggtcttggaaggaggaggtgttccggaaggaggaacccaaatcttgtgggttgcaccatcattcttgcaaagttagcattttagagttgaagcatgggctactaaaaagttcagaaaaaattcttaaggttaaaagggaggaaagcgtggaggcacaatcctttgaaatcaagatcaagaaaatcattgagggaattaaagagatcaaacaaatgttacaattgttgatcaagaaaaagggcatcaatgttgagtccaaataagaggagaaataacccatgcaagtagtatcaattttgctgccatggtgtgggtaataaagtcacaacaagacagtgatttangaaaagtctttggagtttctgccaatgggagaatagaacccaccaaggggatgagctt

SEQ ID NO: 85854 - DNA, 469 bp, Glycine max
  Clone ID: PAT_MRT3847_4853C.1
cattccgggcccaccctttatttttttaaaacaaccccaaaaccgctgtttttttgacaaacaggcccccccacccccccttttggggtaaacccttaagggataaaccccccccccccaaaaaattccccccctgaaaaataaaaaaccctttaaaccaaaaaaaaaaccccatttacaaaaaaatcaatgttttttttattaacccccccaaaacaacatcaccctgactttttgctaattaaaaaaccaaaacccccagttatcattcctgacctcaaaaaaaaactttttcctcaactaagaaggcttttaaaaaaccccacccgccgccagggaacaaacctttttcttcaacccttgaacttaaaaaatttccttttccaagcccccaaaccccttaaaagatttcccctttgcttttttaaccccaaacaaaagggcatcaaatttaggcttatattgggga

SEQ ID NO: 85855 - DNA, 103 bp, Glycine max
  Clone ID: PAT_MRT3847_48540C.1
ctgcaggctcctcggcccagttactcgccgcgtcgcctctccgcgtccgctcacttctatacaaccctctcaatattttattatactcaactaacattcttca

SEQ ID NO: 85856 - DNA, 668 bp, Glycine max
  Clone ID: PAT_MRT3847_48541C.1
gtattttcagaggcgacaaaagggaagaaaacaaatcccccaaaagatgaatgatatgcccaaattataaaaactaggttttgattatattttcccctcgattttcatttactgagaaaatcactgctgctgctgctactcccttttctcgtcctcagtgtcgagttatttccccccctcaaattttcgtttttttttcctaaaaaaaaggaaaagtaaatggcggcggcgatttcttcaccgatggctcagtctgtggcggcggcggcgactccagtaatagctccgggagtcgcattgggcggaggtccctttgcgaatgcgtctctgtacgtgggcgatctcgaggggaatgtaaatgaggagcaactttatgatctgttcagccaggtggctcagattgcttcaattagggtttgcagggatcagaccaagcgatcctctcttggttatgcctatgtcaactttgccaacgctcaggacgcatccaatgccatggaacttctgaacttcactcctctgaatggaaaaccgattcgaattatgttttcccaacgtgatccaagcattcggaaaagcggacatggcaatgtgttcattaagaacctggatacatcaattgataacaaggcattgcatgacacttttgctgtctttggcactgtact

SEQ ID NO: 85857 - DNA, 283 bp, Glycine max
  Clone ID: PAT_MRT3847_48542C.1
cccacgcttacggacacaccaggggcaatatcgatggacctcatgagaaggggacaattgctgcggtcaacaattgaccttgcagctttccattcgagggtctcctactgctacttgtggttgttcccaatctggaggcaaaatttgcccttgatccaaaggctatttaatcggtaattgcatgtacattggcgctgggtttaaacaagggcttaccattacttgtactaacgccttaacttttaatgaactggttagaatggcatacgaacctgttaaattt

SEQ ID NO: 85858 - DNA, 604 bp, Glycine max
  unsure (1)..(604): unsure at all n locations
  Clone ID: PAT_MRT3847_48543C.1
acgnacaaattcaatttgtatagattacctcaacaattaacagagaatccgtatcgaaaatacacagaaaatatgaaaccgtggaaaagcctattattgtacaacaaagcggggtaagtatgaaagtatcaatacaaaaataaataaaaaattgagactcctctgtataatgtgccaggtactagcaaggagaaagtgaaggaaacaaaatgaactacaagatgccacaatactaacaaaccaaggcaaatggacgtttctcacatggcattgattctgcatccttcacaagcattgtagaattgtcatgttaattatgctatttttgctccaacaaaagatatcagcaactctgaagcactttgtagcaaccaaactgactgcaatgaaaggaaaaaaaaaaagaaacattgcaagccacatgaaatgttaatccgaaaattcaagatcaccttccattccaccactcaagctcagatatatcagctgtttcaacccccataacactcaacatccaaggcttttcattatgttcgccagttctttgatcacagttccaggatcagcatgtgatcccgcaaggttgattgcatgatactctaac

SEQ ID NO: 85859 - DNA, 463 bp, Glycine max
  Clone ID: PAT_MRT3847_48544C.1
aaggattgcggtgaacccgtaaagatacacacctgcatttgggaaaacaggagtgggcaaaaataaggggggaggggttgaggaagaataaattgctaacggagcatggtcagacacgtaactcttccacacacagttgtctgaaacagcccaatatacaacaaaactcttattttgacagttttattacatataagagccataacacaaatgacatagagaagcactctactcattttataaccatatcactatggcaagtttccaataaaaattagatccagctgcccgcaaccagtgtttagagatgggctgagcttcacctgagaactatttacggagtcgtagagcccacagttctaggttgacccactggatgtcaccattgagcactgccatgatcttgtttgtaatgacaccaatgacttaaattgactgtcttataggctagaggatttaatag

SEQ ID NO: 85860 - DNA, 275 bp, Glycine max
  Clone ID: PAT_MRT3847_48545C.1
tttatacccgattttgagagcactttcttccttgctcacattaaggggcgtagtagcacgccctctcgtaaccgggcaggccctctacggtgatatggtaaccgaagtctactccaccgctcccattcgtgtcgtaaagatggactatttccggcccgacatggtcaatttcgtacactagaacatcttcaataacagacgccatccatacgccgatagtcgttgcgctggataccagacctgcggttaatcctggggtaccggccgagccgtct

SEQ ID NO: 85861 - DNA, 744 bp, Glycine max
  unsure (1)..(744): unsure at all n locations
  Clone ID: PAT_MRT3847_48546C.1
gcacgcctacctaagcttctcttcggctctcgctgcctgtgtagatgaaattggcaatttcagagtaaaaaccaattatgctgcagagataacaaaggaaatttggaaatattctgaacatatttctgttgagtgagatcagtgtaatcgtggttcgtgatttgatctggaacaacgcttacttaaaaggactcttattttctctgttctctgctctctcggtctgtcagaaatggctgtagcagactcaatatctttccaagaacaactacttcagagggttgcttcagctcagtttaggaagcctctccttcatcttgtgtccactcaagaagacaagggcagatacctcacccaatgtgtcccacttcacaaagcatcactcaaaggtgactggaaagaagctagaaaactattggatcaagatgggtcacttctcaaaacggccataacaaagggggggtgggccacactcctccacatagccgtgggagcaaaccgtgttcactttgtggaggagctgctaaagttgatgcaaccagaagaattggaattgcaagaccacaagggcaacactgcattctgctttgctgcagcagttgggaatgtgcaaattgctgagatgatggagagaataaatgcatcgttgccaaccataaggggtggnaggaggactcacccctcttcacttggctgttttacaagggaagaaaagaaatggcatggcatctgttccctaaaact

SEQ ID NO: 85862 - DNA, 581 bp, Glycine max
  Clone ID: PAT_MRT3847_48547C.1
cagtggttgtcatgaggatgaaattggtattacagcagtcacagctccagaacagcaaagagaaggggaaattccgatgttggatatgatatcccaaaatataagctctctggttgttggtgatgaagttttaaccccagaaattgaggaggatgatttgatatcactggaaggtgatccaattattgatagctcttcactttcagtagccagtgaacatagtagtatttgtggagatgagttcatcagttctgaggtttcttcagatttagggacaacaagttccaaagacataggaaagagcatctccactgtcaaaattgcagccagggctactgatttgagtatgtcaaatgtagaggcagatgtggcagtgagccttgaagagacaggagttagatctggctcaaagcctactacaggtgtttttcaccaactaactctggaaagatctgtgagtggaacagtaagtagaagtgtttttgaattagattgtaccccactatggggatttacatctgtgtgtggaaaaaggcctgagatggaagatgcagttgcaactgttcctcgatttttgaaaa

SEQ ID NO: 85863 - DNA, 397 bp, Glycine max
  Clone ID: PAT_MRT3847_48548C.1
cccttccttaacctcggagttgggttcgagttttttagagaaaaaaagaagttattctttcttctttttgctgaaaccccataaagcgaaatcgtaaagggtgtccttggaaaaggagtgtttcattaaaaagcagggatctttcgggagaaagataagagaaaggggtaagctttgttttggggcaatgggggatttggagaagcaggagaggaggaagaggatgatgaggaggaagaggacgatgaagatgatgactgagattgatgtccaaaaccttggttatgatgttttgtttgtgaaggaggctattatatattctgattgtgcatactaggctacttttttatatttgcgctggtagaaaagaattcttcttttgttggcatgattaact

SEQ ID NO: 85864 - DNA, 554 bp, Glycine max
  Clone ID: PAT_MRT3847_48549C.1
ctgatactttaatttgcttcacatattcatatgcagtactgatactcttggatacgtatccaatcctttacaataaaattatgaaatgaaaattcaataaattaaataagagaaataaaagcatgtacaataaagaaacataaaagtattgttccttaatgaaccaaaaatggaaatcgtcctctttatggatgatttcaagaaagaaatgataatgataatattcttatttgcagacaattggaagtaatttacgataatgatttataatttttattttgtagactagaaattataatttattatgctttatgattttttatacatacatacatacatatatatatatatatatatatatatatatatatatatatatatatattaattacacgtattgtatcctatatatttttagaataatcgtagctccacattggatatgtattatatcagatacacatatcgtatctgcgcatcattaaagatttataaaaagaccatgctttgtaagaatttgctcactataaaatgattctccagtccaatctgtg

SEQ ID NO: 85865 - DNA, 406 bp, Glycine max
  Clone ID: PAT_MRT3847_4854C.1
ccacgcgtgcggggcattccgttgttggaagcttggtattacttgtgaatctcatgctgttgataaggcatgaagtgccgatctcctctctacttcctgtgataacatttggttccccatccatcatgtgtggaggtgatagtctgctagaaaagttaggtttgcctaagagccatgttcaagcaattacaatgcacagagacatagtaccacgagcattttcttgcaattaccctaatcatgttgcagaactattgaaagctgtcaatgggaacttccgtagtcatccttgtctcaataaacagaagctactatatgcaccaatgggtaatctgctgattctgcagcctgatgagaagttttcaccaagccattcatctcctgccatcaggcaggggtctatatc

SEQ ID NO: 85866 - DNA, 1635 bp, Glycine max
  Clone ID: PAT_MRT3847_48550C.1
ctgtggtggaaacgaatagtaataataatagcttattgaagcaggttcgggaacatgaagaagagatcatcctattaaggaaacgtcttgctgattattctgtaaaggaaggacaaatacggaacgaaaaatatgtcttggaaaagcgcattgcatatatgcgtctggcctttgatcagcagcaacaggaccttgtagatgctgcatcaaaagctttatcataccgacaagacataattgaagaaaatatacgtcttacatatgcattacaggatgcacagcaagaaagatcaacatttgtttcatcctttgcagcctcttcttgcagaatactccctgcagcctcctgttcctgatgcacaatcaattgttagcaatgtcaagcttttgtttaaacaatttacaggaaaaacttcttctcactgagtcaaagctaaaggagtcacaatatcaattgacaccttggcgttcagatatgaaccatgctaatgttgccacacaatcacaacctcacttcgattggtgcacctttgacaacttcaaataaaaatggccttgaactggtacctcagcatatgtactctcaagtaaagcctcaggtctctgttgatgctcaggcaggcactgaaccggatctattgggtcgccaccagaatggcttgagtggtggtgtggcaacaagtgttgatgctgatgatttggggagattttcacctcttgcaagcaggtattcatcagcccctgatgcatccacccacctggtagttactcagggtgataaccatcctgctcattatggagatgaaatgaccaacaaacaggtcacatttcgtgaccccatgatcaacaatgaagttgatgatcctgatggagatggaacacatagtacgagagaaacatctgctaattggagttctggcaaccctccttatacaaccactgttgatgatcccagttcttcatattctccttatttaccagcagttcttgaagaaccttcttcttcattttctgaggctgcagatgaagatccattgccggctatagagggtctccaaatttcaggagaagcctttcctggaagggaacttaaggcaggcggatactccatcaatggcactactagttgtaattttgagtggattcggcatttggaagacggttcctttaattatattgatggggcaaagcaaccaatctatcttgtcaatgctgatgatgttggtacattacttgccattgaagtccaacctctggataacaggaagcgcaagggagaacctgtgaaggttttgatgataataaaaagatttacccagatggggattgggagttgttgtgtgctacctaaattttgctccttttcatattctataatagggcagaattagcttgagctgtaattgtgaatttatgcaatcatttttttcttctttttctttttcaatatttagcaattcttttttagctcttttccttgccatgtaagtccattgttgtactgcatgttgctcttgtcattttgtgcatctctttgggtgggcccttttgcaatgtgcatgtattcacatgctatgtccgcccactttcattaactaaaatggttcagaggaaaatgatatagttgtcgtttga

SEQ ID NO: 85867 - DNA, 340 bp, Glycine max
  Clone ID: PAT_MRT3847_48551C.1
cccacgcgttttttatttgaggtataatgggccatggtggaaatggatttggacgggctatgggtggtacccctacattgttgcttcctcagtaaatgatgaatcaatgtgcttgatcctgtattagggggacccaagggcagaatggtccggtatagacgctgatctggcgcatgggtgcctttgttttagcatattatgccttcattgcctgttgaatgaagtggtggtttgcctggattgctaccttaagatgagtcaggcttcaatgcaagagggatgccgcgtcacgtgggtggagatgattgcaccgaatgcaggcatggattggtctctaata

SEQ ID NO: 85868 - DNA, 1102 bp, Glycine max
  Clone ID: PAT_MRT3847_48552C.1
gctaactggagttctggcaaccctccttatacaaccactgttgatgatcccagttcttcatattctccttatttaccagcagttcttgaagaaccttcttcttcattttctgaggatgaagatccattgccggctatagagggtctccaaatttcaggagaagcctttcctggaagggaacttaaggcaggcggatactccatcaatggcactactagttgtaattttgaggggcaaagcaaccaatctatcttgtcaatgctgatgatgttggtacattacttgccattgaagtccaacctctggataacaggaagcgcaagggagaacctgtgaaggtttttgccaatgataataaaaagattgcttgtgatcccgaaatgcagaaccacatagagaaggcttttaatagtggacatgcttcatatagagtttctcattcgactagatatcttgatatatgggagccagcgacattggccattacgagggaaggttatagtatcaaatgcagtggacaaagtggagttgtaatcacagaaaaattttcaccgtccaccactgttatgattccatatggacatacttcagagtttattataattggttccagtggtgatgaacaccttttaaagacagatttcagtggtgctagagacactattgtgctcactttgagattattcatcctgaggaggcctggggagaaaagaagagtaaagaagaagggattattcttttaacaggtgagggaatgtcaggactgcttggctgaaaatctctgctgtgcgtggaatgtgcagaccaccgagatggggattgggagtagtgttttgtgtgctatctaaattttgttccttttcatattctataatagggcagagttagcttgagctgtaattgtgaatttatgcaatcatatttttttttttctttttcaatgtttagcaattttttgtagctcgtttccttgccatgtaagtccattgttgtactgcatgctgctcttgtcattttcttgcaatgtgcctgcattcacatggttccccccacttttattaactaaaatggtccagaggaaaatgatatagttgtcgtttga

SEQ ID NO: 85869 - DNA, 430 bp, Glycine max
  Clone ID: PAT_MRT3847_48553C.1
ctttgacaacttcaaataaaaatggccttgaactggtacctcagcatatgtactctcaagtaaagcctcaggtctctgttgatgctcaggcaggcactgaaccggatctattgggtcgccaccagaatggcttgagtggtggtgtggcaacaagtgttgatgctgatgatttggggagattttcacctcttgcaagcaggtgagcctggtcaaatggagactgctactgtgaactgaatgtattggtattcatcagcccctgatgcatccacccacctggtagttactcaaggtgataaccatcctgctcattatggagatgaaatgaccaacaaacaggtcacatttcgtgaccccatgatcaacaatgaagttgatgaccctgatggagatggaacccatagtacgagagaaacatctactaattgga

SEQ ID NO: 85870 - DNA, 144 bp, Glycine max
  Clone ID: PAT_MRT3847_48554C.1
acaaaaaattgctaaacattgaaaaagaaaaaaaaaatatgattgcataaattcacaattacagctcaagctaactctgccctattatggaatgtgaaaaggaacaaagtttgtataggacgcagagctctgctcccaatcccg

SEQ ID NO: 85871 - DNA, 395 bp, Glycine max
  Clone ID: PAT_MRT3847_48555C.1
ctagatcaaataaagattttttacaaaacgagaacagagtacattcattataggatcaaaatttcttttatcacaaaatttaaaatttaacattacattttacctttttcaccaatttttaaatactacataaataaattgcaacatacaacattttaagggttaaaacttaaaactaaattttaaacaaagggatatttatctttttattcattatttcaccatcttcttttctaactatttgaaatatttacctttttactgatatccatttccaaattattttccatatttattaaatattttttttttttctaaacccattatatgaggtcatttattgtcattttttcacattacttgttttgtttttcttccccttttttattattcct

SEQ ID NO: 85872 - DNA, 337 bp, Glycine max
  Clone ID: PAT_MRT3847_48556C.1
gacccagacagcaaagttgcctgctttacatgcaccaaaaccaactttggcttagcttttttaaataacgaccaaggccaacgtttactactataatataattctttacaacttcatgaacattatctttctcttaaatgatttgttacttgattcccacaacttcaaagtccttcataacatttatcatcataacccttatattgctcaggtttacactttcaccttaccaaaaaacctgaataaatttgttcttgttaccaaattcacatttttttctattccacttattaaaccccttaatttataccatttaaccattttttttcaacaaaat

SEQ ID NO: 85873 - DNA, 601 bp, Glycine max
  Clone ID: PAT_MRT3847_48557C.1
gaaattcaaacgacaactatatcattttcctctgaaccattttagttaatgaaagtgggcggacatagcatgtgaatacatgcacattgcaaaagggcccacccaaagagatgcacaaaatgacaagagcaacatgcagtacaacaatggacttacatggcaaggaaaagagctaaaaaagaattgctaaatattgaaaaagaaaaagaagaaaaaaatgattgcataaattcacaattacagctcaagctaattctgccctattatagaatatgaaaaggagcaaaatttaggtagcacacaacaactcccaatccccatctcggtccgcactttccacgcacagcagagattttctgccaagcacctgacattccctctcaactgttaaaagaataatccctttttctttactctccttttcccaggcctcctccggatgaataatctcaaagtgagcacaatagtgtctctagcaccactgaaatctgtgttgttttctgcttttaaaaggtgttcagcaccacttgaaccaattataataaactctgaagtatgtccatatggaatcataacagtggtggacggtgaaaatttttct

SEQ ID NO: 85874 - DNA, 199 bp, Glycine max
  unsure (1)..(199): unsure at all n locations
  Clone ID: PAT_MRT3847_48558C.1
gngcgtgtgttcgtactgtttgcgagaagacgaccgaaagggggattaggaacagagtttacacttggccgtatagaaggccttgttaaaacacgccactaaccttattccagtgtccctttctgttccggataaaaccttttttcaacaattaccctctttcttcattgaacggggtaccaaaaggggggaaaccctt

SEQ ID NO: 85875 - DNA, 326 bp, Glycine max
  Clone ID: PAT_MRT3847_48559C.1
tttttctctctctttttcttaggcgaaaaacatatataataaaattttactgggtgtttacacttgtcctaaatatatctcacattaatgctcgtcttttatgtccctaggattaaaccctcgaggagtggtccgacattatcacttccctagaaaaagcccttattgtgatctcttattcgatgacccacttttgtgagtattaagcaactttttcaagctagcctccttggttaaaagaaggtcatccaccttcccgtcattgctttcctcatcatcacaaccaccactcctaaaaacagcatctgcccccattcccgtacctt

SEQ ID NO: 85876 - DNA, 1311 bp, Glycine max
  Clone ID: PAT_MRT3847_4855C.1
gtgctacaaggtttttcgttattcagggttctgagacgttggcttcatggcaagcaaacctactctttgagccaattaaatttgagggtttagatgtacttgtgcacagaggtatatatgaggctgctaaagggatatatcaacagatgttgccagaagtacgtgctcacctaaaatctcgaggttctcgtgcaacttttcgtttcacaggccattctcttggtggaagcttggcattacttgtgaatctcatgctattgataaggaatgaagtgccggtctcctctctacttcctgtgataacatttggttccccatccatcatgtgtggaggtgatagtctgctaaaaaaattaggtttgcctaggagccatgttcaagcaatcacaatgcacagagacatagtaccacgagcattttcttgcaattaccctaatcatgttgcagaactattgaaggctgtcaatgggaacttccgtagtcatccttgtctcaataaacaggtaaagttctggttttcaaaaagttttgaagtagatgaagaaatttctttcatataaatctctgaagtagttttatttgtgaatttttactgcagaagctactatatgcaccaatgggtaatctgctgattctgcagccagatgagaaattttcaccaagccatcatctcctaccatctggcagtggtctatatattttgagttgtccattatcagaatctagtgacacattaaagcagctttacgctgctcaaatggtcttcttaaactcacctcatccacttgagatattaagtgatcgatctgcctatggatctggaggaaccattcagagagatcatgacatgaattcctacttaaaatgtgtgagaaccgtgattcgccaagaacttaaccagattcgcaaggcaaggagagagcaaaggcaaaaggtgtggtggcctctcgtactgccacgtggaagtgacactaacatagttggggggtccatgattcaagaccagccttccttctctggcatcattcagataggtagagagtcattgaaaaggtttagtaggcttgttagatcccaacacatgcaattgtttgtagcgctcctgtttcctgcacggttgttgctcgtgggagcatgtaacttaattagcttaagatgaaaatatcaccattttttattttttttgttgaggggcagttgtatagggtgagggcacattgttggtggaacatttagaccattctttattcgttgatttcaaaaattgattgtatatcttttgaatagtaattgtatagaaaaatattgctc

SEQ ID NO: 85877 - DNA, 1097 bp, Glycine max
  Clone ID: PAT_MRT3847_48560C.1
ctttcctagtatagtaagtgacaactgcttgcatataaaacaacaaccaacacacaaaagcacactaaaatcacagatgggtatactaaaagtaaaacaccacattcccacgctcctctttctcagtatttcatttcctctgtttcttcttacacctacctcctcagacaacacaaacttgatctacaaaggttgcgccgaccagaaactccaagcccaatactcccagaacctcaaaccgctgttggactccctagtctcggcgtcggcacagaagggtttcgccgcgactacccaaaacgcgctcaccggcgcgtaccaatgcaggggagacctctccaactccgactgctacacctgcgtgagcaagattccggggatggtgaagcgcctctgcggcggagatgacgtggcggcggcgcgggtccagctgagcgggtgctacctgcggtacgaggtggtcgggttcaaggtggtctccgcgacgcagctgctgtacaaggtgtgcggggcccgcaaggtggtcgacggcggggggttcgaggcgaggagggacgcggcgtttgggatggcggagaacggcgtgcagagcagcggaaatttgttctacacggggagctaccagagtctctatgtgttgggacagtgcgagggtagtttgggaaatgaggattgtggaggttgtatcaagagtggtgcggaacaggctagggatcagtgtggtgactctatctcagcgcaggtttatctccagagttgttttcttagttatagcttttaccccaatggtgttcccaccgcctcatcgtcttcctcagggggaggaggggggcatccacacactgagaggacagtggcacttgcggtgggaggggtggcggctcttggattcttgattgtttgtttgttatttctcaagtcggtgagaaaaaaaagaggtgggaagcgttgataaagttttttttggattcctagatcattgctttttaacatcttagctcaatatacctttgccttaatttgtatagttctcatccaaaggaattgtcattcttattcttatgctatgaaatggattggggagagtattataggga

SEQ ID NO: 85878 - DNA, 429 bp, Glycine max
  Clone ID: PAT_MRT3847_48561C.1
ttctttaacttatttatttttttgatttgtgaattacttgattacgacattactcgagagcattacatttttttcttcgtgcagcggggggagaccacctggattctgagggggaacaagaaaaaactcctgctcactactaaagcaaaaaaagggggggtgtgcccccccagtgtggagttaaacgaaaaaatcgtgccctgaaccaaaaaatagatctttgacgtgaccccccttgatccaagggacctttttggtacagagtccacacagaactaaccctttgtcacccccccatcttaacggaaaaaaaaaacaggcaattgctgggtctaacaaagaaacccgcccaccaaaaaggtttgtgtgcgcaatctcaaaacattattactcacacccgggtgccacaacggcccttgcgtgggggcc

SEQ ID NO: 85879 - DNA, 654 bp, Glycine max
  Clone ID: PAT_MRT3847_48562C.1
tagtttcaaggataaaaatcttctgggggcgttttcttccttgagcttttgagtgctgtggagccaagggttgtcaactggagtcttgtttctaaaggggagactgatgaagataagaagttgaatccaacatacataatcagtgttgcccgaaaactagggtgttccattttcctgttacctgaggacataatagaggtcaaccagaagatgatactcattttacctgctagcatcatgtattggagcctgaagaaacctgaagaaaacatcacccctgaagcatcgcctaaagcttcagtagatggtgaaagcgaaacagatgtagtggacgaggtatccaatttagccattgatgatacaacttcggagaatgctagctcttcttaagttagtaaggttgaagcaaaccatactcaatggagaatgagcgggaaaaaacgcatttttgtttatagggcaaaaggaagatgccaacctcttggttcccagttcgaaagaaagcttattgttatgaaaaaccacagataatagaaggatcttgtaaattattctttagaatttttttgtacttaggcatattctttcatgaaaattgcatgcaaattttcccaataataatgtgggcggaaggcatcattttattttcggtct

SEQ ID NO: 85880 - DNA, 599 bp, Glycine max
  Clone ID: PAT_MRT3847_48563C.1
ttttggggggtttttttttttttttttttttttttttttttttttttttttttttttttttttttttaaaaaaagggggggggggaacaattggggcccccaaacatcaatttttctgaccaacggcaattggccaaacaaaaaaaccttagcgggggggcccccaaaacttcctccttaaggggttaaaggtaaacccacaattaaaaacaaaaaaaggcataaacaaaaggggtttaaaaacaggggaaacaaacaaaagggtgggggaaaacaggataatcatcacccagggcaaaccccagctctgggggccaaaccacaaaatcggcaggggtcccaaccgcaagggccccctttgattctaacccccccaggggggcaggtttcttgccccacaaaaaaaacaatgggcccaaaaaaaggccatatttcttcccatatgaccacgcccctggaaaattaaaccgcaaaaatgaaatgcccccccaagcttttaaaaagccacccccccccaaaaccttgagttcaggcccagggggggaaagaccagtacctaatagggcaatggggccctttaaaacagccccccaaaattg

SEQ ID NO: 85881 - DNA, 2253 bp, Glycine max
  Clone ID: PAT_MRT3847_48564C.1
tacggctgcgagaagacgacagaaggggggtgccggtaaatgtcgccaaggtagatagaattagaagccctcgctggtgatttagtgaacccagaatcataagagaatatgaagatggaggaagcttcaccgcagtggcaacagtgacggtggcaacaaatggtggtggggagtggccagcgctgctcaaatgggattgggaattcgtaccttcgccaaagggcacggaggcgattcgcgcctcatgcctttcaaagccttcgttgtagcttccctcttcgtcagcagcgccgcctccgcctccgttctactcctccaagctaacggcatccacagggtggaagatctcatgaaagcaggagcaaatttaagagcaaaacttggattacgtccacgaacgcagaataagaatatggatgattcatgacaatagactcatggaggaagccgcaggggtggccacagtgacggtggcaacaaatggtggtggggagtggccagcgctgctcaaatgggattgggaattcgtacctacgcttgggggggcggaggcgattcgcgcctcatgcctttcaaagccttcgttgtagcttccctcttcgtcagcagcgccgcctccgcctccgttctactcctccaagctaacggcatccacagggtggaagatctcatgaaagcaggagcaaatttaagagcaaaacttggattacgtccacgaacgcagaataagaatatggaggactcatgacaatagacacagccatgtcttgtgctgatacctctggtgggttggttccctggtggatacaacacaaatttataataaacattcatgggatggtatttggaagtgttgaaggtttcatgcacaagtcagcaatcatattatggttgtcagaaacctcgaagaacgatgggattttctcagtctttgcccccaggctttggattaactagtccatttggtgagaatttccacttatgtcaataatgtttttgaggatgtcagaaatggatgggttctattagaagttcttgacaaggtttcacctgcatctgtcaattggaagttggccacaaagcctcctataaagatgccgtttcggaaagttgagaactgcaaccaagttataaagattgggaaggaactaaacttttcattagtgaatgttgctggtaatgatattgtacaagggaataagaagctcttattggcatttttgtggcagctgatgaggtttactatgcttcaacttctgagaaatttgagatcgcactcacaaggtaaagagattactgatgctgatattctaaactgggcaaacaataaagtgaaaagagcaggaagaacttctcaaatggatagtttcaaggataagaatctttctggtggcgttttcttccttgagcttttgagtgctgtggagccaagggttgtcaactggagtcttgttactaaaggggagactgatgaagataagaagttgaatgcaacatacataatcagtgtcgcccgaaaacttgggtgttccattttcctgttacctgaggacataatagaggtcaaccagaagatgattctcattttagctgctagtataatgtattggagcctcaagaaacctgaagaaaacatcacccctgaagcatcgcctaaagcttcagtagatggtgaaagcgaaacagatttagttgatgaggtatcccatttagccattgacgaggtatccaatttagccattgatgagacaacttcggagaatgctagctcttcttaagttagtaaaggttgaagtaaaccatacccaatggagaatgagtgggaaaaaacacatttttgtttatagggaaaaaggaagatgccaacctcttggttcccagcttgaaagaaagcttattgttatgagaaactgcagataatagaaggatcttgtaaattcttctttagaatttttttgtacttaggcatattctttgatgaaaattgcatgcgaggtttcccgataataatatgggaggaaggcatcgttttattttccggctaattgttaagattattcttaatgcgtgcatacagatacgggttgaagtggatgaacggaaccagtgatgattatccacttcatttaagtggtttttctatttcaagtcttggattcaaatatatttatacaggtagttgatgctatggcaattggagattatgcctgccccaaaaaaaaaaaaaaaaaaaaaaaaaaaaaaaaaaaaacc

SEQ ID NO: 85882 - DNA, 514 bp, Glycine max
  unsure (1)..(514): unsure at all n locations
  Clone ID: PAT_MRT3847_48565C.1
gactacgtgatctatggctagcaatgtgccagagtcctgtcacttgtcgggttttttgcggggtgcaggaatgtgggatatcagtggagtgatcaagaagaaaaaaggaaggttgtaaggcaggtgggcgcctccgcggtcagtccgattgctagtgtggtggggttaccgggccacaagcacggtgcgctaaccattacggcgcgctttggtgcgttcgcttaaataacgacccggtgctactaggttaagcaggcccctacgcaaaagcaatcggacatctagttcaacgcaaggggccccgtgtaagcctcttaacctgaaatttccggggtgggtggcttagagaaatatctcaaacgctaacatgcgctaggcgatggggaatgtatttgttaagcatacgccaacgattctgcataagggtaagcaaaaacagcaacaggagcggagggtgacgcgaaggcaactgcggcnacgcaacacgccactacagccgggtagaagtaaaagc

SEQ ID NO: 85883 - DNA, 2491 bp, Glycine max
  Clone ID: PAT_MRT3847_48566C.1
ccggaaatttcccgggttcgacccacgccgtccgggagagagaaaaagacgcaaaacaaaacaaaaaaggaaaacccttgcttgcattgcattgcactgcagcacctcctccctaccaaccccctcttgccttgtctccgacccgccctgactcgttgagctcgccggaaactttggccaaaagggtctccgaattcgcccatggcccttgatttccgaccttagagacccttcaagttttcgcctttttcttattcgcttttcccctttttttgggtcctcaatttctgaaacctgcaactgagaaaaagattgctctgataactcgtgcctcgacgaagacccgggtcgatatactgtgacagcaatagtagtccaatgtaaagccaatccgcttgttgtttctcgaagccaacacaagaaaaataaagaaaccctcactttactttacttccattgcattcacattcacattcttcagctcgccggtgacaccttcatcgttttccgccatgtcctcctattccgaacaaccttagattgccgtcaatctctctcacctttttcccttctttcaacagaaaaagagagagagtgtgtgtgtgattttttttttttttgaaaaaaacgatacggatgtacgtggtgcctccaccccagcgttcggatccgggttcgggatccggtgatttgcgggtctaccaagcttggaaggggagcaataaattttttcttcaggggaggttcatatttggacctgcgatcattggccctgacaatttttcttattgctgctcccgttgcagttttctgtgtctatgttgccagaaaactaatagatgatttttctgatcacttggggataaccataatggccattgctgttatattcacaatttatgtgttagttcttctcttgttaacatctggccgagaccctggcataattccacgcaatgcacatcctccagaaccagaaggctttgaaggtagtctagatgttggggctggtcaaactcctcaattgcggttgcctcgaattaaggaagttgaggtcaatggaattactgttaaggtcaagtattgtgatacttgcatgctctacaggcctcctcgatgttctcactgctcaatttgtaataactgtgtggaacggtttgatcaccattgtccctgggttgggcagtgcattgggctgcgtaattatcgcttccccacgcgtccggtcttctcaactacgctactatgtatatatgtttttgcattttgctgggtctatattgtaagaattatggcatcagaggagacaacaatttggaaggcaatgataaaaactccagcctccatagtgttgataatttacacctttatatcaatgtggtttgtaggtggcctcactgccttccatttgtatttgataagtaccaatcagactacatatgaaaacttcagataccgatatgatcggcgagccaacccatataatgaaggagtgttgaataatatcaaagagatattctgcatcagcatttccctttcatagaacaattttggggcaatggtgccctgaataccagcattacctactctatggatgttgggacgcatgaaataactggtgaagcaaactgatgtggtcttgctaacttacctttgtcgcttggtttaaacctaggtggtgtgtttgggcgagaaacgtatttagatggacttgccttgacaaaaatctttactcgccataccatcagctgaaattgcgtcatcagtagatgactcggaccgtgctggaatgcatcctaggcgatctagctggggaagaaaaagtgggagctgggaaatgtcccctgaagttctggctttggcggccagggtgggggaaccaaaccgtgtcggtggaggcagcagtagtttgacgcacgagaacagtcatgtgtaagccattatgcttcaagtagtgtgaccaaaggacttgaaatttgatttcacggttataatgaaaaaaatatattacactgttcatgtggtgattctacagcaaaattatgtgcaatatggggttgtaggcatttgcaaggtgtttgcaagtgtttttttaggcattctgcttctaagaagaaattgtttggtgttctgagagtgagctttgctttgctttgcttgatatgttgtattatgcaattaattagcctctgcactagtggaagttgctgcagctttctctgtggctgaatgccagtgacttggagtattgggagtttgtccaggaggaaatcaatggtggatcaagctgaattgttcttgctaacttacctttatgcttgaattaaatgtagttggtgtgttagggtgagaaacttattgagatggatttgccatgacaaaaatctttactctctataccactagtgttatgtgcattctacttttaagtaggaacattgtgtatcatgtataattcccataatcatactgtttgtgttactaaacgaaa

SEQ ID NO: 85884 - DNA, 322 bp, Glycine max
  Clone ID: PAT_MRT3847_48567C.1
attcgtgtttgttatggcaaactgcataataggtagataaatccttctactcatgcataccaagagggattgactttcagcaatacaccccttgatttagatggtcgagggaacccgttcacttaaaccaactccaacatatggcacgtgtacctgtcgatgtgcgcatcatataataacactggaaccttgacacacacagctcatctgaacgcctgtgctgggcacgcgatgcccataaggaacctttttcataccctatggtgcggctttgacacccactgtttatcctaaccaaccttctccaagtatctttagtctg

SEQ ID NO: 85885 - DNA, 182 bp, Glycine max
  Clone ID: PAT_MRT3847_48568C.1
gatcatagcgatccagagagtgggttcaatcagtgatcggggttcacttgctccttcgtaaagtcctcgtcatcagcataatcatcactccttggttggagacgatgctgatgacagacgtcgccatcggaacgcctgaagacgctactcatcccgacacctctgaacgtggggttggctga

SEQ ID NO: 85886 - DNA, 985 bp, Glycine max
  Clone ID: PAT_MRT3847_48569C.1
tccgcccactcgtccgtacacatatgcattctttctctcactccattccatttccgggatttgcatttgcatacatacacttacctctctggtctctagctatagcacaagatatgggtagcagttattttggagaacctaactttggaaatgaaagagcaagttgttcttcttcgtcaagaaaagggaagaagagccacaactcagacaagccaaagcaaccacagagaggtcttggagttgctcaattggagaaaatcagattacatggctatcacccttctctgcacgctccttacccttctaatttttccaacgaagatccaagagtgcaaatagcatattcatcggtgccatcatcttctttttcttactcatcatcatacgcagcttcctatggattccaacccaacatcatgatgggcctatccgaatatcaaaaaacaaacatcagatatggagattctcagccaactaatacagcaagatgggaaactaccagcgtcatcttggagagccagtattctgctccatccaacatagctcgaccctttctaaacctaaatgacacgcatcaagacatagatacaaggaagcataggaacggttctgtgggctcaagcagtcagaactccgaatcaagtgacactcaagaactagatttagagcttagattatctctttgatctgccacttataaatgcagtgatatgttctcatatgattaatattatattgttgcgcttttgtttacaattgagaattgcaaaagcacaaaaaaattgaacaggccaatatatgtgttttttttctaagtttcaattgaaggatatgtccttatcacttgtgtaatagaagatagattgactctttgcatataaatcaatgcaaaatctttatccttttacatgaactctcaaagaaatgagaagttattattacctatcaatttgcagatagtacaactgggattcttttgtcatgg

SEQ ID NO: 85887 - DNA, 1545 bp, Glycine max
  Clone ID: PAT_MRT3847_4856C.1
cacgcgtccggttctgttctggctcttatttttctctgtcttgttaaccatcttgtccaaaccaaactccaaaaatacatttaagtttgaatttcttgacggagaaaccaatgcctactgcaccatatttttattgaatgggaagagaagacaatctccaaacacaacaatttcttttgatactaaaatgattcgtcaatctctttacacccctccttccatcaccttctcaaccccatctccaaaacgtcaccgtttcgctcctcctagttggagaattcgatgcgacgcgtcgtcggtgtcggtggagcagaaggttgttgggccttaccctggtgggctgggcccacacacgggtagagacccaaacgcgaagaagccagagtggctgaggcagaaagctcctcagggcgaaaggttccaagagattaaggaatccttgtcccatttgaagctcaacactgtctgcgaggaggcacagtgccccaacataggagagtgttggaatggaggtggagatggcattgcaactgcgacaatcatgcttcttggggatacttgcacacgtgggtgtaggttttgtgctgtgaagaccagcagaaaccctccacctgctgatcctatggaactggaaaatactgccaaggcaattgcaagttggggcgtggattatattgtcttaacaagtgtggatcgtgatgatctgcctgatggaggaagtggccattttgctcagactgtcaaagctatgaagaatctcaaacccgagatcatggttgagtgtttaacttctgattttcggggtgacctgaaggctgtagaaactctggttcactcaggtttagatgtctttgctcacaacattgagacagtcaaacgcctccaaagaattgttagagatcctagggcggggtatgagcaaagcttgtcagttctaaaacatgcaaaacatagcaaggagggtatgataacaaaaacttctataatgctgggccttggagaatctgatgatgaggtgaaggaagcaatggctgatttaagggccatcgacgttgatattctgacacttggtcaatatttgcagccaactcccttgcacttaactgtcaaagagtatgttactcctgagaagtttgatttctggaaagaatatggggaatctattggttttcgttacgtagctagtggtccactggtgagatcttcgtacagggctggggagctgtttgtcaagacaatggtacgggaaaagaccaagaatgttgctgactcgttgttatgatctttaggttctgcgattatgtatattaggcaacaacaactgacgaggttttggcatgttcattgctgaggagaaaatgtgtgcgggcagaaaattcaatacttttgaagtcaatcagctttacgtattctttgaaccagtaatgtttctcaattttaattctttagtaaaaattgacaatatacgtaagttaaattgtgatagtgaaaaaagagcaaaaatttcaaaagcattataaagcgaaaatgataattggtttactt

SEQ ID NO: 85888 - DNA, 213 bp, Glycine max
  unsure (1)..(213): unsure at all n locations
  Clone ID: PAT_MRT3847_48570C.1
acttatcctctnatgaagatacttnagagtgcgcgtgnaccctcttccccgcgacactcccttaaccctcgctcccaactttttgagtcnccgcttctgtgaaaaggggangggggntgttctcnacaagtgtnaggggacagagcncgtcatttcctgcgtgaaaaacttccagaaaggtgagccttcaaaggtgaaccctaatgcgcactt

SEQ ID NO: 85889 - DNA, 428 bp, Glycine max
  unsure (1)..(428): unsure at all n locations
  Clone ID: PAT_MRT3847_48571C.1
catacaaaattttaaaaacaggaaatggaaaataaaatacaaagtgattttatttcaaattaaatggccccttgaactctctcttttttttttctacttgaagtgtactattgaaaaggtaattgtgataatttttcattagttgacacttgacagaataaaagtttttgtagtgtatgaaaactatntttttttaatattattaaacaaccgactaaaattataagattaagtattaacattctcggaattttaataattaattattcgatactaaagtttaattatgatagttaaaggaatctagttttgttgtttgaggaagataattgagttattattgcaaattttttatattatcctaaattttaatatataaaaaatataatatttgataaattatatttagattcttatattattaactt

SEQ ID NO: 85890 - DNA, 1002 bp, Glycine max
  Clone ID: PAT_MRT3847_48572C.1
catatgcaattactgcaatgttaatattggttggagttacatagtatcactgacaataaatagtactaaataaacacaacaaatgaagaaagaaattgagaaacaaggcacaataaactcagtaataacagctgtagagactagagaaaatcttacaagcctcatttcatatcttcattcattctcctgtcataactatggacaataacatggttcaagcactgttgctgcttccatcagttgatccaggcataagctctctcagcattgccactacctgcaacatgtttgggcttcttgaaggcaagtcatcaacacactgcaaagtaatctctaaatatcttatcatctccttcacttctttggcttctgcttcatcagttccttgagtggccaaaagcaagtcattgtcaattacttccatttgcttcccttcgcggaccttaatcttcgcccaccccaccaagttggtgtcaccaaagtcctccttatcagtcgggcgtttcccgctcagcagttccaacatcacaactccaaatgaatagacatctcccttgacagtgcacctgaaactttggtagtactctggaggaacatatccaggtgttcctgctagcgtgctcacgctaagatgtgtgtcaagggcacttattagtcttgccatgccaaaatctgagaccctggactccatttcatggtcaagtagcacgttgcttgatttcatgtctctgtgtatgatgtgagggatgcaattgtggtgcaggaaacaaagtcctttagcagcacctcttgcaatcttcttcctttcttcccatgtcaaaatgcgtcgatcacgtgtcttgatcctcccatgaagcatctcttctaggcttccatactccatgtactcataaacaaggagcctctcctcccctactttgcagtaccccaacaaagggacaagatttctgtgcttgatcttccctaaggtttccatctctgccatgaattctcgctcgagcc

SEQ ID NO: 85891 - DNA, 477 bp, Glycine max
  Clone ID: PAT_MRT3847_48573C.1
ttgtttttaggattttactatttttcatacttaattttaaaaacaggatttggaaaataaaatacaaagtgattttatttcaaattaaatggccccttgaactctctcttttttttttctacttgaagcgtactattgaaaaggtcaccgggataatttttcattaggggacacttgacaaaaaaaaagtttttggagcggatgaaaactatttttttttaatattattaaacaaccgactaaaattataagattaagtcttaacattctcggaattttaataattaattattgggtactaaaggttaattatgatagttaaaggaatctagtttggttgtttgaggaagataactgagttattattgcaaaccctttatattatcttaaatttttataaataaaaaaattagttctgataaatataattaaggccttaagttataactatcgtagggccacccgagaagagcaccc

SEQ ID NO: 85892 - DNA, 356 bp, Glycine max
  Clone ID: PAT_MRT3847_48574C.1
atcaggcttccaatgcaatatcattgattacactgactgatgcaggctgcagaggcgggttgatggcagaaggattctcactgcctaatgcaacgctcgatgaaggcattcattcaaaagggtcaacctataattgcttattggcaggcatgtgcagatatcacaatgtgagagctgcaaagaagcttctcaatgaaaaggataactatcaatagtatgccgcaggtgttacatactaacatgtcaataggtgcgaggtgcaaagatcgtgaaccgagcttggcataggaattacttggtgaattgctcaactttgatgggctacctcattatgtcacatataatacatcgatgga

SEQ ID NO: 85893 - DNA, 471 bp, Glycine max
  Clone ID: PAT_MRT3847_48575C.1
aaaggagcacggttcactcaatgggggagccgggaaaaagatagtttttttttaccaattacagaagagactggatgcaaaacaaaacaaatcaaacccaaaacccaaaggttttcaggggggggctctttttttcttcctatcctttggggcgggattagacaggcaaggggggggcgaattaatggcactgcccacactggtctaagtattttcaccctggtaaaacatggtggctagcccctttcttgtatggtcttttaacacgaaaaaaggtggccaagttaacatctaaacatcttttacggggggacgctcagcattgggggcacgggaaatggggccctttttacacttttttgagcaagggctgcaaagaacaccaggcctacatgggagcggtacaacgtttatctctccctcgaaacaaactttggataacactttctcatttggaaggctttcataccc

SEQ ID NO: 85894 - DNA, 208 bp, Glycine max
  unsure (1)..(208): unsure at all n locations
  Clone ID: PAT_MRT3847_48576C.1
aggtnaanaanantttctttgtgttgtttttttttttttgtttgttttttggggtcaaaaaacagctgttggctaatacattgcccgggttgtctttggcttattttttcttttcctttttttggggccaaagctttccttgaatattggcaattccacccaagaaaagtttgggaaatcaacttttttttcttgcaattttgcttgg

SEQ ID NO: 85895 - DNA, 564 bp, Glycine max
  Clone ID: PAT_MRT3847_48577C.1
aaaaaaaaaagggggtttttataaaagggcccaagcccctttaaaattttgggaaaaaaaaaaccctttaacattttcggcttaggccccaaaagggcggccccccacccaggggcccagccccggcttttcccatcattccccccttggcccgggcgatttcaaaggggggggggaaaaaaaaacccccccccaagggggcccaggggaaacaggggggggcccccccgccttttgggcccccccaagggcttgggggggcggccccccccaattggggggggcccccccgggggggggaacccccccttttcacccaaaacttgggccgggggtaagctttataacaaaaggcttggaagggccccgcgggatcaaaaaaaaaatggggcggggggcaaaggatttcccccccaaaagggcattgccccccccaaaaaagggaacaaaaacatcggggtactttcccaaaaacagcttattttccactattgcccggggcccgggcaccccattaaatggccccaaaaaaacccctttttggagggccaaatcttggggggc

SEQ ID NO: 85896 - DNA, 275 bp, Glycine max
  unsure (1)..(275): unsure at all n locations
  Clone ID: PAT_MRT3847_48578C.1
tatttnctcccancactgagcttaaccgagcttcacaaanatgaatcgggaaaaattnatcgaacatnggccngttcggttacaantngggnaaacggcaccgtcacaanaaacaagaaggctgtncacaagacaacaaccacacatgacaaaangttcanancacctgaagagaatangggtnaatncnatcccggctattgannaggnnaatatntttaaggatnacgtnttatccagtttntaaatccccaaagttcaagcgatcgattgct

SEQ ID NO: 85897 - DNA, 338 bp, Glycine max
  Clone ID: PAT_MRT3847_48579C.1
ctaatcataaggttatgctgggccaaaccacatctacggtggagactgataataggcctagggtggatgctctacttcaaaagcgcagatgagtgcttacaattataccccatatctccacacacactaattctttgcaacttactcgcaataaattcgttgcttggccacttatacaatcactatggtctcaaacaactcgtgcttctcaccggatgcagtttttggtttcttatatgcttgctcaatattattagcaaactgatgacatagtctgatatcactgcatcataaataaattatacataaagctgagcaatcgttgcaaaaatatagat

SEQ ID NO: 85898 - DNA, 283 bp, Glycine max
  Clone ID: PAT_MRT3847_4857C.1
tcaaaagtctcaattttattatcctagctcgattccaacacaagctcaactataagcatgtctacaaaagagaaagacactcaacatatctcgataagctggtgaacaataacctctatcagactaagatccttcaaataccattttcaagccaattccaaagcctatacagttggagagcttgctcataacaaatgacatttgcaactactgcaaccaaattaatggggtgtcagggcagagctttaacaaactctattatacgtaggctttacatgacgat

SEQ ID NO: 85899 - DNA, 243 bp, Glycine max
  Clone ID: PAT_MRT3847_48580C.1
cgggaacatgggtcaacttaattggggtttctaagaagacatgcggaaaacttctccatgatcgccgacaaattaaggggctatttagccccatggattggtgcaaaactcttacgtttcttttaggtacgactcgacatgcatggtatacaaggatgtaaagaatacatggctggggttcattttacatgctaccttcccacattgttttcttcttaagggcctagggagcttgaggaccat

SEQ ID NO: 85900 - DNA, 397 bp, Glycine max
  Clone ID: PAT_MRT3847_48581C.1
gtggaatgaactggagttccaagatacgcgctcatctctgagacgttcagggagacgctgagcgcagggttcattgcgtttataggaataggagaagctgtggattggacattcgctagctgcttcgatcatcaatctgccaagaataccactatacattcttataccttacacgacattctcaccctctccgtggattatccatttagtgttaatgaaatggtggccttgcgtgagttgttcatgaaggtgcgtagttgtatcattgctgatggcctcatccacaaggaagaactcacattggccactgcagaagaccaccaccggggagaatcttttgcttgacagggtcgattgatgtctttgatggaaaaataaacgttgttatagaatttga

SEQ ID NO: 85901 - DNA, 241 bp, Glycine max
  Clone ID: PAT_MRT3847_48582C.1
ttaattcgtacgctgggcaagacagcagagacaaggtgcatgacttgaaaaactatgcggggctgttctctatgcccgatagaaaggcccaagagattaagaccagcccgggaatcatgtggttgatgaatgctaaagcacgcagccccgttccccttaaaattctctcaatagaagatggtactgggtcggaggcatgcagcacaactccctaatcggaataagaaggaagatgctattg

SEQ ID NO: 85902 - DNA, 483 bp, Glycine max
  Clone ID: PAT_MRT3847_48583C.1
atgtcaaatgaagaggtattcctacacgctaggtttgggcgaaccgaaccaagcgggaaatcaagcctactctacgacctctgcaagctaaacgagatccacgtgttgaagatgacgtcgtacgatgagcgcatggagaatcacgagaaccatgtgttgcacgcgacgcaccagatcgccgagtcatggatccatgcgtctcggaaggttctagagaggatcgcaaatgcagtcctctccagaaccttcgagaaggtggcggaggactactacgtcgtggaaatgatctggaagcttcttgcagaggctgaagaatcagctctcgatctgaggcacaaggtcccagagatattggaggtggaggtggatccaaagggagcaccaaggattcaagaggcgataatgaagctctacgtttcaaagagcgcgttcgagaagattcacttgttgcaggcaatgcatcttagaatttcctctctataa

SEQ ID NO: 85903 - DNA, 383 bp, Glycine max
  unsure (1)..(383): unsure at all n locations
  Clone ID: PAT_MRT3847_48584C.1
cggaattcccccgggtcggacccacgccgtnccgtacgggctggcgaaaaagaacaacaagaagggggggttagggtttttttctttagaatttggagtgggagaaagtgccatgcggattaagaaaatttatttcaattaggggtttttggttttacctttcctgggctggtttggagaaacccttaactagnnngtttttagaatgtnntggataattggttttaagaattccggggctttttgttggagggagaaggaaggggaaaaaaagggggaagaatggtaatgaactnnngatgatttaatnnttgtgaaatttgtcaatggtgaagaannatttgtacccgatttgagggctgnngaattgggtttcaagaaag

SEQ ID NO: 85904 - DNA, 569 bp, Glycine max
  Clone ID: PAT_MRT3847_48585C.1
ggctcgagtatttttttaatttttttttttaatctccaagatgcatcttccgagtttggatttatgttttataaatattttatacatatctatatatatagttcatggctttgtgtctttcatgttctaggaatagccatgccgatatatcgaatacatattgaatccaatatgtgtatcttatctgtgcatcatagttgagaatgcttatagaaactgtcttaagtgcatgttcaagattaacattagtgctcatgtttatgatcttaggcatgtgtttatcattttactttaaggaattgtttcatttctgttaatacaacattcctcagtattgtgaaggtgttacagggtgtgtgttctgacttctgacacttgttttgatttaggtttaaacttggtacacctctgtcacaaatgatatgtttcaaacttgatgctttgaccccgtcattagtgaccacattgaggtccaaatgatgcgtgtttcctgactatttctatagtattgtgacttgattcagaatgtggaactttgcatctagtttaattgctggaagtgtgggtct

SEQ ID NO: 85905 - DNA, 325 bp, Glycine max
  Clone ID: PAT_MRT3847_48586C.1
atctaggcctctttgtttggtcaagcaccaaaggcgggggggaaccactatgggcgagaccccccggcctccattcttttgcatagtccgggggccggacgctgcatagctgcagggcataacggcgccctcgcctgacaccattcccggatctagcatcacacgggcgggccgggcctgaattcacaccagactcttctttatttgagctgctcccacgcacgcagaccggaagatctcagttgtcctggactggacaactacgtacagatcttcgtgggaccggggagggagtcgcaatcgatcatttctaggattccttatc

SEQ ID NO: 85906 - DNA, 281 bp, Glycine max
  Clone ID: PAT_MRT3847_48587C.1
ggccctcgaaaatcaataagatgatggctatgcagaacatgcctcgtcctacaggtgctgatgctgctggtcatccactatgtgagctagatctccatcctcgagtcgaagagtgggatagacggaagatgtttgggggaccttggtctgatccagatgttttggattctgcaaatgatgcctaagacttgtgagtttaattcctcttgagtccagctcattggacatttgtgatgtctatgttggagccgtcggcttatggctaatgaagctcatgatgt

SEQ ID NO: 85907 - DNA, 613 bp, Glycine max
  unsure (1)..(613): unsure at all n locations
  Clone ID: PAT_MRT3847_48588C.1
gggggggggggggggcnngngnnngcgcccgaaggacagagacaccagcggtggacgcacagacgggcgaaccctattgagaccaggtttttttttgaaggatgaagtgtggtgaggtagccaggaagagactttttggacttgccctgtggggggggggatttagaaggagcggttgtatggaggagagaacagatgaatacgtgcttgcgcaatgaccacatgaacattagtggcagcatagtgagtgtggtggggcacttcacatgggctatatgagaatggtaatatgggttgcatatggaatcatagaaataaatgggtttttttttttttgggaaagacatttgataaggatgaactataacaacaattcctatttactggttgggcctggntaaatagncaccacacaaattttgggtgcttctttctacgatgggngagttaacccttgggaggggttaccgggtgagacgctaacgggggggtggggtttggggggggttgttattaaaggggggggggggnattgggtccttgtntncgcgatttattggggtgggnggacacgtgaagattgaaaactttattattttttgggggggggtgg

SEQ ID NO: 85908 - DNA, 548 bp, Glycine max
  unsure (1)..(548): unsure at all n locations
  Clone ID: PAT_MRT3847_48589C.1
atttatttttattttatttgtcacttttggaggtaaaaaaggccaacataggactttatcaaattttattttagaccttatttattatgggattgatcctaattttatttataaaattttatcactgaaaaaacccatantcaaacncnncanccccccctaaatctggaagatccgggagggcgggcacaagctctcaaaacctttctcacttctttcctttccacttcccactaaaaacccgcgctgctaattctctcatgtttttactgacaagtggaaaggaaagaactgatactatcatcaacacaagtttgcatataaattttgcttgaatcccggaacgttcggaattattatactttataacaatcacctctccatgtagtggaaaatttttgtgggaattccttaaaaactttacacagcttttgtttaaccaactgggacatacaagttttagaaaaatggccatacccctctggaacactttgaaacatttttttcttaaacatgtttttttctctcggatagggtgggtgcatttt

SEQ ID NO: 85909 - DNA, 180 bp, Glycine max
  Clone ID: PAT_MRT3847_4858C.1
ccacaaacccacatattgatttcactagggtattccgtacacaagccagaaatcacagtcctaaaaggatggcagacggagctatcattaattacaagaactgactttatatggaaaatatttcatctatttcagaagacaggtctgcaaagaaaacctaactaaatatcctgagttgaa

SEQ ID NO: 85910 - DNA, 517 bp, Glycine max
  unsure (1)..(517): unsure at all n locations
  Clone ID: PAT_MRT3847_48590C.1
taatantttatatgtgcgaaatattggtaacaaatctggcttatatggtcacaattgcagtagtaaagaccaaaatctctttccttccccttttcgagacgacaagatggtgaagaagagcaagagtaagaaaactctttttcaaacccttcaccaccgtcgttgtataatattaatgttttttttaatttagaaattatttttttttggcgaaattgttgtgttaaagagagtaagagcaagagggtttcgctgaagaagaagtacaaggtcataaggaaggtgagggagcacaacaggaagaaaacgaaggaagagcaaaagcttcgattgagtggggagaggaaggggaaaaaggatctgggtattcccaacgattaagacttcaaggagcaggaactcaagggtctcgaggcgcgaagggcgaaggcaattgagggtggggaacaaaagaaagggtgaacgcgggggtagggctcggaaaaggaaattgggcttgctagaggatgaaagatac

SEQ ID NO: 85911 - DNA, 1207 bp, Glycine max
  Clone ID: PAT_MRT3847_48591C.1
caaatccatatcaccgaaaaccattttggcttctcaaaaccccactcatcatccatatcacaaaaaactattttggcttctgcctttccttttccagggagctcattgacaatggctgaaacaaagtgggtcatgaaggacaaaagatggtctctccatggaatgacagctctagtcacaggaggcacccgaggcatagggcatgccattgttgaagagttagctgagtttggagcaactgttcatatatgtgcacgtaatcaagatgatattgataaatgtttagaagagtggaaaaacaagggacttaatgtgactggttcagtatgtgatttactatgttctgaccaacgtaaaagattaatggaaattgttggctccatctttcatggaaagctcaatattctagtgaacaatgctgctacaaatataacaaagaagataacagattacacagcagaggatatatcagccataatgggcaccaattttgagtccgtttaccatttgtgtcaagttgcacacccacttctaaaagattctgggaatgggagcatagtatttatttcttccgtagcaggtttaaaagctcttcctgtgttctctgtttatgcagcctctaaaggagccatgaatcaattcaccaaaaacttggcattggaatgggcaaaggataatattcgtgcaaatgctgttgcccctggacctgttaagactaaacttttggagtgtatcgtgaattcttcggaagggaatgagtctataaatggaatagtgtctcaaacatttgttggtcgcatgggagaaactaaagagatatcagcattagttgcttttctttgccttccggctgcatcatacatcactggacaggttatatgtgtagatgggggtttcacaacttagattgttgttaatgattttgttgctgaattaaatcttgtgtttcgtgttcctccaaacgactcatgcttatgtcgttggttaggtttatctcctgttcttaaacataaccatgtgttcttgtttagtttcgtgtgtctttctctcagaattcaacaaggcagaacaattgttaattgcctgctccccatgactccatgttatcttatttgttctttagatgaaacataacttcaattcctcgtacaatttttagtaaacatttgttgtcaacattctatcaaagaagtggaaaaaaaaaaaa

SEQ ID NO: 85912 - DNA, 328 bp, Glycine max
  Clone ID: PAT_MRT3847_48592C.1
ttctcggctgcgagaagactacagaaggggacggtgtgtcggcggcggtcagtggtgtgtttgcgaaagcgtaagagtaagaatggagggcggagagcaaggatcgtagatgatggtatactatactgtctaccagtgacatatcaagccgtgttacatactaattgatcacctacttgccctcacacactctttcccacctgcttctaaccggcctactgtttcaccactctttctgcctaacactttctctcaaccatgcacgctttgacaacagactcggctgttgtaccgatacaagcctccaatgtttatctactaacgagtc

SEQ ID NO: 85913 - DNA, 2071 bp, Glycine max
  Clone ID: PAT_MRT3847_48593C.1
aaaaaccaaacctcaaataaacctctttagtacttttctctccaccctcccataattctaaaccccaaaaaaacctcttttggccataggctagccctcactatggcaccaccatttcccttcctaatgacccttctacttgctccctttctattctcctccattgcttcctcttactcattcaaagatatccaatcatggtgcaaccaaaccccttaccctcagccatgtgagtactacttgaccaaccatgccttcaacaaacccatcaaaagcaaatccgatttcctcaaagtttcccttcagctagccctagagagagcacaaaggagtgaacttaacacccatgccctaggcccaaagtgccgcaatgtccatgaaaaagctgcatgggcagattgccttcaactctacgagtacaccatccaaagactaaacaaaaccattaaccctaacaccaagtgcaacgaaaccgacacacaaacatggctcagcacagccctcacaaacctagaaacatgcaaaaacggattctatgaacttggtgtcccagactatgtcctacccttgatgtccaataatgtcacaaagttactaagcaacaccctttccctcaataagggtccttaccaatacaaaccaccaagttacaaagaagggtttccaacatgggtgaagccaggtgatagaaagttgttgcaatcttcttcagtagcttctaatgctaatgtggtggttgcaaaagatggttctggaaagtacacaacggtgaaagctgctgttgatgctgctccaaagagtagtagtggaaggtatgtgatatatgtgaagagtggggtgtacaatgaacaagttgaggtaaaaggaaataatataatgctggttggagatggtattggaaagactataatcacaggtagcaaaagtgttggaggaggcacaacaaccttccgttctgccactgttggtaagcaaattaatatatgatcatattttttttcctctaagaggatttgcttactcaacaaatagcattatacactaaagaaggatagcagcatatcgtgcaccaagtccaccataggcacctccaaccaaaccataaccaacatgtggtggatagcttggaagcaatcctggtcctggcttctgtgtgtttgatcctccagacttttgatcagcctgtggctttgccagagagcattgtaaaagttgaccttctaattcatatctttcagtgtttttcagtgctttcatagcatttgacctctctgcaaaatgtacaaagccaattctgttcttttcctgtccagactttgctggtggaagaaccacctttgtgatcttcccatgacgttcaaaaagcttcttcaactgctcttgagttacattctttggaaggttcttcacatatactgccttcacctgagatgcagcagaggactcagcatttttaggatcagcccagctcactgttggagcattctcacctagcttaaatgttgggctcatcatcttttgccttgaatactcagcacatgcatggttataatagtcaataaaagcaaagccccggttattgttggtgttcttcatatccttgactagttccacaccagtaactccaggtccaatctcagttacaatcttcttcagatcttcaacaccccagcttctaggaacattgccaataaaaagacggtgcttggcttgagattttgaacatttaatttttttacccatgaattcggtattatttagctcctcaatggctttagaagccaattccacacttctaaaggtcacaaaaccaaagcccttgttctcggaagaatcctttcccttcattattcgaacctctgcaacttccccaatacgctcacataaagatttcaaatcctcatctgaggcatgaggaatgccaccaatgtatacttcagacccatgaggaggaattgaaaggagttcagcatgttttttcttctcatcctcatcttccacctttgtttcatcactgctatgattttgcatcgcatcctcttcttccacttcttcaacctcttcttcctcc

SEQ ID NO: 85914 - DNA, 1608 bp, Glycine max
  Clone ID: PAT_MRT3847_48594C.1
ggaatatcggcagtgatgatgttgaaacaacactctattccattggctcacgattgaaagctttctcagattggctactcaaatacatggtgtcaggtaacctggatacaatatttccagctgctacacgtgaatatggaccaatggtggagggtttgtggaaggataagtgaaattatttggccatgcatcacatcaataaacaatagattttcatcaaagtctaatttatctctcacatgcaggctgttgaaatttccaagactgactatgagccatctgatacggacatcttgtacgctgagggtatatcgttatccaacagcctcacttcaatggaattttgttttcccaagtcaaacagtgaggattctttgtttcctgagtatcaacatgaatcttctctcagataccaactgatcagagtacatcctaaaagccttggagaaaactgcaagtggttggagatgtttgaagagaccgatgttgtaatgttctcagttgccttatctgactatgatgagtacactacagacagtaaaggagtttctaccaacaaaatgttggtagctaagaatctctttgaaaacataatttctcatcgaagcttccataacaaaaaatttctcctagtattgactaaatttgatctgcttgaggagaagattgaacacattcctctagcacaatgtgaatggtttagcgacttccaaccatttatcagtcccaatcagaagaaaggctgtagcaatggcaataataactcttcattagcacaatgtgcttttcaatacattgctgtcaagtttaagagattgttcctttccatcactggccgaattctctttgtttcactggttaatggattggaacctgatactattgatgaagctctcagatatggaagggaggttatggagtgggaaaaatgggatccctctattgtaactgatccaaagtccgagaatacttcaacaagcattgatgagcaaagttacttatgttaatttgtatggtttaattacttatttgatttttatagttacaaactttttcttttagtctttatacttaaaaacatcctttattagtctctatacatacaatgtttgatatcttttagttctcatgaactaaaaggaattaaaaatgatatatgtaggggtcactgtacttaaaaacatctttaatccctacatatatcatttttaagtatagtaactaaaaggaagagtatttgtaactatagttaccaagtgattaattaaactcatctgtatagagaaacttaattctgtaaaggggcttaaaagagttcatgattttccatacagggatgaaaaagtgataattaaggtgagggattcataaaattttgaatatagattcattaggctggaccccaatatttaattttgatcttgttcacaatgggtcttagtcttgcgaaattgtctatgtacagatatacttgtacaccacgaaacataaaggggaagaacagagaaaagggttggccattttgtcatcttgaatatgaaattgaagattaatttgtcctctacttttgttccgagaagaaaataatgttcacttgtttgccaaaaa

SEQ ID NO: 85915 - DNA, 286 bp, Glycine max
  Clone ID: PAT_MRT3847_48595C.1
ccagtttctaaatcccaaagttcaagcatccattgctgctaatacttgggttgtcagtggttccccgcaaacaaagaagccgcaggatatcctccctagcattatccaccacttaggaccagataactcggaaaacctgaacaacctaccccagcccttcccgaagcacgctcccgaaggggcccttgatccaaccacccctcaacaggacaatcatgactccctcccacaaatcgtccccacccagcaccctcacacaccacgtgaggaccccaacgctcccccc

SEQ ID NO: 85916 - DNA, 245 bp, Glycine max
  Clone ID: PAT_MRT3847_48596C.1
atcacaataaaaagctattacttataaccaccagaatctaaataattggatacaagcccaacttttttcaacctttccaaacttttgagctctcacaaaagcctccaagaatgggccgtttatcttgccccccaagcccgattttgttgccccccgatgatcttgagaaggccatgcccccctgcgggtgtggatcacagggttttaaaacccattcttgagcatcatccacatacttgttttga

SEQ ID NO: 85917 - DNA, 272 bp, Glycine max
  Clone ID: PAT_MRT3847_48597C.1
cttttccataactttttaaaaatatatatatctaaatgaatgcaatgtgcataaatattttttaaacataacagtgaactattgcaccttttgctaatgcctctatttacttgctttggcataaagaatgagccaatgaacctctgtgtcctgtggaaaaatgtataaatgttatctgatattgctcttagatgtaatgctaattaatgttaaatcacaaataaacagtattttaaatatacaaagaaataaaaaaataaaaaaaagggggg

SEQ ID NO: 85918 - DNA, 343 bp, Glycine max
  Clone ID: PAT_MRT3847_48598C.1
ctcaagccggtttttagttattttctacactatattttaaggacaattatacatagacggtagggggtttattactactaaccaaactcaattgttgtttaaaattgtcatcctatattgacatttttaatcatccccatattatgatttattgaattcttattattaaaaccccttttatcccaaatagaatcctaactttgtttttcaaatgtttctttcttagaatcatcttacttctgatttgcttgaaaattttattcttaataacctaaattcctctatttgcactccagaatgaataaattatttcatttcaatatctaaatttcatgattattat

SEQ ID NO: 85919 - DNA, 358 bp, Glycine max
  unsure (1)..(358): unsure at all n locations
  Clone ID: PAT_MRT3847_48599C.1
gggtcttgctgttcttacagttcctttcaccatggaatttccaaaagcaatattctattactgagttacatcaaatttattttcacttatatataaacttatacttaaaattcctaatataaaaaaaactttaaatattcctgaaatacctattacaccacccaccaccaccattactcctcaatctcccttttctatatttccagctctaaaacaagctacatcatcaacaacaaataaacaaagctcaattccagaataagcttcagaacattcaaataaaaaaatatcttcttcttctattattagtcgaaaacttagaagtttagagaaacgantgaaagaaaaaaagaagaac

SEQ ID NO: 85920 - DNA, 388 bp, Glycine max
  Clone ID: PAT_MRT3847_4859C.1
ggcttcaactcgcatcctcaaggagctcaaggacttgcataaagacccaccaactatttgcagcgctggtccagtagctgaggacttgttccatcggcaagcatcaataatgggtcctgctgatagcacttatgcgggacgtgtattcctaggcactattcacttctctccggaatatccgtacaagcctcctaaggttcgctatacgactaatgtgtttcacccgaacatcaatagcaatggtagcgcttgtcttgatatcctgatggagcattgtagccctgcactcaccatctctgaggtactgcttgctatctgctcattgctgactgagccatatcctgttgatccacttgtatccgaaatcactcacatgtacataactgac

SEQ ID NO: 85921 - DNA, 365 bp, Glycine max
  Clone ID: PAT_MRT3847_485C.1
ggaaacaaaaaaaaacctttagggctttttattaattttggaatcatcaaaattttaaataatctttttttttaaggccccccttttgcccccaaagataaaaaaagacccgggggggaattacatgatttttaatccccccgtttgaccctatggggggggggaaaaaaaaaaaaattattggccctctcaaaaaaaacattacaaggggggcgacgagcccctttgggatctgaagttctaaactaatagttcagcttcagcatcatttggccagcagcggctcctttaaagagagatctgcaaaaaaaaagatgtaagtcaaggggggaggagagctaacatctgcgttttgatttttccca

SEQ ID NO: 85922 - DNA, 297 bp, Glycine max
  Clone ID: PAT_MRT3847_48600C.1
tccagccgttcgtaacactccgaaggggagacagaagggggccaccacaaacttcctagtaactctttttgtccaatccacagagtgagactcatccagcgaacaacgataacgggtcgtctgggcttacttaaaaaatatcagcggccatgggacgaaaccttcggcactatgtaagcctgattggatcaacaaccgtgcgagggtcgcctggacagagaacccacaactttctatgcgtcggcgacaactaagaggaatgcgacgacaaggctagggacatgttgactcggagct

SEQ ID NO: 85923 - DNA, 622 bp, Glycine max
  Clone ID: PAT_MRT3847_48601C.1
gagaaagagacaagaatgacattagaaaaactcgggatacaaaatgaaccaatggatttgctgttctgtctacttgccaaaatagtgttgggttcttatcaactgttgaagaaaattgggttacagaccaacctttttgtaactatataactacctactacgatggatgtatcatccaaatttccagtgccaatctttgcatgaaaaaatggttatcctacacataaacctacaaaagactcttaacatctttccgctatgaaaatttagccattagctacttgcacatcttcatcttcagaatctgacgacatagatgtgctcgaactatcagatgaaacatcagctaacacattgtcttgtagaaaaggcaagtaacgtgcgtttgtaactgaaggaactttagatacttttggatctcctacttcctttgaaattgtaaacttatgcccaagtgtcttcgtatcaattttggcaccaacagaattgattcctttcttatcatctgcaaaggttgactgaagtacagttgttttcttttttgaacgaatgtcataagaactactgtgagtgccaccaaaagtccgcacaacttgggaaacgactgcattttgtttctttg

SEQ ID NO: 85924 - DNA, 490 bp, Glycine max
  Clone ID: PAT_MRT3847_48602C.1
ccaatatgctaccccgggggggggaatcacacatttttccgttggtggggcccctttttattttagaaaaaaaagggaggaaaaagtaccaacaaggcgaacatttggcgaactatcaaataaaaaaaaccaaccccggcttttaaaatcagggctcccaaccccggccgggaaaaaaaccccgggccccccctgggggaaaaaaagaacccccccccccttaaaaaaaaaaaaaacccccccctcctcaacccgggaaaacttacccccggaaaacaggggggggccccccccccggaccaaagggttcctttaaaaaattaatggcccccggccccaaaaaaaaggaagggcgcgggcccaaaactccaacaaaagccttaggccccctgggggttccgggaccccccccccccaaacaaatgcgggcccggatcccccccggccccccccaaaattcccagccccggaccaacccaaaaagggcccc

SEQ ID NO: 85925 - DNA, 268 bp, Glycine max
  Clone ID: PAT_MRT3847_48603C.1
gtggagtgcaggtgtgatcatatacattctcttatgcggaacacctccattttggggtgaatcggagcaagagatatttgaagaagttttgcatggtgatcttgatttctcttcagatccttggcttaatatctctgaaagtgctaaagacttggttaggaaaatgcttgttagagatcctagaaaacggatgacagcacatgaagttcttcgtcacccttggattcaggttgatggagttgctccagacaagcctcttgattctgca

SEQ ID NO: 85926 - DNA, 157 bp, Glycine max
  Clone ID: PAT_MRT3847_48604C.1
cccgaaataaaaggcgaactattttattgtataattagttgtatggatagtttgacatttatttacccaattttttgattggccagttttttaagtccaaaagcttttttagaccctaccaatcttaaacccattttgatttgtaacccaacccccc

SEQ ID NO: 85927 - DNA, 791 bp, Glycine max
  unsure (1)..(791): unsure at all n locations
  Clone ID: PAT_MRT3847_48605C.1
tatcagtgtcattgcattccaatttcttctcctcactaaaacaggttgaaaagaggttaaaattagaccaaactttacaaccagcaatagaatctcagatacatgaaagcattttgggttctcccatcttccttcaatctagttgtagccagaattgtccctcacaagatagcagtgaacctcctcaagcattcctctcagtttcctaagaatttccaacaatccatcaagacccttctcatttttaaacagatcatgtcactccagccaatgaagctgaagataatgatgatgacattgaacagttaatgcagctcttgggattataagaggtacaagaaccaagggatgatggtgattcatgccactgtgaagatgggttttatgtaaaaattgttggtttgtaagggccaaagtgtaggaaggaggtgctgaggttagatgggtggatcaaccactttatgaatggtggtggggaggagaagcaagaacccttgagattggcacacctgcttttagggaaagctgcttttaattctgatggtgcttttggagaattggacttcccttcaggcattcaagaatttcttcatactgatcctccctgtaattaaggcaaccccccactttcttattattactcttttagctttgttgttttattttattacattcttctttctanatgttatatccaaatgcaactatatagaaactttagagcctttatgacttatagaaaagttgngagattctttcaaannnnnnnnnnnnnnnnnnnnnnnnnngaa

SEQ ID NO: 85928 - DNA, 259 bp, Glycine max
  Clone ID: PAT_MRT3847_48606C.1
aaaatacggttctggctccaaaacaccacctcacggttccggtcccaacagaccacagtaagggttccacctctaaataatcacagtccggtcgttttaaaacaggaaatttagtttgtcatttctacatgatcgatctcgcaattaagattgacaaactcccctctacatgatccaaccaaagctgcccctctatatgatcttctctcacttccatcattcttgcctactttttactatacatagtctcccctcaact

SEQ ID NO: 85929 - DNA, 359 bp, Glycine max
  Clone ID: PAT_MRT3847_48607C.1
atcgcattgaatccattttcgtcaaacataacataacatgtctaatcatcatcattcctccaatcccttcgcatcatgctcatgcactcactccgattccgattccgactcagtgagttgcttcgtcaccgatctcttcgaaactcgcctatgctcctgcgacgacgacactgacataaaccccttttccgacgtcgtttgcgacctccaccgtacggagcatgtgttagggttagggtttggcgttgaaattgatccccatagccaaacgaatggggataatcatcatcgtgatcgggttttcgatgctgatagagttttcaatttcacggtgggggatggttcgagcggggttaggg

SEQ ID NO: 85930 - DNA, 476 bp, Glycine max
  Clone ID: PAT_MRT3847_48608C.1
acacaacaaaatacatttggcacgcgaatagtccccacaggatcgcaaaattacaccttatccactatgcaaaaagcgcccttcacagggagactaacacaataatacgtgcttcatgaaggaccttcctcaaaggtgactagatggccactatgtaaaccatcctttcttttcaccctcaactgccaaaacagcactcccacccctgtttcctctatactaccaccacatgtggtggcaccccgcacttcagataagacctggcacccttataagcacactatgtgagcctcacatactaggcctactaaccctgcaccgtacgctgccccataacaattttggcattgcggaggcgagacactctctcatctgtttactctgcgcaaaagaacccgccttctccgatcctggcatccattggggctggcatagaagcgtgtttgccgacacaactggcagcactaacaggatag

SEQ ID NO: 85931 - DNA, 195 bp, Glycine max
  Clone ID: PAT_MRT3847_48609C.1
tgatactgttgctcagagtgacgtggactaggcactgaggttaatgcatatgtcaaaattctctggggattctgaagatcggcgaaaatcttttcttgattccatatctggtatctattccatactgctggatttatctgctagaggtatcctattggactttatctatacccaatctcttatccttgatattct

SEQ ID NO: 85932 - DNA, 313 bp, Glycine max
  unsure (1)..(313): unsure at all n locations
  Clone ID: PAT_MRT3847_4860C.1
gctctgtgngaaggcttcagtactaagancnagncctgcacatatgatnagangcgagctatanaagccagcccntgncgacttgcnttgnttagccctgtcatctntcntggcntggtgctatnacttcngtcctatcnngnntccttaggctannaattgncagcctgtgccaatgcnaggacnaaccttagcagccaganagggagttggataggctttgnatactgcatttaggnctggtgcagtgatgggtttccnncntggnggaaatggtcttntggngnnctacattnaccatcaatctcttcag

SEQ ID NO: 85933 - DNA, 436 bp, Glycine max
  Clone ID: PAT_MRT3847_48610C.1
ggctcgaggtcttaggtcctagattaaattttattaattagtgacattaaaatactgttgtgataatcagaattcatctggcgaactattttgatatggttttaaaagtgaatttaacgacaaatattggtatatcttttaggaaaaaaagtgtccatttattctttctgtttactttgatagtctcattttgttatttatttaaggctatttatatttttatatgaatgcgataaggacagctttcacgtttatgtcagttcattgaaaaaagggtccacatttaagttaaactttgaaggtttcgctttatggcaaaaacaaatacgcgcatttaagaaaataaacaaaaaataaaaagtttgttggttaacaaaatgtacagttcgtagaccgggaagtaaaataaaaaccggttcctggttgctgacagaaa

SEQ ID NO: 85934 - DNA, 143 bp, Glycine max
  Clone ID: PAT_MRT3847_48611C.1
gagagaagcattggttgttattaatggctgagggtaaggaagagagtaaatctagcgaggagagcgttaagctggtcgtaagtcaagcgccgaagcgcatgtcggcagacgaaacgcttgcaatgttcaaagagctcgctttg

SEQ ID NO: 85935 - DNA, 372 bp, Glycine max
  Clone ID: PAT_MRT3847_48612C.1
cacaaaaatacgaacaccctaatgtgctagctcacgccgcacccatcaacaggacgctcttggtactgacagccccactaatcggctgccagctgctacttcttattaacagaactcgcactttatcattttctgattaaacctcctcgacgtttatataccacgcctcttacgtcagccgccgatccctataggcccgttctcctccgaacgcattctcacaatgtgcatggtctcctcctcgaactgccccgcgatgctacagtcttcttacgccgtgctctgactcacgcggagctgctagccgctgtccactacccttacactgcggttgctctggttgcgactcgggacgcgcctgctcgagtctcg

SEQ ID NO: 85936 - DNA, 289 bp, Glycine max
  Clone ID: PAT_MRT3847_48613C.1
aaagaacttgctgaggaggtttggagactccaggcagctctttttttggcattttcttaacgatctcaggaggataaccactaaatgtattatagccaggtgctccctcatggtatagtcgtgcatgttcttaccgagatcgttaagaaaatgccaaaaaaagaacttgctgaggaggttcggagactccaggcagctattggtgaacaaacagaaattacaaaattcagccaacaggagtatgaaagacttcaaaatgagaaagtgtgatgcaaaattggtttgaggg

SEQ ID NO: 85937 - DNA, 270 bp, Glycine max
  Clone ID: PAT_MRT3847_48614C.1
tacggctgcgagaagacgacaaaagggctagccactatcatagggatttgcacaaagaatagcaaactctaactcaaggttccacgagtatggaggactactacaagaagatggaaatagcctgattagagtcaatgttgaagaagatcgtgagacaactatggtcagattcattggaggtgtaaagaaggagataacttatgtggtagaattgcaacattatgtggagatggaggacttgttgcacaaatctattcaagtggggaggta

SEQ ID NO: 85938 - DNA, 158 bp, Glycine max
  Clone ID: PAT_MRT3847_48615C.1
tcttagcgaaagaaatgtccttggtttcaaacgtgttctgttgttgaacttctaatgccgcgtctcaagccatgggaattggaaggagaagcgattgtggattgaccataatgtcttcctctaggccgcataagaaagccactgcgcatcacattaat

SEQ ID NO: 85939 - DNA, 381 bp, Glycine max
  Clone ID: PAT_MRT3847_48616C.1
attgtcactatttcgattgggggtacataggaattagtgaaacaatccttgacaataaacttatgaggcagtaccaacacagctctgatgtatgaacgggattttgtgctgtgtgcgggcaaccataatatgagggggcatctgaaagcacagggctcccaccagcggtttgtaaagaagatggacacacaaagctttactcagagaaacacaaaaaggtaccttgggtccacgtagctctcaacattccagggaaaagaaccaaaagacatagtctctaaaacaggcttctttaaaccaccaaagctatttaggatgtatctcatcgctagagactgccccctaagggggtacaaccattgcaggttcttacaaacaagg

SEQ ID NO: 85940 - DNA, 607 bp, Glycine max
  unsure (1)..(607): unsure at all n locations
  Clone ID: PAT_MRT3847_48617C.1
cgcgacgaccctcggaattcggctcgagcacaggccaagcataaacaagttggaatctctcagatgagttgctttataacctcatactcatagcttctgcagtgagttatggcagaaaacaaagacgaaatctattctgaatgttcaccaggctcaaactctccaatgggtagcaagtgcagatacttgtttcatagattatgcggttgtgacacttcatggaacaaaaacagctccccaaagagtcgaagaattttccacagagatgtggaaaaagaagaattccagtatgctagtagtcactgtctctcatcctactacagtgtctttgtggttcgactagcaatcatggtgatgctagccatcttgatagggttgctcactatactgacatggcatttcaccaagatttatacagcaaaatcacttcgcagcttggcatatggtttgcgttatgaacttctgcaacgccccgttttgaggatgtggaatantttaaactctacttctgaaatcactacagctcaggtcaaactgtctcagtatgtgatcagacgtcacagcaaccctgcgactcagcagagcagntgagctgtatgaagcgatg

SEQ ID NO: 85941 - DNA, 1072 bp, Glycine max
  Clone ID: PAT_MRT3847_48618C.1
acggctggagggcacctgcacagaagaagaagaagaagaagaagaagaagaagaacgatagtaatggaaatcaagcccggtttgtcagcactcgttaccggtggtgcctctggaatcggcaaaggtcttgcactagctcttgcagagaagggtgtatttatcacgatcgtggatttctctgaagaaaagggaagacaagctgcaatcctcgtcgagaaaattaactccaattttcattctaagttaggatttccgtctgccatatttgtgaaatgtgatgtgagtaatgcaagggatctagctgctgcatttgaaaagcattttttgacatatggaggactagacatttgtattaacagtgcggggattagtagttctgtaccattccgtgatgatcaaacggatggcacccgaacatggagatacacttttaatgagattttcactgctgatgttgattcaagggatctacgctgctgcatttgaagagcattttttgacatatggaggactagacatttgtattaacagtgcggggattagtagttctgtaccattccgtgatgatcaaacggatggcacccgaacatggagatacactgttaatgtgaatttcactgctgttattgattccactcgccttgcgattaaaatcatggaagcttccaaaaggcctggtgtgattatcaacttgggttctgcttctggtctttatccaatggtggctgacccaatttacagtggctctaaaggtggtgttgttatgttttctagatcacttcgtctatacaaacgtcaaggaattcgagtcaatgtgctttgccctgagtttgttgaaactgagatgggaaataagattgatcccaagatcatcaatttgagtgggggctttgtacctatggaaatggtggtgaaaggtgcttttgagctcattatggatgaaagtaaagctggtcattgtctgtggattacaaatcgtcagggcatggagtactggccctctccatctgaagaagcaaagtacttgatacgttcctctcgtttcaggagaagatccgatttcaaagctcca

SEQ ID NO: 85942 - DNA, 255 bp, Glycine max
  Clone ID: PAT_MRT3847_48619C.1
aaaaaatactgattcagattcacgaaatatattaaaattttccttaccttttaacaactcctattgcaaaagaatgatctatagaaagttatttgtctagataaatcacgaatcactttcttgaacgctactatgtgaacaacttacatgtctttattcataggagaaattaccgttgctggggtcgttgagcgtaatggccccccactgcaaaaaacctaacctaatggaccactgtgaacattatatcaggtt

SEQ ID NO: 85943 - DNA, 374 bp, Glycine max
  Clone ID: PAT_MRT3847_4861C.1
cactcccaattcctacttccccaggggtggtttaaccctggaactggtgtgcgaatcccttgctttcaaaggcaagggcctctgctaggtcacccaaaccggctttgttgtcctctgcgaccgccgcgtcacccgcaaaaagggtaactaactctccttattgcggcggctgcaagacgcaaaacttgtcctacgaggctcagctcagagccaaggaggagcaggttcgcgacctgttgattcacgtaggaagattttctcgcgagcaactccaactgcacggggctatcaagcccattgttccttttgatattcagtttcattacaggaatgagaatggaattctcgttgggcccccgaagatggttgcccaa

SEQ ID NO: 85944 - DNA, 352 bp, Glycine max
  Clone ID: PAT_MRT3847_48620C.1
cttcatcacgcttctgcttctttcatttcgctcttagtttccttttcatactcaccgcctcaccaatacatagttttaacttccttttattgagaaaaagaaaagtctagagtacaattcaatggtatggatgacaccatggagaagagcaccaccatcttagccattgctgcttcccagaggtactccttgaagatctccttcaatttccttttcgggtttatttcaataaattaaggattaatatttgtgtaaaagatgtgtgatttcaattttgaaattgaaagccatagtataggataggattttcattattactggtgtgctattagagtatggtttattttttttt

SEQ ID NO: 85945 - DNA, 1071 bp, Glycine max
  Clone ID: PAT_MRT3847_48621C.1
tacggctgcgagaagacgacagaagggaatccgtagagctacagtgaacacttttggatatattgcaaaggcgcattggaccacaaggtgtggtggggaccctattgaataatctcaaggtgcaggagaggcagaaccgtgtttgcacaaccgtagccattgcaattgttgcagaaacatgttcacccttcacagttttaccagcattgatgaacgagtatcgcgtgccggagcttaatgtgcaaaatggtgtgctcaagtccctctctttcctatttgagtacattggtgaaatgggaaaggattacatctatgctgtgactcctttgcttgaagatgcactcatggacagggatttggttcacaggcagacagctgcttctgctgtgaagcatatggctctgggagtggctggtttaggttgtgaggatgcactggttcatttgctgaaatatgtctggccaaacatttttgaaacttctcctcatgtgattaatgctgtgatggaagcaattgaagggatgagggtagcgttgggagcagctgttgtactgaagtattgtctacaaggactcttccaccctgcacgaaaagttagggaggtatattggaagatctacaactctctctatattggagcccaggatgctcttgtagcatcgtaccctgccttggaggatgagcagaacaatgtttacagcaggccagagttaatgatgttcatctagttggattttgattagttagttcatttctgtctccaatatatttggcagttttcagtacttcctcgcagcaatgtaaagctcagttgtttgaacattattgtgtcttgttacatagataacaggttcctctcttgatgaaatattgtatctcaccagatgatatgcttaaacggttctgtttttgtcagtgtatttttagacatctgcattgccaaaatgctggtgagatggatgagtcagttaagaggttgcagaattaccaagattgataagcatgtcattttagtttagttaatgttatgaatccttctcccattactggtgctgcttaagattgattatt

SEQ ID NO: 85946 - DNA, 3046 bp, Glycine max
  Clone ID: PAT_MRT3847_48622C.1
taaggatttacttcccaggttgactccgattttgaagaataggcacgagaaagtccaggagaattgtattgaccttgttggtaggattgctgaccgtggagctgagtttgtaccagcaagagagtggatgaggatttgttttgagttgcttgagatgctcaaagcacacaagaagggaatccgtagagctacagtgaacacttttggatatattgcaaaagccattggaccacaagatgtcttggcaaccctattgaataatctcaaggtgcaggagaggcagaaccgtgtttgcacaaccgtagccattgcaattgttgcagaaacatgttcacccttcacagttttaccagcattgatgaacgagtatcgcgtgccggagcttaatgtgcaaaatggtgtgctcaagtccctttctttcctatttgagtacattggtgaaatgggaaaggattacatctatgctgtgactcctttgcttgaagatgcactcatggacagggatttggttcacaggcagacagctgcttttgctgtgaagcatatggctctgggagctctcaagtcaagtgtcaatgttaccgggtcaactctccttcaaacaccagcgattaaacttgtctctctttaatctcttaataccaaaacgctaccgttttgctcttttatttctctctctctctatggattgcaagaagcgagttcgggatgactcggacgaatcaattctggaatcgcccgaggcgaaacgactcagggacgatttactcgagttcttcgacgacgccgatgatgcagcttccactcaggaccttgactccgtcatgaagagcttgcaggaggagatttccggcgtgacgtcagattacggcgagtctcaggcgcagatcggatacctcctggaggcctccgacgacgatcttgggcttcctcccgccggaaactcgtcggcgccacaggagaagaacgtggaggccgagttggttcgagtcgcgtctgactcgtccggaatcggcgagttgtgggagtttgaggaccagattccgagatacgactcgttcgatttgggaatggggttctggttatgagtgcgatgctaccgaatacgctgcgtttggtgaacttttcgatcattctgatgtgtattatgactcgggacgggaatagatgtgtaatgaaaactaactggtacatatgctgaaatatgtctagacaaacatttttggaacttctcctcatgtgattaatgcagtgatggaagcaattgaagggatgagggtagcgttgggagccgctgttgttcttaattattgtctacaaggactgttccaccctgcacgaaaagttagggaggtatattggaagatctacaactctctctatattggagcccaggatgctcttgtagcagcataccctgccttggaggatgagcatagcaatgtttacagtaggccagagttaatgatgttcatctagtgtggattttgattacttagtttatttctatctccagtgtatttggcagtattctgtacttcctcgcatcaatgtaaagctcagttgttggaacattatttcgtgtcttgttacatagataacaggttcctctcttgatgacatttgtttgatttgtatctcaccagatgatatgcttatagtagctaaccgttgaaggttgtgtgattgctgttgagatggaagcaattgaagggatgagggtagcgataggagcagctgatgtactgaaccaccgtgtcaactctcgttcaatcaccagcgattaagcgtgtctctcctaataccaaaacgctaccgttttgctcttttatttctctatggattgcaagaagcgagttcgggatgactcggacgagtcagttctggaatcgcccgaggcgaagcgactcagggacgatttactcgagttcttcgacgacgccgacgacgcaccttcctctcaggaccttgactccgtcatgaagagcctgcaggaggagatttccggcgtggcctcagattccggcgagtctcaggcgcagatcgggtaccttctggaggcctccgacgacgagctaggtcttccacccgccggaaactcgtcggcgccggaggagaagaacgtggagaccgagttggtccgagtcgcgtctgactcgtccggaatcggcgagttgtgggagtttgaggaacagattccgagatacgactcgtttgatttgggaatgggatttggctatgagtgtgatacgaccgaatacgctgcgtttggtggacttttcgatcattcggatttgtattatgactcgtggcggcacgagaccttgccaacacaatagaagatttaatgaaaacaaaaggaaaaaaagggttttagagatgtaaatattttcttctctctcagctttttcttttttcttttttgttcccttctcttgatgaagggaattacagaagaaagattataaagcaggacataggataacaagatgcaaaggaaattgcttctttatatatttatattttaatattttatattattaaggggaaaaaaaaaaatagaaacaatttctgctgatggtgcttgaaaaattaatctggacataattttggtaatcctgaaatctatctaacaaccaaggagattgtgtgtgtgtgtgtgtgtgtttttaataaaatatttagttttataaataaaaaataagtactgtattaaaagagtttttgcacttttatttgcttgaatgaggttatgtaagactaaataaatcttccgagtaaatgagtctagctcgtttggtgaaagtttgatgatattttctttgattcttataaattaaaagtaaaatatttttccttgtaagttttgtaacggaattttattgtttgaattggtggtgagtttgaactcaaagaattttcaaacatctgcattgccaaaatgctggtgagatggaacagtcagttcagaggttgcagaattaccaccattgatcagcatgtgatcttagtttacctaatgttatgactgcttctcccattactg

SEQ ID NO: 85947 - DNA, 246 bp, Glycine max
  Clone ID: PAT_MRT3847_48623C.1
ggggccaaccagaaatacatatcacacagagaaagaataaagatttaaaagtacatggggatgcaatatgacaggccagggaatcaacaaatggaaaaaacaggcgggggtgaaattgccattgaaccatgacatgttaaaagcaaaaccctattgggatctcctaaaagaggattgttttaacctggtctcttaaagagcttgtgtgcgccccccccgcggcgggctctgtgtcccgccccttgt

SEQ ID NO: 85948 - DNA, 1081 bp, Glycine max
  unsure (1)..(1081): unsure at all n locations
  Clone ID: PAT_MRT3847_48624C.1
cccacgcgtccgcccacgcgtccggaaggaaccgtctccgttaaggtcaaatttcctcaaccggcaactaaagcgcgccggagctctccgccgccgcgtacggcgaatcccgacgcctcttattcttatgctatattcgatcgcccgcgttccgcgactctcgtcgacggaattcccggtgactcaccggtggcctgtggaaaatcgcttcgttgaatattattatgaagaatctgagcaaggacaaggattgcagcaggagcaagagcagcaatggattcgttccccacgcgtccgcgaccgcatcgacttgatgctttgggcttgttttgataggctagaactcagtccgtcttctttcaagcatgttctcttatgacgctattccaatggatttcaagttcttgatgtggaagatgcctccaatgtaagggagcttgtctcaaaacgtgatgatccagtttcatttttacagatgcagcctatccctgcaatatcagaaggctgtgaaggatttagagcatcacatcctttactcttggttgttgcatgtgataaatcaaagatccctggtaaaatgctaaatgtcagagatggccataatgaagctcaagcagaaaatattgtcagctcagctacagcagttcggttttactcactaaggtcccatacttatgttcatgctctgagatttcgttcaacagtctacatggttagatgcagtcctcgaatagtggctgtgggtctagctactcaaatatattgttttgatgctcttactcttgagaataagttcagtgttctcacttaccctgtgcctcagttgggaggacaaggaatgattggggttaatattggctatggtccgatggctgtagggcccccggtggttagcttatgcctcanacagcccattgttgtcaaacacaggtcgcttgagtcctcagagtcttactcctcctgctgtcagcccatcaacatcacccagcagtggaaacctggtagcccgatatgccatgtaatctagncagcatttggctgcagggcttatcaatctcagtgatatgggatacaaaacatt

SEQ ID NO: 85949 - DNA, 1097 bp, Glycine max
  Clone ID: PAT_MRT3847_48625C.1
ctttattctctcacccctctctctcccctcttccccacccaaccttctctctatcacacacacaaaacaatggataaaaaacaacagtgtaagacgtctcaagatcctgaagtgagaaaagggccttggacaatggaagaagacttgatcttgatgaactatattgcaaatcatggggaaggtgtttggaactctttggccaaagctgctggtctcaaacgtaacggaaagagttgccggctaaggtggctaaactacctccgtcctgatgttagaagagggaatattacacccgaggaacaacttttgatcatggagctccacgcaaagtggggaaacaggtggtccaaaattgccaagcatctacctggtaggacagataatgagatcaagaactattggaggacaaggatccagaagcacatcaagcaagctgagaactttcagcaacaaaagtgtccaccatggcgcaacccatggaaacctattctccacccagttatcaaggaatgttagatccattttcaattcagttcccaacaaatcctcatcattctagttgttgtaccaatgacgacgacaacaacaactattggagcatggaggatatctggtcaatgcaattagccaattactgaacgggaattaaacctataaacataaatataaataatatatataaacctaagtgtctaagttccataaattaagctgtagtctctggcttaaaacatgttaggtttgtttatacaagtagttggatgtttggagtacttcggtcttttgcgtaccatcaatatttaagaactaagttagttatgttccgtaacttatgggctcttaattaaactatatctgcacaaaattatatatatatcaaatgtgatggtatgtggactataaaaagatatggttgagaaccacaaactttgaaacttcgaataatatattgccagtgacagtcttgttgatttgttatagcaaatgccgttacctagctcaatcgccaaacagcacatccccctttcgccagtttgcgtaatagcgaagaggcccgcaccgatcgcccttcccacagttgcgcacctgaatggcga

SEQ ID NO: 85950 - DNA, 157 bp, Glycine max
  unsure (1)..(157): unsure at all n locations
  Clone ID: PAT_MRT3847_48626C.1
ttggaatcacaatttctataaccactcagtgaataatgataatttttacgaaattcaaataaattgttgttgttgttgttgagggtgaaacttgggactgggagtgagatagttgattggagaatancattggctcntanctcaatctagttactac

SEQ ID NO: 85951 - DNA, 606 bp, Glycine max
  Clone ID: PAT_MRT3847_48627C.1
cccacgcgtccgcccacgcgtccggaaggaaccgtctccgttaaggtcaaatttcctcaaccaccaactaaagcgcgccggagctctccgccgccgcgtacggcgaatcccgacgcctcttattcttatgctatattcgatcgcccgcgttccgcgactctcgtcgacggaattcccggtgactcaccggtggcctgtggaaaatcgcttcgttgaatattattatgaagaatctgagcaaggacaaggattgcagcaggagcaagagcagcaatggattcgttccttcttccttcaagttcatatcgtcttgcattaagaccgcctcttccggcgtccgctccgccggagcctccgtcgccgcctccatctccggtgacggacacgaccgcagagaccagttcttgatgtggaagacgcctccaatgtaagggagcttgtctcgaaacgtgatgatccagtttcatttttacagatgcagcctatccctgcaatatcagaaggctgtgaaggatttagagcatcacatcctttactcttggttgttgcatgtgataaatcaaagatccctggtaaaatgctaaatgtcagagatggccataatga

SEQ ID NO: 85952 - DNA, 331 bp, Glycine max
  Clone ID: PAT_MRT3847_48628C.1
tactcgttcatcccgacatggtttgcttttcttgtttgctgcccctctttctcgggccggtcttcaacatcctccgtctgtgtcttccattttatcatggggaaaatctatcggcttttcgcttggtagtacaggaaacctgatagggctcctcctgcatgtcctttcatgcctccagcctacatggctgatgcagattgttaaccatttccagcacatcctgttaagcctggaaatgcatatctcaagcaagatttattcttgcttacctatcgtataatacttgactttcacaggattaacaatgtatgataacattctgatgggctta

SEQ ID NO: 85953 - DNA, 344 bp, Glycine max
  Clone ID: PAT_MRT3847_48629C.1
cacctaacaaaattataatatggggtgtatttatataggggtggttttattcttttcataaatacatataccattacttctctctctcactttaaaaatttcattcttacattttactacatacttatttattttaattccttcaaaaatagatcacatatgacttaaatttcctctcattccaattatatttttatttatgcttaacatttatataaatagtatttttttaaattattttaaataattccttaaatactctatttcatactttatggtaatgagtatctctcttacactttcttcatattatattgtctttattaactaatgactttttccat

SEQ ID NO: 85954 - DNA, 129 bp, Glycine max
  Clone ID: PAT_MRT3847_4862C.1
gttgggatgaaatagactatgaatttgttggaaatgtgagtggtgatcgatacatggttcacacaaacgtttacagaaaaggcaagggggacagggaacaacaattctatctatggtttgatccaactg

SEQ ID NO: 85955 - DNA, 285 bp, Glycine max
  unsure (1)..(285): unsure at all n locations
  Clone ID: PAT_MRT3847_48630C.1
cgagctggctacccctgcatacactngtccttgttcgagccacccttgatttgggattgtggagctaggcagcttgccatcgacatgctttacagccacccacagacctgaggcaaatcggatcagacaatctaacctatcaccagatagagcaaaagctgaatcaggggatttttacaatgataagagagccgtcgtggagggctgccaaaaaggatctgagcctcagagaaacctgtatgctataaacttagcatgttgagactgctgtacacattgctagac

SEQ ID NO: 85956 - DNA, 277 bp, Glycine max
  unsure (1)..(277): unsure at all n locations
  Clone ID: PAT_MRT3847_48631C.1
tggnccttcaaacaggncancannacaagggccanntctttatnataggantnnaaagctggaggatnntctnnctcaatttangnaagtcacaatgtctaaccacnagagcaccgaagtcgntncattacgaacnttgacgtcccagtggganagttagctncncagattgcggagaagtcatcaangattttggggcancactnagggtaatcctgngaggcatgccaagntgtnatnactnnaancnaggnagctgngttactgagnttgggtc

SEQ ID NO: 85957 - DNA, 358 bp, Glycine max
  unsure (1)..(358): unsure at all n locations
  Clone ID: PAT_MRT3847_48632C.1
agcagaaataaaaagaaaaaagaaaagaaaagaaaaagagtgacagaaaatacggtggaaaggagacggaagagaaagtgggtgtatgtttataattttgcatatttggttttcaatttcaaatagtgagttgtgaggataaaatgccttggtatatgggtactatacgtgtgactttgtaattgcaaattgtaatatctttaatgatttttgtagcttgagtaaccttgctattttgttggattttggtttaaattgtttatctgaagaatgtagtgcttataatagggtgtggcttccttttgataggtacgatgcantaacttacttgaaatatttggatacactgagagtgtca

SEQ ID NO: 85958 - DNA, 454 bp, Glycine max
  Clone ID: PAT_MRT3847_48633C.1
ccactctttcgtgctctacctgtgaccgggcaacatatgattaatttttcggttgctgaaatagctttttgtacgtctacaactctacctttgctaatttatcttcacggctgacatacacacctttgctggtttgttggccaacgattgtttgttccatctacctatctacctaaacaggtgggctcttcttagctaatagaaagagtctgaattacaatattttgggagggcatgtgtctcaggggatggctggcttcatggctgagaacataccgcacttttttacaactcgtatgttcaacaaatttgttgctctgagggtccagctcgaaagtagcttgagtggcacctcttttattgtaagcacagagtaccatcagaatcttttgaaagaattgtgcaagttgatcagtctcttggacaaactgtgtcaaggcccgactaggctgtc

SEQ ID NO: 85959 - DNA, 265 bp, Glycine max
  Clone ID: PAT_MRT3847_48634C.1
ggcttcagggtctaacccaggtgtctatcaagagtaatagggcgttccaaggggacctgggtgcaacacacatactcatgacgaaggcccatacagtatgggatgaaacaaacaacatgcagcctagctggagcgatgcactaatgaaaggacaccactcgcctgaccgtgagaggtggaccaagtcataattaccccatcctcagttacagtacatctgactagcatgagcacatggagatggtcaataattaacatgcaatga

SEQ ID NO: 85960 - DNA, 388 bp, Glycine max
  Clone ID: PAT_MRT3847_48635C.1
gacacacaaacgttgaagcttgaagtaactatggaaaggaagaggctgagcaaggcaaccttggtacccaaaaaaaacacctgacctgggggaaaaaacaactccagttgtaacaaaggaagaaaacaaacggtttaccacagtgggccaaacatgacagaaacccggtcatggtcagtacctaaaaagggccctgcataaaattccaccccctaggctgcaccgggggcacaagggagccttttttgccaagaaccaaaaccggggggaaaagaacttggatccaacgggttctcccggaccgagggtgcctgggggaacgaaaaatgggtgtgagccgcaacaacaaaaactttttggtcggattccccaaccatggggggggccc

SEQ ID NO: 85961 - DNA, 292 bp, Glycine max
  Clone ID: PAT_MRT3847_48636C.1
aaagtttattactgaaacattggcctgtgggattcttttccttccaggacgttcgggaccgtcccaggggttaactccttctttttactcctaaaagctctttcgttttttgtgggcggcaccttccgttggtatcggctggcatcgctctccagattgggcccagttattttcagggcaaaattgttgcccctatgcattagtggctttaggcaccgttatgacccactcgctagtgggagccactattgggacttattgcctgaccatgtcttgcaggtagtatttgtat

SEQ ID NO: 85962 - DNA, 362 bp, Glycine max
  Clone ID: PAT_MRT3847_48637C.1
gacccctaacgctagcaactggaattcggcgtgcgaaaaaccttagccttccttacaactgcaaacacaaagacatgacaatctatggatgcctccgcctccactgtcgagactaacaacagacctctttagaacctgacagactctcaatgatcagcacaagctcccagttcagacttctttgggaccagctagaagaatgttatcgcctcaagggtacccaacagcaaggtttccggtggaagcttcaagattgttgctgtataacagaataaagagattgaagagacacatcgaaccgacacaacaaacagagagggtcttgcctatgatatctcagacgaccaacaagacatcacaag

SEQ ID NO: 85963 - DNA, 960 bp, Glycine max
  Clone ID: PAT_MRT3847_48638C.1
ataagttgtttaagaaacctgtgactttttattattaattatgtatgtcatgaattttcaataattattatcattttgagaattaatgtatatagcatacattatataaactaaataaatatttcaaaacaatatatatctctctatcctgctatagcggttttggagccggccgataaaggccactatccaggatttaaagcactgaactatatagtactggacatcaatacatatacaaaaaacaaaaatgtaattagacaactaaatctaattatgtaaattaaggaaagtaaggtatcctcataaacgaagcaattcatgcaagttttctctagaatggaacgagcaagagaaggcatggataaaacaataagcaaatatttgaaaggaaattcaaaaccaaaatattccaaatcaaccttctgtatgaaaaagagagcctcagacagaacttttcatgaattaggatcagccaactgatcagaaactatacaaaaaaggtgtttggcttgcatatcaatatttgccatatttattgacatatccattgaccagctttgcaattttcacctgacttgaagaaacatattgcttagcagtatccatgatcggaatctgatggggttccaaggtgctaacaaccttgtcaactgattttttgactatcataatgtgtgcatccttgctaagatgaccctcgtgccaagctggttttaacaactctttaacatgatcaacaagagctgcgcgaaaaaattttaatgcctttgattccttctgaatgctgccatcaatctgaaagtcgacatccatttcatgatttttcttatccctgtctactctcttctttttatgccctgatccttcaccatgacgtctagcatcacactcggtcacatctctctcattttttgtactatctgcaacaccaaaggtatgttgtcccggacgcgtggg

SEQ ID NO: 85964 - DNA, 230 bp, Glycine max
  Clone ID: PAT_MRT3847_48639C.1
gacacacaccacacacatagtagctattatactctctagagtaattgcggaatctgctagaattttctaataatggcgaaagacgttgagcaggtaacaaagcaaggggaatcctccgggaaggactacaataaccctcctccggaaccgtgaatcgacccaaatgacctaacaaagtggtccttgaccaaagccgccttacttaagttaataccaccattccttttttt

SEQ ID NO: 85965 - DNA, 1262 bp, Glycine max
  Clone ID: PAT_MRT3847_4863C.1
ggtaggaagagatgttgcaacatgtttgcaagaagcattggcacggaaaggcctagatgtgcgggtagctgcattggttaatgacactgttggaacattagcagttggacattatcatgatccagatactgttgcagcaattataattggtactggtacaaatgcctgctatttggaacgagttgatgctattatcaagtgtcaaggccttcttatgacatccggacgaatggttgtcaatatggaatggggaaacttttggtcatctcacttaccaagaacatcatatgacattgatttggatgctgagagccctaatccaaatgatcagggttttgagaaaatgatatcaggaatgtatcttggtgacattgtgagaagagtcattcttaagatgtcattagagtcggatatgtttggaccaatttctcccaagctttcaatgcctttcatactgtggactcctttgatggctgccatgcatgaggataatgctcctgtggggagagaagtagcaagaatccttaatgacatatttgagattcctgatgttcccttgaaggcaagaaaaattgtggtgaaggtgtgtgatgtggtgactcgtagagctgctcgattggcagctgctggtattgttggtatcctgaagaagattggtagggacgggagtggtggtatcacaggtggacggagtagaagtgatatgaaaatgagaagaacagttgtggcaattgaagggggattgtattctaaatatacattgtttagggagtacttgcgtgaagctctaaatgaaatattgggacaagatattgccaagcacgtaattctaaaggtcaccgaagatggatccggcattggggctgcactgcttgctgcctcttattcatcctaaactgtggatagagggtacacctgctataaaatatatataaattgtttgatatttatatatatatgtgtgtatatatataatatatatataggcacacacacacgtatagccatgtaaatcagaattaattctccatatttaatatctctgtataaaggaaggtttcgtctattctttgaccaagttatcttcatttatatgattattattatttttttatcgttgtgtgttttatggcttttatctgttgtcagttgagaacatttggatgtaatactatactctcgtcctaggactaggagtactatcttgagattgaaattgcttatacgtcttgttttcttatcaataaattatttagtccgca

SEQ ID NO: 85966 - DNA, 532 bp, Glycine max
  unsure (1)..(532): unsure at all n locations
  Clone ID: PAT_MRT3847_48640C.1
atcaacatattagttcttttttatcgacaaatgttagttgtttaatttttgttagcgggggattcgaactcacaacatatctctccctcccttcactccatccggttaatcttatatctccaacaaatattagttgttagtttgtagtttttgttagtgggagatttgaacttatgacctgtcccctcatccttcttctttcactaccaaatcaaccctataatccttggagaatccacacttaaaccatgaagcaacanatatnaaagttacacacacaattttaaaggttagtttcgtatgatttgttcctccattcataacctagcatgcttttgcaacaagtagcaaatacagtagcataaaggcaatgaagtagataacttgtttacccaaaatggaaagaggacaacttataatatcaacaaaaggcttttacccaaaatggaaagaggacaacttataatatcaacaaaaggcttataaatgaaaacttaacagtataacaccgtaagatactaggagacgttgt

SEQ ID NO: 85967 - DNA, 625 bp, Glycine max
  unsure (1)..(625): unsure at all n locations
  Clone ID: PAT_MRT3847_48641C.1
gctgctaaatcaataatctataaaattattgttcatttagcattatcctgctcagttacataactttaatctgattttctagttacataatttttatgttctaaactctaagaatcagcattggtataaataaaaatatatacttcatcaagttgccatcctgccgtttaaggaaaatattttataatataacccccccacaccgcttacaaccctggttattcttcagtctaatactaacggttaaaaagggatgcatttgatggtttcctcttcattgccctcaattcaaaatactcttacgtctagaaaattggctagatcttgggaaccccataacctgcatcctctgatttcaaattctcattccaattctcaaattctgatcccccaaacatgacttgcttgatcccaacaaaatcggagcttatctgggtcagggcttttatcanacccttcagaagcattggttcaccggttccattatccacccttattcgagccaagttgtcttgcccctcgagatccccaatgttgtaaaatgtaggtggttccacatttgctccctgaatataatcataccttggggcgggcctcctttgggagactgtgacggttgcttatt

SEQ ID NO: 85968 - DNA, 281 bp, Glycine max
  Clone ID: PAT_MRT3847_48642C.1
gtgggggaaaggaattgggccttttcccaaaaagaaaaaatggggacaaaaagggggggggttttttttttttccagggggggggtaacccagaaaaaaattttttttctgtgaaaaagccacagggcgccctcctttccccaaaggggcctttgcggagaatttttatccattttatggttcccccacgttaaaggggttgggcttggaaacaattttggcctgaggacggcccccgaaaaaacctttacttttaaaaaaatgggttccaaagggggccc

SEQ ID NO: 85969 - DNA, 236 bp, Glycine max
  Clone ID: PAT_MRT3847_48643C.1
gtagtacctttactagctttccaacataataagagaacatcacatggtttatcccgttttcaactacatggggaaaaagaggctgatcataacaaaaaaaggggtgcaaaatgccgtgctccacacaatgtatgcatcaccaaaccagcccaataaaagagggtttatccctgataaaaaataccctatccccgaggttattataaaacatagtgaccccttaaagctaatccttt

SEQ ID NO: 85970 - DNA, 464 bp, Glycine max
  unsure (1)..(464): unsure at all n locations
  Clone ID: PAT_MRT3847_48644C.1
ttcgtccgctctcggtgnctcctcttttgccgaattttcgacgctttcaatttatttaaattaacagaatggcatcctttgaagagattattgagacgaccaaatggaaggacggacagaaaattccttatcttgcacttgctaaaacattggagcgcattgaggcgacctcctctcggttgaaaaatattcgcattctcagtggttttttcgccgctgctattcgcctttctccgtccgatttgagtcccgcagttcatttatgtctcaacaaactcgggccgagctatgagggacttgagttgggtatcgccgaggcgtaccttatcaaagcgttggccggggccaccgggcgaacggtagacatgatcaaaaaggacctcaaagtaaagggcgaccttggcattgtgggccaacatagtcggtccacgcagcgaatgttggccaaaccgccgccactgact

SEQ ID NO: 85971 - DNA, 385 bp, Glycine max
  Clone ID: PAT_MRT3847_48645C.1
ccgccctttttttttttttttttttttctttttttttttttttccttgtttttttactggtgtacctttttgttctttgtttatatcttactctggtttttgttttttctaaatgcatctattcgctatttggaacggcggcaaaaactctgaagctgaaaaggcacagccgaaaaagtgccccaaacaaaagacctcatcagccccaaaagtagcacccgcgcagaaaaaacacgtctaccacccacagctgcatgcacagaaataaaactgagtcaaaaagaaaccccccccgctggttctgataaaaaaagctaaccggggcttgtcgctcaaccttcctttgctaccccccacaaaagagccccctttgggccccttgggg

SEQ ID NO: 85972 - DNA, 284 bp, Glycine max
  Clone ID: PAT_MRT3847_48646C.1
aacacaaataaagacacttggttagggagagaaaatggacgataccaccggatctagtgtgaaacacatacattgcaggacaaacatgtattctctagctcgctagacgctggagcatatgatattatatatatttgctacacgtgcgagacatttgttccttccaaacacactgaatcataaatctttattccgtggtgtgatgagggggaagatcgctccaacaataagatggtagaacgggccattggaacaccttgcctgcatgggcggcccaagagaga

SEQ ID NO: 85973 - DNA, 1294 bp, Glycine max
  Clone ID: PAT_MRT3847_48647C.1
aagctacaaaaccaatcccttcccttccttactctcctcaacaacatcacaattcccaacacaacacaatctctgacctcttccttctgtggtccccactatccccaacacaccatcatcaatactttgcttccaaaaatcaggaaactcactcttcatctcttttcaccccaatcccttcaaactcacccccacaaattttcacctctttccccaactgggttctcataaaaatctgattttttttttgcctatgcttttctgaaagccatgaatttcaggagcttggaggagttctgggccttttacgtgaaccagcattcgaagccttccacgaggaggtggcactttgtgggaacgctcttcagtattttctttttgttctgttcagttttcttcagctggtggttcttgttcttggtgcccttttctgggtatggatgtgcctggtacagtcatttctttgtggaggggaatgttccagccacttttggacaccccttttggtcactcttgtgtgatctcaagatgtttgggttgatgcttactgggaaaatggatagagagatcaagaggcttggcaaaagacctgtgctgcaagtgttctgatttccatgtttggattggtcccctttgtttgaggaaattttcaagtgcagatgcatttgttgaagctcatcagtggggatgatggttctttgtgattgattggcttgccaatcttggagaaggctgtgctatgttaaaaattcaatagtacgatatgaagtgtgcatgacaccaatcaggtagactacttcactgatctgggataccacatgtggtcttgtgacatgccatggtatttgcatggtctatgtgtatagtgaaagttgaaacatttgttgctgtttgctagcaataattacatctcaattcaataacctaccaaaattttggagtttccctgcaaaaaaaaaaaaaaaaagaaaacagcaaaaaagtttaaaggcaaattcatatgaaatagataactaagtaagaaaggatgtaaaatataaaaaaagttattccggatgtgtaaaatggaggagacatgggcgcccccaccaaatataagactggaccccgcgcaatattatcccaagcagatcacaggtgggttccacggttcccttaagggaacaggttcaatgccggggcgaattttggacttaaagttttccggatgaaaaaggtgaatacatccaaaatgcccctataaataattccgggcaccaaaaggggaaaaaccgggggcctttgtgggcatgca

SEQ ID NO: 85974 - DNA, 296 bp, Glycine max
  unsure (1)..(296): unsure at all n locations
  Clone ID: PAT_MRT3847_48648C.1
ctttcttcgccccgtccaacttcgctttccagaagcttggccctcgcatcaacgccttcctcttcagcaagtacggccagaagtacctcaaggctctgcttgagtaccaccttgtccctgacaacaccctctactcagatgccttttacagctcggatagcaagagccaggaaggtgtgcccaaaggatactttcacgttgaccttcctaccttgctcgaagaccgcagcctcagcattgacatcgnccgctacagtggcttcatcagcatcaagatcaatggatttggtcgcgtc

SEQ ID NO: 85975 - DNA, 111 bp, Glycine max
  Clone ID: PAT_MRT3847_48649C.1
gattaccgacgaacctcggaattcggtcagcgtgccaagaggaggactattcttttctataagaagaacacttggggtgtggcttgggatgacgtgtccgccttggttgga

SEQ ID NO: 85976 - DNA, 342 bp, Glycine max
  Clone ID: PAT_MRT3847_4864C.1
cttttctctccgtgggttgaacttgaagaacctctgaaaatcctttctttctttgatcgagcactctctctctctagatctgatcaaatctccgaacatattccctccaaatatcattttccttaaccaaaccaaaccctaaccctttctttctgtatgaaacctgattcccccccaaaagccttatatttgagaacatttgtaaattctttacgtagtctaaggtagaatttttctgtaacattttaagagcttgaaatcgtgagatgaatcacaacaaccacaatatagcgaggtacccttccagaatggggattggtctcggaggttttaatcccaacc

SEQ ID NO: 85977 - DNA, 1922 bp, Glycine max
  Clone ID: PAT_MRT3847_48650C.1
ctgggctcgattaagtattgcagaagcaaaaaatggagccattattttcttcagcagcagcaatatgtgtggtgactgtgttggtagctgtgattcccatatgggcactgaagatgctgaactcgctgtggcttaggccaaagaggtttgaaaggcttcttagagcgcaaggttttcatggtgacccatactcactttctcatcacaactccaaccaaacccttttgcaacaacaccagctcaattcccaaccttttcctctatccgatgatgttgctcctcgtgtatcctccttgttacatcacactatcgacaaatatggcaagaaatccttcttttgggaaggtagaacaccaaaggtgatcattacggacccaaatcaactcaaagaagtcttcaacaacattcatgacttccagaagccaaagtttagtgacaatgtcaagttcttgttcgctggcctgttaaattatgagggtgacaagtgggctaaacatcgaagaattatgaacccagcatttcactcagaaaaattgaaaaatatgctaccagcattttctcaaagctgccatgatatgattagcatgtggaagggaatgttgtcatcagatggaaaatgtgagattgacatttggcctttccttcagaatttaactcgtgatgtaatttctcaaacagcatttggaagcagctatgcagaaggagaaaaattttttcgaaatctgagaatgcaggggtatcttttaatggcaggaaagtacaagaacataccaatattgcggcatctacgtacaactaccaccaagaggatggaagcaattgaaagagagatacgagattcaattgagggtatcataaaaaaacgagagaaagccatggagaatggtgaaacctctaatgaagatttattaagcatacttttggaatcaaatcacaaggaaatccagggacatggaaacagtagggctgttggaatgaccaagcaagaagtaattgaggaatgcaagctattttacctggcagggcaagagaccacttcatctctgctggtttggacaatggtcttattggctaggtatccagaatggcaagcacgagcaagggacgaagtttttcaagtttttggaaaccaaaatccaaacattgatgggttaagtaagcttaaaattgtgaccatgattttatacgaggttctcaggctatatcctccaacaactttctttagtcgcgcacctcaaaaggatgtgaaacttggaaatctatcactacctgcaggaatacgcattaccatgccaatattatttattcatcatgatggtgatatctggggtgatgatgcaaaggagttcaaacctgaaaggttttctgaaggaattgctaaggcaacaaaaggccaaatttcgttttatccatttggatggggtcctagaatatgcattggccaaaactttgccttaatggaagcaaagatagtgttatcattgcttctgcaacatttctcatttgagctttctccggtctatgaacatgctccaacggttgtgcttagtttgcagccaaaacgtggggcacacatcgttttgcataaactatgatatgattcatatattggaattagtcatcggcttgcgggataaggctacgcatatctcacttggtttagtgtgttatacattatatttcctttatatagtatcaatcatgtacttgtgtgtggaatgaaaactatctttaattaaggatcttgcaagttgtaatgcaggtgtatttgaatatgtagtatatggtatattgaaaactatcttttgagtttggtcactggttacggaggaataaaagggaaggatttctctcctctctatctcatctatatattttatagtgatttgataaatttgcctttttaatagttttttcatgcc

SEQ ID NO: 85978 - DNA, 626 bp, Glycine max
  unsure (1)..(626): unsure at all n locations
  Clone ID: PAT_MRT3847_48651C.1
ctaactgggtttgggatgaaagtnaccctttgtatcagtcaaaagattgcagcttccttgatggaggatttcggtgttctgagaatggaagacctgatttgttctacacaaagtggaggtggcaacccaaagcttgcaacttgcccagattcaatgcaacaataatgttggaaacgctgcggaacaaacgcctagtgtttgctggggactcaattggtagaaaccaatgggagtcactattatgcatgctctcttctggagttccaaacaaggaatcacatctatgaagtgaatggtaggccaattacaaagcacaaggggttcttggtattcatattcaaggattataactgtacattggaatactacagagctccatttcttgtattgcaaagcaggcctcctcctagaactgatagaaagattaggacaaccctgaaattggatcaaatggattggtactctttgaaatggacagatgcagatgtcctaagtcttaacacgggacactggtggaattatgagaaaaccataacatggggttgttatttgcaagaaggtgcggaagttaacttggaaatgatggtagaagaagcatataatatgtgcataaagacaggattgaa

SEQ ID NO: 85979 - DNA, 296 bp, Glycine max
  Clone ID: PAT_MRT3847_48652C.1
ggcaaaaaaagaagtttccattaaatagcgggggcaaaattcccattggttttcccatcatcagtgtatgttatatgccttctgaggacaaaaatgaattggttgaagcaaaaaggcttaaagtataaatatgaaacgcttcttgtttgattacaaaatagcttcattagacaagggggtggatatgcgtgactgcattgaaattaggtaatacggttcctgcttatagttttattcagttagggaggctaaaaaagagagtttaacgctcttgatgctggtttgtagcggattct

SEQ ID NO: 85980 - DNA, 2045 bp, Glycine max
  Clone ID: PAT_MRT3847_48653C.1
ggcacacaagagtcatttgttttcgaatctagaatagcgctcaatcagcatggtgtcccctcctggggtcaagctcagtcagcactgcaccgcaaatttttctttgcccctttcgatgagtaacgccacacactccgaagccgccgattctggaggtggggggtgaggggattaggatttgggttgttgggtcctgagtggaatcagcaactatgaatatgatgcggaggttgaagagcattgcttctgggaggacttccatttcttcagatcctggaggggattctaactcaaaaagggccaagtttgaaccagaaactgaagggaaggccgatgagaaaacaaataccattgaaacaatctgcacagatcaggaacaacctatagacacatcaaaagaaacttccaatgtaggcacatccgatgtatctacagtagctagaactgagaagtcaggtttcgatgagcttcctaaagaattaaatgaaatgaaaattagagatgagaaaagcaaaaacaacaatgaaaaggatatagaagctactgtagtgagtggtaatggaacagaaacaggacaaataattacaactgccattggtggtcgagatggacaaccaaagcagacaatctcttacatggctgaacgtgtggttgggactggttcttttggtattgtttttcaggctaagtgccttgaaactggtgaatctgttgccataaagaaggtgttgcaagacaggagatataagaatagggaactccaggttatgcgcacagttgaccatcctaatgttgtcaaactaaagcactacttctttttcaactaccgataaagatgaattgtaccttaacctggttttggagtatgtacctgaaactgtctacaaagtttcaaaacactatgttaggatgcaccaacacatgcctatcatttatgtagcaactttatacctaccagatatgtcgtgcgttaaattatttacatcaagtgattggtctttggtggtcgtgacatcaaaccccagaacctattggtaaatccgcagacacatcagttaaagatatgtgactttgggagcgcaaaggtgttggttccgggtgaacccaacatatcgttcatttgctctcgatttttatagagctccagaacttatatttggggcaactgaatacacaactgctattgatatgtggtctagttggttgtgttttagctgaagcttctcctaggacagccattgtttcctggagagagtgggattgatcagttagtagagatcattaagattttgggaacacccaccagagaagaaataaggtgcatgaatccaaactacaatgaatttaagtttcctcagatcaaagctcacccatggcacaaggtttttcacaagagaatgccacctgaagccgtggatcttgtatcaaggctgcttcaatattcaccaaatctacgttgcactgctttggctgcatgtgctcatcccttctttgacgatctgcgggacccaaatgcatgcttgcctaacggccgaccactacctcctttgttcaacttcacatctcaagaactggctaatgcacctgaagagttgcgccaacgcctcattcctgagtatgcaaggagttgaatcaatttgaaagttgaaacatctctagggcattgtaaatgggttttgaatgaatagacaccctctccggcatcgccacccgcatgttcaggtctgttcttcagcctcttctgcacaagtcacaactgtgactatacaaagtgagaaacaccttataaagttctatcaaataacttaaaaagacctgcaggtgactcaaatggataaagtggtactacctggtgatagggttgcaagccttttttaagtagtttataaacttggtgcctcagttgtgaaagatattctaacgatcgtgtaagcatgttttcatatagttcaagttcgtttattaattattactttattccttgaaatggaccaagtggaatcctcaattgaataggctttcgcttcttcacaaaactttattct

SEQ ID NO: 85981 - DNA, 523 bp, Glycine max
  Clone ID: PAT_MRT3847_48654C.1
aagcccggatttcggctggagggacatgcaactgaaagtgatggcgcgggacagtggggatccgcccctcagcagcaacgtgtctctcagcctattcctgctggaccagaacgacaacgcgcccgagatcctgtaccccgccctccccacagatggttctaccggcgtggagctggcgcccctctccgcagagcccggctacctggtgaccaaggtggtggcggtggacagagactcgggccagaacgcctggctgtcctaccgcctgctcaaggccagcgagccgggactcttctcggtgggtctgcacacgggcgaggtgcgcacggcgcgagccctgctggacagagacgcgctcaagcagagtctcgtggtggccgtccaggaccacggccagcccccgctcttcgccactgtcacgctcaccgtggccgtggccgacaggatctccgacatcctggccgacctgggcagcctcgagccctccgccaaacccaacgattcggacctcactctgtacctg

SEQ ID NO: 85982 - DNA, 587 bp, Glycine max
  Clone ID: PAT_MRT3847_48655C.1
ggcatcccttcttcaatgatctgcgggacccaaatgcatgcttgcctaatgggcgacctctacctcctttgttcaacttcacatctcaaggtaagatgatttgaacttacattttggttaagtgatacatttcttgccttaggcattgctcatgtaagaaaacaatgcagaactggctaatgcacctgaagagttgcgccaacgcctcattcctgagcatgcaaggagttgaatcaatttgaaagttgaaacatctctagggcattgaaatgggttttgaatgaatagacaccctctccggcatcgccacccgcatgtccagagtctgttcttcagcctcttctgcacaagtcacagctgtgactatacaaagtgagaaacaccttataaagttctatcaaagaacttaaaaagacctgcaggtgactcaaatggataaagtggtactacctggtgatagggttgcaagccttttttaagtagtttataaacttggtgcctcagttgtgaacgatattctaacgatcgtgtaagcatgttttcatatagatcaaggtcttttattaattattactttattccttgaa

SEQ ID NO: 85983 - DNA, 667 bp, Glycine max
  unsure (1)..(667): unsure at all n locations
  Clone ID: PAT_MRT3847_48656C.1
ggtacagttgaaattaaagtatcaggagaaggaagtaatattgagcatgatgttaaatgcgatgaatctcatgatgaattttgcgatgcaatacacagtcaggatattcagcctattgaaccacttcaaatcgtaatgcttatagttggcacacggggagatgtccaaccatttgttgccatggggaagcgtcttcaggaagatggccacagggttaggctagctactcataagaactttgaagattttgtcatgaatgcaggcttggagttttaccctttgggtggagatcccaaagttctcgctggttatatggtcaagaataaaggcttcttgccatcaggaccttcagaaatacatacacaaagaaatcaaatcaaggatattattaatactttgctcaaggcatgcaatagtcgttacccagagtctaatgccccatttaaagcagaagcaataattgccaatcctccagcatatgggcatactcatgttgcagaatatctaaaggttccacttcacatattcttcacaatgccatggacgcctactagtgaatttcctcatcctctttcccgtgttaagcaaccaattggctacagactctcatatcanatagttgatgctttaatctggcttggaatacgagacttgataaatgagttta

SEQ ID NO: 85984 - DNA, 239 bp, Glycine max
  Clone ID: PAT_MRT3847_48657C.1
cttgtatgttttacaactccaccaccaaaaagaaattgaaagcggagtttaaaaactagagcttaaaccttggtgattgatcaaagggtataccgaactccttttctggttgaaggcatataccaaactgaagaaatagccgttcattaattagccaggcctccgtaaaactaagtggtttaaggaacaacggcattttgaaacatgtgctccagggcagagggctagccattgaacat

SEQ ID NO: 85985 - DNA, 734 bp, Glycine max
  unsure (1)..(734): unsure at all n locations
  Clone ID: PAT_MRT3847_48658C.1
aataaaataaaaccaaaagcatttcagaactatatgaaattaatgtgaacagcaccatatatactagagcatgcctacatgcaccctggttgcattcatttgtccccagtccccacttctccatctttgggacttaatttggcgtttttaaagctttttttgtctttgtctgagactgctatccagggaagcttttgttggtaggggggccttatggaagagtggggatataagctgagaaagatcacgaaataggtttggaaggcaaagtactgatcagctgaatatttgaagtccaaattatcatgtcacttcaggaaaaggagtttgatgttagttttgggagctactaggtgctagaaagaataaggatcaccatctgcataagcacagcaactaatatggatggcaatctttgacatataagccactctaaatatcacaccactatttgctagtcgaagaagttttatgttagttttgagagctactaggttctgaaaagaataaaacagagcactatatctacccaagtatgttcataacgcgtgagaatgatttatcaaacaattgtttttagaaacactatctgtttatcttctaagaaagattacaatactaagaagaaagaaacaatagtcatacaatatttactaaatgncatatcccatcattcatgntaagctaaaacaatagttggacatatactattacctaaatacatagctatgtta

SEQ ID NO: 85986 - DNA, 691 bp, Glycine max
  Clone ID: PAT_MRT3847_48659C.1
cagggtttcttttgctcaaatcacggctcgcaaagcaaacctgtaaatgtgttggagacaaggctgcaaatcttgctggagatgtctctgctgataataattcaagtgttgaggctccgaaacttaagaagatagttgatataaatgaagcccaagtatgtaaaaataaaggatgcggtcaaactttcaaggaaaaggataatcatgacactgcttgcaactaccatcctggccctgctgtttttcatgaccggatgagagggtggaagtgctgtgatattcatgtaaaagaatttgatgagtttatgagcattcctccgtgtgcaaagggatggcataatgcggatccagagtcctgatcactggagacacagaaggacgagttattttcttacagttgcagatcctctaaatgaaatggaaaaggggtttgttgattcattgttgtcgattaattagagcaaaacattgtctactcttttttccgtctccctcatccccctttggactgttcaaactctatggttaatttgagaagctataagaggtcattccatcaagatgattactgtggtctgtggatagtgtagaatgtgaagttgtcttgtgttctttgaatgttgctatttgctttcgtttggctggtttggacggctaattttgaaagatgttgaattatggttttgtccac

SEQ ID NO: 85987 - DNA, 704 bp, Glycine max
  Clone ID: PAT_MRT3847_4865C.1
ccaagctttcaatgcctttcataatgaggactcctttgatgtctgccatgcatgaggataattctcctgacttgagagaagtagcaagaatccttaatgacatatttgagattcctgatattcccttgaaggcaagaaaatttgtggtgaaggtgtgtgatgtggtgactcgtagagctgctcgattggcagctgctggtattgttggtatcctgaagaagattggtagggacgggagtggtggcatcacaggtggacggagtagaagtgatatgaaaatgagaagaacagttgtggcaattgaagggggattgtattctaaatatgcattgtttagggagtacttgcgtgaagctctaaatgaaatattgggagaagatattgccaagcacgtaattctaaaggtcaccgaagatggatccggcattggggctgcactgcttgctgcctcttattcatcctaaactgtggatagagggtacacctgctataaaaatatatataaattgtttgatattttatatatatatatatatatatatgtatatatttatatatatgtacatatatatatataggcacacacacacgtatagccatgtaaatcagaatttatctccatatttaatatctgtgtaaaggaaggtttcgtctattctttgaccaagttaacattaatataattataattttattattttttt

SEQ ID NO: 85988 - DNA, 1295 bp, Glycine max
  Clone ID: PAT_MRT3847_48660C.1
ctgctaacccaactcaaaaactggaacttgttggaagttgagtggaaactgagattctgagaggaatcagcccttttccgtatactttacttgaacaagccgtttgagttcggcgtgtttaataaataaaatcacaagacaacgttgtcttgcgcctgaaagtgttgtggagacaaaaccacaatacagttttagaatggagaagacagcagttaaagttcgatgccagaggattgggtgcgacgccatgttctccgaggccgacaaccccgacggttcctgtcgataccatgattcgggacctatatttcatgatggaacaaaagaatggagttgttgcaagaaaagaagtcatgattttagcttgtttttggaaattccaggatgcaagacaggaaaacatacaacagttaagcaagttattacaccagtgaagaagaacaccatgccctctccaactgctgtttcttctaccaatgcatcatcaaaggagtcttgtcccagatgtcagcagggtttcttttgctcaaatcacggctcgcaaagcaaacctgtaaatattattggagacaaggccgcaaatcttgctggagatgcctctgctgataataattcaagtgttgaggctccgaaacctaagaagatagttgatataaatgaaccccaagtatgtaaaaataaaggatgcggtcaaactttcaaggaaaaggataatcatgacactgcttgcaactaccatcctggccctgctgtttttcatgaccggatgagagggtggaagtgctgtgatattcatgtaaaagaatttgatgagtttatgagcattcctccgtgtgcaaagggatggcataatgcggatccagagtcctgatcactggagacacagaaggacgagttattttcttacagtttcagatcctctaattgaaatggaaaaggtgtttgttgattcattgttgttgattaattagagcaaaacagtgtccactcttttttcatctccctcatcccctttggattggtcaacctctatggttaatatgaaataatgcaaagttataagaggtcactccatcaggatcatttactgtggatagtgtagaatatgaatctgttgtcttgtgttctttgaatgtcgccatttgcttttgtttgactggtttggacggctaatcttgaaacatgttgaactctattgttttgcccactttaggccaaaaaaaaagaaaaaaaaaaaaaaaaaaaaaaaacgcgctgcgttagttatagcgacccggcccccggggatttttttc

SEQ ID NO: 85989 - DNA, 314 bp, Glycine max
  Clone ID: PAT_MRT3847_48661C.1
ggctcgagaggtagagtgtttctttgtgtttcagttcccatctaaagagggtagatgctgtccaaatgatttggaaggctgttgcacgtaaagttcctttcatgaagctcaagactaataggtctaggagatttctgaggtctctttatgggaatcacaatttttggagaatgttaatttcgttggataggatataattgcaaattaaagacaaaacttaaatactacttaattaggtcttgtttttctaaaaaaaaaaaatttaatatttattaattaaaaaattttctatattgttttttttttataaaaat

SEQ ID NO: 85990 - DNA, 390 bp, Glycine max
  Clone ID: PAT_MRT3847_48662C.1
gtcgcccatcgtcgatgtcgacagcgccctcgataacatcgacaccattcgcatccccgaaccccacggtacatacttacaaacacgcggagctcgcgcagctcgtcgaatatacaaagctatgggtgtctggccatgggacatcgttcccgaagcacctcctaagatgtgggccatcaatctgctagaggatctcgcccttgtcgcagaccatgttggcagaaatccaggcgatacactgcaagaccttcaatcagagctttggaagtctcttgcgcgcgaccgcaaaccttcttatgctggaaaattgatggcgcaagatgtccacgctgcaaagaagcgattcgttcgaacaatgcctcaatcacccgatgctcaagacgacactgg

SEQ ID NO: 85991 - DNA, 532 bp, Glycine max
  Clone ID: PAT_MRT3847_48663C.1
taatgatccaacttcagctcgatatgccatgtgttttcacctcgatccaaagatatcctcctccttggcttttgttcaatttcctcagaaatttcacaacattagcaagaatgacatctatgatagtcaactaagatcaatatttacactacaatggcaaggtatggatgggcttatgggaccagtgatttcaggtacaggcttttatataaaaagggtatcactttttggaaacttcgcaaggaaaggaactgatctgctgcaacttaaagaatactttggttcatctaacgaattcatcagatcacttaatcaaaactacacaagtgatttggtatctggtcagaaatatgcattactagaagaacctcactttttggcttcttgtaactatgaaattggcactaaatggggccaagaggtaaatagacttgtttcctaaatcagttattacatcaaaattcttgtagtaaaaaaaatgtgcatatttttcgaacggttgcaggttggtttctcgtatgttagtgtagta

SEQ ID NO: 85992 - DNA, 2747 bp, Glycine max
  Clone ID: PAT_MRT3847_48664C.1
ggaatcactttaaagagaagcactttattaactttgtacatcctcacaatctacaccattaaatttttgatggggttggggatttgtttcactacggggaaaagggggaaaactgagaagggtttccgggggctcggggctgttagggggtgaacttgcgaacagagaagggaagaggagtttgtttagtaaggattatcgttgggggcattattggagctggtaggtagggggggctagggtaaataaatgagagaaacggggttaaataaataaataaataaaaggaagaaaaaactctggaggttgaccggtggatattagagtagaagaagaagaagaagaatcccaaaaagagaaaccaactcaaacttgttttatccatgggttgatcatcccaaaaaagtttgctttgtttgggtaaatgacccttaaccctgtttgtgaataataatagagttaggaggttccgatgacggtcgatttggacaacgcttccaccgcttcaggtgaagcagccagtgtctcttcctccggcaatcagacaaaacccgccgctccaaagaaaaaacgaaacctcccgggcatgccagatccggaggcagaggtgatcgctctgtcgcccaagactctcttagcgacgaaccgtttcgtgtgcgagatatgcaacaaaggattccagagagaccagaatctgcagctccaccgccggggtcacaacctgccgtggaagctgcggcagaggtctagcaaggaggtcagaaagagagtgtacgtgtgccccgagcccacgtgcgtgcaccacgacccttccagagcgttgggggacttgacggggattaagaagcacttctgcagaaagcacggcgagaagaagtggaaatgcgataagtgctccaagaagtacgcggttcagtccgattggaaggcgcactctaaagtctgcggcacaagagagtataagtgcgactgcggaaccgttttctccaggagggatagcttcatcacgcatagggcgttttgcgatgctttggcggaggagaacgccagatctcacactgttgtaaaagatatttcggagaatgattccaaggttttaatcggtgattcgccacccccgcagcctgttgcagccacggtggctgctactactgctgctgctaccaccaccaccactactactattacttctactacgcaggcaaatagtgttatgtcctcttgtttgcagacgcataacctagtttagatttgccagaaaacaatcccccacaagtcattgaggagccacaggctgctactgctactgctataagtgggagctgtggcagcagcagctcctgctcaactagcaatggtggtgctacttgtaatagtaacagtagtagtagtgtgtttgcgagtttgtttgcttcttcaacagcatctgtgaccctacaatctcaaacaccagcattcagtgacttgattagagccatggggcctccggaacaccctgcggatcaaatctcgggtccttcatccgaggcgatctctctttgcctctccaccactagtgcctcaccaatcttcgcaacaggtggccggcagtatgcgtcgtcttcaccgcacccggccatgtcagccactgcattgctgcagaaggcagcacaaatgggtgctgctgccacaaacgcctcccttcttcgcgggcttggcattgtgtcatcgtcacctttggattccacctcgtcgggacagcaaaatgtcctgcaatggggccaccaacagcagttggaacccgagagtggctcggtcgctgcagcagggctaggacttggtcttccatgtgaagatggtggttctggactaaaggaattgatgatgggaacttcctcaatgtttggtcctaaacacaccactcttgattttctaggattggggatggctgccggtggcactgctggtggaggcttatctgcacttatcacatctattgggggtggtttggatgtaactgcagcctttggcaatggagatttttctggcaaagatattggaagtagctcttgatatgatatcttttggtagtaagcaagaactgcacttatcagggcaaaagtatatgatgggggcctttctggattgtgttgccccctttaattgccagggaaagaaactgtgatttactgtgttagaaaacggaaggtggtacaagttacaatacgcttgctctggatgaagggtagttgttgaattaaggttgtttgcaacaaaagggtttgaactttggtatggttgtcgtaggttttggcgacagtgacacgtttgaagatagtatcatcttgtttcggctcctttggtctccacagttttgattaaatttaaattacggcattggatgctttggttcgtagttgttggcataattcaggaaactttgatgaggtagtagttttcttcaattgtcgatttattgtaacaaggtagttttccgcgtatgccccattgttttgtaccagtgaatggttgattgaattcttctagcaagtagtgtttttatgtaaatgtcataaagtattgtagtattcctttgtagataaaaatcctcttctaagaagctttatttaattgccaagtatagcattatgatggataattaataccttaattaggaaatcatgtgatttattttcttgccgcctgagatgtggttaaaagtagacaacatcatgaaagttttgatattcttgttaggctatgtgact

SEQ ID NO: 85993 - DNA, 1182 bp, Glycine max
  Clone ID: PAT_MRT3847_48665C.1
ctcaaacttgttttatccatgggttgatcatcccaaaaaagtttgctttgtttgggtaaatgacccttaaccctgtttgtgaataataatagagttaggaggttccgatgacggtcgatttggacaacgcttccaccgcttcaggtgaagcagccagtgtctcttcctccggcaatcagacaaaacccgccgctccaaagaaaaaacgaaacctcccgggcatgccaggtagttgtagtaaaagtaaaacaaactaacaaacacgcaccaatttcaattaaatctcttctttattccttttttcttatcagatccggaggcagaggtgatcgctctgtcgcccaagactctcttagcgacgaaccgtttcgtgtgcgagatatgcaacaaaggattccagagagaccagaatctgcagctccaccgccggggtcacaacctgccgtggaagctgcggcagaggtctagcaaggaggtcagaaagagagtgtacgtgtgccccgagcccacgtgcgtgcaccacgacccttccagagcgttgggggacttgacggggattaagaagcacttctgcagaaagcacggcgagaagaagtggaaatgcgataagtgctccaagaagtacgcggttcagtccgattggaaggcgcactctaaagtctgcggcacaagagagtataagtgcgactgcggaaccgttttctccaggttcgtttccctttctctctcttgcttgattgtctaatttcttttgttttgtttcgctccactctaaaaaaagcctttgcttggttgttgggatttgaaggagggatagcttcatcacgcatagggcgttttgcgatgctttggcggaggagaacgccagatctcacactgttgtaaaagatatttcggagaatgattccaaggttttaatcggtgattcgccacccccgcagcctgttgcagccacggtggctgctactactgctgctgctaccaccaccaccactaccccacgtgtccgcggacgcgtggcgaatagtgttatgtcctttggattgcacacgcataacctatatttgccagataacaattccccacaagtcatttgaggagccacaagctgctactgctactgctataagggggagctgtggctgcagcagcttctgctcaactagcaatggtggtgcttct

SEQ ID NO: 85994 - DNA, 413 bp, Glycine max
  Clone ID: PAT_MRT3847_48666C.1
gttgagtctcatcatttgtttcttccaacaatcccccaattgcaccaaacaaatgatgagactcaacatccaagtagttcttggccagcaccactagtgcctcaccaatcttcgcaacaggtggccggcagtatgcgtcgtcttcaccgcacccggccatgtcagccgctgccatcgctgcagaaggcagcaccaaatgggtgctgctgccacaaacgcctcccttcttcgcgggcttggcattgtgtcatcgtcacctgtggattcctcctcgtcgggacagcaaaatgtcctgcaatggggccaccaacagcagttggaacccgagagtggctcggtcgctgcagcagggctaggacttggtcttccatgtgaagatggtggttctggactaaaggaattgatgatgggaa

SEQ ID NO: 85995 - DNA, 1185 bp, Glycine max
  Clone ID: PAT_MRT3847_48667C.1
ccacgcgtccgcctatttccgcacctcaattagcaggagggaagatgatagtatctggaaattgtagaaggatgggtgcgattgggaaatggttacatcagaagcagtacggcaatacgaacgtctccgttaagaagaaagaccgggcgcgcgtggaaaacgcgcgtgtacattctgcgctgtccattgcggggttagcctctgcggtggctgctgtggcggcaacagaggaccctcgcggtggctctcgttctaaattggacgttgctctcgcttcggccacgcaactcttggcctcttattgcgttgaaatggcggaggtagctggcgcggatcgcgagcgcgtggcttccaccgtcaggtctgcggttgatattcaaacgccaggggatctaatgactctcaccgctgcggctgcaacagctttgcgaggagaagcagccttgacagcgagaatgccaaaagaagcaaagaagaatgcgtcaataagtccgtatgataaagtgatagcggaaacgcagtggcttcgtgcgtttgacggtcaggtgttggaacgttatcctccgtgcctgggggatttgttgcagctcacagaaaaaggtgctttacgatggagacatgtccatgtttatatcaagaaatgtcaggttaaagttaagatcaaaagcaagcacgttggaggagccttctccaaaaagaacaaatgtgtggtgtatggagtctgtgataaagataatgcatggccatatagaaaagaaagggaagcatcagaagagctttattttggcctcaaaactgcacaaggtcttctagaatttaagtgccagaacaaactccacaagcaaaaatgggttgatggagtagagtttttgcttcgtagggttaactctgttgaagcaacagagcattctctagaatttttaagtattagtactagtacatgatttgtttggattgtatatgcctataggatttagaagagtgaaacataaaaaattttgtcaaacaaatgctaccctctacattataagcaaagaaacattactgttcaccgcaggggttgcttgtgaccatgcttgttaatagtaatacaaattgataagtgttaaaacccgtttaagatataaaaactattcaagtagaatagctttttttattaaaaaaaaaaaaaaaaaaaaaaaaaaa

SEQ ID NO: 85996 - DNA, 1773 bp, Glycine max
  Clone ID: PAT_MRT3847_48668C.1
tccggtccggtctcccgggcggctcgagctgcctgcgtgcctgcacatatcaaatatcagttcaagtattaaagaggctcatccataaaatctactctctcatccgtgagaatggtttctgcggagaaagattccaatgaaacaaccaatactcatccaaccatcatcgggaagtccatgcgaacggtgcgctccaaactattccaacacgaccgcgctgcgtgcgtctccgacaacttaaccggttcgctaatggagctcgcctcgcgaaacaacaaatccgttaaatcttccattacggaggagcaactcctcgagctctctcaagctctgagcgatttctccgcctgtagtagcgatatctccggcgagctccagaggctcgccaccgtttcctcctcccaacctcctcctgctgctcctcacgtcgacggccaaccccaacctgagcacgagccctgcctagggtttctccagagggagagcttctccaccgagatcatagagagcatctcgccggaggatcttcagccgacggtcaagatctgcgtcgacggactgcactcgccgtctgtggccgtgaagcgatcggcggcggccaagctgaggctgttggcgaagaaccgagccgacaaccgcgctctgatcggcgagtccggcgcggtggctgctctggttccgctgctccggtgcagcgatccgtggacgcaagaacacgcggtgacggcgttgctgaacctgtctcttctggaagagaacaaggcgcttataacgaatgccggtgcggtgaaggcgctgatttacgtgctgaaaacaggcacagagacttcaaagcagaacgcggcgtgcgcgctaatgagtttggcgttggtggaggagaacaagagctcaatcggggcttgcggggcaataccgccgctggtagcgctgctgctgagtgggtcccagagagggaagaaggacgcgctgacgacgctgtacaagctgtgttcggtgaggcagaacaaggagagggcggtgagtgccggggcggtgaggccgctggtggagctggtggcggaggaggggagcggaatggcggagaaggcgatggtggtgctgaacagcttggcgggcattgaggaggggaaggaggccattgtggaagaaggtgggattggtgcgcttctggaggcgattgaggatgggtcggtgaaggggaaggagttcgctgttttgactcttgttcagctctgtgctcacagcgttgccaacagagccttgcttgtcagggagggagggattccgcctctcgttgctctttcccagaacgcctctgttcgagctaagctcaaggccgagacactccttggatatttgagagaatcaagacatgaagcatcatgttcaagtccttagataagtaatttatacttaactaggtaattatataatgtaattggttgttgtacatatagtgtttttttggtttgtaactttgtacagtgtggattttttaaattagaagctagccagcacagctgtagtctgacccttgatgattagtctttttaagctaggttcagcgattttgcttttccttgttcaatgtgttatgtttccaggagttgtgttgtagtgttagtttccggttaatttgtcttttttttttttttttctttctcttaatctatttgttttgaaaacttccagtttttgtagaaaagccttgctgagttttttgtggttttgcctctcttgtagtgactgtgaaagtagaggttgtactgccct

SEQ ID NO: 85997 - DNA, 1101 bp, Glycine max
  unsure (1)..(1101): unsure at all n locations
  Clone ID: PAT_MRT3847_48669C.1
aattcggntcgagtggtgctgttcatttctaagactgtagcagatgctttcaatgcaaatatatatgacattataatgaaagccaagggtttgccttatttagaaactcatgctgaaccatatatgaggcagctatcagtaggcgatgtagtcacaggcccacttcagacatttaatggggttgagaaggtttgcaacatagtgtttattctcagaactacgggacataatgggtttcccgttatagacgagcctcctatttcgcaagctccagttttatttggcataatcctccgtgaccatcttctcacattgttgaagaagaaagcttttatgtcctcacctatggcaacaagtggtgatgtcatcaatgagttttcagcagatgattttgcaaagaagggttcaagcaaaggtcgtctaaagatagaggatatacagttatcagaggaagagatggacatgttcatagatctacatccatttactaatgcttctccttatactgttgtggagacaatgtcactgggaaaggcccttacacttttccgagagctaggtttaaggcatctgctagtggtacccaagttctccggtagatcacctgtggtgggtatactcacacgacacgatttcatgtcagaacatatattgggtttgcatccctttctggtaagaaacacagggaaaagtttaagattttaacacccttggctagggaaaaataaatttgggcatttgagcaacgcttacatattcttgcgttgcagaaggatttcttattcatgagaccagattaccagtgatatttttttttttttttttacacttcatggaagccagagctctaagtcatattacaaaaatcaaagaatgattcaatgagccctttatcaattattggtctttggtgcactttgacgaaggtttggtacttgaaagaaacattttggcggaagtgatccatttagcccatcccacctagtgggataagggcggtgttgttggtgttgtgntnnnnnncntnnncnaaaannntnnngntnnntnaaaggntnanngccccttatnggggggattnnnnnnnntnnnnnngnnnnn

SEQ ID NO: 85998 - DNA, 199 bp, Glycine max
  unsure (1)..(199): unsure at all n locations
  Clone ID: PAT_MRT3847_4866C.1
actgtgnananaaaggacaaacataaacgggctgtcctagagggttaaaatgagctttactactaattcctttccagcgaaaaagcctattttaagcttacatgggtagggccatattacaagcaaatgccttctttgtttaagtagactttaagctcaacacttaagcgttccaaaataaaccttatacggcgttgtt

SEQ ID NO: 85999 - DNA, 409 bp, Glycine max
  Clone ID: PAT_MRT3847_48670C.1
gtggaagcagggtaagtcagggaatgtgcctagagtggtgcttgtggtgacgaagattgacttgttgcctagttcattgtcaccaacaaggttggagcattggattaggcagagagcaagagagggtggaattaataaggtttctagtttgcacatggtgagtgcattgagggattgggggctgaagaatcttgtggataatatagttgatttggctggacctagagggaatgtgtgggctgttggagcacagaatgcaggaaagagtactttgataaactctatagggaaatatgctggagggaagattacacatctgactgaagcacctgtgccagggactacactaggcattgttagagtggagggtgttttttcaagtcaagcaaaactgtttgatacacccggg

SEQ ID NO: 86000 - DNA, 862 bp, Glycine max
  unsure (1)..(862): unsure at all n locations
  Clone ID: PAT_MRT3847_48671C.1
gcgccctcgcgtacgcaaaaatcgttttcgcctgaaaaaaagtccctgcgatcaactccggcgaactctgccttcgccggtcagatcgtcgggattgtgaatgttttcttgcgtgaagtctcataattaaaccgcaatttgtactgagtgacacctcactgccaaaagaggccgaaagaatggttcccttttccaacatactggggcacgaaaagtgtgaaagctacttaatttttggcggagaaactacccttggagataattttcgggcatttttttacttcctttgccttgcttattgttttatcggattatcggctataactgctcgcttttttcaatcgatggaaaatgtggtcaagcacacaaggaaggtagtggaggtttgggacccggaacacttgttggttctgcagcatttgacctgttccccatccacgctgtttgtgtagtagttccaaaagcaggagagctgaagaagattgctgatctaggagtatggctgggggagctgttttggtcattctgggcttacatttggttatacataattttggaggtatggactccaaacgttgtgactctctgggaggcattnnnnnnnnnnnnnnnnnnnnnnnnnnnnnnnnnnnnnnnnnnnnnnnnnnnnnnnnnnnnnnnnnnnnnnnnnnnnnnnnnnnnnnnnnnnnnnnnnnnnnnnnnnnnnnnnnnnnnnnnnnnnnnnnnnnnnnnnnnnnnnnnnnnnnnnnnnnnnnnnnnnnnnnnnnnnnnnnnnnnnnnnnnnnnnnnnnnnnnnnnnnnnnnnnnnnnnnnnnnnnnnnnnnnnnnnnnnnnnnnnnnnnnnnnnnnnnnnnnnnnnnnn

SEQ ID NO: 86001 - DNA, 313 bp, Glycine max
  Clone ID: PAT_MRT3847_48672C.1
tcgctacgggccaccatgcctcctggttagaagtttccatttgttgaaaatttgacatttgaatcaggacgattctttgttttttacgccttattctatttgtttggtttccaatagcctgaaaatgcaaacaatgacccgaaacttcccactttccaccagagcagaataaactttttatagtaaataagtttttaaaaagagattactggtttttataataattggtaatcgacaatataaaaatctttacacagtacaaacaaatttatctctttttaaaaacttatttactataaaaagtttattctgc

SEQ ID NO: 86002 - DNA, 555 bp, Glycine max
  Clone ID: PAT_MRT3847_48673C.1
acaaagcaaaagcctcaacaaggaaaaattaaactcattcacaaataaataaaaaatgtaaaattaccatgttgtgtcgggatcctttggctcacagaagggtctattcttggaagagttgtgtagttgtcctccccatcattcactctaaatctgatagaggcaaagaaatctcattgccaataagaagcattgcttctttatagttataaaagaataagtatgtacaacagttagaagtttgtgaattttatgtctgcattacatattcatcatgtcaattttagtgcatgtaaacatttttttgaaaataaactcaatgtttgaatacatcaaattgttaatgtgacttaccaaaatgtccccccataccatgtccttaagagtttctggcacatttttccaattgctgtggacaatggggatcttttctcgagctacaacccctaaaaaactgtggaacttttgcttctctgggcctgatgctcttccagttgcaggatccacattaactattggtctaggctgatctaaacttcttaaagtcaaccttct

SEQ ID NO: 86003 - DNA, 229 bp, Glycine max
  unsure (1)..(229): unsure at all n locations
  Clone ID: PAT_MRT3847_48674C.1
gtttgttaaccccccngagggagaacaaaaccaggggggacttaggacggcgaaccgggccggacaccggaggaaccgaagtcggccaaaaagccaaacacaacccagaacgcgacagggaaacgcaagccaaacagtgaagcctaagacaccaatgggggagactaggaagaaataaggggagatacagaactcaaggatggtcacttcagaaacccggcaaggccag

SEQ ID NO: 86004 - DNA, 260 bp, Glycine max
  Clone ID: PAT_MRT3847_48675C.1
gctgccacaacctcaaaggaccactaattgattattgtgtcttaaacaatctccctcggggagaacattcacatgtgggacgggaaaaaagaaaataagaacaacgcaggttatccatacgtccacaatgattgctctgacattaaggctccttcgtgctttcaagcgaaaaatgttcccacaaccctcatctcttgtactgcatgaaccacaactgcttttcagaggctcagacgtacagtgtttgacgacttctactc

SEQ ID NO: 86005 - DNA, 353 bp, Glycine max
  Clone ID: PAT_MRT3847_48676C.1
ccttaacacagaacttgaaaagacgccttgttgaggctcatggccataccggcaggagaggggtcactacgccaacatgcgggtggcattttcaaacgtaagtgacaattagacccccgctatcgaagtgctactttggaccgggggggagcggatcattgtgtcacatgatgcgtcgcttctaggttcttttcatacgaacttccaccctcagcggcggctcttaccgctcagggcatcctctgactgggcttggcttccgcctctccggctctatcccttagcccctttatacaacgttttagagcgccttggcgcgcagtattgccctcatcaattgggcggcgaatacc

SEQ ID NO: 86006 - DNA, 300 bp, Glycine max
  unsure (1)..(300): unsure at all n locations
  Clone ID: PAT_MRT3847_48677C.1
ggttttggttttttttttttttntccntnnnaaaaaaaaaactaaactggattcacctttaccttggcccggtcccaaaacaaataggggggggagatttttttttaaaatgcaaaacggcctgggaaaaaaaatcttgaggatgggccttttgggctcaagaaaaaaaggaaccccttttttttccccccaccttggggggggcttattttgtgtgggaaacctttttattcctcccacatttcttaccaatgtgggggccccccttcccccttgtggtgatcccccccttaaaaacaa

SEQ ID NO: 86007 - DNA, 353 bp, Glycine max
  Clone ID: PAT_MRT3847_48678C.1
ccaacaaaaaaggcaaaaagggtgggtttttttcagggaacccatgatgttcttcggaggacataaacatgaacacaaggcaatgccttaaatgccgcatactagctataaactctattacaaatgtcttgggagactactatcacacataattaatccaagggtgaaatcttaatcatcaaccttgctacacacgcactatgaccaatgatgcctatgatgaccaaatgaagcagcaagtctcggactacagaatccttaaaagcgctctcaggggccacaaccctgaacccgaattggttgtatgcactaggatcctgggtcaaacccatggaacagcggtaggtacccaa

SEQ ID NO: 86008 - DNA, 241 bp, Glycine max
  unsure (1)..(241): unsure at all n locations
  Clone ID: PAT_MRT3847_48679C.1
gggttttaagagagagagagaatnattagaaggcncttgccttcacctntggtgtccaagntattgntagaganaanaactagttgttcaattagcttcatccatctnctcaacctccttaatnctctttccctnactncttcttccacccttcttgtgtttgagtacagaagcttgagatcagacgtgtcgagcngcagcatcgatgttgcgcctgagcaacngtgctggatnccctgaa

SEQ ID NO: 86009 - DNA, 381 bp, Glycine max
  Clone ID: PAT_MRT3847_4867C.1
cttacgtgtacgcttttcttggggaactgtttgaggagccgtattgagagcaggaatggattatggatatccatcgcaggatccaacggtatctgaacagttatatgtacagtccaatcttgctaccaatcacgctacaaactgctctaccacctgtagtaccactggtggatgcttgcatggtggatggcaggatccaggcacggtacacgcgacggcacacacacgggatgataaatgtgtgttggaattcctgatggactgactgatggacggtgtgtccaagactgctgccaatacaattgaacgagcaaacttgctaattcagaagctgaatcaaaagcacaagaaagggactcagactgaaccattcacaggacc

SEQ ID NO: 86010 - DNA, 217 bp, Glycine max
  Clone ID: PAT_MRT3847_48680C.1
tagaaaaaatgtttacaatgttgataaaagtgatggcattgttgttgggatcataggtctcttaggtgctatagcagctacacgacatctgagatttggttcccgtgctggtcctgatacaacaagcaacctctttggtgttggactccatgacacacgcggtactatgtttgaagacactgtttctcttctactttatgctctacagaatgctttt

SEQ ID NO: 86011 - DNA, 603 bp, Glycine max
  Clone ID: PAT_MRT3847_48681C.1
agaagaagaaatgcttaattaagttgtttactaaacgatgattatataaaaaacaaggttttgccttaattaaacctgacaaatattttgcgagaaatcaatcaacgtcaacggtacttttttttttatatatataaaaaaaaccacattggtactgaatttagtaaactctctgctaaactagtttcttgtctctttttttttttttcaattgtcttaatattcataaactatgatactgattggttaaaagattcgccttacaatgtaattctacaatttatataaactaataaattaaaaaatagaaaattgatacattaaccaagaaaaaagttaagtagtagttgacacataacattatgcaatatgtaacatcccaaaattatccaataattattttaaaagattgtttaaatatatctttcaacaaaagaaaatactaggttgttataatatttttagtaaaagaaaatattagggatattaatataatatttattagataattggtttaaagataataataatataaaaaagagagaaattggctttagccaatttaaagccactgaacgtgaattgtttcatgtaaattattag

SEQ ID NO: 86012 - DNA, 400 bp, Glycine max
  Clone ID: PAT_MRT3847_48682C.1
ttttaaaaaggcccttttgagacccaagcatcacgactgatacaataatcggagccaacccatgcacatccttaaacagatgtggatacaggccctgcacgagaatgcctaagatatccctaggcggtctaatattctacgagagagctgatataatgcacttacctgtggtaagataactacacctatattgcagaacgtcgccgaatatgtagggacgcagatctactacgcaatgtctcggctcgtgggactggcccattgactcggataggggagcacctgcctttacggatggtagatagagataggcattgaaaacgccggggggtgactcagaacatatgcctatctctgacaatgccttcccacttagaatcgtggtcggcatagtatcctt

SEQ ID NO: 86013 - DNA, 579 bp, Glycine max
  Clone ID: PAT_MRT3847_48683C.1
ggaattcggcacgaggtgaatgattaaaaaggtgaagaatgccatatatcaatatgagacaaaggaggagagtgaaggatcaaccttttattaggtagtacactccatattaattgatcgttggactaagagtagcactcctctccattgtttagctcattctttaaatcctagatattatagtcatgaatggctaagtgaagattctaatcgagttcctccacatcaagactggaactcactcgtgaaagattaaaatgcttcaagaggttctttcttgatgtggatgtaaggaggaaagtaaatattgagtttgccaacttctcggatggaagagaaggttttgatgatcttgattctttaaatgatagaggtcaaatggatccaaaagcttggtggctagttcatggcattaatgctccaatacttcaaaaggttgcccttaagctacttgcacaaccttgttcatcttcttgttgtgaaaggaattggtgtacatattcatttatccattctttaaagagaaacaagatgacaccacatagagctaaagatttagtatttgttcatagcaaccta

SEQ ID NO: 86014 - DNA, 301 bp, Glycine max
  Clone ID: PAT_MRT3847_48684C.1
caaggagcgcttcatgcctgcaacgcgtttatcttttgaagaaggttatccattgcgtacgcggtactgtgaacaggcgagacgcactaacccatgcaggactacataggtatatggaaactcatctgatggctgcatgctacggctattaacatccttccaagcatccacatacgggttgagaaatccacgaccatcactatcagggacttgacagaacatatctaaagagccaggatcttggaacatagtgtcttgctactgggatggcaggacatgagactctctttgctctggcatt

SEQ ID NO: 86015 - DNA, 1714 bp, Glycine max
  Clone ID: PAT_MRT3847_48685C.1
cccacgcgtccgacggctgcgagaagacgacagaagggtacggctgcgagaagacgacagaaggggaggtttgaagcaagcaagttccgcaatgagtgaacccagatagagagatagatagtggcgcaatccgggtttggtttgtccccaaataacagaaaatgacgatgctttccaagatatcatcatcactgttactatcactatcctccaaacccaaacccaaacccatttgcaacccctttctgctttctcgttcagccgccacaaaacatcagaagaataaaaaggagaacgcaaaagcagcgttggcgaaggagaagcgcagaacccgttccgataagcagttcaacagagacgcaataatcgagcgttgcagcataaacgacattgacaccgacaccaagttctctcacgttcccgtgatgctgggcgaggtcttggacgtcttttcctccacactaacctccttcgtcgattgcactctgggcgccgcaggtcactccaccgccgttatcaaggggcatcaagagttgaagtatttggtggggatggacgtggactctgtcgcacacgacatcgcccagcctcgtcttgatgccgttttgaacgctggtgtcaaagcgattaccgttttgaggaattttagagacgtcaagtctgtgcttagagaatttgctgagctacacttgggggttgacggcatcttaatggacttggggatttcatctatgcaggtagatgatcctgtgagaggattcagtgtgcttggtgatggaccacttgatatgcggatggatcctcaggcaagtcttaaagcagaagacatattaaattcctggccagattctgaagtgggccgtatcctaagggagtacggggaagaaagtaattggcgaactctgcaaaagaaaattgtcaatgcccgattacatggtggattgcattcgactagtgacttgctcgatcttattcggcgcgtggctcctccaatgagaggtggacggcaaggttggataaagacggcaacccgggtgtttcaagctctgagaatcgctgttaatgatgaactgaagacacttgaggattctctctattattgttttgattgccttgcacctgggggtaggcttgctgtcatatcttttcatagtctagaggacagaattgtgaaacagacatttcttaacataatcaaagggagcaaagatgtggaagaaagggagagcctcaacagtgatttgaggaagactagtgatgaaatcaaagaaaaagaagcatggataaagcaagtaatatatggatcaaatggaacaattctcactaaaagaccaatcacgccatcaggagaagaagaaaaattaaaccggcgaagtagaagtgcaaagctcagggttattcagaagcactgaagatgataaaacatggcaaattgtagtttagtgtagagtttttagaaatacctggattcataatcttgtcggtaacttggttaatctttattaaaaaaataaaaagttgctatgttcacaagtcctctttaaaagagaaaggtcaaaagggacttgtgcatacggttgcaaattacctgatgtctattttaactagaaatttctagcaaattactgtctaaagatttggattttagtaattcatctgcttaggctttaaacattcagcagtttatatgtagttgaagtcctaatttaattgt

SEQ ID NO: 86016 - DNA, 690 bp, Glycine max
  unsure (1)..(690): unsure at all n locations
  Clone ID: PAT_MRT3847_48686C.1
tcaatgcccgattatatgncggattgcattcgaccagtgacttactagatcttattcggcgtgtgactcctccaatgaaaggtggaaggcaaggttggataaagacggcaacccgggtgtttcaagctctgagaatcgctgttaatgatgaattgaagacacttgaggattctctctattcttgttttgattgccttgcacctgggggtaggcttgctgtcatatcttttcatagtctagaggacagaattgtgaaacagacatttcttaacataatcaaagggagggaagatgtggaagaaagggagagcctcaacagtgttttgaggaacactagtgatgaaatcaaagaaaaagaagcatggataaagcaagtgatatatggatcaaatggaacaattctcacaaaaagaccaatcacgccatcaggagaagaagaaaaattgaaccgccgaagtagaagtgcaaagctcagggttattcagaagcactgaacatgataaaacatgacaaattgttgtctggtgtagagtttttagaaacatctgtattcataaacttgtctgtaacttggttaatctttataaaaaaaacaaggtgttcacaactcgttaaaagagaaaggtcaaaagggacttgtgcatacggttgcaaattacttgatatctattttaactagtgatttctagc

SEQ ID NO: 86017 - DNA, 1025 bp, Glycine max
  unsure (1)..(1025): unsure at all n locations
  Clone ID: PAT_MRT3847_48687C.1
agaggtaaatctgacattccaattggtcttgttctcttagaaacatgatcaattggaatgtcagatgaggtaaatctgcctgtcaatgttttgtcagcaacgttccctggtcatggtcatggtcaggcttttaatgcacctgatgacttgccaaagactgccatgcgaagtctgaaccaaggctcatctcctatgagcatggactttcatccagttcaacagacactgcttcttgttggtacgaatgtgggggacattgctttatgggaagtgggctctagggagcgattgctcatgaggaactttaaagtttgggatcttagtgcttgttcaatgccctttcaggctgctcttgtcaaagatccaggtgtttctgtcaaccgtgtgatttggagtcctgatggggctttattcggagttgcttactcaaggcacatcatccccgccatggtaagaggtgagtgagagtatattaggacatttcttgcaggagagagaaagtggaatagaagagaagagagagaaagagaaaggtttggtcttttggtgtttttggtctcttctctagttgtgttgtggagtggtggtggtggtggtggtgcgttctatattcttcgggggacctttctttccgtgtgtgtgagagagcggggaagatctagtttaccgtcgctcattnnggcgctggtctaatcgaagacgaggcgggtacgatgtcatctctaagtagggagttggtgttcttgatcttgcagtttctggatgaggaaaagttcaaagaaactgttcacaagcttgagcaggagtctgggtttttctttaacatgaaatatttcgaggatgaagtgcacaatggtaattgggatgaggttgagaggtacctctctggtttcaccaaagtggatgataataggtattctatgaagatattttttgaaattaggaagcagaagtacctggaggcattagataagcatgatcggtctaaggctgtanaaatattantgaaggattgggaagggttt

SEQ ID NO: 86018 - DNA, 179 bp, Glycine max
  Clone ID: PAT_MRT3847_48688C.1
tggtcgtccttttttttaatattcatagagcatctattttgaggtaaaatcatcaatcagaaagagtggacttttgatctccatagggacatgatcaaagtcaagtggtacagattgcttaccagatgcaaaagtgtgcttacacacgcggctttattattattcaactacctaattgt

SEQ ID NO: 86019 - DNA, 170 bp, Glycine max
  Clone ID: PAT_MRT3847_48689C.1
ataagccggaacaactcaaagtcaacttcaaatcactttacacacaatatatattattacaatggttccatgaccctatgcgattgcgctactcttctgtgactgtctcttcttgtcttcttatctgatgaatgacatcacttagaaaaatgaagttcgaagattgacga

SEQ ID NO: 86020 - DNA, 234 bp, Glycine max
  Clone ID: PAT_MRT3847_4868C.1
gacgacagaagggggtggcccggggtcttttgctggctccggttggccggggtcctcgggaagctcatctgccagcatgacggtgcgacgctcggccgcagcagattccatctccgaggctcctcctaagaataaggttgtcctgaaggatgtgttccaggtttttgctgagaaggttacatctcataacgaattggtttcatcgttggctgttcgtacacgttacgcgtgttg

SEQ ID NO: 86021 - DNA, 758 bp, Glycine max
  Clone ID: PAT_MRT3847_48690C.1
aaaagactggtgatcacaagtctgaggggaaaggctggggaatggagctggaacccgcccaggcgggccggtcagcggtgccctagtcccaaacccatcccttcttcccctcttctctagacaccgacagaaattaacccttctgtttcttgttcctctgtttttttctctttctcagagaggctattataccgaacctgctctttgtttcttgttttcacagatccgacccaaactacagagaatgtcagaaacacctcaaaggaagaaagcgagccttcccccgaaaagaggtcagatcaaggctcaaatttttactagccttgtgaattcagtggcctccaccatctcaaaaacgggggaatcgcttcgaaacgttattggaaatggtgtgaattcaggttcaggttatgcatcttctaccccacccccaagtagtggctacaactctgagaccaactcctccgatgtcacctagaatcaatcaagtgggcttttgtacgtggcttaaccaatgtttttgctggttgaccaggaacttttccttaaactctgctaatgctagtgttgttttccaatgttttagagagatgacagaactagaggagctacctactctgtctttttatctttgttttcctttatgctttagttttttttgagggatccttcatgctttagttaggatactcgccttgcgtatgttatggcatgtacttttttcttgcagctataatattattacgaaacttttccca

SEQ ID NO: 86022 - DNA, 401 bp, Glycine max
  Clone ID: PAT_MRT3847_48691C.1
tcattctcataacctcaatcacccccccttttactcgctctttccttcctctggtggcgggaatgtctactcctgctaggaagaggctgatgagagacttcaagaggctgcaacatgacccgcctgcttggatcaatggtgccccccacgataacaacataatgctgaggaatgctgtcatatttggtcctgatgatactccattgtatggaggcacgttcaaattgacactccaatttactgaggactattcaaatataccacccactgttcgaatttgatgtctcgtcatgttttattccataaaattaagcctgatgggaagaattgttagggatattatttcaaaattcaaggggagtcctatctatttatgtggctggtatacttacaattattca

SEQ ID NO: 86023 - DNA, 544 bp, Glycine max
  Clone ID: PAT_MRT3847_48692C.1
cttctttcttctttgtactctccttcccggagtctctcacggcacctccaccactctccgacaaccaccgtcgtcgtcggtgatctctctagcaccaatggcgtaggccccccaagctccaacccaccttcaagatctgttagaaactaccgcaccaccaccaagatctgccaccgccaccatgagatatgccagaacccatcatatcactagccacgcgagctgccaccccataattgtttccaagaagtacaccgttcaaaaccatggtggttgacggtgacgccgacgaaggtcctacaaaggcgtaaccaagttgcgagcctcatcgtcgacgatgagaggtttgtgcggcggacgcttcataaaagagaattgtagctctcaattccttccccgatgaccccctttccctcaatctcatcatcggtgtttttttactttccttctttagctatcaattgtagctttttgttttcagatctgagctttatttttgaaatatgaatttctcaaatctgattcaattgtagctggaatctaa

SEQ ID NO: 86024 - DNA, 599 bp, Glycine max
  Clone ID: PAT_MRT3847_48693C.1
ctcgagccgctcctcccttcttctcttcttccaacttctgttaaacttggcatattctccacctctcactcaagtaattaatcctaatttttttatttttcttcaaatctgtatactctctacactgacagaaacccttctgtttcttgttcttttttctttttcagaacctgctctcttttttctttttttttcttctgattttcacagatccgatccaaactatagagaatgtcagaaacaccccaaaggaagaaagcgagccttcccccaaaacgaggtcagatcaaggctcaaatttttactagccttgtgaattcagtggcctccactatctcaaaaacaggggaatcgcttcgaaacgtgattggaaatgggggcggttcaggttctgcatcttctaccccacccccaagtagtggctacaactctgaggccaactcctccgatgtcacctagaatcaatcaagtggcttttttctacgtggcttaaccaatgtttttgctggttgaccaggaacttttccgtaaactctgctactgctagtgttgtttttgagagatcacagatcttagggagcttacttcctaccctgttt

SEQ ID NO: 86025 - DNA, 483 bp, Glycine max
  Clone ID: PAT_MRT3847_48694C.1
gcggctcgagatcaacgcggtgttatcactgttgtctccgctactgcatagactacgagctgcatctatgacgcctgcgctacatgcacctgccatgtgctatctgactaagtgttttgagcctggctgggcgtagacctatgattgactgatgctgtacacgctcattgggtagcagcttccagaaaggcattcgctcgagggtccccggcgcacagattgcctctggatgctttacgaatcacgctgaagaacagcgcacgagagtaaacagacccttagaccgactatgccacattgaaaggtcctgactatgatagctcagacgaccaacatgacgttgcaagacgaaacgattcgcgttacacacttttatcagctccacaagttgctggtactcactatgcagtcatgagcttctacgagtacctagagactgtttttcgccagtacttgtacgacgacatggaaagattttacatt

SEQ ID NO: 86026 - DNA, 433 bp, Glycine max
  Clone ID: PAT_MRT3847_48695C.1
aagtattcctcgagatatatattattctatttccaccccacaatattaaatatttgagtatgcaaaatcttatgactttgggtgtttgtattatttaaattcaaatttccttttatcttttttttttcttcctggttagcttgctagttactcatttaaattgtgaaataatgctcattgtatgaactgtgaacttcttcccttgattttaatattttcttctgaagaatgtagagtttgatgttccagaaaagattagcataattaagattaacttggagagtgaataaataaatagtaatataaattaatttgcctaaattgagtagaaattgtttaggtgagcatagtttacgatattacaaatttgaattgttattggggagtgtgaataggtaattgagaatgtcaatagccttatgtgagtcctgat

SEQ ID NO: 86027 - DNA, 2605 bp, Glycine max
  Clone ID: PAT_MRT3847_48696C.1
gtgcgggccccggcccggttttcccgggtttgctctctttctctctctcaccttctttgctttctcactaatcactataaaaaaaatcttcactatctgtccttccaccacacaattcaataccatttatcaaactcactcatcaattctcgtttgttctcactaactattacttcatcatgtcgtcgagcacagttggtcaagtcatcaaatgcaaagctgcggtttcatgggaggcagggaagccacttgtgattgaagaagtagaggtggcaccaccacaagctggtgaagtgcgtttgaagatcctctacacctctctttgccacactgatgtttacttctgggaagccaagggccaaactccattgtttcctcgtatatttggtcatgaagctggagggattgtggagagcgtaggtgagggtgtgactcatctcaaaccaggggaccatgccctcccagtgtttaccggggagtgtggagaatgccctcattgcaagtcagaggagagcaacatgtgtgatcttctcaggatcaacactgataggggtgtcatgatccatgacagccaaacaagattttctattaagggacaacctatttaccattttgttggtacctccacattcagtgaatacactgttgttcatgccggatgtgttgccaaagtcaaccctgctgccccacttgacaaaatttgtgttctcagttgtggaatttgcacaggtcttggggctactatcaatgttgcaaaaccaaaacctggttcttctgttgccatttttggacttggagctgttggccttgctgctgctgaaggggcaaggatttctggtgcatcaagaattattggggttgatttagtttctagcagatttgaagaagctaagaagtttggggtcaatgaatttgtgaacccaaaagaccatgacaagcctgaaacaagaggtgattgctgcaatgacgaatgggggtgcggatcgtgctgttgaatgtactggcagcatccaagagccatgatctgtggtattcgaatgcgcccaggagcgttggggtgttgctgtacttgttggagtgccacccaaagatgatgcattcaaaactcatccagtgaatttcttgaacgagagaactctaaagggtaccttctacggaaactacaaaccccgcactgatcttccttctgttgtggagaagtacatgaatggggaattggaactggagaaattcatcactcacacagttccattctcagagattaacaaggcttttgattacatgctgaaaggggagtccatcagatgcatcattcgaatgggggagtaaatctatatcagaccaatgatgacatgacatggtccctgttgggggactgagttctctttctggttgtgaaaagaagaaaataaatttcatatatgatatatatccctttaggattattgaatttgtgaaaacttgtgagtttgagtgtagagaatgatagggcctttgctgctgttattgtctaatgcatgataaataaaatgtcgtttttttgtcgtgttgctcacagcaagaaatgtagaagaagggtctccaagcactggaaacactcaaagactcaggtctatccgagcttggattgattcaataaggtggatcgtgggggatgcaacagttttaacttagatttgaagaatctaagaaatttggggtcaatgaatttgtgaatctaaaaaataatgacaaggatgtagagggggagatgtcagttgatgacaactgagtttaagcactagctgttgaatgtactggcagcatccaagccatgatctcagcattcgaatgcgtccacgatggttggggtgttgctgtacttgttggagtgccaaacaaagatgatgcattcaaaactcatacagtgaatttcttgaatgagaggactcgaatagggaaccattctatgataactaaaaacccctgcactgacctttccattctgttgtagaagaagtacatgactggggaattggaactggagaagatgcatcacttacacagttccgttctttgaaagtaacaatggctcttgattatctgagatttgaaaagatgcataagatgcatcttaagtatgggggaattaatcgagtgaatccattgacgacaaagtccctgtgaatgcctagacttgtctttttaatttgaaaaagtcgtcattaagcatcaatagtgtttgtcctggatatatcaagacagaaatgactgactacagcggcttcttaacagttgaagaaggtgcagattgttctgtcaggctagcacggcttcccattagtagtccatcaggctacttcgattataggagtgatgtggcttccttttgattagtaatgcaactgttatgcttttgtttgtcaatttagtcagttctaaattacacgcaattgtttattgagacaactttaagcacattatatcgtgttggttactgctagtgcaacttggacggacaagatcgtacacacgaggaagaaggcacagaaggttgtggagctccccatttttggatttgaaattgattgcttgatttgagttcgaagttgagttggcaaaagag

SEQ ID NO: 86028 - DNA, 592 bp, Glycine max
  unsure (1)..(592): unsure at all n locations
  Clone ID: PAT_MRT3847_48697C.1
cgacaacaacagggccgtgaacccatagctattcgggcgagccttgcgcgacaacagcacttccatcctaaattcgacaccttcagaaatccaccctccaagacagaatggccgaccagagcgctgcttggccgattgctgatgctgcactgagccaggaaattctcgacctggtccagcaagccagccatgcccgccagctcaagaagggagccaacgaggctaccaagactctgaaccgtggtatcagcgagatcatcattctcgcggccgacactacccctctggctatcctgctccatcttccacttctttgcgaggacaagaacactccatacgtgtatgttccatccaagatggctctcggccgcgcctgtggtgtatctcgggcagtcatcagctgcagcatcactaccaacgaggcttccgatcttatgggacagatccgcgcactcaaggacaaggtcgaacgcttgatgatctangttgctatcttcgatgaaatttgatgtcgaagtgaatagagtcgctggcttctgtcaagtatcacttggcttagcaaaggcatcgncggaacagcctactcagtaac

SEQ ID NO: 86029 - DNA, 393 bp, Glycine max
  Clone ID: PAT_MRT3847_48698C.1
ctgctgatcggcgcggtcgaaaagcccaaagcatatagagggtccgaggacacttggacaacagcgaccatacagagatatgcgcgtgcatatatgcgtatgcacacggtatcagccgttatggagacaagatgatagctacgcgaggttttgactgcttaccaacctggtggaacactatggctgcatactggatccggatattgtgaaccggttccgatcatgcagatgcacattcacatagtcaaggctcatgggggggcgtctcaattaggcatgatgagtgaaccatcacgggagggataagatctttaactcgagatagactgctcgggctgaactatggtgcatatgagagcgatgtcaaaagggtctttcgatgactgataaatg

SEQ ID NO: 86030 - DNA, 452 bp, Glycine max
  Clone ID: PAT_MRT3847_48699C.1
cgaatgctgctagagcggtattcgttcagttatatatatgggtaggatttgctaatagctacaatgggtactattggtgaagcggaggacacatatgccaagatcctaggaagatggccagccttttactatggcatggggcacatgctcaatgacataactgctgcttggaggtgcacctatataggattgatcttgacagatattggactatcacctagcagacagaagctgcaacgaaaaggacaaagagcaagttactggtttagattattaactaaacacctctggcgtagcagggcagtgaaaacacaacttcaagaccccatggagagaatgcagctgctgtgatgctctcaagtcaagtggctgatggatatgccaccatacttgatggcgaactgatagacacgtgtggacactttaagatatggcatggtgctggatcttta

SEQ ID NO: 86031 - DNA, 320 bp, Glycine max
  Clone ID: PAT_MRT3847_4869C.1
gataaatttgagtataatggagcaacagagcttgtatttgatgtgcagttcatgttgaagagtgcaatgcatttttatggtttttcacatgaggtaagaactgaagcaaggaaggttcatgatctcttttttgatatcttgaaaattgcatttcctgatacggacttccgagatgcaagaagtgcactttctttctccagtcaagctactgccagtacagtaacatccccaaggcaagtggctgtcggccaaagcaagaggcacaggctgataaacgagatggaaactgagtcatacgctttgcagaggtcactgcaacg

SEQ ID NO: 86032 - DNA, 784 bp, Glycine max
  Clone ID: PAT_MRT3847_486C.1
cacgcgtccggaagcttctcaccaagatggccacgttctaaattggccaatgcgtcacctcattgccctaggaattgcccgtggcttagccttcctacaccaatcctcaattgtccatggcgacgtgaagccacaaaacgtcctattcgatgcagattttgaagcccacttatcagattttgggttagacaagttaacaagagccactccaggcgaggcctccacttcaacatccgttggcacactgggttacgtttctccagaagcagtcttaaccggggaagcctcgaaggagagtgatgtctacagctttggcattgtgttgctggaactactgacaggaaaacgacctgtgatgttcacccaagacgaagacatagtgaagtgggtaaaaaaacaacttcagaggggtcaaataacggagctattagaaccaggtttactcgagttggacccagaatcatcagagtgggaagagtttttactgggtgtaaaagttgggttgctttgcacagcacctgaccctcttgatcgaccaaccatgtccgacattgttttcatgcttgaaggctgcagagttggtcctgatatcccatcctccgcagatcccacctctcaaccttctccggcataataacccaaaaactgcaaacttttctgatccaacttttcattttttttgttgttttagtcaaaacccttttaagttgatttaagaagtgtaacattggtagttcgtggttgttaacttgtgtttttgtctccaccgggattctttcccacc

SEQ ID NO: 86033 - DNA, 394 bp, Glycine max
  unsure (1)..(394): unsure at all n locations
  Clone ID: PAT_MRT3847_48700C.1
cccttcccccgtcctttggaatttttttttttttattaacccctccaatttccttnnanncnnnggtccnnnnngggcctttttcaccacaaaaatttgccctttcctaattctgctggtccccactgaccgatttttaccggtttaaataactttaatggtggtgtgtgtaagaatgggacagtcaggggccaaaaatccaagaattaattttccaccccaccccccattaaaaattttctcaaatcctaagggcccatggtttccaccaaaagcacgctcacaggccaaaaaattaagccccccttaaaccactttttaagttttccaacttatggtcctttttccccctggaaaaataatggctaaaacactggggggttttggagctttt

SEQ ID NO: 86034 - DNA, 546 bp, Glycine max
  Clone ID: PAT_MRT3847_48701C.1
aaaaaaaaggggagccaggagggatttattgactccaaaaaaaataagggacacgttggctttatccaacaccttcttttgaaccacaaataaaggggtcggttatattattataaaaaagtttgcaaaagcccaaacacaaataggctatctcaaattgtcaataaagcacccaattgggtaaaaactaaagagcttttcgtcatgaacatttgaaaatgctaaaaagttggtgcaactttacagggcccatctttttggcctaggcccatacaatatgccctggaatcttccccgtaatctggcttaagtaaggttccaaacacaactgattttgaaacccaataagccggcttattggcccgggtgaactttaggatagccccaattataccctggcaaatgatttcaaccactccgggatttaaagggaaaaaagggccgggagactcgccccatttttcattagcccttgcaaccactggtgcctccaagattgaaggatgggagtaaagaggattgtgtatatctacaccggggatattt

SEQ ID NO: 86035 - DNA, 304 bp, Glycine max
  Clone ID: PAT_MRT3847_48702C.1
tgtttactggaatgtcattgttctatcaataagagagcctacaacaaactagatgcgctctggaggaggtaattagatacatttatacacttaccatccaatttgtacatgcataaataaaaccaatcaggccaataaacggacttgaacttaatggataggctcaacagttatgattccatggttaaggaactataacccatatttgttagaccaatgtgataagatcataaatgatggacataaagacctcgtgaaggaaattatgaaaacaatgctgatatggggagaaatacatagatag

SEQ ID NO: 86036 - DNA, 1363 bp, Glycine max
  Clone ID: PAT_MRT3847_48703C.1
cggttgcgaggggcagcatctaaggcattgcaacgaactgatcaaatggcacagagtgtggaaattcctcgtgtgaaactcggaactcaaggccttgaggtttcaaagttgggatacggttgcatgggccttactggtgcctacaatgatcctcttcctgaagaggaaggcatatctattattaagcatgctttcagcaaaggaatcacttttttcgacacatctgatatttatgggccagaccatgctaacgaaattgtggtcggaaaggctttaaagcagctaccgagagaaaagatccaaatcgcgacgaaatttggcattacaaagatcgactcttctggaatgtttgttaagggtacaccagagtacgctcgctcatgttgtgaagccagcttgaaacgtcttggtgttgaatacattgatctctattaccagcacagagtggacttatctgtacctatagaagaaacaattggtgaacttaagaaactggtggaagagggaaaagtgaggtatattggattatctgaagctagtccagatacaataaggagagcacatgctgttcatcccatcactgctgttcaaatggagtggtccctatggactcgtgacattgaggacgagataattcctctctgcaaggagcttggcattggaattgtaccatatagccctcttggtcgaggcttttttggtggcaaaggagttctggaaactgtgtcaacagttagctccctgattacacatccacgcttccgagctgagaacttggacaagaacaaaaaattgtatggcaaaatagaaagccttgctaccaaacaacagtgcactccttcccagttggcactagcatgggtgctccaccaaggcaatgatgttgtgcctattcccggaactactaaggtgaagaacctagatcaaaacatcggtgcagtatcattgaaattaacagaaagtgacctgagagaaatttctgaggcagttcccattgatgaagtagccggtactcgacactactatggatcggctaatttttcatggaccgttgctaatacacctccaaaagatccgagggtttaaacttgaagcactcgaaatcattttcaatcggacaatgcactaagttatgaattaggctagttgctgtttttctcattgtatgcaaaatcctatatatgggtattagtagttcaatttgcgagttaaatttaataaaatccaagtcaattatggcctcttggtgattgactgatggatatttggttggttcagttttgttgtttgcagtacgagtttgcgatgtgtaacaaaaaccatgaataatgttatatagacgtgagggtttgctccttatgtt

SEQ ID NO: 86037 - DNA, 391 bp, Glycine max
  Clone ID: PAT_MRT3847_48704C.1
ataagatgtaccagacatataaagggcatatgtttttcatcaagccaaaactttggggggggattttacgattaaccgttatgctggagatgttacatatcaagcagattattttcttgataaaaacaaagattatgttggagctgagcattaagctctttcatgcgcttacaagtgtgcatttgatgctaatatcttccctcctttaccagaggagacatcacagcaatcaaaattgtctgacattgcctcacaatttaagcaacaactgcaatctctcatggagacactgaatacaacagaaccgcattacataagatgtgtgaaaccaaatacagttctgcacccaggaatctttgagaacttcaatgtcttgaaccaattaatatgt

SEQ ID NO: 86038 - DNA, 240 bp, Glycine max
  Clone ID: PAT_MRT3847_48705C.1
ggctcgagactcaatcagagataaactgatacatccaccaccctcatcagtggcatgagaaggtgtgggcttttcaccaatgaatccaacataatctccctgcctaattctatccaaaacataacgaagcctgttaatgatggttttattatcaggtaacccatcaatatttactctggcttacttacccacctactgaaggaggccaagagccacggatcttactctggatatggttag

SEQ ID NO: 86039 - DNA, 469 bp, Glycine max
  Clone ID: PAT_MRT3847_48706C.1
atattcttttttttttatttacttttttttttttttttttttttttttttttattaccctatcccttttctttggatccttggggaacaaaaaaaaaaggatgacgaccgccattcaaaaaacccaaggtcctttttctgttgttccacgtaaaagaaaaaaaaagggggggggcccccatttttatggggggggcggagaaaaaacctacgaccctggctatggaaaaaccaaagattttagcggattaaagcggtttcctgttaaaaaaaaacgccccccgggggctggagggaaagcccgcatactcccaggagactaactcggctgggggcgcccatgccaaagacgggcttatggggggccccgatcctgttttctaaaacaaaaaatatgcacgaatacaaccttactccacacccgttgaaagcggcggggtggggtcgtccccgaaacagaaacaccataa

SEQ ID NO: 86040 - DNA, 799 bp, Glycine max
  Clone ID: PAT_MRT3847_48707C.1
accagagaaaccgcagaatggccttcaaatgctacacaagcccaaatcatcaatactaaaccccttcaaatacccatatataggtgggaaaaaatgacataccatctttcatcattcacctaaaccttcttttcctaccaatcaatcacatgtgttgcagaaaccgcttcatcgcctgcacctgctgcataatcatcaccctcttcttcatgttcataatttccatcatcctcttttggataatcatatccccatcaaatgtcaagttccatgtaaccgatgcctccctaacagaattcaacctcacaagcaacaataccttgtattacaacctaaaggtcaacgtcacagtgagaaaccccaacaacaaaatcgtagtgtactataggaggatcaaagcaatagcttggtacaaagataatgattttggttgggtgagcttaacaccctttgaccaaggccacaagaataccactttccttcaagcagtgtttgaagggcaaagagtgattaagctcaaacctaaacaacttggtgagtacaaagatgagacaagtgttgggatttacgaggacttggctgtggattttgatcttagaatcaaagcaaactttggaaggttcaagagtagtcgtttcgatccacccgttgttcagtgtcgccgtttgagggttcctttgatttctaatggtaaaactgcacctccttttagtgtcaccaaatgtaaaattgatggttctttctttgcagatcgtgattctcaagcagaagctagatagatgatatatatatatatatc

SEQ ID NO: 86041 - DNA, 201 bp, Glycine max
  Clone ID: PAT_MRT3847_48708C.1
tacggctgcgagaagacgacagaagggggaacctcaaaatcagcctctaatatttttctcactgtctctccagagaattgatagagagatggcagctgaacattggtgctggtaatggtgggactctctgagtgagacagacaacctctgcttgatggagcaatgtctcgtacgtatccaagctcatggactcgcgacaag

SEQ ID NO: 86042 - DNA, 393 bp, Glycine max
  unsure (1)..(393): unsure at all n locations
  Clone ID: PAT_MRT3847_48709C.1
ggaagaaggatcgtgctcacgtggagggtattgcaatttcatgcatttgaagtatgtgtcgagatcatttaagaaatcactggtccggcaaatgtatgaagagcatccggagtatctgaagaggaagaaagaacgcgaatcagaaaggaaaaggtctcctgaaagggctccacgaagaaagcacagcagntcaccccgcaagagaagtagacgttccaaatcccgttctcgtgatagagatcgcagagatcacggtgacagagatcgcgatagaagagacagagaccgtgatcgtgatgacagaagagatcgtgacagagacagagatagaaagcataaaaagagaagcgacagatctcgctcaggatcttctcccaagaccgtcgttccaga

SEQ ID NO: 86043 - DNA, 473 bp, Glycine max
  unsure (1)..(473): unsure at all n locations
  Clone ID: PAT_MRT3847_4870C.1
caccagaagacattgagcaagaaatagttttctttctttgtttgtattatttttaaatcttttaaaaaataatttttcttaaaaattcgaattcttaacgggtttttgaaaaaaaaaattataaaatatagtgtaaatctgtgtctcccaatccgaatttgcatggtgtataataaaattgtatgatttggaaaatacgaggagagttatatgtttgggtanttttttttctctatgtttcanaaaaagactctaaaagccttcaccagaaagctgaaagaactaaaaatgttaggtctttcggttcgcacggaggccaagagctagacgaatcttttgaaggagaggaacgatttttttttattcttgttcttttctcatctagattcggacacctttgtttatgattattaaccaatgttatctaatttttctgttatgaatcaaaagaaaatggtttcgatcagtgttat

SEQ ID NO: 86044 - DNA, 197 bp, Glycine max
  unsure (1)..(197): unsure at all n locations
  Clone ID: PAT_MRT3847_48710C.1
ctcggagcaggcgagggtacatagccaaaattatacagattatgggtagtgctttcaaaaataatggggtcanccgcgttctggatggtggagtgtagggggttnccatgtccaatanaagttagtaattatgcccttgaccaaactaagaatgaggacaaggttgagttgcgtggaagtcctgaatggccacttgt

SEQ ID NO: 86045 - DNA, 321 bp, Glycine max
  Clone ID: PAT_MRT3847_48711C.1
atggcgcatgctgtaaaacggcaggatccattcattgataacccacattatacggatgacctagacctctgtgagttcagcagcttgaagcacttgagcgtatgaatttacgctctggaactctcggactccgtatgaaactgtcttaattactgatgatcctgagtatgctaagtatatactctacgaaacatgtggtacgcacaagtgatctgactaggtagcatttgaagaggcacatgagactacggttgacgaggcattaaatgatgacccagttgactatgatgctgatgtggaacaggatgatgctgatgaatc

SEQ ID NO: 86046 - DNA, 440 bp, Glycine max
  unsure (1)..(440): unsure at all n locations
  Clone ID: PAT_MRT3847_48712C.1
gcaaatacttttaatcctcttatatcttactcaaacctgngacatccactatagatacagtatcattatcactttacaaccccccccccccatcaccttatccatcaataaattaaattctccaatctttcttcaattatcttaaacttttaaatctattctcataaataccaatctctttactttcataattaaaccctcatccctttatcctttttctccatttcttttctttttcaatatattatatttttccatttacttctaccatttccttcacctaaactaatatncattatattcccattaatttctaatccatcttaaatcatctttccaaaaattaaatcaaaaatacttcctcaaattttctttccttcaaattttccaacttactatataaatccccncccccaataaattttaattccattaaccca

SEQ ID NO: 86047 - DNA, 256 bp, Glycine max
  Clone ID: PAT_MRT3847_48713C.1
atgttaaatatcaatgggggaatgcaaccactgtcgcttggtggacacaatgcaaagaatgcaatgggtattggaggccatactccatccataagcagtggcactgccagtgatcctccatcattaagcggggttctgccaatgtgccaggaaacaatggatctaagtcatggcgtaatagcatcaactcagcatcgaatagtgattcttctgcagttggtggcaacaatcgattcaaccagagaacatctgacat

SEQ ID NO: 86048 - DNA, 419 bp, Glycine max
  Clone ID: PAT_MRT3847_48714C.1
atgcataaactgtcattatgcaatttctaatacagaattgttttctaataaatttgctattatagaactatttatattttataacatatactcctaaatagctgccagtaatccattaatggaactaacttagattttagttcccatcatacgaagttgtctagtcttcaataatattgtcttcaatgactctgattgggtggagctatggacaaaattatgcttattttcttcattgataactatactttcaccggctaagattgaattcaggaattcatcttcctttgtagtttcaaatggattccgcataacattgtcttcatttctaaaataggcattgttaaatgcatagtttggaaaggatgctccttcctgctcaatactagttcgagactgttgtattggagagaagcaat

SEQ ID NO: 86049 - DNA, 381 bp, Glycine max
  Clone ID: PAT_MRT3847_48715C.1
gtcaatcttttgtgcaaccttactcgaacgcctacggctgctaaatattcaaagcgtatggctcaattgtactgaatggtcaacagaatacaaagcaagctctcgtttactatgtagaatgagaatgatctatctcaaaactgtttcacatgccaacttctgcgaaccaatgcatacaaatagtgcctctaatagctgctaagatagaacaatctcagaagcacactgacatccattaagagaacatcatgccaatatcctatcagtaattagctgcagtatcgagttcaagcacaccttattaatgcttgcatctatgcactctgcaatgaggcacttgttgctataactaatgcagtagaaccatatcaggaactggat

SEQ ID NO: 86050 - DNA, 597 bp, Glycine max
  Clone ID: PAT_MRT3847_48716C.1
tttttttttttttttttttttttttttttttttgtccgtttcgaggcctatagtgggaccctaaaacgtttgaataatgggaacggaagggagaaccaaggaataacataggaaccgcgggagagaccaaaacaccgctacagggaggggaaagagaactagtttaaaaaatggatgaacatagggggtgtgagaaaaaaagtggcattcgctatgcctgacacaaaacagaccaaccgcaaaaaaaaaaaaacaggcgggggcaaagagggaaaaacctcgccccaattggggggagatcgctgcccgctcactagcagggaaaccggcccagcgaccccgtttaataaatgaaccacccccccccaaaaaacaagcggaaaatgccccgccaagggggaaaatttttgttcccccgagaggggagagataagggtgttatgaaaggacaacccgaaaaaaaagaattaacacagaggggccgcacacagggtgggacaatccgaatgcaaaaaaaaaaaagttttgatacccaggggaaaaaaaaacgggaaaaaaacccaggggaaataaggccgcgcgcgaaataaggatgag

SEQ ID NO: 86051 - DNA, 1025 bp, Glycine max
  Clone ID: PAT_MRT3847_48717C.1
ctcgagccgatttcaagtgaagtgcgggacatctcacccattcacctttctcctccactctcatagctttattagctttcctctcactctaattctctacccccaatcaatctcaaaatttccaattcttatttttaagaattgaacattcttcaaatggcatgcaattcgtaatcctatccgtctgttgaatctgctatggtctcaaatccagttccgaacacggaccggtcacgtgacgcgaaacggaggaagaagaaagcgcagctgaggcagcaactacggcaagaggaccagagcaatcccaagtggaaatcccaagcgcagcaacaaatctactcctccaagctgcgccaagccttagccagagttaacctcggtactcctccaagctgcgccaagccttagccagagtgaatctcgggttgacgccgccgccgcgccgaggcaaagccgtgcgcgacgccgccgacagagtcctagccgtgacagccaaggggatgacgcgctggagccgagccatcctcaccaaccggctcaagctcaagttcaccaaacacaagcggcagagacttacaacgcccccaacccggtcaaagaaaccccgggtcagcgtttaccggctgaaggggaagggttcaccgggcgtgcagagaaaagtgaggttcctcgcacgcttggttcccggttgccgtaaagaaccgttaccggttattttggaagaagccattgattacatacccgcgcttgagatgcaggttcgagccatgagcgctctctttaaccttctctctggttcttcttcttcttccggcgccgccgcctccccttccgcgccacctagctcgtcatagaagacacttttggctctaggcctttatgtatgtatgccatgccatgtcatgtgtctgtccatttttttaattgttatcatcatcatcatcattgtttgcctcgttttctttcacccttgcccccaaagaagctttctttctgtttattgttttctaattgcatagtataca

SEQ ID NO: 86052 - DNA, 279 bp, Glycine max
  Clone ID: PAT_MRT3847_48718C.1
aataaaccgaccaacattaaaaaaaaaatacagttctggacataactaactgtataactgggttttaaccagagggaaaaaaaaaaatcgtgcccttgaggaaatgaaaagtgggagagcataagtgggccctccagtgtaattttgtggcaagtccatgttgtttttgctagtcactcgaatggatcataaagttactaatttcccagctgctacccaccgggtggggtttttcttccttttgaaaattttggcccaattaggtataacctttttttt

SEQ ID NO: 86053 - DNA, 232 bp, Glycine max
  Clone ID: PAT_MRT3847_48719C.1
cagccaattgacttaatgaactccatttcaagttattggggcctgtgggattaaattaaaacccataagtctaaatgaacagttatcttgactgagcaacgactcccctaactttcaagggcctccatggtgtatggtgggcctacatatttttatgtcgcataaccacatctttggctaaaggctctcaccactttgttactgcttttacctctgcaatactttattaaac

SEQ ID NO: 86054 - DNA, 271 bp, Glycine max
  Clone ID: PAT_MRT3847_4871C.1
atcaatttgtccatctgcgcctcgctccaacactacagaactctgatgcgcagtcgcatccacagcacattcaaccacccctaaatcatttccagtgcttccgctgcatggacaccaccgtgccctatgcccaagtctacatacactctcaggttcatttagatctacgtctggcccttggagcatcagcttccattaacattttgaaacaacgtcttagcgcgaatcttaaagtggagtagcaggcgtttttactgagtgaacttactca

SEQ ID NO: 86055 - DNA, 261 bp, Glycine max
  unsure (1)..(261): unsure at all n locations
  Clone ID: PAT_MRT3847_48720C.1
aaaaaatgattaaatggaaatatatgaaattaaaaaaattaaagaaaaatttgaantagagattgatggaaaattataataaattaatgtgataaaatggaaatgtaattaaataaaggatgaaatgatgaagtagtataatatataagatggtatagtgaaagaagtagggtgtgtgaaattgaattgtaaatgtttagtgagatgtgagatagatttanataatgagaatataatgataaaagaggttgnaaaatggaa

SEQ ID NO: 86056 - DNA, 312 bp, Glycine max
  Clone ID: PAT_MRT3847_48721C.1
ttttattttattattgtgtttggattttttattaaaattggaccattcatggggaatatataatataattgaccactgctggtagagatggtaaacatcatcgtcgtcgtcgtcgtcgtcaacctaactctagggcaggaaaaatttttggctgcaggttcaccctaatcgagtgacttaaaactacatgagacaaattatacttttgtttcaaggggggggatggaaaggtttcaaaaacaatggaattggcaagacagattgattacagactaacagtaaaaaaaaggccctggaaaaggaacgggcttt

SEQ ID NO: 86057 - DNA, 1269 bp, Glycine max
  Clone ID: PAT_MRT3847_48722C.1
aaaaaaaatcttctgatgataatgtttcagaagaaatatattcaaaggatctctaatgattcagcatttattcacaaatcatctgccggcatattgagcatataaacgaaagtttatgatacagtataaatttggttttgcagtactcagcactcttggtataaaattaagcggtcataaaaattgtcagaactataacgagaaccaaaagatttctttacatttgagggcaaaattcatagatgtgcccagaggccagagaattaacaattaaatgtacttaaataaagtcagtattctccaaaagatgcaggtgaagttctttatctcataactgcaaaaaggttaggaaagaacaactagttctcagcatcatccccgagctccccgtcttcaagttcctcatgccccccagttttcctggaaccatcccagtggtccctcttgtgtcttctatgccggttttcattgtctgattcaggagagtttgcatgcttccgagacttcttgcgttcactgccatgccttcgtgattttttagattcttccttctcttccttttcagaatccacatcatctatactgctctgatgccttttccgatgtttcctttctttatccttttcttttttcttctcctctttgtaaccatggctgtcagccatgtcttgattatcactatctgtttcatccttcttattacgttccttagacttatctttttcacgttctctctccctttccttttttttctttttcctgcgggtcctgtcctctttcttccgcttttcaagccccttcgcagtactcttcacgatccttctctttggggcggcggagatttttgcctcaagtatgtgatgtattcctcaaaaatttctctactatagctttcgtctccaattgacctgtactcttgagtctcctcaaaaagtgacttgcaatcctcccattttgaggaagttgtaatatccttgaatgtatataacaggttagtaaagtcatcagcaaggcgttggcgcttcttggcttctttctcctccttctccttagctctctctaacaactcttcgaatataagcttcaaattgatctcagatattgtttggcatgcagctccttccaagacagcgaccttaaactcctcaaatactgatgtagtcactacagtgatcttgcctgacttaactgtatcttttatgagcgtcttgtcttcatgatactgtttttcaagatcctcagagacatcctcaaacaaatccacgagcc

SEQ ID NO: 86058 - DNA, 1416 bp, Glycine max
  Clone ID: PAT_MRT3847_48723C.1
atactggtcctcgtgttccaagacttccatcatctttggggcagcctactgtatcaaatggaatttctaatggtcttctgggcagaaatgggattgcgggtaataacagaggacctgcatataatcctgttccaccgagctcttcattgttgagttttcctatgaatcaaacctctgaaatgtctgtcaacaatagtttcccaattggaaccaccccaggtatatcaagtatcacaacaaaaggctcttttcaagaagaagttacatcaggaattaaaggatccagtgggtttccaagttatgatatttttaatgaactgcatcatcagaagtcccatgatttggagataacaaacccaggcttgacatacaatgcctcccatcatgtaaaccctttacaaggtaacattgatgttgcaccatcagttttagtgcatcaagggttttcttctacacaacagaccggccaaagcagagatggcgctttgattggaaaagctatgttctccatgggagaaggcttggaacaaaataacctccaaaatgctaacttcaatccacttcttgttgacaattcaataaggatcaaggctgaaagaattcctgatgcaagctcccagactaatctcttccctgagcattatgggcaggaggatctgatgactgcacttctaaaacagcaagaaggcatgggaccagctgagaatgagtttgaatttgatggatattctctagacaacattcctgtctagaacaaatcctttctgactgaagttgccagtgtaaatagtttgttacacaagcacatgatcatcctgctgttagctgttttggaattgagtctaattgttcaacaaacagaatttggttgatgtcaaatattcagacttctggggagtagcatattgtgatggtttactctggatgctcaagatgaatcagctcaaatctcaactgcatatatgcataaagcatgtgctatttttgactgcaatttatagcaaaattgctagcaagcttctaattttagggtgttcttgaaggtatgttggcttagggcagaattgcagaaccaagggtttgatacatctgcaaagttgtcataggagcatttctaacttcaataccaaattatgaaatttttttcttctgttttttcttttgtaatttatttcattcaaagtaagtaccgtaagtttgtaaatattgcatttggttgttctagacattttgtatggccattcttttctggttgattctgtgtacttcgttacgcatgtgtttttttttgtttcattgtgttttttattctctgtacatatggtttaggccttggcatgtttggggcatataattcaagtacattctttctggtttctatataagaaactatacggttagagattctaacaaaaa

SEQ ID NO: 86059 - DNA, 267 bp, Glycine max
  Clone ID: PAT_MRT3847_48724C.1
acggctgcgagaagacgacagaagggaacctttgctatgttattgtcttttggtgtgtatccatatatctattacgttcatagttaggaatgtttttgtgctactgaatcctgtggtagacgacatgtgacatacgtgttgcatctacctaggagttgtctgtttgcttggctagtagggtggggtaattcttagattgctctatgcacacatggcacttacacttttgcacacatgttgagatgttaggccctatacccgggtcta

SEQ ID NO: 86060 - DNA, 260 bp, Glycine max
  Clone ID: PAT_MRT3847_48725C.1
tcgacttatttctacaacataatgaaagtttccgcaagtgtactcccaaaaaattattatagaactagctccttcaaactgaacgctcatgagagttcctacaattcataccacatgaagaatcctcagaacctgataattcaccaaatgacaacatgaatgattacactcttctcctctcttcaaatgaatctgacgagaatgttaagttaccaatctcaactaaaatcaaacaacaatttgtaaaccttttaatcaac

SEQ ID NO: 86061 - DNA, 923 bp, Glycine max
  Clone ID: PAT_MRT3847_48726C.1
gtgctgagaaactccttcctcagcccccaggaggcaacattcgggacaatttcttcaattaatggaattgatcttcaaactcttgcagttgccggccagctcccagcacaaagtctagccacacttcaagcagcaggacttggtaggccaactggaaaagctggtgtacctatgcctctcatggatcaaagaaatcttttcagttttgaaaacccaaggttaagatttggagaaggccagcagcaacatttaagcactagtaaaccaatgaacttgttgcatggaatccctaccaacatggaaccaaagcagcttgccaatttgcaccagtctacccaatccattggcggcttgaatatgcgagtcaatgcttccgctacacaaggcaaccccttattgatgcagatggcacaatcccaacctagaggtcagatgctaagtgaaaatattggtcctcgtgttccaagacttccatcatctttggggcagcctactgtatcaaatggaatttctaatggtcttctgggcagaaatgggattgctggtaataacagaggacctgcatataatcctgttccaccaagctcttcgttgttgagttttccaatgaatcaaacctctgaaatgtctgtcaacaatagttttcctcttggaagcactccaggtatatccagtatcacaacaaaaggctcatttcaagaggaagttacatctggaatcaaaggatctggtggatttccaagttatgatatttttaatgaactgcaccatcagaagcctcatgattgggagataacaaacccaaacttgacttacaatgcctcccagcatgcaaaccctttacaggtaatattgatgtcacaccatcagttttagtgcataagggttttcttctacacacagactggtaaagcagagatgct

SEQ ID NO: 86062 - DNA, 604 bp, Glycine max
  Clone ID: PAT_MRT3847_48727C.1
aacaaactcaggttcaatgctacgccgtacccgaagacctaaatgacccactcctccgaaaatgggttaaacctgacaaattcaacccgatcttggttgctaacaaaggtgttaatggtagtgcctttcgcgacccaaccacggcatggtggagcaaggatgggcactggaagatattggtgggtagtagaaggaagcgtagaggtatagcttatttgtacagaagcaaggactttatgacttgggttcaagccaaacatccgatccattccaagggtgagacaggtatgtgggagtgtcctgatttttatccagttttggttaatggcaatcaaggattggagacgtccgagggagggaatcatgtgaagcacgtgtttaagaatagtcttgacatgactaggttcgactactacaccgtaggaacatattttgaagataaggatagatatgtcccagataacacttcagtggatggttggggtggacttaggtatgaccatggtaatttctatgcttcaaaatcgttttttgaccccagtaagaacagaaggatcttgtggggttgggcaaacgagtctgataccaaggaagatgatgttcg

SEQ ID NO: 86063 - DNA, 500 bp, Glycine max
  unsure (1)..(500): unsure at all n locations
  Clone ID: PAT_MRT3847_48728C.1
ttcggcacgagcgagtttattttgtttgatatcctatattcattcganttcattttatttatntattantantannttcngatgaactaaaangatatnngangatnctaattntangaatntgaaantnaaatnataaagttattaaatgattaatgnatttttttctacctgttgcctgtagtaanaagagttccatctgttcttgantagcttccttcaaaaggacttctgcttccccagtgaatgtcttggtagaagatatgatttctttganttgaggtttatncgtgtntaagtaagcnngtnncncaactaganatttccttacctgtncnttttctaatgaaatcaacatnaccattcgttccagtagtaagtagttattatctgtncttccacggtaanaggagctgantggganagtttaagcaactcgcgcaatcgattgacctcttgctaattgattttgagtngctttatcnagaatctgaaggggg

SEQ ID NO: 86064 - DNA, 354 bp, Glycine max
  unsure (1)..(354): unsure at all n locations
  Clone ID: PAT_MRT3847_48729C.1
agcagtccgcccacacgtncgctcagacactttgttgactgatattttaagaaaatcaaatgatgagggaaaattttctataaaaaaaaaaaaaaaaaaaaaaaaaaaaaaaaaaaaaaaaaaaaaaaaaaaaaaaattaaaaattccctcttaaaaagggggttaaaaaggggccaagcttttaaaaaaaaaaatccaacgtaagagggcttctaaagggacacatatttttattggactagnccgttgttttacaacgggccggacgggaaaaaccctggggttacaaaatcattggcgttacaaaaaataaccttttggcaaaatagcctatatcaaaaaggcccgaacag

SEQ ID NO: 86065 - DNA, 704 bp, Glycine max
  Clone ID: PAT_MRT3847_4872C.1
tcggaaattccggcctcgagagagccaagggcacctgagttttatctctcttggaaacttgattacttgaaagataagatgcacccaacatttgttaaggatcgcagggccatgaagagagagcatgaagaattcaaggtgaaaattaatgaattggctgcaaaggctaaaaaaaacaagaagaggagtgggtgatgcaagatggtaatccatggcctggaaagaacatggatgatcatccaggaatgattcaggtatgtctaggaagtgctggtgcactggacatagaaggcaaggaactgccaaggcttgtgtatgtttcataggaaaaacgtcctggttatcaacatcacagtaaagctggtgctatgaaatgctctggttcgagtttctgctgtgcttagcaatgcaccttttgcattgaatctggattgtgaccaatacatcaaaatagcaaggttcttagggaggctatgtgctttttaatggacccccaaattggaaagaagttctgttatgtccaatttccacgaaaggtttgatggcattgattgcaatgacagatatgctaatcacaatactgtattctttgatatcaacatgaaatgccttgatgggaatcaaggtcctatgcatgttggtactggaatgtgtgttcaacaggcaggcattatattggctgtgagccaccttttgataaaagc

SEQ ID NO: 86066 - DNA, 312 bp, Glycine max
  Clone ID: PAT_MRT3847_48730C.1
ttgggggttttttttttttttttttttttagcatctctcaaatctttgatttcattcattaattgcttgaaaatttggataaatacaactctgaatataaacaaagtatctgtggattcgatacttgaacttttattttactttattacttgagacaatttgatgcagccgcagattagttaacaagacactagttcatagtttattagtttaaccataactgtaaaatatttctttctttttgtatgactccagactttcacataaacaagaagaagcctaaataaaaagaccagacggacccccggcccc

SEQ ID NO: 86067 - DNA, 651 bp, Glycine max
  Clone ID: PAT_MRT3847_48731C.1
gcaacttcttgtaaatttctgagattgcattctcacctcacctactcaatgggagaaccaaatattttcttttcttttttctctttttcttctctcgtggttgggtaaaaacaacaataatgatttacggacatgaattttaatctggatggtgaattcaacaagatatcatcatttaagttggacatgtcagatcttgattttacatgcccagccaagaagaattcccagtctaaggataagaaaggagaagtttctggttcacaagaagggaagcaagatgggtttaatttcagctttgattttaatgattattggcataggttgggtagcttcaattttgattcaagcttcatgaaagtagtaactacctccaacagtagcccaagaaaaaagggagtaactacagaaggaagtgataaagaaggtggtgaaatgcttaaaaccaatgatgatgaaggtgctcgtgcatctaatgatagcacaactgtgaaatcccatgcatcagtgaggctggaaacttcgaaggttgagactgtggttggtagcccagggaatctagtttccaaacaggatggttctgtttccaaaatttcatcctctgggaatcttgacatgccaatggagaatcaaactttagatataaataaa

SEQ ID NO: 86068 - DNA, 314 bp, Glycine max
  Clone ID: PAT_MRT3847_48732C.1
ggaagactggactaccagaaaggtattgacctgattcggttggcaatgccagagctcatggaagctgatgttcagtttgtaagtgattttgtatatgtgttctataaacagatgatgtttcaatcacaaattaaatccctggcctatccaaaaaaaaaaaactaattaaatccctggacatggtggtatcaaaatgtaggctgtgtttactggtagggtataaaatatatcttgagacgttgcagaatatacctgctaaataaattttaaacaacttgatacttgccataaaaaaaatatgtgatggatcattc

SEQ ID NO: 86069 - DNA, 209 bp, Glycine max
  Clone ID: PAT_MRT3847_48733C.1
gtttggtgtaactgcatgctctttgccattgttgatcgagtttacctttagatttctgagtgacccatatacttatacagtgtgattttaggatcttgttaactagtattcctagactattgcttaaggaactaaaaggagaagcttttattatctaaatcatagaaaagtttacaaaaaaatcataaaaaacccatttttatgccttc

SEQ ID NO: 86070 - DNA, 807 bp, Glycine max
  unsure (1)..(807): unsure at all n locations
  Clone ID: PAT_MRT3847_48734C.1
ggctcgagctcgagccgcgcttccccaccgtgcttttcagattggtcgagccattttgctcactccacgccacaaacacatcacctagttgcagatttttattctttttcttccaagtttgtttatccttatcctaattccatttggctttaacttttaataacagcagttttctttttgttatttattgctattatgatgtagtaatttcaatcgttttcataatgactccataatggcgattaatgaagtttctgagctgtgtgagcgatttagcataaagtatacgatgcatcgtttctggttctggatgttcatgttcgagcaaagatcttttgtgtgtgtgcagttactgctttgacgttttggattttcagtaagtaaaatctcggaagtcctcagttaagctcttctgcttacttagggtttggaaagtcacttcatgtagggattagtatttgcactagatccgtggttagttttgaataatttctaaggttggatttgaagtgaatggttttagaaagggatactctgctagagtgctgtggatatatggtcagggcatttgtttgtcttacttgtatagttgtataggttcttgctattttcttttaactgcatatctagtgatttgcagttgcatttgggttggggttcctggtgattattgcatgtgctgtttttctttggatgagaacgggttggaataatcactggtgaatttgggcattctggatgacaagggttgtncagatgagtgttgatggcgacagcaaagagctgaaagaactgaatcagcgctta

SEQ ID NO: 86071 - DNA, 237 bp, Glycine max
  Clone ID: PAT_MRT3847_48735C.1
caagacattactatgttatgggacataatagctgcggcgagaacagaaagcaatagagtagtgatatcttggaacataataccttcaatgcaaaagaccaaacatcttggccctgtaacaaatgggaatggaggctcctaaaatgaccctcagaaccttggcagctctggttgtaactccaaaatatcactactctattactatctgtcgttgcagcaggtattatgttcgaagaca

SEQ ID NO: 86072 - DNA, 520 bp, Glycine max
  Clone ID: PAT_MRT3847_48736C.1
cgccccatccacccgcgcgtacttttaaatgttaggaggcactagtgtagctttgtgtgattattcaaggcctcccaacccacaacagacactgagggccacacaatcgatattgtcaaagacaactactatattggtgacacaaccatcattgcagaccggtacgtccatgaggtatgatgagctgggcccctacactgcgagaacctttgtccataacagaagcaccacactgatcactcttatcggtgaaaagttaccaggagaaccctctgagcctacgacccccatctagatgccgccaccgccagagacaccattgctgccggctggcctggtaaagctgcaggctggaagaagaaaatatccatcgctaaggcggacatgcacaactggtagagcaggctatgcaccgactgtgacgccatgactatttgcatagacgagaatctctacgtggaccggcactgcatgaacggcaccgcttacagcacggatgcagaacttgaaggaatggtga

SEQ ID NO: 86073 - DNA, 877 bp, Glycine max
  Clone ID: PAT_MRT3847_48737C.1
ctactttactgacacttagtccccggaatctcgaatttccgaccggtcatatttccgtcaaagaagctgacacaacccaacctttcttttcttttcttttactcctttcattgtttctcatatatgatctctttctttacacccaataataaaagcaattgttggctgaagctacaagtgcaatgaatttaacctttgcagcataggaaattaaggtgaagtggaaaggttcagttcatagttgaagttggcgtagttggagcacacagacacagttgttgcaggcattaaaagcaaaggcagcagttacaacaatccgcacggatatatacatggcgtaaagcacaagaactacttggcaagtgcaatgaaggatccagtggaggatcaagtgaaatctaggagggcagtgcagaaacccaaggattttagaagaagagatagaagaagaaaccaatgcaaacaagagaaattacaagacacacaattggtttcctctgcttgcaaaagtcttgtgtttcctgcaaggcctggctatggccagctggggacaaagtgtctggtcaaagccaaccacttcctggcagatatatccgcatctgacttgagccattacaatgttaaaataacacctgaggttacttctcgtaaaacaagcaaagccatcatagctgagttagtgaggcttcacaggaacactgatttggcaatgaagcttcctgtttatgatggaggaagaaatctctacactgctggcttgctttcttttgcatacaaagagttcaccatactattgagagaggatgatgagggcactgggtctaccagggaaagagaatttgaagtggtgatcaggtttgcagctcgtgttagcatg

SEQ ID NO: 86074 - DNA, 269 bp, Glycine max
  Clone ID: PAT_MRT3847_48738C.1
gggactttgagtccttctgttgcaaagttggattctcttgttgagataaggttgggaggtaatgatatcagtggtgggatacctagtaattggactagtttgagatctttgacattgttggatctgagtgggaacaacatttcaggtcccttgccgagttttaggaaagggttgaagcttgtgattgatgagaatcctcatgtaagtgctccagatagttctcttccttcaccagtgagtagttcgggttccggttcgggttcgtggtc

SEQ ID NO: 86075 - DNA, 166 bp, Glycine max
  Clone ID: PAT_MRT3847_48739C.1
cctcgtgccgattgattatgattatgagtcgaaatattacaatagttttatgaaaaaggaggctgaaagaaatcagaggagatctaaaaaaggtgttatgagtgaaaccataagccaaggggaatgatttttatacaataaaaaggatattgaaaaaaaaaaaaaa

SEQ ID NO: 86076 - DNA, 346 bp, Glycine max
  Clone ID: PAT_MRT3847_4873C.1
cctacacatggaagcattacaagaacatataaccgggtgaataaattctcgttccatcaatccctataacgcaattggcgtgtcgcgggaccactatgctttcggatgcccttaccaaagaatgtatatttcgctcagaccacgttgcaacacatttgtggatgacgagtgtcaatatgtgttgaaaccccattctttgtacgatccctcatacagtggctatttaagctcgaagggggtaagctatctatatgggcccttaaccgctgggtcgcttatatcacaaatcctagtacatctcgctggggcaagcaatgcttggtctagggccgagtagaatttttgc

SEQ ID NO: 86077 - DNA, 689 bp, Glycine max
  Clone ID: PAT_MRT3847_48740C.1
ctcccctgttttaactttcttcaacactctctgacttctccactttctcttcttccattcacatcatttctttctttcttccccttgttgtttatttatcaattatcaccatgcccctcaaacaattcaaccaaagtttgcaactttgataaccctttggcctcttcttcttgttccccttaatgggtctctctccaattcccctcacaaagcctatctattctggtgtctgaatttcactttggttttcatatgttcccacaggctacacatttggggttgtagaattggaaatttcagagtttttgggacaccccattttgaaaaaagtgtgtgtgtggctgcagctatggttgcagaagcttggattgtaaagatgggtaaccaggtaagttccaatctcaagcatgcccttcttcttgaaactttgacaaagagaaaacagagccacaagaggtcagatactaaagaaaccataggtattctttcttttgaggtagcaaatgtgatgtcaaaaactgtgcacctccacaggtcactgtcagagtctgagatctcaaagctgaggaatgagatcttgggctcagagggtgttaggaatttggtgtcctctgatgagggctatcttcttgagctggctctggcagagaagcttgaggagttgaatagggttgctagtgtggtctcta

SEQ ID NO: 86078 - DNA, 146 bp, Glycine max
  Clone ID: PAT_MRT3847_48741C.1
ggctttcttgcttaggcaaggaacgaagagacaacctctggggccgagagttgattcagggacagtggcgggactggccagttaaacgagacgctcagaatataactatagctgaggcacaagaacagatgcatgagagcaaagca

SEQ ID NO: 86079 - DNA, 325 bp, Glycine max
  unsure (1)..(325): unsure at all n locations
  Clone ID: PAT_MRT3847_48742C.1
tttttttttttttttttttttttttttttttttttggggggtttttttataaggaaaggttggacccgggatttnaggattggtatttttagggggacccgggggggaaaacggaagcccataaaagggcgccgaaaacaccccaataaatctttatcggggcaaattgtcagccgggaaaaaaaccggaaaaataagaccacaaagcaaaaggggcaaaccactaaaataaaaaacagggggcgcaacgagattaatggcggttaacacaggggggccctgaagtgcaaaaacttaaaaaaaaacccccacccccgaatcgacc

SEQ ID NO: 86080 - DNA, 696 bp, Glycine max
  unsure (1)..(696): unsure at all n locations
  Clone ID: PAT_MRT3847_48743C.1
gataaatttgaaagctcccgggtcgacccacgcgtccggcaatcttagagcagagatcttggatttgcttcttcatacaagcgcaattcaacttcgaccctccaacgccaaccacgaaaactatcacttcatacagggcgaggttttgcttattccctgtttggttgcttggaaggcacagttgctgacgaggggggcattttttaactccgtgcgttcaatgaacgcacattcctgaaatctacatggagttcaaattctagacagatttgaactaaatctgaaacgcgatttcgatctcgacaacttccgaaagccatttttcttcgtcgtcgctaatttctgcactctaattagctttcgaatcagaagaagatgcttcgcctgaaagcgtttcggcctacgagcgataaaatcgttaagatccaattgcatcctacgcatccatggatggtgacagccgatgattcagatcgagtctcggtttggaactgggagcaccgtcaggtggtttatgagttgaaagctggcggagtggatgaacggcgtttggtcggcgccaagttggagaagctcgccgagggagaaacagagtcaaaagggaagccgacagaagccattcggggaggaagtgttaagcaggtgaatttttatgatgatgatgtacgcttntggcaactttggcataatcgctct

SEQ ID NO: 86081 - DNA, 667 bp, Glycine max
  Clone ID: PAT_MRT3847_48744C.1
agggaattggagtgccatcagtatatataatacatagagaatgtccttgcattgtaggtatttctaacaaaatcaaggagttcatggaggaatgaaaaagagggaatggaaggatactgaggaaaatttgaccaaccaattttcattctcttgcaagcaattgaatctaaaaatagtagactccgtggactattttcattgacccatactagcaagcaatcagttaagcagatggtggttggatttcatctctgtccaaggagacattcagtttagtccatttggcacgccatgccaaaaatgagagagtcccagtttgacaagccaacccacaaatcaggccaatccataaacccttaacctgcaaattgaacttaaatccaagaaggcctgatattggcaaaccaataagataaaaagttgctaggttgacataggcagccaagtgctgccaaccacacccttctgatcacccctgataagacaccttggacagaatctagtaatatggaaatggaaagaaagggttgtcagtgaagccaactcctcttttattttagaactatcactgaacatctgaatccatatattgtgaccaaattgcaagtgccaaaacaaacataaaccaaggaggagagagagcttgagactgacacccattgcatgc

SEQ ID NO: 86082 - DNA, 212 bp, Glycine max
  Clone ID: PAT_MRT3847_48745C.1
tgtgtgaggacgaggaagagagcaacgtctcattcagagaccccacatttgacttgaaatcgattctggcccgaagctgacgtatagctggccgccggggagaacgatacagagaggagcttgcataggataaacgtatactgctgacatactatgatactcacttcgctcttgatcgatggtgcctacgaggcaatgagggaggacctgct

SEQ ID NO: 86083 - DNA, 242 bp, Glycine max
  Clone ID: PAT_MRT3847_48746C.1
tagtacttgaattagagggtggaggtaaacaggagccacacttttgggattagagtttctctttgttttccaaaaaaaaaaaaaaaaaaatcatttggtgttgtgtgttacccccttgtttaaggctacggcttcaaaaatggggtactttagagggcagtgttttaacgtgttgaaatccccatcttgttgatttgaaattgtacctagaaatgtctccaattaggatttagagttgtaaa

SEQ ID NO: 86084 - DNA, 276 bp, Glycine max
  Clone ID: PAT_MRT3847_48747C.1
ggctcgagctaaagtaagccaacactgtttttgggtttattgccacaccgaaaaacctctcctacacaagtgaatgatgcatcggctattatatacaagagacctctaattacctttatctcacaccctacgttacagtgcgaatgcactgcgctagatgcttacagctggagacagcgacccaccacttgcgcttgcggacgtacatcctgatacgacgagctctaagaccgagagggaggccctgctctatgcactaaggcatacagatgtgcc

SEQ ID NO: 86085 - DNA, 354 bp, Glycine max
  Clone ID: PAT_MRT3847_48748C.1
cccatacgtccgcccacgcgtccgcccacgcgtccggctgaacaagggtttctctgtctgcttcttcactatctctcgtatcattcgaaaccaaaacaaaatcatgggcagaaaatgtcaccatcggaggcaactggaaatgcaatgggaccactgaggaggtaaagaagatcgatactactttgaatgaggctaaagtccctggagaagatgtcctagaagttgttgagagccctacttatgtggtccttcctgttgacaaaagtttgctgcgccctgatttccatgttacggcacaaaactgacggagtcgcaaaggtggtgcttataccggtgaggttagcgctgaaatgc

SEQ ID NO: 86086 - DNA, 2829 bp, Glycine max
  Clone ID: PAT_MRT3847_48749C.1
gacgaacctgccgctgctggaggtacttactccttctatatatcatcacttcatttgcatgctcacaccatcgtatatttcatcatccgtgcatgtgcacaacacgacatacacacttgaataccaagccatttatgagtttataagatatacatataatctgaatcatgaatcaggtgttgataatcaccagaggtatcttggtggtcaggatcctggcaaacaacatgcatacttaaagaagtctgaatcaggacacttgcataaatctgcttactctgattcaggtaagaatggtgggagtatgtcagacatcaacaatccatctttggataggcatgctgagctacaaaagtgtgctgttcctcccaataactcatacttcaagggatcacctacctcagattttagtggaggaggaagcatggcacctcccgccctaaacaacggatttagatggtacaaattcatcattgggctattaactatggtctgaagcattgtggtgactacttggaacttcagtaatctttctaagccacccttatttgaaaatgttacttcagcatccaatgatgagacactggaatggaattcactgataattctttcatttgcaatgggtggtttggatactggacctgcggcttgatctgatatccataatcatggtagagttggaaatcaaattccaggagtggctccttttgtcgccaaggattatccaatgtatattttggacctgaggacgtctgagtttgctgcagcacaactgctgctcgccactgacacctctgtggacaggaactacttaggcaattgatacaagaatttacttgaacttcagaaagcttatctgtctgtcctggactcacctcagaaatcacaataaaatgtaccgctgggtggtaaatcaggcagctccactcctcaggttattatgaaaatcatagcatatggtgttcggatatcttacccaggaagtcctatggcaaactcttttcgatctaaagtcgtttctcttcccctgttggatttaggcacaatgacactgaattgcgttttgcttctggaatgaggatgaaaactttgcttcatcacttttggaagagtttaaaaggaataaaaccaagaaatcagccgtatctgttgttttgatgcacctgatgcccactgaagaggatttcaaatgaaatttctggtcatgtttttttatgctgaattcagtgctgatcaatatgggaggcggtttattcaacaaaagcttgaaactgctactaatgaagaaaaaaatatgttttaacaagaaatcatgccttatgctcttgctttgatttatgtagttcaaaagtcttttttggccgagtttaagcgagcatgcacttgcatcccaaagaagagaattagccaacaaacttcttggccatgttctgacacttagccttcaaatgtatggttgccgtgtcatccagaaggccatcgaagttgttgatctggatcagaagatagagatggttcaagagcttgatggtaacgtcatgcgctgtgtacgtgatcagaatggtaatcacgtcattcaaaagtgtattgaatgtgtccctgaagatgcaatcgactttattgtctcgacattttttgatcaagttgtgacactatcaacccatccatatggttgccgggtgatacagagagtgctggaacattgcaaagaccctacaacacagcagaaagttatggatgaaattttaggagcagttagcatgttagctcaggatcagtatggcaactacgttgttcagcatgtgctggaacatgggaagcctcatgagcgttcttctataataaaggaattagcaggcaagatagttcaaatgagtcaacagaagtttgcctccaatgttgtagagaaatgtttgacctttggaggtccttctgagcgccaattactagtgagtgagatgcttggcaccaccgatgaaaatgagcctcttcaggcgatgatgaaagatcaatttgcaaattacgttgtacaaaaggtgctggaaacttgtgatgatcaacaacgtgagctgattctttcccgaattaaggttcatttgaatgcattgaaaaagtacacctatggaaagcacatcgtcacgcgtgtagaaaaacttgttgctgctggagaaaggagaatagctgctcaggctcctcctcaacctgcttaggtggcttagaaaaataatcttgtacagctaactgaggctagtgtaagctgctgctgcttcctctcccaaatcaagaggtcatgtttgcctatctctcaagatgggttgtagccaattggaaataaagttgtcggttttactgcagaaactgtacattttgtagcttttaagtttatacaaagaatttaagcgagagatgaggcctcagatgttttaatgcgcctgatgccccctgctgcagaggagagaagataaaattaaatgaaatattatactatacaagcccatttacggtgtaaagattgtaaaatggtgagttagtttataagttgacgcgactgtacaaaatgatgatgctcttgtttaggcgagggcagtttttttcttctttttcatttaatcatgtatggttgttgactttgtttcccctttcaagagtatatttttttttgctagtttacttgcctttttatggggtaaagattataaaatggtgaggtagtctataagttgacgaaatgactgtaaaaaataataatgtttttgtttaaaaaaggccagtttttttttttttttttttaatgaggagcttatcaatggttattgactccgttccccc

SEQ ID NO: 86087 - DNA, 144 bp, Glycine max
  Clone ID: PAT_MRT3847_4874C.1
gccgttatttgcgcaaatgagccgtgtactataggggggccattgacgtgagaagtgtgaagacctgataagctacctatgtctccgataccagaagtatagtacgatgacctagctaaggttgcactgatcgtggatacacca

SEQ ID NO: 86088 - DNA, 150 bp, Glycine max
  Clone ID: PAT_MRT3847_48750C.1
ggaaaatatcttaggatttgaggtgctggagaagaagcgtgaagtgtatggtatgggggcgcttttaccgaaggcactaaaggaggaaactattggcttcagaatgtctttactttagcctggtttctttcaaaaaatagttcaaagtct

SEQ ID NO: 86089 - DNA, 1055 bp, Glycine max
  Clone ID: PAT_MRT3847_48751C.1
atgagcttctttcttattgtcatagagctggaagcatgcttttatggttctcacatttttttgttttacttcagaaggattttctgcagctgcaagcctgctagcaatgttttttgaagttactctcctttatattgaagtttttttttgctgcaaatttgttaattgacaataaaatatgaatgtcttttcctttggcctgcatctaatctttagatgtaatgtccttatcaatacctgatatcatgaaacctttcaactagaaacttacttttctttgcatgcctcttgctgctcaatgacccctctgtggacaggaactacttgggcaatacatgaatttgcttgagctccagaaagcttatcttgggtctgtcctctcacctcagaaatcccaatacaatgtaccgccgggtggtaaatcaggcagcttcactcctcatggttattatggaaatcctgcatatggtgctgggttgtcttacccaggaagtcctatggcaaactctgttgtgtccacttctccagttggatctggaagtcctgttaggcacaatgaactgaatatgcattttgcttctggaatgaggaatttagctggggtcatgggaccttggcatgtagataatgagaacattgatgaaagttttgcttcttctctgttggaagagtttaaaagcaataaaacgaagtgttttgagctgtctgaaattgctggtcatgttgttgaattcaggtatattttttgctattgttcattttatgctgccacactgaagaatcaaatttgattattttattatcattggcagtgcggatcaatacgggagtcgatttattcaacaaaagcttgaaacagctactacagaagaaaaaaacatggtttatcaggaaatcatgccacatgcccttgctttgatgactgatgtctttggtaattatgtggttcagttaatcattactctttcaactgaatttattgttttctttggaacatgtaatcttgcgtgagcaattgttggtattgctgtaattcttaattgcagttttttgag

SEQ ID NO: 86090 - DNA, 2679 bp, Glycine max
  Clone ID: PAT_MRT3847_48752C.1
gtgctagatggtgaaaaccatttgccatcacagattgaatcaggtgttgataatcaccagagatatctttttggtaagcaagatcatgggaagcaacatgctttttcaaagaaatctgaatcagcacacttacaaaattcaagtaagaagagcaggagtgggtcagatctcaacaatccatccttggataggcaggttgagttacaaaaatctactgttccttcgaataactcatatttcaaaggatcgcctacctcccattttagtagaggaggaagtatgccaccccagtaccagcctttagatagtacaaattcatcatttggtaactatggtctgagtggctatgctggaaatccagcattggcatccttgatgactaaccaacttggcactggtaatctgccacccttgtttgaaaatgttgctgcagcatcagcaatggcagcccctggaatggactcgagaattcttggaggtggtttggcttctggagctgctgctccatctgatgtgcataatcttggtaggatgggaaatcaaattccaggcagtgctcttcaggctccttttgttgatcccatgtatcttcagtacctgaggacatctgagtttgctgcagcacaacttgctgctctcaatgaccctgctgtggacaggaactacttaggcaattcatacatgaatttacttgagcttcagaaagcttatcttgggtctatcctctctcctcagaaatcccaatacaatgtaccgctgggtggtaaatcaggcagctccactcctcatggttattatggaaatcctgcatatggtgtcggattgtcttacccaggaagtccaatggcaaactctgttgtatccacttctccagttggatctggaagtcctgttaggcacaatgactgaatatgcattttgcttctggaatgagaaatttagctggggccatgggaccttggcatgtagatactgggaatattgatgaaagttttgcttcttctctgttggaagaatttaaaaccaataaaacaaagtgttttgagctctctgaaattgcgggtcatgttgttgaattcagtgcggatcaatatgggagtcgatttattcaacaaaagcttgaaacagctactacagaagaaaaaaacatggtttatcaggaaatcatgccacattcccttgctttgatgactgatgtctttggtaattatgtggttcaaaagttttttgagcatggacttgcatcccagagaagagaattagccaacaaacttcttggtcatgttctgacacttagccttcaaatgtatggttgccgtgtcatccagaaggccattgaagttgttgatctggatcagaagatagagatggttcaagagcttgatggtaatgtcatgcgctgtgtacgcgatcagaatggtaatcatgtcattcagaagtgtattgaatgtgtccctgaagatgctatccactttattgtctcaacattttttgatcaagttgtgaccctatcaacacatccgtatggttgccgggtgatacagagagtgctggaacattgcaaagaccctacaacacagcagaaagttatggatgaaattttaggtgcagttagcatgttagctcaggatcagtatggcaactacgttgttcagcatgtgctggaacatgggaagcctcatgagcgttcttgtataataaaggaattagcaggcaagatagttcaaatgagtcaacagaagtttgcctccaatgttgtagagaaatgtttgacctttggaggtccttctgagcgccaattactagtgagtgagatgcttgggaccaccgatgaaaatgagcctcttcaggcgatgatgaaagatcaatttgcaaattacgttgtacaaaaggtgctggaaacttgtgatgatcaacaacgtgagctgattctttcccgaattaaggttcatttgaatgcattgaaaaagtacacctatggaaaacacatcgtcacgcgtgtagaaaaacttgttgctgctggagaaaggagaatagctgctcaggctcctcctcaacctgcttaggtggcttagaaaaataatcttgtacagctaactgaggctagtgtgagcttctttctttgtctcccagatcaagaggttatgtttgcctatctctcaagatgggttgtagccaattggaaataaagttgtcggttgtattgcagaactgtacattttgtagcttttaagtttatacaaagagtttaagctaagcgagatgaggctctcatcagttgttttaatgcacctgatgccccctgctgcagaggagataaagtactatacaagcctttttatggtgtaaagattataaaatggtgaggtagtctataagttgacgacatgactgtacaaaatgatgatgttcttgtttagacgaggccagttttttcttcttttcttttaatcatctatggttattgactttgtttcccctttcaagagtaaaatttttcttgctagttttcgagcctttttaaggatgtaaagttttataaaacgaacggtgaggtagtttataagttgacgcgactgtacaaaatgttggcatgtgaaaagctgtttatgtttaggtgaaagcagggtttttcattcatgtatgtatagtcgctgaaagatgcggcaatttgacgag

SEQ ID NO: 86091 - DNA, 748 bp, Glycine max
  Clone ID: PAT_MRT3847_48753C.1
aaatgtttgacctttggaggtccttctgaacgccaattactagtgagtcagatgcttggcaccacagatgaaaacgaacctcttcaggcgatgatgaaagatcaatttgcaaattacgttgtacaaaaggtgctggaaacttgtgatgatcaacagcgcgagctgattctttcccgaattaaggttcatttgaatgcattgaaaaagtacacctatggaaagcacattgtctctcgtgtagaaaaacttgttgcagctggagaaaggagaattgctgctcaggctcctcctcaacccgcttaggtgcttagaaaataatcttgtacagctaactgaggctagtgtgccgcttcttcttcctctttctctcccagatcaagaggttcctctttctctcccagatcaagaggttatgtagcgaattggaaataaagtgttcggttgtactgcaaaactgtacattttgtagctttaagtttatccaaagaatttaagcgagaaatgaggctcatcagatgttttaatgcacctgatgccccctgcagaggagataaaatgaaatgactatacaagcctttttatggtgtaaagattataaaatggtgaggtagtttataagttgacctgactgtacaaaatgatggcatgtggaggtctgttcttgtttagacgaggccagtttttcttctttttcttttaatcatgtatggttattgactttgtttccccctttcaagagtataatttt

SEQ ID NO: 86092 - DNA, 349 bp, Glycine max
  Clone ID: PAT_MRT3847_48754C.1
ttcatggttttcgcaaagtacaagcataagtccaaccatttctaagacaacaaaagccgaaacttgacttggggtgagcatagaatgcatataactcgtcgttaaaacagcggctttgatgatcgtcatatcaatcatcagtgatttgaaaaatcttgttgtgagtgacagccaacaggaccggcggaagagacccgcgatcaggctgatgtacaaccgacacttctatactcacaaaagtccgaaggcaaggcagtgagcatcgtttacagaacagattccagtactacacgaggtgaatatgaaagagcatccgacacataagaagctttttgaaagtttgtataaa

SEQ ID NO: 86093 - DNA, 323 bp, Glycine max
  Clone ID: PAT_MRT3847_48755C.1
gccatgcggtacgagtaaccttgacattgttagcatatttgctgtgcattttcccgtgcgcgtctacaagggcatccatcgtgaatatcatatgcaagatgaagataatgggcggccgatcaggaaagttcatgggagagagtttggagagacttttgtaataattcgttaagttagaccttgttcttatgaggctacaaaccatgttttttttttcttaattcgcgaaggctagcttgcttttaagtactttagacctattaaacctctgcatgtatgcctgtctttatttaaatgtctggtatgctgcaacctggtaccac

SEQ ID NO: 86094 - DNA, 169 bp, Glycine max
  Clone ID: PAT_MRT3847_48756C.1
aaattaaaaatctcgtttaccaaatcaagcggtgtacattttctaataagccgaaccaattcctctacttcttcccatctactaaaatatgaaaccaactacttttaaaacgcccaattaaatccctattgtttactcatagttctttacaccaactacaacgacaaca

SEQ ID NO: 86095 - DNA, 278 bp, Glycine max
  Clone ID: PAT_MRT3847_48757C.1
cgtcctcgtctctcttttttctttctcccatcaccaaacacgacacacagacaaacgcacccgaccaaacattatatatatatatatataacaaacaacaacattcttgtttctcatctgacatctatgcacccaccaccttgatcctcctccactctgttcgttcgattcctcattccaccgatggcgggtgcacactcccacagacaatcacaccacctccaacaacaaccctcttcgcgctcctcttactcctcaccgtcctccccttgactctc

SEQ ID NO: 86096 - DNA, 456 bp, Glycine max
  Clone ID: PAT_MRT3847_48758C.1
cggctgcgagaagaccacagaaggggacagagcttttgattgaaaatggtagaaaggaggagaaagcctctgatactgtgttccactgtcccaatcaacaacttcttcccccttcaatctcaatctccttccactttccgtttacccgtcgggattctccgatccccccaattaactttctcccacttaaaatattactaattttaatctttgttaggttctgatcaagaatgttgataccaacacacagaaaattgcagtggctattgctcttgatccaccaggcacccccactaacatagactcaccctcttcttcaattctcgaataatgcttgtttttccttcttgtgatttcccttctaatggttctgtgttagatgatcaagtagcttatatatctcctcttttagcatttaaccttaacttgcacgtgacgtgcttaaaatctattttt

SEQ ID NO: 86097 - DNA, 313 bp, Glycine max
  Clone ID: PAT_MRT3847_48759C.1
ggtaatagtttaaaatattaagcgcagatttttatttttcatattagccgctctttatacaggcgccccctttccccacattttaaaaaaaaaaaaggggaagccatgatgtgcttaccccccccataagaagtacaaacttgttgttcttgatgggagggaaaacaccacctctttattaggaggatggttgaacaacaaaaaccaccgggggggacgaccaccatcgccgtcatacttcatttgtttgcagccccacattagtagatcatcattcctcctaaaggggggctttcgctggaagaaggttgct

SEQ ID NO: 86098 - DNA, 546 bp, Glycine max
  Clone ID: PAT_MRT3847_4875C.1
ggcattgggattacatgcatagcacatttcatattggatttgggtccggacccttatataacacttatactagcccggatatacaatctttaatgctgggagtttttatgtatatatagctgaatatagttggaccaaaaaagttggcctcaaacccatttcattttagatgggcttaagcaatcatcaaccaaactcacaaatttgtacatgataataataatttacattacctaagtttggatttgatggctggcaaggttgaagaaggcacctctcttgtgcctaagttgagcataggttccttgctccagaaccttgccctcagacacataagcaattgaatcaagctctttgatggtgttaagcctatgtgccacaacaagtggtggttcttcctaccatagtcctatcaagtgcttcttgcacaacttgttctgattgcacatccagggcacttgttgcctcatcaagaagtagtatctttggggttgcgaattatggcccttgcaattgcaattctctgcttttgtcctcctgatagct

SEQ ID NO: 86099 - DNA, 307 bp, Glycine max
  unsure (1)..(307): unsure at all n locations
  Clone ID: PAT_MRT3847_48760C.1
ggcaatgacctctaccctgggggccagtactttgacccactgggccttgctgatgacccagtcacttttggctcgagctcaaagttcaaggagattcaagaatggaagggctgggccatgttctctatgtttggattctttgtttcaaggctattgtncactggaaaaagggcccatttggaagaaacctcttnggaaccacctttgaacaaaccctggtgggctaaacaatngctttggggtctaatgcccactaaagttttggcccccagggattctttaaaatggtatnatggacttncttcct

SEQ ID NO: 86100 - DNA, 460 bp, Glycine max
  Clone ID: PAT_MRT3847_48761C.1
tgcatttcacgctttggctgaaggacttgcattgggagtggctgcaccataagcatacggacttggtcgtcgtatggtgcttccagtctctctacacgggcttccccgaggtgcagccacggctagctgcatatgaggagccaccgatagctggctcggctctcttgctacagctgccataattggattcatgggaccaacatcagcaacatgcgctctgcgtacgtggtatacacctcggaggagatgatcacataatggctcttgcctgtggcggattgagcccatgctttcgaagcttgagtagatgcgcgggatacctttgcgaatactttcatgttgcaaattgctgtgttgtcattggatttgcttcctaaggattcacatttacggcggttgaaagtttacggccctctaacggactctatcccacattagccattctcatttacttcaaggg

SEQ ID NO: 86101 - DNA, 572 bp, Glycine max
  Clone ID: PAT_MRT3847_48762C.1
gaaggaaaagaaggataaaagagaaagagagagagagtatccgccgttttggaaacgggcttttgagtttgttgacttggcaaaggcaaaggcagcggttgtaataaatatgaataaatagcgtttggtgatgttcataagacgtgtctctgtctttcttctcggtgaagtcaaggttgttctgttcttctacgcagacacacacacaaacacataacataacgcccctccttctcttcttctttcccttcaaattctatttcttcatccattttgtgctccaaacagcacaaacattacaatcacaccggtgttcttcgctttctactcttctaaaagtgacttaacagctcatattgaaacttacctacagaatagaggatcatgggttgctttggcttctgcaaaggagatgatagtgtcacagttgctgacagaggacctttcatgcaaagcactcctactgggaaccccagttatcatggaagacacgcagcagtaactgctcctcggactataaatgttcaacctattgctgtcccttcaattacagtagatgaagttgagccttt

SEQ ID NO: 86102 - DNA, 277 bp, Glycine max
  unsure (1)..(277): unsure at all n locations
  Clone ID: PAT_MRT3847_48763C.1
tgggaactgaatctccatattgttcaagttacttttgactatgagactatnataataacaacaacaactatggtcactacaaaatatgcaacaaccaaaaaaaaaaaaacttaaaataaaaaagaaaattttaaatctaggttgagtttggaattttggtgcttataatttataataaaaaagaaaaattgtcaaaaatgaagagggaatgctttacccatggagttgagattaacacacaaaccaaccaaatcctgtcgatacggcaaatacgacc

SEQ ID NO: 86103 - DNA, 441 bp, Glycine max
  Clone ID: PAT_MRT3847_48764C.1
ggaaaaaaataataaaccggggatggaaaaaaagcagcccccccacccacaggaaaacacaaaactctccataaatgtaaattaaaggcaaagggacccgggggggccaaaaaaacacctaagttactttttaaaccaaaaaaaaaaaaaacacgggcctttcaaaatcacagttacaaaaatcaatccctattaaggacccttaagggttcttccaagggggggattaaaaaaagggaaacaaacattttttttttttggcactattttctatccctcattgaaaaaagggcttaaaaatgggcccccttgaaagggcgggccaaattgccaatgggggggggccacattgaagcttggaaaagttttgccatcattgggggggacttgaaaaaaaagggattgcccattgaggaaaaagttgctttgccagttttgccc

SEQ ID NO: 86104 - DNA, 748 bp, Glycine max
  Clone ID: PAT_MRT3847_48765C.1
gttggtaccaagcaaatgataaaaaaaatctcagtgtaagtatgctagtaactgccaaggtttgctgaatctgtattcgctcaatttaaagaggcaacaggtgacttcatctcatattagacgacagaaacaatggcaatgcagggttgttattgtcactatacgaagttggcaactcaaagaagaacactggaaaatctcagtttttcaggctcaatttcggttaacaaattgtcaaagaatgaaaggaccagaacatgtgatccattatcagcagggaacaatcaatttcataggttactggtgaaaatgcggcagacagaaatgcctgcctcgaagtatggaacaaatggtaaagctgttagaatggtagggacaaatgagttagtgaaaagaaagagaatgttagagaataaggtgttgaatggttcagcaacttcaaaggtagtgagaaaaaatggtatcacaggcttgaacaagacagtgaaatctagaaggtcattggaagagctaaaggttttagccacagatgaaggtttcagttgggccaatgaaaattacagttcctggcagaggtctattgatgtttggtcttttgtggcttctttacgcattcggattatgttggacaatgcacaatggacatatttcggaggtttcacagaggctaagcagagaagcagatagcggaaaactgcctcgtggttaaggaagtgtgtattgcatcttggaccaactatcattaaac

SEQ ID NO: 86105 - DNA, 275 bp, Glycine max
  Clone ID: PAT_MRT3847_48766C.1
tcggcggccgccctttttttttttttttttttttttttttttttttttttttttaaactctcttatttatttgggtttgggattaaattttaatctcataccctacaatccctcaataacccttaaaacctcaaaatactcatctcttttatactaccattacattcaaaaatttactaattcttctaaaaaaaaccatttccccctacttctaaaaccccataacaataataattttccccccaccttcacaaattctctcatatatcctactt

SEQ ID NO: 86106 - DNA, 349 bp, Glycine max
  unsure (1)..(349): unsure at all n locations
  Clone ID: PAT_MRT3847_48767C.1
gagctttcttgtcggcggccgccctatacnccccgggggggttttttcaataaatttttgaattttagaccgcttgactttgaccaattcactgatgtattcacacaaacatggccctgaaactctgcatcgccgccatgtgagatgccctcaagaaatcaattaatcaagcaacactaggaaactggaagccatgagaatgaaaaagagaaaagaaaaccatttacattgtatctaatgtaactaacaaaatctgaataagaaataaaattataaaaaagtacaattctggaactgatgatttgattgtgatcccatagtacctattaaacaattggaggctgaacac

SEQ ID NO: 86107 - DNA, 417 bp, Glycine max
  unsure (1)..(417): unsure at all n locations
  Clone ID: PAT_MRT3847_48768C.1
gcaaaagatgaagtaatcaaggattacatttacaatgtagaattcgtccttcttaagtgcaggtaattatgagaggaacgatttctcaccttaatccttcgagtgaagttgaaactatgaacaggagaattcactctaacattaacccaaaaatattaaagaatggtttaggtggggggcagggggaactctaattgggtggaaagtttcaacttacaaatgtgtaacacttgtcaacaaataacaattacttccaaattttgaattgaatctgtaacaaaagaatcaatcaacaggcaacttgtaatttaatatacatgtaaaatcattngttggtttcttatgtatattcagcagcttgaagtcactggggctgtcccttttgcaacttataactcttgctttctcgtctataat

SEQ ID NO: 86108 - DNA, 215 bp, Glycine max
  Clone ID: PAT_MRT3847_48769C.1
ccgggatcgacccacgcgtgccgacacacaccactttatatacgcacacgaggagtcggaagcactactgctagtacaccggataagctctctcatctctgcgctgctgacagctatgactggggtggaaactaaagactagggaaaatggggaagtgcacaggcgaagagctgggggggattatggactagtaagcatgaatatagcagggata

SEQ ID NO: 86109 - DNA, 338 bp, Glycine max
  Clone ID: PAT_MRT3847_4876C.1
tgaaatataaacagctttatcctagtctcttcagaatcgcacattatacatccaatatagcgaaaatctaatctcatcacatattataaagtatcaatgacgaggaacaaaggggagacctaacacattatggtaaacgaaaatgcataatattatgctcagaacctgagctggctgaagaccaccgatgcttaccagtcttgatcctctgctagaggcagcttttggtctgcttgagagcaggaaccttcatattcttggcttggagcacgatcgaggtaaccgcgtccttcacatagacatcgagcgtgtagcgcagtgacatgatgtgcctcgga

SEQ ID NO: 86110 - DNA, 458 bp, Glycine max
  Clone ID: PAT_MRT3847_48770C.1
aattcggctcgagcaatacaaagaaacgagataaaaaaaaaaaacaaaaaaaaaactccctacaaaaccaactcattaaaatatccaattcaatatccgaaaacagaggaaacatgtctctgtttgcacccctgttgttgaaccagagcgaccccttcgaccatttccgagccttactcggtggaaattcagaatcattggatctcggagcgtacacccaaatggattggaaggaaacccttgacgcccatgtgttcgaaatcgatcttcccgggttcgccaaagaggatgtgaagcttggagtgaaagaaaacagagtgctctgcatcaaagcagagaaaaaagcagaacaagaagaacaagaagagaagacaaagctgaaatggcattgcagggagagaaggagcagtggcgtggtctctagggagtttaggttgcctgagaattccaaggttgat

SEQ ID NO: 86111 - DNA, 411 bp, Glycine max
  unsure (1)..(411): unsure at all n locations
  Clone ID: PAT_MRT3847_48771C.1
gactaccacttcccantatcttaatctattccacaaccaccctcatcataatgggcaactttttnnngaagtcggagaggaaattaacgggggggattggtccactctacttttccaaattttatcccaccttccntttacacttctctcccaatatcattctctccgcttatatccgtttcnctcttctccacaagtccgtttctttagactttgtctaaacggaaacctatctcgtgggagattgttgttgttgtacggttacgctccaggttgtgtcggaagttgtttctagctcacgcaatactctgctttctttcatctactctctcttcccttttccctctctttgtatctttatgtaggactaaactactccttttcttgctatctttactctgtctcaccaca

SEQ ID NO: 86112 - DNA, 2176 bp, Glycine max
  Clone ID: PAT_MRT3847_48772C.1
cccacgcgtccgcccacgcgtccgattttttgaacaaaaatcctaaaccaacctcttcttgctacgtctccattcacagttgctgttcctcccggtcgttgtttgcacaaactcagcctcaatccaatacgatctaatctgataaaatagtaaggatacttataactgttttcccttggtatggtatttcatcatatgggtgtgtttaagttttcatctttcaccggataaacatgaagaattaaccatgctctagtcaaaacttgttttgctcaaaattcaataacttggtctgcttaaagatattggcttgatccctcacacctgcaaaattgaatggcaccctcaatttgttttcttcttctatcccttctgttcctttcatcctccacaagtggtgatgaagagggtttcatctctgtgatcatatctgataaggggcttgattttgccaaggatattctgatagaccaagctgttgcctctattgttcagtctcagctgccacagattgagaagactgtgcaagtccctcttgttggaaaagccaaagtggttctttctgacatcactatcaatgatatccaagttaattcttcatctgttaatactggagagacaggcattgctcttgtcgtttcaggtgccactgctgacttgagtttgaagtggaggtactctgttagcagttggttagttccaattggaatttcggacagtggaactgctactgtaaaggttaatgatttgcaagtgggacttactgtgaatttaaggaaccaagaaggaactcttaagttgattctgctggattctggatgtcatgttagagatttatctataaagttgcatggtggagcagcttggctttaccaagtgctagtagatgcttttgcaggaaatatagcatctgcagttgaagaggcaatttctaagaaaataaatgaggggatatcaactcttgaccttttattgcaatctcttccaaaaacaatcccattagacgaaactgctgctctaaatgtttctttcgtggacaatccagtgctgagtgattctgctattgaattagaaattaatggtttattcacagggagaaatgaagttttggtacctcaagcttaccgcagaggatcagacctttctgcttcctgtggtgacagttcaccaaagatgataacaatttcattacacgaaagtgttttcaaatccggttccttggtttatttcactgctgatagtatgcaatggattgttgatgaactccctgatcaggcccttttgaacactgctgaatggagattccttattccacaattatacaaaaaatatccaaatgacgacatgaatcttaatatgtctgtatcttctccaccagatatacaagtgacaaacaaagatgtcggtgtcaacattttcatagacataacaattgatgttctggaagatggtgaagtcatacctgttgcatgcatctcggtggattttagtgcctcttgtgctgtggaaatcgtaggaaacaatcttgccggttggcttaaattgagaaagttttccacgtacttgaaatggagtaaaatagggaaactgcacatgaatttgattcagtcagtgacatcaaccgtcctcaagactgtcctcataccatacctaaactcgcagttattgagaggaattccactgccaattcttaatggtttttccattaagaatgctcgtatattgtatgctcccccatggattactgtgtgtagtgatgtttctttctcaggagactactatctccaacaactaccagcttatgtatcataaacatgctctcagagatctgtctgcttagtgtactaagtggtaataaggtaatgagcaacttgtcaagatggctatgaagagtgaatgacatgaacattggtgtagctctggattttacctattgtaaatcatgctgtcctgaagattacatggaaaaactgccaatagtcaaacgtccttatttgatttggaatgctctgcagtttttttaatcagggaatggtatttttatatgtaaatttgtgaaaataatatattaacttttgtttggatacatcatacatagattaatattttgttttaccaagtattaacaaaaactattttttaaaatagaaacatttatttcttcactactatccaa

SEQ ID NO: 86113 - DNA, 363 bp, Glycine max
  Clone ID: PAT_MRT3847_48773C.1
taaaaattttaattaattagaaaaaatgtttttgaaagaatgtgttagagagtgtgttcctaacacttctctcagtaaatatcattgtttgcacttctcgaatgctgaactggaagtaactccaaaataaaaaattatgttgaaaggattaatcgttcttaatattatagtattctgggaaaccttcaaaatttcatatatgattctacaaactgtggctgctaatactcattcacttgacagtaaataatgcctgctctgtcatctggatccttggacttagacataacctaatttccatggatttgtggggaaggaatgtcaatacagggagcgtgttgcatatatgatatatactaaatc

SEQ ID NO: 86114 - DNA, 262 bp, Glycine max
  Clone ID: PAT_MRT3847_48774C.1
tttttcaaaattctgggtacatagttaagtaacatatagtgtaaacataactcaagctcatgtgaacaaaaacctttgattaaaaggtatttgaacaagattttaagtgctacaaaaactgaaaataaacatacaacttaaacaaactctccactttctgaagaaatgtctcaaatattttgacataattgttcacaaaatattgtggatgaacatcattttaaaaaataaagaacagcatccggtattaagttatcaaaat

SEQ ID NO: 86115 - DNA, 610 bp, Glycine max
  Clone ID: PAT_MRT3847_48775C.1
ccacgcgtccggataggttatctgaccagaatgactctaggagattccttacatgactgcaagaagaaggcctcacagtcccttctgaagggcaagagttggtcgctggagagaagaaggaaccagagtgtgatgttaagactgctgctgatgcaacatggcagaggcctgctgttcgctgcactattgctgctacacacaatatagatggactggatctctttattgatgaagatggactctggatgtcatcaacgactggctgaaggatgccaatcttttgcaggctggtcatactaatgatgggtacattgctgagacaattactgcaaggacacaagcaagctgaaaactgtgtctatacagcgagaagtgaaatacatcaggaaggtgagcaactgccagtatccttgatggccatactagctccaaagcgcaggataaagcaagagtattatttgaccgctccaaaggaggaggagatggagatgctgaaccaactgagtatccctatcttggtacaagaacgatgtgagtgatgacagtgtaaggtcgaaaggccacccgtcttctgtcaatgaagctggcaatgaagatgatcatgcatcac

SEQ ID NO: 86116 - DNA, 324 bp, Glycine max
  Clone ID: PAT_MRT3847_48776C.1
agaaaggagggagaatagctctcagcaatctgcttctaagggatgacctggatccagattactcgctctgtttacatccttatgggtagatagtagaaagccggccactctctctgacgcttatttgcatgtatatcagtcctggaacctaaacctacctactctctgtattgtttcatcgggtgaagatcgctatagattaacaatcaatcttcctgcatatacgcctacatgcgcctagatctctcttaagctggttctatatgtcctttaattagtgccacttcgtggtttcattgaaagaataccacaacggcggccgca

SEQ ID NO: 86117 - DNA, 431 bp, Glycine max
  unsure (1)..(431): unsure at all n locations
  Clone ID: PAT_MRT3847_48777C.1
gggtacaacantaaaataatctctaattatggatactacatgtaaatcctcatgcactctgaccaggtatacgtggtgggatctttcttcagccctcgccctgctactgtccgcttctagcgactatgtctctgcctccatttgggaacatgatggtcggaggcttcagttccgtattcccttcttctcctcttttggtcgtggtggggatttatagacaactctacggggcggatcaagacagagatatccgtcctttatgacgaatattgtgacaatgtgataattgtttgcgtcgcatcagcatgtaaaagattgtgcacgttctgtgtagctttctgctcaacaacacgtcgttactctcctcaaagttcctaatgatccctgctattctttgggactacacgttccttcgaccaccctagtttttc

SEQ ID NO: 86118 - DNA, 1604 bp, Glycine max
  Clone ID: PAT_MRT3847_48778C.1
cataatcagcagagagaattccatgctttcatgtgtgtttcacaaaagcagcttgatacctttgagtatattttgtttttcaaaataatttaacaaaggcaagtaatcacaaaaacgaatttatgtcgtaatttgggtttcaacgttgcatcgctatatctaacgaggtttcaataacatgcttgcatatgtactaataaacaatttttgaaaaaatttgttttgggattgttgattacaaactaattaaaaatagttgatattgctatttttgagttgaagcatatagctttggggtgttcattgtgtgttgccactctcctctcttgttgtacacttgttccttttggtttgcagaaaggaacatggaagctgtgtgtgctttttctgttggcacacttcacatcccaacagcacatgaaacatcaaactcctttaggaaatccatattcttgagcaaccaagtggcttcaccagtttcattggtttttctcaggggcagttcaaaatccaagcttttaactgccttgtcaccccctccattgacagaatccagtaaccaacctgaggctgagccagaatttgaaagtcatgcagagaaatttgactggtactctcagtggtaccctttgatgccaatttgtgaccttgacaagaggaagccacatgggaagagggtgttgggaattgatgtggttgtgtggtgggataggaatgagggcgcttggctggttcatgatgatgcaaatctgattctggattcagatttatatcaccgccgtgttgaggaacataaactaaaggatattggtccaaacaattggcacaaagcctgttttgtgccaacaaagtcagacgcccttgttattggttatagaacgtggctaaggaagtatgcaggtggtcaggttgattggagaggaaaatatagtggagctcttcctccaacacctccgagagaacagcttttggacaggtactggtcccatgtggtgaattgcaagagttgcaattctgcttataagagcctcaatgcggttgaagtaatgctgcagatcatatctgttgcttcaattgggattgttgccgtcatgaagcatggtacaatgtcagtggcaaaaagaaattcaatggttgccttagcagtgctatcatttgcactgtcacggtggttagctcacttcatatacaaaaacttccgttatcatgactatgagcatgccttccgctgaaatgtgttttccatatttcttcatgtctaaaaatatgtgtatagactatagtgaaggtccactagaatgaagtcactggtcacttacatttgacttttcagctaagaagaaaatgtgtttaatctttgtttgcgttccggttagtcctggtaaaagcagattgatatggtgcttcccaagaaactttggattgtggatggacaaaattgtaccacgatggtaaattttaaaagttaattcctctatgacaagtattcgcaacctcttcatacagaggacaaataagttgatatcaacatgtaaataatttaaaaaaaaaaaaaaaaaaaaaaagggcgcccgccgaagaaggagctcgtcgaaacgggaatt

SEQ ID NO: 86119 - DNA, 1914 bp, Glycine max
  Clone ID: PAT_MRT3847_48779C.1
cggtccggaatcccgggtcgacccacgcgtccttttgagttgaagcatatagctttggggtgttcattgtgtgttgccactctcctctcttgttgtccacttgttccttttggtttgcagaaaggaacatggaagctgtgtgtgctttttctgttggcacacttcacatcccaacagcacatgaaacatcaaactcctttaggaaatccatattcttgagcaaccaagtggcttcaccagtttcattggtttttctcaggggcagttcaaaatccaagcttttaactgccttgtcaccccctccattgacagaatccagtaaccaacctgaggctgagccagaatttgaaagtcatgcagagaaatttgactggtactctcagtggtaccctttgatgccaatttgtgaccttgacaagaggaagccacatgggaagagggtgttgggaattgatgtggttgtgtggtgggataggaatgagggtgcttggcaggttcatgatgatgcttgtcctcatagattagcacccttgtctgatggaaggattgatcaatggggcaggttgcagtgtgtgtaccatggttggtgtttcaatggcaaaggagaatgccagctcattcctcaggcactccctgatggccctccggtacatacgtccaaaaaagcatgtgtagctgcttacccaagtactgtgcagaatgatatcttgtggttctggccaaatactgatcctcaatacaaagatattattacaagaaaaagacccccattcataccagaaatagatgatccatcgtatactaaatcaatgggaaacagagacattccttatgggtatgaagtactgatagaaaatcttatggatcctgcacatgttccatatgcacactatggactaatgcgtactccgcaaccaaaagtgaaagctgatagagaagggggcaggccacttgacatgtctattgaaaagttagatatcaatggcttttcagcaaatcaggcttggggcaaaagcaaatttatgccaccatgcattttttatgcatatactccagatcaacctgcctcatctggtgaaactaagaaatcatcagctaagaagaaaatgtgtttaatctttgtttgcgttccggttagtcctggtaaaagcagattgatatggtgcttcccaagaaactttggattgtggatggacaaaattgtaccacgatggatatttcatgtgggacaaaacctgattctggattcagatttatatctcctccatgttgaggaacataaactaaaggatattggtccaaacaattggcacaaagcctgttttgtgccaacaaagtcagacgcccttgttattggttatagaacgtggctaaggaagtatgcaggtggtcaggttgattggagaggaaaatatagtggagctcttcctccaacacctccgagagaacagcttttggacaggtactcatttaagattgctcttgaacatggaagtttcaatttagttataaatagattggccatttcctttaattcagggaagagttggtatacgttttggtccttggaagtggcaacttgtgttgcttaggtccctgaaaaaagtccatacagattagtcttttgtgggatagaattatttaagttcacagcttaaaagggtaaaattgttaactagttgacatattcaatgatcaatttgtatagataggcactttcaaggactaaagcaacacaagttgttttgttgctttaagggaccaaattgtatattaaatcaagcataaatctttaatgaagtccaccataatcaagaattttatcaatctaaaattcttagccaatggagaaagaaaaagttgttctgtacttctgtaactacaacataatcagcagagagaattccatgcttt

SEQ ID NO: 86120 - DNA, 532 bp, Glycine max
  unsure (1)..(532): unsure at all n locations
  Clone ID: PAT_MRT3847_4877C.1
cagagtcctgtcacgctcggttcacgggctttatctaaatcgagtcacttacttgtgtaactgacccggtggtattctctgttaattggtggtgtgtgtttggtcgttttgttaaggccaagcgcaggcgcatggtatagctgccgactgcataggggcaaaggcgaatgcgccgcccactaagaggagagaggggctcatagtagccacagatacatggcgcctaccttcaggcatgttggctgacacaaacgctgggcgagcaagaggtgtgtcgtgcaggatggtaaccactgtgagtcaggcaaaatcgagtatcaacggaggcagcaacagtgataagtaacggcagtatcgccacttagccagcatccncaaggcgtcgccgttggtaatgctaggtgcgtggtgcgataaacgggggatgagcaactgtattcgtaactaaagctagccctgcggaaaatattgtcaggtgctggatagaacactccngcccagggtgtgagtgcacaagccgctgcagttaaac

SEQ ID NO: 86121 - DNA, 171 bp, Glycine max
  unsure (1)..(171): unsure at all n locations
  Clone ID: PAT_MRT3847_48780C.1
acgcaggcangcgnacgnaagcacggaattcggnncgaganccccacncggaattccnngnacgcgcnctnannaccncaacnctcnnaanganncgcnancangaaggannanncgaanncantancnnannaagntcancaananntacanaaaggnagnaangngann

SEQ ID NO: 86122 - DNA, 215 bp, Glycine max
  Clone ID: PAT_MRT3847_48781C.1
cggaacacccgggacgatcccactcgaccgctcacggttagaaccaaacagacccggccagagcgaagggcacaataaagcccgggaccaccacagcccaaccgcgcaggaggcgccgcaaagacaagaagggcgaaggagagaccgacacgaaagaaccacccgcccaagacgcgagacagaacaacgaaccgccccacaaaccggggaaagga

SEQ ID NO: 86123 - DNA, 411 bp, Glycine max
  Clone ID: PAT_MRT3847_48782C.1
ggagtgattcacaaagagggagaaagtgaaaatcatgggtttgagaggtcaaattaaagacttgtgcaattttatattttttccccataaaaaaaccgtaagactccccaccggaaattatagctctactattagaaaactcacccgaagtagcttgccagtaattgaaaaataggggcaaggttggctaacaagaggcacaaacacaaggattcaggaagagaggcttaaggctcgaagggagaaagggtgggagtaattcacaaacagggagaaagtgaaaatcatcggtttgagaggtcaaattaaatataaagacccatgcgatttaacattttaaccctttgaaacgttgcttcacgtgtatttctgtcatttgagtaaaacataaggagtgggcccggatctaga

SEQ ID NO: 86124 - DNA, 204 bp, Glycine max
  Clone ID: PAT_MRT3847_48783C.1
aattcggctcgagcaataataataactgcattgttgcctctggcttccccccctgctctacacaaaaatatatgtattagcatgtgagaaggtgaatttttgtgaagaatggagagcttatattgcctccggtgtttcgatttcaccctactgatgaggagctgtttttgtaatacttgaagcgcaaggtatcttactgtcctg

SEQ ID NO: 86125 - DNA, 526 bp, Glycine max
  Clone ID: PAT_MRT3847_48784C.1
ccaaacaaaattccaaaaggcggggccgggcataagtcccaaaaccttccccggttttttccccccccaggggggccggaccccccctggggcctaaaaattatgaaccatggggcttttcccctggcccctttctttttaaaaatcccatagtcccccaaacagtttcccctctcataaaccccccaaaaaaccccccagaaccagctggtttaaaaggggggctttggtttccctcccctttctcccaaaaacaaaacacgggacccggccatttgggtccctaaagccctgcccccccccaaaaggtcatcccgggggcggggtccccgggggaaaaaacccccttaacgggcctccgaggggggacccccccaaagaaaacaagaaaaccaacttccccccccccgtggcagagagaaacccccaccgggggccgcccccaataggtcgccccggggacccaattggggggggaaatgccccctccccccgccagaacttggcccgggggttcggggggggc

SEQ ID NO: 86126 - DNA, 473 bp, Glycine max
  Clone ID: PAT_MRT3847_48785C.1
acgtctcatgcacgcttccctcagctctgaactcggcttgagcttctatgcaacacttactcgttacaacacttgctggttcacttctatcacctgcgtggtatcgctcgacatcgaaattaatacaactgtgaatgaaacttttaactatgacaccacacatggcctgcttagaagatcatcagagatgtgacgttcacaggtgacacggatgaactcactctggacggacgtgctgattgacatggtcgtcctgcaatatagagccaaatctggcatacgggatgctggaaccatcgatctatcgaaccaatgtctggcaaccttagcattctatggagtaggggtgaacctagcgctgcgcctgacaacgagtgatggggcacgattgtgcataagctgctgacagggttagcaagtggactgggactgttcacatcttctgtattgggggtgctttcctaagtgattcc

SEQ ID NO: 86127 - DNA, 993 bp, Glycine max
  Clone ID: PAT_MRT3847_48786C.1
ttcaaagggacttcagtgtccaattgtgttcagagtcagaagcaacctcattactggtggcaaatcaccttggtcgtagagttgaggcttcataatgttatattagaaatagattgcaaacatcatatctatgatagttttcattcgggtttaattgtaaggataaacttgctttgataaacaactcatcattgagtttgagtttggttctaatctatagtatgtttgagtatcctgtagggtagtcttcaaattgcgttttatgaatgcaataaaatgtgcagttaaaattgaagccctgttttttcagacccatttttctttccccaccccacttgtccttttctgcctcagcggaaaacccacttccaaacttctgttcctatctctctccacacttctggggacactgttgttgtcgttttcatctgtgtcacttcctagctctcggtttcatttattacatgttgtcgatctgtgtgttgttgggtccagaaacaaggcatggaggttaagattcagaaaacgttgtctatgtgcaagaatttgatgaaggaggtaaagacatggggttgtttgaagcagacagggctgagtttaagatatatgatggagtttggttccaaccccactcccaagaatttactcatctctgctcagttccttcacaaagagcttcccattagaattgcaaggagagccattgagcttcacactctccctcatggcttgtctcacaggcctcctgtcttgaaggtaccactcttacattgttggttttgctattcaggatattcggtgttgtctcttggttttaagaaagcatgttttggatatttctaatgttttacagttattctactgttctgttggttttgtttaccatttttaagaacttggcattagagttactatgaagcgtttgtgtttagtgttaatataatatgcactgcaggtcgactctagaggatccccgggtaccgagctcgaatt

SEQ ID NO: 86128 - DNA, 471 bp, Glycine max
  unsure (1)..(471): unsure at all n locations
  Clone ID: PAT_MRT3847_48787C.1
gccgcccngggggggggcggggagcacaccagggcacgaaaccanagaggaagggcgcccaggggacancaananccccaaaaangaaggggggagggaaaaaacacaaaanancaaaccacaaggggnnncggcacaaaccgcccgaggggaaggaggggncaccgaaggggggagcaaaaaaaattttttttttcnnccanccngcganncnananaaagangccgggagggggggcgnacaaacacccccagccccaangaggaagggaanaancnacacccacccaacggacaaggcagnaaccccggccagcgaaaanncngaaancaggaacggccaaaccaggcccaacgaaaaannaggggaagaggggggaaacnaagggnggagaaaaacgcngcancncnnncgaaaggaccgggcaaggganggaancaaagccggggaaacaagggaaaacgcccacc

SEQ ID NO: 86129 - DNA, 1412 bp, Glycine max
  Clone ID: PAT_MRT3847_48788C.1
cgaggaggcgtggggccgttctcatcaatggggggccaagtggcacaacattcacagttgagcaagggaaaacatataggcttagaatatcaaatgttggacttcaaaatacactaaactttaggattcaaggtcatgacatgaagttggtggaagttgagggaactcacaccatacaaaccacatattcttcattagacgttcacgtgggacaatcttattctgtgcttatcacggttgatcaagcacccaaggactactacattgtagtgtctacacgtttcactaacaaaattctcacaagcactgctatccttcactacagtaactcccaacaatctgtttctggcccaattcctagtggcccaaccactcaaatcgattggtcaatcaaacaagctcgttcaataaggacaaacttgacagcgagtggaccaaggccaaatccacaaggctcctaccactatggattaataaacattagtaggacaattaccttggtgagctcaacagcacaagtgaacaagaaacaaagatacgcagtgaacagtgtttcattcacacctgctgacactcctttgaagctagcagattactttaacattggagggattttccaagttggaagcatcccagatagcccttctggtagacccatgtatcttgacacctcagtcatgggtgccgactttcgagccttcgtcgaggtcgtgtttcagaaccatgaaaacatcatccagagctggcacattgatgggtactcattttgggttgtaggaatggacggtggtgtgtggacgcctaatagtcgtaaccaatacaacctcagagatgcagtatcgaggagcacaacacaggtatatcctaagtcatggaccgcaatttacatggcattagataatgtgggtatgtggaacatgaggagtgaattttgggcacgccaataccttggacaacaattctatttgagagtgtattcaccagttggatccattagggatgaatatccaattcccaagaatgctcttctttgtggcaaagctgcaggcaggacaaccaggtgatctctatgagaatcaaatccctcataacaaagatgtttatcaacaacctagctatgtagggaccaacttggtcccattctttacaaattcgtctaccatttctttgtattactaccaaatcaccatcttgttgtcataataattaatttgtcacaattgatttattttttcaaataaatttatttttctgatgcgttagcaaatttctgttctagtttatcataataaaatgacacaacttattcaatctatctacatgtgtacccttaagtgaatttgaagtgttgtgtttgcatttgaagcgttgtactgttgtttgacccgataattcaacatgtatttgagaac

SEQ ID NO: 86130 - DNA, 207 bp, Glycine max
  Clone ID: PAT_MRT3847_48789C.1
ggctcgagaaaggactcattataaagagcaacgcatctattgtgctgctaataagcactgaaatcgctggcggtgtgttcccttctccaaaggcaagcatatcctcgagagagaaaggttccttgcttagaaaaccggggagcctaactcgcgcctgagggtctgagcttgaaaacggagaaaagagggaatgtgttgatggataag

SEQ ID NO: 86131 - DNA, 246 bp, Glycine max
  Clone ID: PAT_MRT3847_4878C.1
tcgagcttagcatgggacttgctatagacatgggtagctatcatatggtatattcttgctgtggtgagtaggcatgatctacacagacatgcacaatgtatacaaggacttaagatagcgtgagccgactctgtgattagtgtcagtcgatacattgaatcggtagatcatgaaaatgccaacagtgaacctgtgaagtgctgtgttagattgatatgctgactcaattgtacgagttgaggattc

SEQ ID NO: 86132 - DNA, 373 bp, Glycine max
  Clone ID: PAT_MRT3847_48790C.1
tgtttccattacgtccttgatgcctacctcggactcagataacccttgggctggaaaacttagtttactgcagagcatatgaatcgaatcaagtggtatgcaaccaccaacatatattggatagctcacaagcacatggaagaccaagcatggatttcaccacacaaccacaacttgagggattctagccagcatagcgcacacgcttactatattcatataagttttccacctatattcattttattaaactgtcttggtcctcaaacacctacaaaacatccttttggcacccaatcacctacaaaaacctcattacttaagttttctaccaattttcattctaataaagttttgacaagcatttaacata

SEQ ID NO: 86133 - DNA, 775 bp, Glycine max
  Clone ID: PAT_MRT3847_48791C.1
gccttattatttacacactttttttaatatgcctggatatatatgaggccatatagcaaaaagttggtaccaaaaccaacatattagaagagagagcacttcattttagctagctagagaaaaaaaacaaagtgatagtgagaagatgttagctatggagggtaataagaagactaagcaatatggtcttgactctgccacttcttggtttggaagttgcatttcttcatgttcatcatcagaaaaagtgtcaactcacagaaagcttcctagaactgcttccgaatcatcagttaccaaccccatgaagaagcgtggaggatggaaggccataatctttattttagggaatgaaaccttcgagaggttggcagtgtttgggttatttgccaacttcatggtgtatttgacaagagaatttcacttggaccaagtttatgcttctaacattatcagtttatggtttgggatctcaaactttacccctcttcttggtgcctttatttctgatgcctatgttggtcgcttccgaaccatagcttttgcatcctttggtaccctttcggtaaggagttatctctgtggctgcctcagtcatattttacggttacattttcagtataaaagaaaaatcaattgaacaatttttttaagataaatttaatagaacttgctaattacagtcacttgtgttttgtaggtttaatactttaactgtaagagaaagagaaatacatgtgcactaaatctataataaaacaacgaataataaaca

SEQ ID NO: 86134 - DNA, 229 bp, Glycine max
  Clone ID: PAT_MRT3847_48792C.1
gcacagaatgataattaaattaacttaaaagaaaacttgaggagcataagccctccaaccaaatatcaacggccaccggttcaactggtaagataactcaggggaaggaaaaccctacacagaagaagattccggagaaattcaatagtccacatttgatgtttttatcagcccatttgacccctctagcaaacacagctgggaaacttctcatgggtatggctgataa

SEQ ID NO: 86135 - DNA, 258 bp, Glycine max
  Clone ID: PAT_MRT3847_48793C.1
acggctgcgagaagacgacagaagggatgtttgctcatacatgatccttgtattttcctctacaaaacaaaaacaaaaaaagggaagcatgaaaattcatgatgcattcttagttgcatgtgttaggtaccgtgagccaaccatgttgggatcataaacccatttctaaaaaaaaaaaaaaaaaaaaaaaaaaaaaggggccgccgaatgtgggccccgtgcacccgggatttaattcgggacgggtacctgaggggg

SEQ ID NO: 86136 - DNA, 244 bp, Glycine max
  Clone ID: PAT_MRT3847_48794C.1
aagtgaatttgaagcccgactgaagcatttgttgagttgccattctaataaccctaaccttattacacctgaggaggctgtggaagcctcaaaagtggccgcaatctctgctactaaagctgcagacgctgcaagagcagcagctgaagaaaaggctgcaagagcagcgaaggcagtagctgcagccaaaagggctttagatttggttgcatctttctctgaggaggtggctggaaaggaaaga

SEQ ID NO: 86137 - DNA, 400 bp, Glycine max
  Clone ID: PAT_MRT3847_48795C.1
actcacacacccgtgtggaagataatgcgttgtacataccattgccgtgtttcaggaaggattgcttgggatctcatgagacagtaccactatgagtgctactggagtagctagctcaagttgctacctgaatccattagctagaccatgttgacagttgtagcacggtcttggaaaaatgactatgcattaccctaccaagcttctttccacccatcatacgactctcatgtttaccagtaccacagaaaaatcatacgtcgcatgcggacatacttgcttactttcacgggagctccactgcctgtacttgtatgttctatcaggtgtaagatcatataccgatgttgagcttggagtgattgcaaattcggagagtgcagctttagtgttcatagat

SEQ ID NO: 86138 - DNA, 270 bp, Glycine max
  unsure (1)..(270): unsure at all n locations
  Clone ID: PAT_MRT3847_48796C.1
ggccaggcaagcnccactcanccaccacacctctnctcgttcacgctacccctttctgctcttcttctacctttcangttttaanagtataaagntggcagagacnttcctntttncctcagagtcggtgaacgagggacaccctgacaagctctgcgaccaaatctccgatgctgtcctcgacgcttgcgtcgagnanggaccnagacngcaagttgcctgggaaacatgcaccaggaccaatttggtaatggtctcgggaaaatcgng

SEQ ID NO: 86139 - DNA, 394 bp, Glycine max
  Clone ID: PAT_MRT3847_48797C.1
tttttatttgtagaaagtctagacaggtgccaggaaattcacaacaactcacgcgttttgaccaatcaactgaactagacccctttggtgggagcaagaaacattttatgagattctcaatctttaactatgagagggaccatgtttctttttggaaatctgatgtttggcgttagggcaatgataaaagatagagcggttaagcgataaaaatattatcgattgattctctctttcatctctgataatgcgatcatcgagccaaaaaaaactgtcttataaggacaacatccaatcaaattattaaatatctttaaacaaaaagcattcatcttgcgggggcaattggccacatactcaagtgtgtgcatccacccttggtggtatccttatc

SEQ ID NO: 86140 - DNA, 170 bp, Glycine max
  Clone ID: PAT_MRT3847_48798C.1
catctgcatctgtttgtgttcgacagaacagggaccttaaagctttgggtcgagaatcctaaccctgggtaacaaccggttgaggtacgaaatcgcacaaaccgcttacatcaaattcatccttcactccctcaaacacccaaccttcggcgtcaacggggtcttgatcg

SEQ ID NO: 86141 - DNA, 280 bp, Glycine max
  Clone ID: PAT_MRT3847_48799C.1
tttattctgtataaccgtaatcacaggtagacggaccttacaacagcaaaccaagcgattggtactagattttagcattaaatagtttcaaactagttctccgagtaccactttttaagggacagaaaacacctatttgggctggtcactatcttagagatggagtttctgttgcagtgtaagaagggctgctgcacactccgccatttgggttgggactccatggctgagttggagactcccagtcactttagaagttctatgtttattgactagatga

SEQ ID NO: 86142 - DNA, 1174 bp, Glycine max
  Clone ID: PAT_MRT3847_4879C.1
gcttttcttttgtcacaaagaataggttttaattaaaccagagaaagaagaacaaaagatgagagcagacagtgtcgcagctttttcaccaatctcaaccttgtaagtttagggtttttcacaaattgagctttcactccattttcgttcccaaatactatctccaaattttgattttaccatcgatatacgacacaacatcgcaatttctcgcgggtcgttttgataactggcgaaatcgcacgataccgacagcgtcgtgcggtaatacgacacatttgttgtttgatcatgttagccaagagattaagctctttcttcaaactctccccaaaacctcagatttccacttccatgaagaaagtggatgaagagactggcaaatactatggtagaaaggctgtgtcatttgtcttgattactattacaggtggtgttgctttgagtgcccttgatgaccttgccatctatcatggatgtagcagcaaggccatggagaaggtaagcaagaaccaggcaataatagattctattggagaaccaattgttaaaggtccatggtacaatgcatctcttgcagtagctcatgaaagacgttctgtttcatgctcatttcctgtttctggaccacaaggcaatggtgtcttgcagctgaaggctgttcgaaatggagatgacacttggtctttcctttttcttcctcgtgattgggacattttaatcatggatgctcttctccatatacctgagaatgagaagcaccgaaccttgcggatcaatcttgctgacaagcctctttcttgtactgcttgcaccgatagcacacctcatccatcagaaaattcaaaggcaaaattgagtgccaatcaataaaagcttaattagcaatctttaattcatctaaaaacaagtttttgacatttttatattttaaaccttttacatgattttgaggctaggtggacatcaatatttggctgatagaataaatttatttccaaattttcttttggtaatgtgttatagtattattcaccagtcttatttcattatgaaaataaattttgtcatgaatgatgtaaaatttctttattttggttcttttttccttttggtcttacttttatattgtaattttctctactactgaaggtgagcactggtagtttttgtt

SEQ ID NO: 86143 - DNA, 709 bp, Glycine max
  unsure (1)..(709): unsure at all n locations
  Clone ID: PAT_MRT3847_487C.1
ggtccggaattcccggctcgacccacgcgtccgcacaaagtctcattcactttgatctccaatttttttcagaaacccaagaatcaagtcaaatttgggtttcatttctctctctctctctcccaatcacactgatagaacctgctagctaggtttggttactccaatctccctctgcttttcttcaccttttctgttttgtccacgcattccaacattaaaaaaattggtccccgttcatttatatatgcaatatctggttcaacagtaaaagggtctttaaattttatttatatatagtatcagagtagcctctgaggaagtctgaaccaagagaaagataacacaggccaacttggaataccaaaaccaaaaaaagcctcaaattttgaatccatttttttgcgaagaaagttgaagaaaaaaatggaaacaatgttgcctccgaaccaagcagaggaagcaatagtcacaacaagccttaacgagacagagagtgaagttggtatgagggaagaagagaaggagttgcaacaacaagatcactccatgttcaacatcaagagcttnctctggcatggaggctctgtttgggacgcatggttcagctgtgcttcaatcaagtggctcaagtgctgttgacactgccctattctttctctcactgggcatgctatcaggaaatctgctttcagatttctatggaatc

SEQ ID NO: 86144 - DNA, 362 bp, Glycine max
  Clone ID: PAT_MRT3847_48800C.1
ggtagctccatgagggatgagagtcgtatgatgtcacataacaaaaattgatgtgctacaatgccactgaaattgtcgcgtggttccatttccatagaagaagaatcaaaaaaaagagcattgtagcgtttcaagttgatcataaatgcaagtgcgttactcctacgttcgaagactatgctttttgctctgttcacctttagccaaactcggcacttccaaaactcaatcttcttcttcttttttagccaatttattcgtcgatgacgattccacgctgttaagccttaagctttatcgacccttttatccaaataaatatcgtctaatggggtgtttaaacatattttctttctattttc

SEQ ID NO: 86145 - DNA, 515 bp, Glycine max
  Clone ID: PAT_MRT3847_48801C.1
ttttatttatttaattagactcggagtcattttaattgatgtaattataatagacttttacggactgttacatacttggaggaaatacaagtattgattctgtatagtttctttattcacctgtagctacaagcatttattggaaccttccctagcaacctgtcttgaaaatttgcgacagtcatggaactttcctgcagaagatcacttgaacatggctctgcctttaaatttcagctttccccatcatctttttcccagagaaagcaggtatatgctgctagaacattgctatccccaggggtagcctgaactgcttgctcaaataaaaacgaagctttttcctgatcatgatgaagttcccacactagtttagcatattctgatatcatttcaccgtcactgggatcagctactatcgcacgtgagtagtaatcctctgctacttgaagatctctcttggactgtaacagaaactgagcatactttttcagaaacaaaggatttgtttggat

SEQ ID NO: 86146 - DNA, 688 bp, Glycine max
  Clone ID: PAT_MRT3847_48802C.1
gggggggtatgtactcacaaatcagaacaaaaagaaagaggaagggtaaaacctatgttacaaaaggttactttgatgaaccatgcaacattggattttccgcagactgtcataaccatcctcagttttcattaccttcaaactactttgggaactgtttgatccctctcctcacaaccctaaagaggggtgagttggtgggacaaaatgggattgttgcagctgcaaatgccattgaaaggaagattagagatttcaagagtgatgctttgagattggctgaaacaacgatgtcagatattagaggcttagggaaatgtggtcaatctcttgtggtgattgttggctcgccgaaacttactgcgtacaacactgactttggatgggggaagcccataaagtcagaagtggtgaatcttgattctgtgcgaacagtttctctcactgattgtagagaccaagaaggtggaattcaggttggaatagtactcgagaggattcaaatgaacaatttcactaacatcttggaagaacaccttagtcatattgcagttcttgactaattaaaccatccacgtattagtcataacatgtatctttcacgccatgcatttgtttattatttaatggttttaaatactatactaaatagtaagagtattgttccagatattggaaaataaataaa

SEQ ID NO: 86147 - DNA, 398 bp, Glycine max
  Clone ID: PAT_MRT3847_48803C.1
gacaccccatctatacacgactcattctcactacacacgctcaacacattacttcctctttcgtgccctcaaattgagatggcctgtagggtcgatgaaaggatctcactgcgcaaccaacatcacattgtccgactacgtacctgctcaagctcatcctgcagtgtctctcttgacataagtagcgtatcacgcctacacattcacttcctcgcaatgggcattgacagtatacattactggcagctctttgctaccatatcacagttcatctagcctaaccaaccatgtcttgatacaacatggatgttccaaatggcacggtttgtgcatgaacgtttaaggcgagggtcacatgcaagaagagaggtgccactctcgtgtctagtttagacgtc

SEQ ID NO: 86148 - DNA, 577 bp, Glycine max
  unsure (1)..(577): unsure at all n locations
  Clone ID: PAT_MRT3847_48804C.1
aattcggnacgagaattggcttagacatgctaataaataaagtggagaagacttggagtgaacccaattaaggaccaaaatgcaagttttttttttttccactagtcattgctcaatattcatctttagatgaaatatcgttttcaaaaactatggtttagaggactgaaaagctcgtgtgtggactctggccgctcaaataggcccttggttgacctgttgtttgaggacttagacttagtcctgacatgcactaagcatatacgcatttacctgacaaccctttgcgtttctggaaggaactcatgctttatccttcaaacatgaatgtaaggaagcatggagacaatgctatgagtctaggaaaagaggcaatcccaggatgtgtccattcatattatataactattttctatttcgattcatgcttctatttgcctaggatgatagcagggtgagttggattctaatttcgactcatgcatcatgctcaaacatttgagttagattccgttagtgactacaagtaaatagtctttctnntagttcaattctaatnnnnnnactaattcanatc

SEQ ID NO: 86149 - DNA, 246 bp, Glycine max
  unsure (1)..(246): unsure at all n locations
  Clone ID: PAT_MRT3847_48805C.1
acgaagacngcaacgggcgcagtggaggaagcagaaaggcccccccccccacaggcggaaaccatagctgaggcagaaacaagcagccaaacagaggggagaggcgagacagcaagaaagcacctcccgagctaaaccggacaatgaccggcgcacgaagccgaagcagcaaaaaccacgcgcaagagcgcacccaaaaaacgcaagccggaagcacaacagaaacggcgcccaacgcccgaaaaa

SEQ ID NO: 86150 - DNA, 335 bp, Glycine max
  Clone ID: PAT_MRT3847_48806C.1
gctcaattgcctgaattgctataatttctagacatcactcgatcgacgtctccccggtgacgccaattggctcgggggctcctctacccccaccataaccactcatctcgataataccatcgacattaccttactatttatgagcctcctatctgaaaaccctctcacgcttgacaattccacaatgatcaccacgagcttaccactgcatattgacctgactgcctcactgtgctcgaatatcgaactctacgatacgaacgctgcctcatgagcttcaattacaactcgctaccctattcaattaccgatcgttcaaacatatttcaatacag

SEQ ID NO: 86151 - DNA, 492 bp, Glycine max
  Clone ID: PAT_MRT3847_48807C.1
ctctagagcgggcgcgttttgggtttttttggtttttttttttttaaaactaaaacagaggcgttctaacacatacatatgggcaaaaatcaattacaagccaattttcttaaaggaggaaaacacagggacgggcacttaacaggatttgcctatatcccaattaatgcgactaccaggagaaaacctaccctccctaacaacccggtctattggataaaaaaaggagtctggaaaacaaaaacaccgaccggggggcacgaatcgtctgtatgtttccaaccacgaactgaaggacgctgacgggggatgcgttgttggggggggggatatccgtggggggggggggggacacgctggggggggaatggggcacaggggaggggggctgcgggggccgcaggggggggtggggtgacgagtgttggtggggtgggagagccggggggggggtgtgggggagggggaagagggggtggaggggggtggggg

SEQ ID NO: 86152 - DNA, 411 bp, Glycine max
  Clone ID: PAT_MRT3847_48808C.1
ccctcggaaactggggtggccatacctttgtttggcgttaaacaaaggaaattttttgaaattttcctgactcccgttttgcgtttcctttggataaataaaggctggtttttgttccaagaccccttaaaaaaattgtaaaaaacctttcccaaatttttaaataagtttttttttttcaaaaaaggttttcaagggccatagttgcttccctgctccggttaaacagccaaagagcgaaggccacctcccccaaaacattttggtgggggttgttctgttgagtccctgcttttttttttttttttcacaaaaataaaacttttcctcttgaatggaggaaacagtatcccgcaacttttttagctttagctccattaaataaactgggccttttttagcaacattaaa

SEQ ID NO: 86153 - DNA, 290 bp, Glycine max
  Clone ID: PAT_MRT3847_48809C.1
atacgactgactatagggaacgctggcacgcccgcaggcaccgatcctgtatagccgccgccatccatgcgttcggacgatcttgtgcatggagaccatgtattttcccaacagcgtgagcatcaaggcttacgctaaggttattgatgttgagggccctaccggaaagcttgtgcgagactcacaccatgtgaacttgtacttccacctgattaccgacaagggctgcaaacaggaagctcacgaatgagtcttgattcggtactcttacaacattggtcgcttttcgc

SEQ ID NO: 86154 - DNA, 372 bp, Glycine max
  Clone ID: PAT_MRT3847_4880C.1
gatataaaacctcgggcgaccccggggaaaaccccacggggcacttctatgggaaaaaaaaaatgaaaacgggaagggccccccccaaaaaaaaaaacggccccggggcctaaaacgggaaaattcaaaccgggccccaaagggggccaaatttctcttaagaggaaaatggaaaaaacactggcggtaaaaaaggaaaaaccgtgccgcaaggaaaaaacggaaaccccggccaaattaaaaaaaaaaaaaaccccgagaaataaaagggggcaccccgggggcataaaagggggaaaacccccccaacaaggtggaggcacaaaccccccacaaacaaaaaaaaaaaacctctcccgaaaaaaaaacaaa

SEQ ID NO: 86155 - DNA, 158 bp, Glycine max
  Clone ID: PAT_MRT3847_48810C.1
ccatgatttctatctaccttaaattgggggtttataaaaagcttttatctatactttaacttatcgaaataggctttcttataaactttagacagattttcctcctgagccttacttaaaagtttaaatggcggaatgttatcatgcggattataacc

SEQ ID NO: 86156 - DNA, 312 bp, Glycine max
  Clone ID: PAT_MRT3847_48811C.1
gaacaggagagggcatacaattctaaattcttactatcgtattcatgagaaatcaaaactatgatataccgtaaaaaaaactatgatatcaattatgtaattagcaattacattgcccaaaagtatcaatggcaatgtgttcatcacttttgagtattaaaaaaaaactaaaatttacaaatgcctttagtgagcactcgaagaaagactcaaaatatagcatgagatgatctcaaagactctcaaaacttgacccccatgcaaccaaagcacagattttccttgtccatattatgaccaatttagtttgct

SEQ ID NO: 86157 - DNA, 451 bp, Glycine max
  Clone ID: PAT_MRT3847_48812C.1
ctgaagtttgcactctacagattagaggaccccatttcaagattgaaatttaagatcaaataatacctgaccatagtacagtatatttccctatttccattaaaatgattttaagcctgtgaacattaagaaatgttacatttggactacaaacattaaatataatatttgttttttttcttcctataaacagttttcattactggcagaagccatatcacaggaacatcaagaacttaaagccagagagaaatctcaggcccaggtaataattaagatagaagccaagtcatgcactgcatggcaatgtttctttcagcaagggacctcgtacattggtggttggagcaataggctgtatcatatagccccggtgtgcagtggactgtactctctaggtttgtgtaagtacactgacattttgcacaacaacaaaatcatttaatgatgc

SEQ ID NO: 86158 - DNA, 2323 bp, Glycine max
  unsure (1)..(2323): unsure at all n locations
  Clone ID: PAT_MRT3847_48813C.1
gcccttgatcggtgctttttcccaaaaaattgaatggccatggaaaataaaaaaattatagagtattgggttgtgtctatactttgcatgcttttgtcgggtcattggatctctgttcaagctgcccctgcaccctctctcatcacacaactccctggctttaacgccaatttcccatccaagcactattccggatatataagtattgatggaaatactgaaagtgggaagaacctgttctactacttcgttagttcagaaagaagtccagagaaggacccagttgtgctctctcatcactcaactccctggctttaacgccaatttcccatccaagcactattccgggtatataagtattgatggaaatgctgaaagtgggaagaacctgttctactactttgttagttcagaaagtagtccagagaaggacccagttgtgctatggctgaatggtggacctgggtgctccagctttgatggctttgtttacgagcatggaccattcaactttgaggctgcaaattcaaaagggaatctacccactttgcatatcaatccttacggctggtctaaggtttccaacattatatatttggactcccctgctggtgttgggctctcttactccaagaacacaagcaaatatgccactgggggattgggaaaatggcccttgatcacatgttatcctcttaaagtggtttcagcaatttccggaattccaggctaatccattttatattgctggagagtcttatgccggagtttatgtgcctactcttgcttttgaagttgctaaaggaatccggagtggtacaaagcccgtgatcaattttaagggttacatggttggaaatggtgtcacggacgaaatatttgacggcaatgctcttatcccatttgtgcacgggatgggcctcatatccgacagtatctatgagaatttacaatcttcttgcaaaggaaactactacgatgcttactctttggacgaaaatgatgtgtgttacaagaccattgaaaaagttgatagggccattgatgggcttaacgtgtacaacatactagagccatgctaccatttccccgatgctgccacagccaaagaaaatggaaccttaccaaggagtttcaagcaattaggagttactgagaggcctctcccagtgagaaagagaatgtttggtagagcttggccttttagagcaccagtcaaacctggtcttgttccattatggccccaattggctcaaactaggcacgtcgcatgtgttagtgatgaagtagcaagttcatggctaaacaacgttgcagtcaggaaagccattcatgctgaatcggaaaaagtggcgggtccgtgggaattatgttcgagtaggatagagtaccatcacaatgctggaagcatgattccttaccacaagaacctaaccaggcttggctatagggcacttattttcagtggcgaccatgatatgtgtgtaccgtttactggaagtgaggcttggacacgatctttgggttacaagattgtggatgaatggaggccatggaactcaaataaccaagttgctgggtacttgcaagcgtacgagaacaacctcaccttcctcacaatcaagggagctgggcacaccgtgccggaatataagccgcgggaggcgttggatttttacagccgttggttggaagggaagctaatataaggaaatgcatcatgtggcgtaaaataaaacatacatgatcgattattaatgaatagaagttacagcagtgtattttagctttttcgttagtgatttatcctttacattaaatcatatatgcatgggatttcgcaaaaaggaaacaaaaagaaatcatatgtaagggattattattatttaactgtaatttgattgatatatcaatcctttcgaagagaggatgttggaagcttgtaatatgataagcataagcctttcgtttttgtaagtgcgggccagtcagccaggcattctagcaccttataaccaatcatccatgaacacatttattagctagcttctagatttaggttccatttaattagaagacgagtgcttgactacaaaaaattaaaaaaaattgtatgacgcaagtattttgtgtatgtatttgaaagaatttaagaaaataacttatggagtggaatacttctatccaaaaggaccagcagaggcttatttttgctggcaaacagctagaggatggaaggaccctcgctgactacaacatccagaaggagtcaactctgcacttggtgttgcgtcttcgtggggggttntaagctggagctgat

SEQ ID NO: 86159 - DNA, 774 bp, Glycine max
  Clone ID: PAT_MRT3847_48814C.1
agcggttccagaattggttcaactgtgtgagaatgaaaacctaaacctacgagcaagtgctgtaaagttgttttcttgcttggtagagagttgtgacgaaggcatcatacaggagcatgtgaatcagaaatgcattaatactctactccagatcataaaatctccatctgatgaagaggaaatactttctgccatgggaataatatgctatcttcccgaagttgaccagataactcaatggcttttggatgctggtgcactgccaatcattaaaacttacgtccaaaatggggaaaacagagatcatcaaaggaataacttagtagagaatgccattggtgccctatgtcgttttacagttccaacaaacttggaatggcaaaaaagtgcagctgaaactgggatcatgactcttttagtgcagctgcttgaaaatggaacaaacttgacaaagcaacgcgtggcacagtctcttgctcaattttctaaaagctcatttaagctgagccggccaatatcaaagcgcaaaggactgtggtgtttctcagctcctgctgacattggctgcatggttcatgaaggaatatgctcagtcaaatcatcattttgccttttggaggctaatgcagttggaccactcacaaggactcttggggaacctgatcccggagtttgtgaggcttctttggacgctctattaacattaattgaaggtgaaagacttcagagtggtagtaaagtgctttcagaagcaaatgccataccactaataat

SEQ ID NO: 86160 - DNA, 421 bp, Glycine max
  unsure (1)..(421): unsure at all n locations
  Clone ID: PAT_MRT3847_48815C.1
gaattgactcgggcgagtgaggccgagagcgaagggcacgcgtcctggcacgcgtgcccttactgttacgttatgtacgagtatccgaaggtgtacgaggattgtactttgcggtgccagaattgtcggagggggtttcatgcgatggttgtacgttctccgccaaaagatggtacttttggctcgttttgcagttggggtttttttccctgtgggtttttctggggattttaacgacattaacgggtcttcttccaagtggaaccctttctcccctttgtttccttgcgccttgaagggggccgagcagaatagtacgtaccagaaggggccttgggttttttacgatgatgacgcgtctgcggagttcgtcgaggctggtttccgacacgancggaagatgattctcgatgatgatgac

SEQ ID NO: 86161 - DNA, 364 bp, Glycine max
  Clone ID: PAT_MRT3847_48816C.1
ggccgccgcccttttttttttttttgtgggttaatttaagtctgacgcccttatgttacgctaaaatgaatatagaagctcctacgccgacacaccccgagggaaaatatagaaaatgaacatcaagctccgaaactataaaacgaccaaaagttgaaccccgaaggccaaaacgaaacggaggaaaaaacctaatagcgcatacacactaagttggggggaatcccttatgaagagcaatgagaaaaattcccaaaagctaacagaaacctcgcactcttcaaggtcgcaaaagttacggtatctgccgattttgcaaaacagccaccactgccctaggaaggaaaggaaccttaacgggggg

SEQ ID NO: 86162 - DNA, 345 bp, Glycine max
  Clone ID: PAT_MRT3847_48817C.1
ccactccaactccattgctgggaggggtttgtttaaaagtatttgggggtttatttcggcgccttttggaaggatgtcatacgttgctcataacgttaatcagccccaagagaaagattcgtcggagggaaactcttcctttgattttaaaacctgctctagactggaaaaagtttcctctacaaaagcccaacttgtcagtggaaaaacctacaaatatgatatatttggtgctggttcacaactcttcagaagcatttcctgaaaaggaatatcaagaataaacccataatgattgatgccagattggtgacaaagaattgacccttaataccatgaggttca

SEQ ID NO: 86163 - DNA, 171 bp, Glycine max
  Clone ID: PAT_MRT3847_48818C.1
agggatcctatcaagttgaaaaggaaggaccgaatagtatgcacgatacttcatccagttacccagccctattgcgtgaatttacccaaggcggcggagactcacttaaaacaaacatcacattattcgaggaacctccgcgagagacccaacacacaaccaaacaaatca

SEQ ID NO: 86164 - DNA, 442 bp, Glycine max
  Clone ID: PAT_MRT3847_48819C.1
cgggaaaacacatttctgtagtaccaatactagacttaaattcacactcagaaaatcatcaaatactttctaagatcctcaatgccaccttatgtaaaatttcaaccatatcctaattcaagtttcatcctcattggtaaagcctcccaatcacataaattcacttcattggccaaacactctgagatccactcataacatcagaagaagcttcacattttcttaaatagttaaattaccttcaaaattctacattccacaattcaatcaacatctagtaattaatacctaaattcccacccaactcatgcaataacatccctttttagcaaccatgtaccaacattccaaccatttcccaaaccacatcctaatcctttcaattccaataccagcattaaaaaaatgtttcacattcctcaattcagcaaaacaacccccc

SEQ ID NO: 86165 - DNA, 285 bp, Glycine max
  Clone ID: PAT_MRT3847_4881C.1
gaaaatcaagaacacatcgatttactggtatttatggaactaaccaatgttttaaaatacatggtggaacaggcaatgatccattagcatgacatactaactatcaatgcaattatgtaaagaaaaaagaagttggtgttaacaaacgcctgaaaccatatttgatatgaaggaggtaatatcagttttgtataggaacattggttcaatcgatgattgacaagatcaaaagctgtggaaggcttgtattacacgggcgaccaattcatgctattgtcttggggc

SEQ ID NO: 86166 - DNA, 165 bp, Glycine max
  Clone ID: PAT_MRT3847_48820C.1
tggagaagaagcgaatgaagggaatcacgtatgccattctggaaacggtcttcgaggcaccggagtggatgcccgtgttcgaagatggtgccgcggaacgcccacttgactatgctgacgggccacccgctctgaacactggactcgtatgcaaagacattacca

SEQ ID NO: 86167 - DNA, 229 bp, Glycine max
  Clone ID: PAT_MRT3847_48821C.1
gctctatcctgatgcctgtggcgggggaggtccgggttggataatccaaggaatagtcagttatgggcggaggacatgggacatatagaagctggtgccctggatactggcagactttgatgtgatacactagtggatttttggtcgagactgggagactagatgcggctctgtcttctaagagtgaggggggaagatttcactgggagacttatgggcaggtttgatg

SEQ ID NO: 86168 - DNA, 439 bp, Glycine max
  Clone ID: PAT_MRT3847_48822C.1
ttgggggggggggggggggggggggggttggatggaaagaggcaagggggtggcagggcaatagaagcaagaccaaaaccaaagagcgcctatctaggataagtgaagcactaaaatgtaaataagacatgagcattgggaaggtaggggctatgcaaggctgcatataggtacagggctatccagataggccatcggcttaagtcagtaagcccaaaatcgggtggtggtggggggggtaacacacacattggagttggctcagtgatagtaaatagggtaagttaggggttgcagggaaattatgctaccctagtgaaaagactagcgaggcataagctatactcacaaatgttgaggcactcctgatgattgtgccaacgcagcagcttgaagtgtgtaactggatcgcgttaatcgttgccgtgaggctgagcct

SEQ ID NO: 86169 - DNA, 347 bp, Glycine max
  unsure (1)..(347): unsure at all n locations
  Clone ID: PAT_MRT3847_48823C.1
cgtccatctcacttagtcttcggccggccttatttttttttttccattttgctctctaagcttcacttgacgtttaacccctataccatagaaaaattgctaggggtaaaacatactcctgagacttcttgcaacattgcacgacctatagcaacgtgaaattttttaaaaaacttgtccgctataaccaagctttttcctactgtagtgnacatgactgttttgcctgtccgcaatgtatcaagtcgagcataatgttcttttacccaagcaggatatgcagattggaggaaaattttattaactccttgaagtgccattatggcgctcgtgttgcaatgccaatt

SEQ ID NO: 86170 - DNA, 123 bp, Glycine max
  Clone ID: PAT_MRT3847_48824C.1
gcacgagcaagaaggcctatggcctaggttggtgacttccattgcacttgggatgggtgcccacctaaggtctccccaagtgggagagcctacatcataatttatggtagtggggaaataaaa

SEQ ID NO: 86171 - DNA, 500 bp, Glycine max
  Clone ID: PAT_MRT3847_48825C.1
aaacaataaagaacatgcaagcttcaactggagcaagaattcaggtgattcctcttcatcttccaccaggtgacacatctactgaaagaacattaaaaattgaagggacccctgaacaaattgagtctgcaaaacaaatggttaaccaagtcataagtggcgagggttagtttgtattggaccattagtgacaccaacatggaatccctttgttggtgttctctcagcttgcgatggtatggttctaaacctcttttgatatttattagagggaaataagtctcctattaatgtgtataccttgtcataattggactggatttgaattgtcacgttggtatccttttagacaatgccttttatgcctttcagtttgcttttcaaaaggttgtgggtcatcttgtcttatgctggacttacatttgggataataacctgaaacttctccattgaaagctcttaacatttttcccctttacattattattcctttccttttt

SEQ ID NO: 86172 - DNA, 513 bp, Glycine max
  Clone ID: PAT_MRT3847_48826C.1
gggggggggccatattaaaagaggggggaaaaatatcatcgggggccccccaaatttaaaaacacaggccattattattttttaacaaaactggtttggaaaaaaaaaaaatgggttctggcaaaaaaaaagggggggcccacgtaaaaaaaaggggggggaaaacattcccccaaaaaaggggcaaaaaacattactaggtttcaaactttttttttggggaaaaaaaaaaaagaaacttattaaattggaaatccccttaaggggggccctaattatgggggggtttttctacgggaggagttaacccctagggcctaaaaactggggacccggattccccaataactccattcacttttaaaaaaattcccccacattaaaaaattaaaaaccgttggagaaaaaacaaaccactcatattttatctcgggcgacaaacttaaatggggggaccttcacccaaggggtaaaaaataccctaaaggcccataaatgagagcgcaaagggga

SEQ ID NO: 86173 - DNA, 440 bp, Glycine max
  Clone ID: PAT_MRT3847_48827C.1
ggaacttgaaaagaagatctgaatccgaaatcacttcagctcttccatcatcctcctcttctcattctccaagcccctcagcttcctccccaaacactgcaacgagagatctagaggcaacaaatcttcttgatggagctttagaggtgacagatctgttcatagatctctctggtgttcctgctcgtgtttgttgccataattggaaccagcacggcctcgaagatgacaatctcgtagggcttttaccagaatagaagtctctggtgtttctgctcatgtttgttggcatcgtctgaacgcgccaccacaaaccgtgcaccgctcgtcgtgcactggtggcctccacgagggggtgaagtcttgaaccctaagtagggaaaactgttgattcttacagagagtcgtagatacacctgcgaagaagaggcgaagtaaat

SEQ ID NO: 86174 - DNA, 573 bp, Glycine max
  Clone ID: PAT_MRT3847_48828C.1
tcgcgataggctattgactttatggttgtgatctgagaattaaggctgttcgcgtgacgaatatgattgaggaggttttgaacgatcaagtgtagaggaaggggtgcgagaagcgttgcgacgatgataccatcggcgacctgaagaagcttgcgcgcgtttcagactggaacaagactcgagaggatccgcatcctcaagtggaagaccttctacgaggagcacatcactctccaggattacaagatcacatgactgcatgcgtctcgaactctactactactgaacacaagacggcgtgattgatgagtaatatactatgtggtgatgatgacatactcgctaaatgtaattctgacttgcgaaagctcccatgagtagagataatgtacatctccaaaggatgttgcgtatcatatgccgatgacagcttaagttgctttgctatataacctatatctgatgacttgattggattgctgctaatgtttatttgcgatctgagtttcttctatagcctatctattcaatctgatcgcgtaagcgtttgacccctataaaagagacaaatga

SEQ ID NO: 86175 - DNA, 1257 bp, Glycine max
  unsure (1)..(1257): unsure at all n locations
  Clone ID: PAT_MRT3847_48829C.1
gcttgtgactaactccctctccctcccgctccgcgatctgtttcgtgttgtagctagctcctcgaaaatgctggcacgcctcgccgcgagtcgcttcaacgagatccgtcagattttccgtcagccttctagggctttctcaaccgctctgaactaccaccttgacacaccggacaacaaccctaaacttccatgggaattcaccgaggccaatcaagcaaaggttaaggagattttgtctcactatccatccaactataagcaatctgctacaattcctcttttagatcttgcccagcagcagcatggaggttggctacctgtttctgcaatggatgcggtagctaagattgtagaggttcctcccatacgggtgtatgaggttgccacattttactccatgttcaatcgagctaaggttgggaagtaccatctgttggtttgtggaacaacaccttgtatgataagaggttcacgaggaattgaagaagccttattgaaacacttgggagtgaagcgcaatgaagtaacaccagatggtttgttttctgttggagaaatggaatgcatgggatgctgtgtgaatgctcctatgattacagtggctgattattcaaatggatcagagggatatacttataattactttgaagatgtaaccccagagaaagtagttgagatagtagaaaagctgagaaagggtgagaagccaccgcacggcacccaaaatccccgccgaattaagagtggacctgaaggagggaacactactttgttaagtgagcccaagcctcctccctgccgtgacctggattcctgctgaagtgtgatatactttttgccttcaataatgtgaggcttgcatgtgttggagcttgccttaattgaaacattgtcagattgttagatgctcaaccaatttttgtatcaaccgtcctggatggtttccatttcaaaaatttgttccataatcgccataaatttcttggcatgttcattacttaccagcgttatctatgtttttctgtactctgtacattaatcaccatgaacgaaatttgaggttaccatgaaatacaatttagttaagaagtgaattgcgtggcatgcattacccacttgggtgtgtaggatggatttatcaacaatggtatgggagaacaatcatgttcaatgcaacattcacttccttgataatggccaaagggtattccggtcctggcatgatagtagattgaaaaatgaagttgannntta

SEQ ID NO: 86176 - DNA, 392 bp, Glycine max
  unsure (1)..(392): unsure at all n locations
  Clone ID: PAT_MRT3847_4882C.1
ccgggccgacccacgcgaccggtaaaaccttcgagccgccacacagcacangacgaanaggggaacgacaacccaccagncacgcccgangacaacaagaagaagcacgcccgcgagccccaaccaaagagaacaaagagacacaccacncacncgcacacccaccgcaaaccaaacaangccaaccgcggccccagccacaacacaagccagaanaaccacaacccccacaagcacccccccaaccacgcccaaaaccacaccaacgcagacacaaacaacacaccaaagaggcccaaacaagagaccgggacgcagagccacggcacaacaagccgcacagggagcccccgccgcagacgccaaagaaanggaacggccaccngccaaag

SEQ ID NO: 86177 - DNA, 331 bp, Glycine max
  Clone ID: PAT_MRT3847_48830C.1
gagaacagaagtaaaaattaaagggaaaaatatttctgatattcaaatcaagcaggttgaatttggatgcagtgagaaaaactattgcaatcactgcaaaacacccattttggatctccatagaagctgtcctagttgttcatatagcctatgctcaagttgttgtcaggaattaagtcaaggaaaagcttctggagcaatgaactcatccgtgttcaagcgacctgataaaatgaaaccttgcagtgctagtgagaaccatactttggaggagagagccacatctattggcgatttaactgatacttcagtattgcctgagggtacaaat

SEQ ID NO: 86178 - DNA, 289 bp, Glycine max
  Clone ID: PAT_MRT3847_48831C.1
actgcatgtattcctactcttcgtcgacaagggcatcaccggctaccgtgaggactttctggaaactggtcaccggaaccatattcagtaccgtctcactctcgaagttgtatctgacatagacctctactgatggactctggacgagatcttgatagtgatgggattgaaaagcaatggtactgtatgcgacgttttgatttgacgagccgttgaccgatgtgcttctctcttgcaagtggacatagttgttactaggcacaatgccgatgatatagcagagaccgtt

SEQ ID NO: 86179 - DNA, 401 bp, Glycine max
  Clone ID: PAT_MRT3847_48832C.1
atttattaccaatgagtgttcacttttgtcatgaattttggtggtgattcatgttcaatttatttcaaagccaattaatgatgtttgatgcataattttgttacgttaagaggattaaattcattatcaaaagaggaaaataaagcaaatgaagataaaaagccaaatgcattttgatgtaaatctcatagatgataattataagatagatcatgataggatctcaattttaatcatgattatgatatgatcagccatgagatgctaggcagtcctttgtttcttaaaattgtcttctctcttgtcagagctcttcattagaccataaaactactccctgatgatattagatggagcagtctttttttagcacattaaaaaatgataataataacagaaaa

SEQ ID NO: 86180 - DNA, 254 bp, Glycine max
  Clone ID: PAT_MRT3847_48833C.1
aagggagaaagaggggggcaatgtaaaaggagttacgctatacccacagcaggagccactcacaggaaggggaacggaagagccggctggaacaacacggatggacactgggtgggcacaaaggaaagcaccggggagagatcaagaagaagctacaccaccgggggaagaaggcaagggagtcaagctgggaacgcccaacaataagggcgcagaagagcccactactggcatggaagaggaacggaagcggg

SEQ ID NO: 86181 - DNA, 568 bp, Glycine max
  Clone ID: PAT_MRT3847_48834C.1
caaaatattagatgtcccgattaatgttttttcttttctttataatctttttaatagtgctgaagtcaaaaaaaaaaaaaaaaaaaaaaaaaaaaaaaaaaaaaaaaaaaaaaaaaaaaaaaagggggggggttataaaaaaataaaaggttggtagctcttgaatactaagccttattttttttttattggccccccaattaaattctctggggccggcaaaacaaaaccgtgacacagaaaaaaacgcggttgccaaacaaaaaatcttggcgcaacaaaacctttttgcaaggcggcaaataacaaaaaagccaccacccgaaaaccctttttaacaaaaactaccccccctttttaaaagggccacccccccaagggggaattaaaaccccccgggggtgtgggttaaaccccaccggtacagttcacaatccacaacctaacggccccccctttttagtaattaccttccgttttttgcccaaagatccgaattttcccctcaaaatataaaaattagcctcccttttttggagccacttaaccccttaaaggacccctaccc

SEQ ID NO: 86182 - DNA, 768 bp, Glycine max
  unsure (1)..(768): unsure at all n locations
  Clone ID: PAT_MRT3847_48835C.1
ccaaaatagaaaatctaaagcgaaacactgaaatcattccatatgatatagcttctctctaaatctgagttctaacttcctcagatttgatcccaaaccagttattctttgaatcagctatcagtgtatcaatttctacaaactttatgaggagctggatcatgctatctagtttggaatattgagtttgctagttaaagtgttgttttggatggtaaatttggtgcttcatgtctggtgaaacaagatctgagttgtgatcagttttagtcaataactaggtagtgaaaaaagtatatttggatttttattactttcaactgataaatgacgaggggaagatatgatggatcgccaaagaagcatttagttgcttccgtttgtggtgtggcagtctttcttggtttgctatatgtgttccagcgatccatctttggttctcagaatagtggttcatctgcgcttgaatatggcagcaagtcattgaaaagacttggggcatcatatttgggttcagatgatgatgctgatagcaagcaagatgaatcttcatccagtattgcgcagggagatggtgaggctgatattgtaccaaagagtttccctgtttgtgatgatcgtcattcagaattgattccctgcttagacagacatcttatctatcaaatgagactgaagttggatctttctctgatggaacactatgagagacattgtnctcctgcagaaaggagattcaattgtttgatttcttcaccggcaggatac

SEQ ID NO: 86183 - DNA, 283 bp, Glycine max
  Clone ID: PAT_MRT3847_48836C.1
gggggcgcccctttttttttggggtttttttttttttggggggccaaagaacattaaaaatttccccacctaaatggctttgaataccaaaaaaggttttttattctaaaaacctagggccatcaatatattgcttgacagataaatattttggaataacccgagagggttggacttttaatggggcccaattaccaatctcttttgaatagtaatcgggtaggactctgaaaaccaatttaggaatcttttttgccgtttgggaggaacaatctgaaatacc

SEQ ID NO: 86184 - DNA, 177 bp, Glycine max
  unsure (1)..(177): unsure at all n locations
  Clone ID: PAT_MRT3847_48837C.1
ggctcgattatggcataggtaccaancgnccacccaagganaagagcacactataagaggccggaaaaggaaggggagaaaaggagggaagnagggaagcaccagacggaaaaggaacaanggnccaaagnnagaaggaagcagcaaaggancnngaagcncaaggcagcncaacaa

SEQ ID NO: 86185 - DNA, 351 bp, Glycine max
  Clone ID: PAT_MRT3847_48838C.1
gaatataaccctatacattttataggaagaattcacaacattgacaccaccaatattattattcaccaccataaggtgaaaccctggccattgtaacacaaataacacgtgtcttctctgcctttagtccaaattaacttgcccctatcagcaactttggcatattcttgattctcgacaaatgtggacccgaacgcgagtagcgccttccaaacctggtttatttgtaaagaggaaatgccctcagggacaggcaagaataaatgcttgaataatgtgttgcatcaacacaaaacacgctttcaagttggtcaagccatacttcatgtggaaaaccattgccaaaaatac

SEQ ID NO: 86186 - DNA, 399 bp, Glycine max
  Clone ID: PAT_MRT3847_48839C.1
gctcagcaaaaataaatatgtattagatagatgaaagagtaccagaggtactgtgattacagataaattttgaacatagctggtacacaagatgaattaagtaccagctacaacccctgacttaagtacatgtgtgctgcacctcttggaagagggctcagccagtacattccctatctaattacataaaggcatctgccaaattagaggaccactgattgaaatgtgtatcaaaatctttttccattgctttaagccaagaccatataagaagaagtgcttcatccatcagcttggttgcattaaaaatttgattatcaaataccaacttgtttctgtgttgccatatggtccttgtgagggctatccaccagcagctccatctcatcggacgcgtgg

SEQ ID NO: 86187 - DNA, 222 bp, Glycine max
  Clone ID: PAT_MRT3847_4883C.1
ggatttcggctcaagctggcccccgaggacctccctgtaaactgcgcagccccaggatttatcattactgactgtagcaaagagtttcctgggactgagtctctctggatgaacttcatggaacatcctcagctgcagacgcttggggagtcagaggactgtgcaggaatcctgtacttcctgtgctctccatatgccagctacttcatcggggagaacatt

SEQ ID NO: 86188 - DNA, 2782 bp, Glycine max
  Clone ID: PAT_MRT3847_48840C.1
ccacgcgtccgcgttggtgtgttacagaaggaggagcggcggtggtggatcttcgagttgtgctagggttccactcacaaacaacgtacgcaaatggaatcacgacagcagtgagtacaccggcaaccagaacaccgacgacgaaatctacgccgtcctccgtgaatgttccatggatcccaatgaaaccgctcagaagcttctctatttagatacttttcatgaggtgagaaggagacgtgaccgcaagaaggagggattgagcagcagagcttctgatgagcctaggtttgcaagttaatactgagggggaaacgtacgcctcggaggatattcctctaactttcctgatggtggtggtgggaggaaccaagctaatcgaagggaaaatggagtcaatcacattgcagagagaagtcatgctccctctactcagccattttcacagaaaactaagactaatacaacatctcaagctacaagagtttcagctgttgcaccccaaggtgctgcaaatcaatccaatgggaagtcaggtcatgattctggtggccaatctcccatagttagtgtacctaaaagtacttcagctgctaaggacactggccatcaagaaaatgtccaacctcaagcagctgttgttgcagcagcatcctcctctactcaaacctttggctcagttaccagctctaaccaaggaatgtctgtgtcaagttctgatcaacttcaaacttctgtatccgatgttcattcttctttggatcctgtagtggcatcatctgtctcccggagtcttggtgtgagtggtgctattagtaacgaagttgtgcgggaccaaatcactttaaaagaaattaagttattcctaggtgattatttcatgaagttaatgatttatcggcatcaaagaatgaaaattatgggtccatgaattcagcaagcaaaacaaattccccacagaagttaaatgaagttgaaaataatcatttatctgaaccctcacaacttccatctccatccccaaatgattcattgaggccatcttccagttctgttagccagtcacctctagctaataccacagaggtttcaacttcagaagcttgtgtgcaatcttcagcagagttgaggcaacatgttacttttccaaaccatttccaagtatccaaggctttaaaaagtggtctgacatttggaagctttgatactttaggcccaagtgaaaagtccaacagtgaaactgatggtgacaataatgcttctcctgcccttgaattgagtgacgaagctgcaacttcaagcaatcaaagtgcatccttgactgcacaaggagatcatcttgattatccacattcttcatcttatttgattgaaaaggcaccagctacaaatggcaatcctataactggtactgacacaaaggttgatcagtcaaagaaggaggttttgttggctcctgaaggccaacaaattccaactgttcaaactgctcaaaactatggtttgaatttcatttcctccatgttaggcactcagcaagttcaatttgagggaactgaacctcagtcacaagatgcatctcgctttcctaactttgttaatgcaagttctcaggctgtgtcccctagcccaactccacccctgcagagttctatacctgtgactccacagtcggtttctattttcaggccaccataccctgctaatttcttcccatatggccactattaccctccaatttatgtgtctcctatacaccaatttttaaaccacaatggtttccctcaacaaccatcagctggcaacatgtatctaccagcagctgctgggatcaaattccctgtccctcaattcaaggctggagcaaacacaggaaacacagctcatattggaattccttctggatcatttatcactccacctgtaggatatgcgccaggtcaaacagttaataccggaagctccactggaaatcaagatcttgcagtgtctcagttaaaggaaagccagatctatacaacaggacagctgagtgaaggctctgctgtgtggatacctgctccaggccaagacatgtccagtttgcaagttaattctctgtataaccttacccctcagggacaacatctcacctttcccccaacacaggctgctcatggggcatttgctggtatctttcaagcagggcagacagtagcttcaccttccacccttttgcaacagtctcaggctgtggctgggcctgttgaaaatgtaggccccccttcaggatcttatcagccacctcagcctgcacagatcaattggaactctaatttttaggctggaaaacattttcttggtgcgataatgttcatatgcacacatggtgtgctcagatgcaggaagtatgaacactggcctgatctgaagtgtaaataaaaatgtggccaaagaatgagagaaagaaaattattaactgtttttggtggagatatttggtgctaacgattttgaagggtgctagttgcaggttttctttttctctatttttttccttctatttttgagcctccaatttatttatccctcacctctttcacccgagagaacatttagttgttgctatataagaaccttggtaattcctagtgataatatactaagccaagaattggtaggtgagatttaccaatttttccgttctaaattctcacctgtatattacattttgatatcagagaacattgaattatacaattttatttggagcatggaaaactgtgaatatctgcttttcttc

SEQ ID NO: 86189 - DNA, 548 bp, Glycine max
  Clone ID: PAT_MRT3847_48841C.1
cttggggggggggggggggggggaccagaatcagcaggacagggaaggagaaaaagaaaataataaatagacaacagcacaggatggggaaggaaaagaaaatacttattagaaaaaagcaggataacgtctctaaacccatatatatgcttatgattacttagtaatatttgcgattgtataggtagtgtgtgtaccaatttaagctaggcagcattatatcagatggggcagctacatacagaatatgaagacgaagagaagatatagaatacacaaacggatgattctatgcaagaatttgaaggaaacgaaaagttgtaccaagcagtaatctacaaatagcgggctccgccttagaagtccggcgagtccagcaccaagtgcttaccctggcaccacaccagtgccaagtgtcccaagtgtaatccagaatttggtcattgtggtactcagtgtaaccagccacggtaacaactctaagtcagtccttacggttaggcgtgcgctgtgtacaagctgcggtcttctggtgcgtgtcatctatc

SEQ ID NO: 86190 - DNA, 254 bp, Glycine max
  unsure (1)..(254): unsure at all n locations
  Clone ID: PAT_MRT3847_48842C.1
gttaaatctcagtnanaaaaactcaacttcctcctttctccaaaaaatntcttcnaaattccacannntanaaganangnaangcacnntcnaatncatggcttccctgaacctccttcnccagnctccattttgtnttctttccttcacagancacactgcaacacccatcttnttctcanacnaaaaccttntnaacgaaggccttctcttgtggtcaaatctantgtgggtgtggntnatntttctcnttt

SEQ ID NO: 86191 - DNA, 325 bp, Glycine max
  Clone ID: PAT_MRT3847_48843C.1
tttaattgttgacaactcttaaaactgcctatatactacagttatgcctaacattattagctttatgttatatgacacttgatgtctacactagtacgctaccctaatctcttaatgctattgaatctttgatgagtacatacattggcatagatattactttgttcaggatgcatgacaacgtgacataattggtcctaaatctggaacgcgatttggtccgtctattgggcattaaaatattgagacctatatcgtttgagaaaacccttttctttttatcgtcattaactgatctcataagttcataccgagatgtcacttt

SEQ ID NO: 86192 - DNA, 866 bp, Glycine max
  Clone ID: PAT_MRT3847_48844C.1
caaagcctcttcagttttaacagcaccagcaacaacagcagcaaaagagaaatatgcagaagcagccgcagcagactgggatcaagcgtcctcgagcatcagcaccagttggatctgcagctgtcctcaagaatgtcaataatgtcaattcaactatacaccactaccagcaacatcttgtccatccatcaggtttgtttacagagcatccaaatccatacatgagctcgccagccatgccatttggcatggtggctcctaccccaaatgttcctccttatgcaggtccttcagctgggccttatggtcatgatggtgtcccaatgggtcccagcggcaaccccagtcttggtggttctcatcttagctcgtcagagccacatgtgcaaactgttggttattatgatagagcctctacttatggtgggattggtctgcaacattattaccaagcatcttattatcctcaatagatcaataattcacttaatttgccagtactgaactggagggttgatatactagtttttccctgactttacaccttgactgcttagttatcaaaagctagtttgcaactttgcgccattgaccatgattgtaggacaagaagtagattcagtaattaagaattgtgagggaatgcttactgttacaattttaattacttgaatcacttcttaattgtatctataaaattatttctaggttaatcatggtcatgagttttctcattctctctttcttctctatttcctaggctttgttgttttgagtaagcaatgggacttggacaggatttggagagctaaagttatcttgaatataatctttacaaagttgtagtttcaagtgtgtatgatgag

SEQ ID NO: 86193 - DNA, 362 bp, Glycine max
  Clone ID: PAT_MRT3847_48845C.1
gaataaccccttttattggatagggtttgttacaaacattatttgatttaccagaccctatcaagctagtgctcaattacaacattattccaatccatggctcttacactaccagaacatttaacaccttatggagaacagggcttaaagaatacatagctccaaaaaaaataccgtgtgccaaattgaaagccaaagaccaacaaaagtctttttggattaaaacggagccttgatacaggggggtttccgcttacatcccaacactcaccattttgggaagaatactccctaagtttactatgtcaaacaggcaataatttgtttccttagattggtggaacaaataagcaaccaacccg

SEQ ID NO: 86194 - DNA, 258 bp, Glycine max
  Clone ID: PAT_MRT3847_48846C.1
tcctctagagcggcccgcctttgtttttttttttttttacagaattgtaaggaaagccgtttctttataataacaatcatatttattatacaccagctgacctatatgggtggtccttggcaaaatgaaagaaaaaagattcctgagcctgcaatagcagccccaagaaaagcaaatcccaagatagaatctgcatcattttaagaaagggatctgggtttgggacctttaggggtcctacttcttttccattaaaaa

SEQ ID NO: 86195 - DNA, 552 bp, Glycine max
  Clone ID: PAT_MRT3847_48847C.1
cccaatcccccacacttacccgttactttctcccttatacttctcctcttctctcactagaccaagaacaaatatctgaaggaccctcccaaaacaatgcaaccccagattcaaacccatatctcttgcagatcaaaagccaccagcctttcttgaccgcgaccccacccattctctctctaagctaaggatgtcatcttccactccgacgaggatgcatcaacaataacgactacgccatcaagcacaatatcaatgatgatttcgacgcctgcacaacttcttctaaggttttgggagttgggccgcaacggaggaagcacattggcccactaaggcccacgcggagttctagtggcacatacgggctgtgtacaattaattttgatttaataattaatttgtttacatatataattttttatgaaacttatatttatgtaaacaaattaattattagatcaaaattaattgtcacaaaatttattatgtacattaaaaattttaatgttatatataaagatattaattgttttataacataattagtct

SEQ ID NO: 86196 - DNA, 319 bp, Glycine max
  Clone ID: PAT_MRT3847_48848C.1
cagtgtgccactggtcggcggaaaaaggctggaacgaggatgataatgctcatattttggctgtaaggtcctgccttgacggtatggatacaccgcttcactttggccacaatggggccatatactacgttgttgggcgccatacgcataattcacatcctatggactacaggtttgatgcgggagacaggctgaatttcttgtatctcaagatccccaaaaaatgagttgtgtacgctgcgcatagaggagcctggacctctagagagggaagcgtatcacgagatcattgagggaggaaggcccgtgtacataaaag

SEQ ID NO: 86197 - DNA, 1228 bp, Glycine max
  Clone ID: PAT_MRT3847_48849C.1
cgacccagcgtccgctccgtcgtcgacctctccgaatccatgcggcgcggagagagtctgcgaccccagccacatgttccggcaccacaagctacgtgctctccatgctccaaaccctaaccctaatcggcgaccaaacccccccggtcccgcaactccgctcgctacagaccgtcgactaccgcacctgtaacgaagagatgtgcagtgccggcaaatgcctcatgctcaccctcctaccggagaatctccaccccgaatacagtcgaactcgagccctacttcaccgactccttagggaactcgagccggatcgactctggtaccggccacgataccaatttcgcggcgtggctgtactgacttgtgcggatcggggtcatcggagtgggggactaccccggcgtccgggccagggtgtttgtgaagtaccttgacctcatgaggaagctgcaattacagtactgcttggagcctgctgggtcccatggtgtgtgggggcttgatgattatcattttttgcccttcatatttgggtcttcgcagttgattgatcacaagtatatgaagcccaagtccattcacaatgaggatattttggagaatttctctaatgagtatttgtaccttgcttgcattgcctttgtcaagaaggtgaagaaaggggtgtttgctgagcattcacccatgttggatgatatcagtggggtgcccaattggaacaaggtgaacactgggttgcttaaaatgtataaggctgaggtcttggagaaggtccccatcatgcagcactttcttttcgggtcgattattaagtgggaatagtgcttggagtcttctgccggttttcctatgaggacgagctatataaaccaggctgatgaaatcgagagaatagggagtcttcggagtggaattatatccatgacagcctttttttcatcattcttttgatatacttactatatccacttgcttattctaagataatacgcctttagtaaagataatggaacgaatttcttcgttttgccatatgactaacgagaatgtttgctgcatgtagaagttctactgctatacttgcaagaacatctagtcgatgtattcttgcactgctagtttctggctcatacattatgatttatgagcagcttagagtgtagcccctttatcttgttgatgagatttggaaatgattgaattttgtattgaataaataattttg

SEQ ID NO: 86198 - DNA, 352 bp, Glycine max
  unsure (1)..(352): unsure at all n locations
  Clone ID: PAT_MRT3847_4884C.1
ggaattcccgggggcaccacccctccggtgggggggttctgagacaaaaaccgggggtcgggaggggggatcatccttctcttcacctctttacttccccaactcatacaacaacaccccacttttttttttttctttcncaactancttcggggcatttgaccatattaatcttactatatttaatatttctctctctttcttcaatggggggggggttggtccancanctgagtcntaaaaagctggagttagaagtgtggtcgcaatcatgcaaaacggggggggcgatccgcaagatcagaggggtacttcctgcatgggggagggcctgcaatgactattgaattcc

SEQ ID NO: 86199 - DNA, 226 bp, Glycine max
  Clone ID: PAT_MRT3847_48850C.1
atcgaacgctcgagcggtcgacggctcgagggagaattccgtggtgactacggatgggacactgatggattatcagctagacccggaacccttcgccaggaaccgggagctggaggtgattcacagcagatgggcaatgcttggtggccttggctgcaccttcccagagatccttgagaagaatggtgtcaaaattcgcgaagccgtgttggttcaggccggtggc

SEQ ID NO: 86200 - DNA, 245 bp, Glycine max
  Clone ID: PAT_MRT3847_48851C.1
gcgcctttttataggcgttttgccctttttggtgaaaacatcacacccttcacacatgcttacggcaattaaaagaggtgtggagtttttgaaattgactgcccctacccaacgggagggtcgtgcactgatttcctttcttgaaggaaacagacaaacaaacgagagaaaactcatgtttcgaattctgctgaggattcccctttttgaaaagattctggcttgccctggacaaaagaaaaagc

SEQ ID NO: 86201 - DNA, 271 bp, Glycine max
  Clone ID: PAT_MRT3847_48852C.1
tcctggtgttagtccacagtacactactcccttattgtgatcgaaccccataaacgccgccttacactgccgttaattcactcatacatctctacacgcactccatgaaacaccagaagctctcctcacaatgccggcggaacgacatgccctcgacaaaatttatcagtggatttttagacaactcgaaggaggatcacgggttggcacagttgatgcgcttaactacattcagaacgacttcgattactgcggagaagagccatctatg

SEQ ID NO: 86202 - DNA, 569 bp, Glycine max
  unsure (1)..(569): unsure at all n locations
  Clone ID: PAT_MRT3847_48853C.1
gaccncagagcggccgcccnnnannnnaatttttaaaattttgtaaggaacaagggcgcaaaaaaaaggaaagccgggaaagaaaaaacaacagaccgaagccccccacaggacggggggacacacagcggaaacaacanaaagggaagccagggccccnannngaacgcancncaanacagaaagagagagaggagcaagccagacggnngagaggggaaggaaccaccgaagggagnacaggggaanaggaagcnaaaagggcccgcnngcgcccccggggcccccgaggagaacgccccaggggcccccaaggaccccaacaaggggggaaccccgcccgaacagagacccccccgccgcggggagggaagaaaccgcaacaggaggggaaggacccngaggaaccccgagaacaaacannccccaagggggggagccagccccccacaagagagccccaggaacggcccggccggccagggccccccccgacaagaaaaaaaacgggaagccaagaagacaccagccggggaggaaaccggaagagacccgggcaaggccggggc

SEQ ID NO: 86203 - DNA, 338 bp, Glycine max
  Clone ID: PAT_MRT3847_48854C.1
tctctcttcttctcactgatccgcattgccgatcaaagtggtcttatttgaaaaacacttgggcgtaggacgcaaatgactgctgtcggaattgctctctggagacaacgggctcactgagaaaacatttcgtactcgcaaagacttggacatcgagtttttttatcatgcgttagcgcctcaatccataaaaggtctaccgcatcacattaggcaggctctgtataccttgttgatcctacattctcccatcttagctcactgctgaaattaaaatcagcggaatgtgagaatattcatacttccgggttattgtaccacggccgatacgaattctg

SEQ ID NO: 86204 - DNA, 1721 bp, Glycine max
  Clone ID: PAT_MRT3847_48855C.1
gacagaatggcacacattaatggaaaattcatggataaaaacatcagattcactcttgtgaatatcagctcaaatcgttggctaaccataaggctagaaacattaggaggcctgatgatttggttgatagcaacatctgctgtcttgcagaatgcaagagctgcaaaccaggcaatgtttgcatctacaatgggtttacttctcagttatactttgaacataacaaatctcttgagtggtgtcctcagacaagcaagtagagctgaaaacagtttaaattctgttgagcgtgtcgacacatacataaatttagaaactgaggctcccggtgtaattgagacacatcgtccaccaccaggatggccaacatcaggatcaattgagtttgaggatgttgttctgagataccggccagaacttcctccagtgttgcatggattgtcctttacagtacctccaactgagaagatagggatagttggaagaactggtgcaggaaaatctagcatgcttaacgcactattccggattgtggagctacaaaaaggaaaaatcattattgatggttgtgatatttctacattcggattagaagatgttcgaaaagttcttactatcataccacaatctccagttcttttctctggaactgttcgtttcaatcttgatccatttaatgaacacaatgatgctgacctatggcaagctttagaaagggcgcatttgaaggatgtaataagaagaaatacgtttggtctagatgctaaggtttcagagggaggagacaattttagtgttggacagaggcaactgttaagtctagctagagcattgctacgaagatcaaaggttcttgtcctggatgaagctactgctgctgtagatgttagaactgatgcacttatacagaaaactatcagacaagaatttcagtcctgcacaatgctcatcattgcacacagactaaatacaatcatcgactgcaatcagattctgctgctagatgctggccgggttcttgaatatagttcaccagaggagctcttacaaaacgaaggaactgctttctacaagatggttcaaagtactggacctgaaaatgctcagtatttatgtagcctagtatttggaaagacagagaataactctaatgaatataacaaggagttggaacaccatgtgagacaattagcttcttctcactggacttcttctactcagtttgccatagcttctaccctttcttcattacaccagcaccttcaagagccaagtagtgaagaaaataaagatatccttcataaaacaacggctgcagttacaacacttcaagaagttctagtggggaagcatgatgaagacatagaagagacactgtataaataccatattcctacagatagatggtggtctactctctataaagttattgaaggtctttctcttttgaagaggttgcctctagacaacattcaacaactagaacttgattttgaagggagatcttttgactaacatacatcttgaggggtgtgaagaagagtttgcaaatgcaattaaatcggagggatagccacaatatgacaagattctttagaattttccccctctttgttacaccagtttcctctctgtatgttttaatactttctcttatgctaatagggttaccaagtaatccatattcaatataattattttagctttcgccgggctaggtt

SEQ ID NO: 86205 - DNA, 291 bp, Glycine max
  Clone ID: PAT_MRT3847_48856C.1
ttgggggggggggggggggggggggggggggggggggagagagaaagggaggtcggagaaagataatgtcaaaaccggaataaacccacaggcataccgaccaactcgacccataatacgatttactcccttagtgaaccaaacggtaacggcttagcgctgggaaagttcgacttgatgcccgcaaataaagccatcacctgtgaatcccattcataaatcaataaaggatccgtgagcaataacccccaaattggacagcatagcgttcctagatctgcaataaatcgt

SEQ ID NO: 86206 - DNA, 373 bp, Glycine max
  Clone ID: PAT_MRT3847_48857C.1
cggccggaacctcctcgtggccgcggtgggcggtggtcccgccggaagagccgccgcggatacgctggtcaacggcgggggggagacggtcctgatctatcgacatatggactactgcatgacgtgcggccgttccatcccgctgtgcctggtgggggagctccatcttccgctggacatcatcgaccggtgcttgacgaagatgaaaatgatatccccgacctacgagacggtggacatgctcaggacgctgaacccccccaactacatcctgatcgtgacgagcgaggcgctcaacacgtacctagaggaccgatgcaacgagaaccgtttcaactgcgtcgacggcttgttcttgtgaatgcttatatcc

SEQ ID NO: 86207 - DNA, 845 bp, Glycine max
  unsure (1)..(845): unsure at all n locations
  Clone ID: PAT_MRT3847_48858C.1
ttcggctcgagnctacaggtcaaatcaatagttactataccgggaaaaacacaatagaagagtcttcttccccaatctcgttagccgttagggtttacggacagagagagagggctgcgctgcagctgcagctgcacctgcagaatcttttatcagcgatagcagcaatgtcttcgtcgaaagatgcagacccaagcctgggttacctgactcgcaaggacacggaggtgaagcttccgcgtccaaccagggtcaagaacaaaacccccgctcccattcaaatcaccgccgagcagattctccgcgaggcacgtgagcgtcaagaggccgagatccgccctcccaagcagaagatcaccgaccccaccgagctcggtgagtaccgtctccgcaagcgcaaggagttcgaagacttaatccgccgcgttcgatggaacatcggcgtctggatcaagtacgcgcagtgggaggaatcgcagaaggacttcaaacgcgcgcgttccgtctgggagagagcgttggaggtggattacaagaaccacaccctgtggctcaaatacgcagaggtggagatgaagaacaagttcataaaccacgcaaggaacgtctgggaccgcgccgtgacgcttctgcccagggtggatcagttatggtacaagtacattcacatggaggagatgcttggcaatgtcgccggcgccaggcaggttttcgagcggtggatgaagtggaccccagaccagcagggggtggctctcttacatcaagtttgaattgaggtacaatgaaaatgaacgcgccagagggattttcgagcggtttgttgagtgccaccctagggttgg

SEQ ID NO: 86208 - DNA, 458 bp, Glycine max
  Clone ID: PAT_MRT3847_48859C.1
acggctgcgagaagacgacagaagggtaggcctcgatcagtcatcattcctgaccgacgtcgactgtcattttgttcgatcaatatcggtcaataatatttttttgccgaggtgggctaatgttttccaggacaaataaacatgccagtttcggccgaaacaaaacgtcggttgagctcgcacaaaaaaacctagccgacctacattgttaattttttatgcaataccaatacaggaaaacttcctcgatggtgaaaaaaacatagtctgccagcgagcgtttttttaaaaagaaatgcgcaatgccggctgaaaaatatcagtcggggctatttcacgaccgttgtcggctattgagttttctattcaatcgttgaatgaaatatagcaaatattttttttgcagaggtgggctaatgttttcctggccgaaacaaaatgtcggttgaactcgcacg

SEQ ID NO: 86209 - DNA, 250 bp, Glycine max
  Clone ID: PAT_MRT3847_4885C.1
tacggctgcgagaagacgacagaagggctataactaatttgattgagaaaaaaatttccacactattctctcataacctgatccctatcagtgttatgtgataaagccatcacaactagagtcatttaagattccgtaagggttttttagatgtttcaatctattaaagaaagtagatcttaatacgacactaagatatcaattgggtacaatatttcgagacatactggtggtgaataactttatttac

SEQ ID NO: 86210 - DNA, 967 bp, Glycine max
  Clone ID: PAT_MRT3847_48860C.1
tttttccctttttttttgcgtcaaaacatctattaatattataattaaactgtccctaatctaagacgtgccctgcccaagtataactattagtattcaaaagcttcgctgaaaaaaatatttactgtaacatcatatgtatactagtaaaacaacgatggaaacaaaaattgattttacagaaaatgttaccatcacagtattaaaaaactttgctgcaaaaatagagagagcaaccttggaatttcattctataatttctccctcctcttcatcaaatttcccaattccttcgccactatcacactgtcttttaaccaaggaagaaggatctttatgaagattattatcaacaatagaatcattctcgtcatcatcactatcttcatcttcacaatcatggctattatcattattgaaggtcacaattttttgaactgtttcctcattccctcctttaagaacatcttttccggtgtgcaagtatttttcttcaccatcaacttcagaccccttttctttaaccacgaccaacggatatctcagcggcttatcaagacaatgtttgaagaaagaattcattaccatgaacctgaaaacctgaatcaggtggctcttatccctctttacatctgaactcaggagtttctgcaataatgtaggcttcctcttcttcaaagaggggctttctgaaaaatctttgtcatcaaacttctgcctcttggcgaacctaccttttctgtctgatttcttgttgaacttgttttggaattttcttttgtcagtaaatttgtttttcccttcactctgaagagcttgattgtcagaattcttcaagtagtatgatggtatttcagcaacttcaactcccaattcagcttgctttgctaacacctccttgagctctctttgtaagacctccctattaatggccttgctgtcttttgggcattcactgtgcttctgc

SEQ ID NO: 86211 - DNA, 390 bp, Glycine max
  unsure (1)..(390): unsure at all n locations
  Clone ID: PAT_MRT3847_48861C.1
attgtgggtatagtttttttattttttatttttttatgcctgtgttattctcactttttgtgatttttgatgattttttattttttttccccccaacaaagggccggaaaacaagagatccctaaaaaaaaaaatccggacacggaaaataatanccgccgggggtgtgggacacaaaaaggcaatttaattccggaaattttaccaaggggagagacgtgagaaaaaaactgtcggggaaaaaaaaagagaccaaagggtcgccgcccccgggggggaaacctttttttaaacccaacgaaggaaaagaattggtccataggggccctcccggaaaatgctggtctctagaaagcccttaccccgctgtaatctccgatgggggagggg

SEQ ID NO: 86212 - DNA, 473 bp, Glycine max
  Clone ID: PAT_MRT3847_48862C.1
aaaaaaaaaaaatgattatttaaaaaacaaaaaaaaaaaaaagaaaaacaaaaaaaaagaaaacaaaataacaaaggcgggccggccgatgtaggggttcctgatttacgtgccctggcttgcaaccgcttgctttttatttggtgccgcctaaattgagtcacctggccgtaatcccacgcccgccggattggaaaaaaccctgccgttacccaactggggttgctggcaataaatcccttttatactagctgccttactagtggtggggcccagaaccaaaaggccccccccactgtagctctgcatgaatggcgaaggggacgcggcttgtggccccccatcccgcgcggcgggtgaggtgcttacgcccagctggatccattcacttgccaggttcctagcgcccgttccttagctttcttcctttctttctagcctggctgcctgccggcccggcagatttccctggg

SEQ ID NO: 86213 - DNA, 349 bp, Glycine max
  Clone ID: PAT_MRT3847_48863C.1
ttgctggggttagcctaaaacatgtgattgtattatatagaatttggtggggttctaacaattaataagctgtcatttttgcaccctatgatgcaaaatgatggggctaaaaatatgggatgtaggaataaagccttaccttattattatgaacctttttctacgaggggtttgatggtatctggaggcctctacatggactaatggggctggctttttgaggacgcgtttagcagaaattcatggcaacataacttttttactatattcacgtggagcccactctgggaagtaatatttattgaggcgggaaaagtaatgcccctctcttcctaaataatacagtgac

SEQ ID NO: 86214 - DNA, 1093 bp, Glycine max
  unsure (1)..(1093): unsure at all n locations
  Clone ID: PAT_MRT3847_48864C.1
cccacgcgtccgtacggctgccagaagacgacagaagggggagaaagtgtggtgtgtgttggagttagagagagaaagaaaaaaaaaaaggttcagaagaatcagataggttagatttatatacaaaataaagaatagatacacttggagttggagttacacattattctctctctcactcacacacactcagagtgcaagctagagagagagagatggaggatctcgaggaggaagagaacggagcggaggaggtgttggggtcaagcttgaccatggagaaggtggcggcggcgaagaagttcattgagaatcattatagggctcagatgaagaacatccaagagaggaaggagaggcgttgggttttagaaagaaaattggcgtcatcggatgtgccaaatgaggaacggatcaacctcatcaaagatttagagaggaaggagactgaatatatgcgattgaaaagacacaagatttgtgttaatgattttgaacttttgaccatcattggaaggggggcttttggggaggttagactgtgccgggagaagaaatctggaaatatttatgctatgaaaaagctgaagaaatctgaaatgcttaggagaggccaggtggaacatgttagagctgagaggaatttgctggccgaagttgccagtcattgcattgtgaaactttactactcatttcaggatgctgagtacttgtatttaattatggagtatctgcctgggggtgacgttatgactctgctgatgagggaagacaccttaagtgaaaatgttgctagattttacattgcacaaagtgttctggccatagaatctattcacaaacacaattacattcacagagatattaaacctgataaccttcttctggataaaaatggtcacatgaagctctctgattttggtctctgtaagcctctggattgtattgccttgtctacactgcatgaaaatcagaccatagatgatgaaactttgggcagaaccaatggatgttgatgatgcggnncntcgaagtagctggagacgnccacgtgaacngtttcaanntgggcagntgnagaggggntntnccc

SEQ ID NO: 86215 - DNA, 459 bp, Glycine max
  Clone ID: PAT_MRT3847_48865C.1
ttctgatatggatattatctctgaattggggatcgtagaagagtgcaacaagagattattattatggctgggttcttctctttaggagcaggaaggcagaacaaggcggaacaagaagaagatcaaagagaagagaacgttaacaacgccggtggtaataataacagtcaattcttgttcagaaacaacgttagcgaagagatctacaacaagggattcgagatatggccacaatcctcgtaccaccaccaccagaacttgaccaacttctactccttcggtgtgggccctagtcgcaggaacaaccacaacaacagctcctccaacaacgtaaacgacgacgtttctgtgtctttctcgcatgagtcgaaccggttcgggttcacggtgatgagctccggtggcggcggcggcggaggaatgaactgtcaggactgtgggaaccaagcgaagaaagat

SEQ ID NO: 86216 - DNA, 519 bp, Glycine max
  Clone ID: PAT_MRT3847_48866C.1
ccggctcgagactagttctagatcgcgatttataactagaacagctccagggtgttttctagagagagaaagagagaaaaggttcagaagaatcagataggttagatttatatttatatacataaagaatagatacacttggagttggagttacacattattctctctctcactcacactcagagtggtagctagacaacaacgagagagagagagagagagatggaggatctcgaggaggaagagaacggagcggaggaggtgttggggtcaagcttgaccatggagaaagtggcggctgcgaagaagttcattgagaatcattatagggctcagatgaagaacatccaagagaggaaggagaggcgctgggttttagaaagaaaattggcatcatcagatgtgccaaatgaggagcggatcaacctcatcaaagatttagagaggaaggagactgaatatatgcgattgaaaagacacaagatttgtgttaatgattttgaacttttgaccatcatt

SEQ ID NO: 86217 - DNA, 547 bp, Glycine max
  Clone ID: PAT_MRT3847_48867C.1
gttagacaggttttgtggagattgcatatcctgaaaaaaggaaattgctttaacaacaatgtctaagggtgcccctcatccaccatcagtgctcatgggagatgcatggacaaaaccatactctcgagaatatgctgccttcccagcttcctggcttcgtgtttctaagttctggccttccacaggacgtattgataatgtgtacggtgatcgcaacctcgtttgcacccttctcccaacatcacaggttgttgaagaacaagctgctgcaacggcctaatcttttcttccattgacaagtattttcattttttaaattgtacataaactcttcctatcattcaggcgttgctgcttgacctttgcttcattatatcataatgatgatgatgtaagtttcattcagccacataaccatacctaaacacagcaaagaaaggtatccaaaaaagaaataaactgttgtgacttgaaaaaaaaaaaaaaaaaaaaaaaaaaaaaaaaaaaaaaaaaaaaaaaaaaaaaaaaataaaaaaaaaaaaaataa

SEQ ID NO: 86218 - DNA, 303 bp, Glycine max
  Clone ID: PAT_MRT3847_48868C.1
ttctttattttctttttttcgcaaaacacccccaggggattttttgaaaaccatctggggacctttcacaacctctcccttctccaatgctatagctcccctaagacacctgacacaacactaagattacagcaccgacccggacatgcgaccaagaacaacatctaacgctctgtaagacaggcaacaaccactcaagcccataatgtaaactaaaagacatcgttaaaaagtggctgactcccacaaataccagtctgacctgttaactgtattgcccgggaaacctaacaagcgttcata

SEQ ID NO: 86219 - DNA, 398 bp, Glycine max
  Clone ID: PAT_MRT3847_48869C.1
cgttgacgacagcaacgagatcggcaagtaccagcagaacgtgcagccatttgccatgcttgcgcttcggtcaaacaacgtggacaaggcgttcattgctctggacgaacatttgatgggggagcaaacgcgacgcattctgaatggccaggagaaagccgactgggcacttctgctcggccaaggaaagcagctgaacatggtcattttgcagaatctgaacgaaaaggaggccaaaatcccaacttcggtcggagtgcagttgcgcattctcaactcaatgccgattgtggccaacatcgacggccaattgaagatcacagcggcgtcggcatgtcttatgtctgcactcggactccaattcgacgtcaacacattggcatgcgcccgcctttcgc

SEQ ID NO: 86220 - DNA, 630 bp, Glycine max
  Clone ID: PAT_MRT3847_4886C.1
cttgctcgagctttacctgcgcttgttgctgtgctccggctgccaataccagtatctatcatggagcaagggatggcatgcttgctggagacaatgtcatttgtggacgcacttccagctttcagaacaaaacaatggcaagtggttgctcttttgttcattgatgcattgtccgtatgtagattacctgctcttatctcatacatgacggataggagggcttcatttcatagggttttgagtggttctcaaatacgtatggaagagtatgaggttttgaaggatcttgtagtaccactgggccgagcacctcatatctcttcccaaagtggggcatgacaacaaataaatgttggacttcaccaacgatgagcgcaatattatatgctctaatgctagctagcgagtgataaatgcaaattgatattcaaaatagacattgttctaaaatattgtcttcctgttaaatggcagtttgtatgtttttattttattttatgccaagcagtctgtagaaggttctgaagatgtctattggattactaatcttagaggtgcatgtcaggatggttaatacagaacaaatatcttcccgattataagattgatttcccagatttaattttaatt

SEQ ID NO: 86221 - DNA, 475 bp, Glycine max
  Clone ID: PAT_MRT3847_48870C.1
aaaagtaatcaacaattttctcgccaagggcttgaggcccagcctgaggaccaatttaaaaacagtcgttgcatagacacctcagagaatgcttctaacaatgttctagctgatgctggagatcaggtgcttgaagccttgcaatgaagaaaaagtctcccctggaattggaggctgtctggatcataatcaaggcaaccgttgaagtctatcatcacataactgaacacctgtttctcatgtgtatgttatcattaatatttatgtttcgtctgtcaaaatcttgacagtatatgtatctcagcatatgaacttattcagcttggtgagtgacttatgttaataatgactttgtcagacttgtctagtagtaagtaaatgccaataatgttaaagactacgccagatttgtgcagtagtaatgccactcatgtcaaatagtcaagtcttcaccagactggtttgggcctagctt

SEQ ID NO: 86222 - DNA, 477 bp, Glycine max
  Clone ID: PAT_MRT3847_48871C.1
ggttcctctcacgagtctgtttctaaatcaggaagtgaaaatgaaacatcaacaaccaggcaatgtaacaaatgcaacaaaaagctaaaagtaggcgatggtcccagctctcacttcggtcatttttccagaaaagtgcaaatcttgacaatggtagttctgtaaaagtagtcaatgactcatgtactgattactcaaataatcaggcagaaccctctcaaccaagccctcgtttacaggaaactccaacagtatttgctcatagtagcagtcccaagaaatatgggttggatactgatacatgtgatcaggatttagctggaccaaatggtagttccacaaaagaagaaatgagtaatgtggcttcactagagtggcaacgaatacaacagttgatgcaaaacagtctacctatttgcaagggctataaggaaccttgtattgctcgggtggtgaagaaacaaggacctaattttg

SEQ ID NO: 86223 - DNA, 389 bp, Glycine max
  Clone ID: PAT_MRT3847_48872C.1
tcctctagagcggccgctttgggttttttttttttttttttttttaataacaaaagtttatcctttctcttttactaaaaaaaacttctatcatttgattccatcctacaagtacttattaataaccttaaacaaattgactagttttcccacaagtattctacttaatcaaggaggatgaaatggcttgggggaaatttgcgatgggcatggcagctaaactcggttggggatgcccagtggtgagcttaattgtggccatggagaggtgtatggtggcgggcttaatggtggcaatgggggggggctaaatggtgctggaagtggtgggtttaatggtgctgggagtggggttggagggaggactggggttggggttgggggtgggg

SEQ ID NO: 86224 - DNA, 596 bp, Glycine max
  Clone ID: PAT_MRT3847_48873C.1
tactgagcatcgtctagctatctcgatcgaactgtccaaggtccatgtcacccaggcattggttaaccagcgaacaacgacgtaccagctggccctgggattagcagcatgagaaccagcggaaccatacacacatggcaattactagtactggaggcaatactggttcaacgtcagggctaaaactagtgcttactagggcggggggctaatgcgacacaaacgtgagtggggtaaacctcgtgtaaaacaaaggaggggcgtttgcaagctaaaaagcaaccatccaagatagattatttacaaccgagcggagtagcgtaaaagcaagtattacagcagcgggatagaagacgtgtgcatcaacgccacagttgtcagatgcaaatccacaaacaaacaaggggacccatgtgatagatgccccaaagcggccaacacgggccgctatgggcggcgacattggacacttggattgatacaattaacatgtgtatatagtgttgcacatgtacgattaagatgtggtgacacttaaggtacaggaaaacgacacagaatagataaagatgtaaaaaggggtggtactagggtac

SEQ ID NO: 86225 - DNA, 1692 bp, Glycine max
  Clone ID: PAT_MRT3847_48874C.1
acactaaacaataacgatgactgcacacgcacgcaagctcaaacttgggattcggaaaaaaagaaaagaaaggaagctatagacatagactttaatttttacaaataaagttgggcttttcttgttcaaagctataatttgcgatttaaccttccatagttttacacacactatcattcatttacaattggctttaccaggcgaaacgaaaatcatactgaaaaaatgctaccaccttattttcaactctaaaatatcaattggtaaattatgcaatcgtatgttttctaatgaattattcgtataagtaacaggaattaatattggtgacaggttcgcataaaccaagtgtgaaacaagatataattcaattcatagtgtagataagatcagactccggcaacctcattaaaaactcatttcttgaattcagtcagaccaattcaataccaaagcaagtacactctgtaaggagatgtgtaagatgaacaactagacagacacacaaaacagtgtaaatcatcaaacaataggtccaaccgccagaatattaaaggtataatttaagtaagatcatcctcctcaagttctttggctttcagcttttccttcaccctcaaaagaagtgtggtcttccaagaatccagaggggtcatgctatcaaattccttgacaacatcagtaaacttcgcaacatcttcttcatcaattgcagcagcaatgtccgccaaaaatctatattcacgtgttcccgaaaatgttggatccagttcctgatatcgttctaatgcattggttacagcaataacatcccctttacagagttggcagatgccagcattaagcaggtgtcctttaactccatacttcagcaaattattgttgagggattggcgagctatctcttcgtaaatctcaatcgacttctgatattgttctagctgagcagcaaactgggcaactttttgtttgcattggtttgcatgactttccacttcttcattttgaaaaaaatgagcagatttctgggcaacatttggttgcagcggttcgcagaagttgtcacttcttcattttgaaaaaaatcagctgatttttcatagtaaacaagagcctgctcaatattctgttcaccctcgtacaattcagcaatttcctttaaatatctagcagccatagagagtcttccaatgtcacagaaaagatttacagctcggtctaagcaagatacagactcgtttatattagtctttttgtagcaatgtgcagcatcgacatgggcctgtgcagcttcatgcttgctttccaacttcaaatgacaacttgccaacttcaggtatgtcgctccagccttgtcccatgatttggcgagcttgaagcaattggcggctttatcgaagagatcggcggcatcttcatacttggagccaaacaagccccaaccgctgagcttcttctcagcctttttctcgaattcctctcccttcgataactgatcggccattttcctccgatcgaaacaaagcaattgaagatggattgattgatcgaattcagtgcgttgcaggaacaagaagaagaagaagaagaagattcataagcgaaggagcaaaaagatattaattagactgtgttgacgaccaagtccaaatccaaaacccgcaaattcagaattgcgggggcgcgggggcg

SEQ ID NO: 86226 - DNA, 455 bp, Glycine max
  Clone ID: PAT_MRT3847_48875C.1
ctagcatccccaaattttagaatcaaacaagcctcagtacccagaatcctatgccttcacagaccctaacatcgatccatatcgtttgatcgcacttgagtctgcaagtgatagctcaatttggtggaaaatataaagtgcgtggatgtaattgacttgtggatatcaacattgaaccgggtgtttcttcctgtgatggatggtgcatttcttaatcactatttccaatctattgctaaatttggcatgcagatccgctgcacaggctttaaagcgtaatcctacgcatgcccgttcaacagtctctcttctcaatgttcgtgactgtcgactatcatttgataacggaccctttgagggattgcactgtgagagatatcatctttgatttgccgaggatgtatgcgaccaacacccaccccagataacctcaatcgcctgcccaggctgatgat

SEQ ID NO: 86227 - DNA, 367 bp, Glycine max
  Clone ID: PAT_MRT3847_48876C.1
caccaccacaatcatgagacccatattgctttccggccacgagcgtgccctcacccaggtcaagttctccaaggagggcgaccttatcttctccgtttccaaggatcacaccgtctgcgcgtggtacagcgcaaatggcgagcgtttcggcacatacaagggccaccagggtgccctctggaccgtcgatgtcgacccttacacccgccttctcgcgaccggcggcgccgacaacaccatgaggctatgggaggtggagactggaaaattgctcaagacatgggacttcttgacctcgatcaagcgtgtcgagttctctgaggatggaaagcagctgttgggtgtgaccgagaagcgtaccggccag

SEQ ID NO: 86228 - DNA, 449 bp, Glycine max
  Clone ID: PAT_MRT3847_48877C.1
aattaagggcatgaaattttttgaataaaagttcaaggaaatttaccctttaagttttgtaccatctaggttttgtttttaccctttttaacattagagggggctttcccaacttaacatgctccagttttagctaagcatgattttttccatgaacaaaaaaaaaagggcctgattttttccatgaacaaaaataagtgcacgattttttccatgcctccacaccttgattcttcattggttttcttcaaaatgccacacaacgttttgcaaccctggtgattattaaaagtttttgtggaacttgtgaaactttagtgtgggacccccggggtttggcggttcccccatttgcaaggggggagccccttggaaaaccttgtgggtgactgaaagggggccctggctggggctggggtggccgggggggggggtggggtggggggggg

SEQ ID NO: 86229 - DNA, 267 bp, Glycine max
  unsure (1)..(267): unsure at all n locations
  Clone ID: PAT_MRT3847_48878C.1
aacataanagnncacccattaacattaacttccaaagccttcacaatttcacgacncaanacactctnngagtgctctccctgtctgncttgtngcctccacatatgctctaatctccaatggttgtcttacacacaancaatgaaatgaagcttctcctgatgcggtctttcntctgttcttcttcttgaccaacccatttgggctgcagaccctcctgcttcttctccngctttatctccaggggangagnagnatcaccggnat

SEQ ID NO: 86230 - DNA, 406 bp, Glycine max
  Clone ID: PAT_MRT3847_48879C.1
tgtacacgcgttcgctcacgcgtccgcccaagtgtattatcattagtctttagagagagtttgtgtgtgttattgtgtgtcaccttggtgcatacaacacaagatggaagaccaaaatggtagtggtaagttgaaccactggctgctcaaggtgaagccttaccttgctatattgatctctagcttgatgtccggatggatgtatctcatcactatagccgccggagcaaatgttggcaacccaagtttactagtttcaggagatggtgttatttcgcacgctatagaacatactggcgctgattgctacataagggaatgttcatgcaggacttgtgcggctattgtgaaactacagacagaagaaggtgctctgaacgcacgcaatactagcaattaaatccca

SEQ ID NO: 86231 - DNA, 528 bp, Glycine max
  Clone ID: PAT_MRT3847_4887C.1
ctcgagccgaatcggctcgaggggattgtttttgtttcttttttttttttagcatcatcaagtgaagagcatcatcatgttatagcatttgacccactctcaatggtcctgcatacgtaggactcttacaccccttcttcagtttttctcattttctggttctgttctgttgttgcagacgctgacatgacaaaacaagcttcttcctaagcaatcctctttgctgctttgactcaccaatataaatatcaattgccgtatcctttgcttcacttcactccttctcttctcatattgcttcctttctttctcttcttcaaatggagaaaaaggtccccttttttttctccattctcttattcattgctctgctatttcatggaggaaaggtgttagctttgaattgccaagacggatcagaggaatggggatacgttcaagtcagacccaaagcgcacatgttttggtggctttataaaagtccatatagagtggaagatccttctaagccgtggccaattgttctct

SEQ ID NO: 86232 - DNA, 474 bp, Glycine max
  Clone ID: PAT_MRT3847_48880C.1
cttggtttttttttttttttttttttttttttttttttttttttttttttttttttaaatcaatttttaaggattttttatctaaactgaaatttattggattactttacctccccagttaacaactttgggaccaaaaaaaaaaaaaaaaatccaccccgggtgcgggaaaaaaaaaaacctcgcaacacgcttttgaaagaaaaatagaccttaaatacatattttcaatggaaaaaggcttgaaaaactaaaatgcgttcccggagcagctaccaaaaaacaaagagatccctattctcttccaaaaaaaacccgggtttacatatggattttgagaaggcccccaatgaattgttggaggtgaagcctgttcaaaaagatatttacccgaagaacagggcaaaaaaaaatctttccccggatggggatacaagtagagggtttggttaaacctttattggaagaattttt

SEQ ID NO: 86233 - DNA, 263 bp, Glycine max
  Clone ID: PAT_MRT3847_48881C.1
ggaacacgctgatgaattttctgttttccaacactgcgacaacacgatgtactatgctttattgggaaggcgatggacatgctaaagaatgggcattttctggcgaaacttatgatactgctatctgcgctctcaaagagagttgcaagaagatccctttcaccaagataagagttgctaaagatacccctcccactcatccacccatggggacatgcatatcacgacaaaaattcttcaacttaaccaacagaaacctaccc

SEQ ID NO: 86234 - DNA, 246 bp, Glycine max
  unsure (1)..(246): unsure at all n locations
  Clone ID: PAT_MRT3847_48882C.1
ctcaaattaactctaattccatccttgtcgcgcttctngattgagattattatgaactccctgagcttgttaaccaagtagttcttctacagtagctagacgcagccgtcggtaaccaccacatcaccatcgtcgcgccgcgaaaccaagccctggcaaccgatntagcncctgaatttaagcgattcctgctctagcctcgcatatcttaggatcgttcagacgctcttgatgtctcaccttctt

SEQ ID NO: 86235 - DNA, 1733 bp, Glycine max
  Clone ID: PAT_MRT3847_48883C.1
ctctcaccttgctaaaattctctttctaattcacaattttcttgtagtaattaaacatagcgagcaagcatattcatttcagcatggtcctcaaaactgattcagttaaaatgttttttttccccttcgtaggaggaggccatcagattccaatgatagacgcagcaagagtgtttgcatctcacggagcaaaatcaaccatcctagcaacaccctccaacgctctccacttccaaaactcgatcacgcgcgaccaacaaaccggtcttcccgtcgccattcacaccttctccgccgacatacccgacacagacatgtctgctgtcggtcccttcatcgactcctcggctctcctcgaacctcttcggcagctcctcctccgacacccgccagactgcattgttgtcgacatgttccaccgttgggctcccgacatagttgacgagctaggaatcgcgagaattgtcttcaccggccacgggtgcttccctcgctgcgtcactgaaaatatcataaaccatgtcacgcttgagaatctgagttcagacttggaacctttcgttgttcctaatctgccacaccatatcgaaatgacgaggtctcaggttcctatttttctgagaagcccgtctccgtttcctgataggatgaggcagttagaggagaagagtttcggcattgttaccaacagcttctatgacttggaaccggattatgctgattacctaaaaaagggaacgaaggcatggattataggaccagtgtccctttgcaacagaactgcagaagataaaaccgagagagggaagacacccactatagatgaacaaaagtgcttgaattggttgaattctaagaaacccaattcagttctttatgtcagctttggaagcttggctcggttaccctctgagcagttaaaggaaattgcttatggtcttgaagcttctgaacaatcgttcatttgggtggtgaggaatatccataacaacccatcagaaaacaaagaaaatggaagcggaaactttcttccggaagggtttgagcagaggatgaaggaaaaggataaagggttggttcttagaggttgggctcctcagctgttgattttggagcatgttgcaatcaaagggtttatgacccattgtggatggaactccactttggaaagtgtgtgtgctggtgtgccaatgattacgtggcctctctcggccgagcaattttcgaacgagaagttgataactgatgttttgaagattggtgttcaagtggggagcagggagtggtggtcgtggaattcagaatggaaagatttggtgggaagagagaaggttgaatcagcagtgaggaaattgatggtggagagtgaagaggcagaggaaatgacaacaagagccaaagagattgcagataaagcaagaagagctgtggaaaaaggtggaacatcttacgctgatgcggaggcattgattcaggagcttatagctcgcagattggcgagacaagattagaattataagagaaaaaagctgtaattgaaagaaaaaacaaaggagaagaaagcgttcaattcatactttattgagacaacattagtgtccctttatacgatgagtttatattcatgccaagcacaaaaaacacaagaaaaagagcttgttactttccagcatcacttgaaatacttaaagttcaaagtgaacagaaaaaataaaataaatcgatcactatca

SEQ ID NO: 86236 - DNA, 497 bp, Glycine max
  Clone ID: PAT_MRT3847_48884C.1
tacggctgcgagaagacgacagaagggtaatactatagttaagacaataattatgagttaggggtaatgaattagtcaagtgcgcataaataattatattagaaacttcttacttctaacagttagattaatgcggatatgaactttctgtttagaataaatatttcccttataaatatgagaagcaattatatatttgtgtacttcttgaggtactaaacttcttttttccttcatgtagacatcagaaaaacaagttagataatgcaatagctatactaaataaaaccttatttgaaaactttgtttgtgctatttgttggaaatgctgggggattgggatctaagttccaaaccttgttccttgcaaatccatgatgctcaagagagccatgatttgaaaactgcaaataaataagaagtacttcaaaaaagaaactatctaaatggtcccaaaacattggaaccccaatagaagtcatatcccaacaagaaca

SEQ ID NO: 86237 - DNA, 411 bp, Glycine max
  Clone ID: PAT_MRT3847_48885C.1
tggttcctggctttccttcccttggggaatcctcaatttggaccctactccacttaaacttcacttggcctaatccaaaattggggaaggacacctggcctttttttaaaggggtggggcccagccccacctttaaaggaccctgcccctaaccagttaaccattatctggtattgtcagaagggcctaaaaaaaaaaacctttacccgtcccggttttttgacccaaggaccacctttcagtttaataccagagcctttgtattaaacacctgggttaaaggggtggcccccgttttgggaccaatcaaattttgaaaacggtaaaaacaaaacatcatttgtaaaaataatggccccaaggggggttccgttggccaccaacaacgaataatcggggctccaacgggat

SEQ ID NO: 86238 - DNA, 400 bp, Glycine max
  Clone ID: PAT_MRT3847_48886C.1
gaatttacagtttatgttttcaatttttttttattaaaataatggggaagggggtttttttttccaggtgtcagggctttaatagagattgtcgtttttaaagccaaaaaaaaccgcgggggtaaaaaaggcccctggcaaagggggggggggccggagggggcccccccaaaaagtttttttccccggaaagaaaaaaaaaaacccgggggccctttaaaatgggggggggttgtgtaaacccccacccctgttttcggggggaaaaaaaaaaaaactttttgggacagggcaacaaagaaaaagacaaaaatacttgggatcgttgggggggtgtaatagaaaaaaactgagcgaaggaaccccgttatcaagcatctccaaagaatatttgactcaa

SEQ ID NO: 86239 - DNA, 484 bp, Glycine max
  Clone ID: PAT_MRT3847_48887C.1
tacggctgcgagaagacgacagaagggacccaccattacaataatcccaactttccccctcacaaatggaaaaatgacaaaacacatccgctacactcacttttggcgcgaaaacgatatgagctagcttcaggatataataacaataatgtaaaaaaattaaacaaccattccaatcagtgctccatggctcctgacactgttgacgaattcctcatacactttctagctttcaggacatggttcattgaatccaccctagttaacgaggtgggttattttttcgctaggttttgacaagaagcatttgtctttcctttgtatagcagagacactttcaccatattaagtatttttttttctttgtaagttgtaactactctctacatgctactatgctagtagtaaaatctatcagattcatatatcaccggggacaggaatggtagcaaaaaaaaatgtaaatttggaatgactggtgagt

SEQ ID NO: 86240 - DNA, 382 bp, Glycine max
  Clone ID: PAT_MRT3847_48888C.1
gtctgaagaagcaagcaacattagcagctgaagcaaaagctcaatcccttgcgttaatggtggattgtcagatttaattcgattttggaaacaacttatcgatcccccaatccgctgtgaacagatcgagggcgtggcctgtttgatttgaactgaatttcggattgaaggatctcattttcttggagcattaaagcagaaatttctagcgctatggggtttccagcagcagcggtggccaaatgaccaaacccctttcttaacctcaaatttcaacagaagacaagtcataatatgcggcctccgttccagctacaaagcgcggcgtcgcacaaggatattgtcgaaagagagcatagaagtgattcacgcactcaaactc

SEQ ID NO: 86241 - DNA, 374 bp, Glycine max
  Clone ID: PAT_MRT3847_48889C.1
gagctctacagtaggtgctcccacgactgagatggagggaaggcctcttgaccaccagcgccgactatgtcatggagtccagacccgtgtgctggtgcatggatcttgtaataactgaagcggtccgggggttgtccagataccatgagagtcattggatgagccggcacccgaaggcaggatggacaggactcaatgggctgtgggatgaaatctcatacaatgtgctctcaggacctattgcaaacagaatcgacaaacacgttgtgtgggaaattgacctgatgggaagactgattatactctacggaactaggtgtactgtcacaagcatccttcttgatatagggggaggagcacaggcaaagaatgcc

SEQ ID NO: 86242 - DNA, 952 bp, Glycine max
  Clone ID: PAT_MRT3847_4888C.1
aaaataaaaacatacaaactgccatttaacaggaagacaatattttagaacaatgtctattttgaatatcaattttgcattcatcactcgctagctagcattagagcatatagaaatctggttcccgtgttgcttgaggcctagcataattgtcattgcatgttttttatgttttataaacaagcactccaatgcttgaaaggtaaattttccccaaacaaaaaaatattgcgctcatcgttggtgaagtccaacatttatttgttgtcatgccccactttgggaagagatatgaggtgctcggcccagtggtactacaagatccttcaaaacctcatactcttccatacgtatttgagaaccactcaaaaccctatgaaatgaagccctcctatccgtcatgtatgagataagagcaggtaatctacatacggacaatgcatcaatgaacaaaagagcaaccacttgccattgttttgttctgaaagctggaagtgcgtccacaaatgacattgtctccagcaagcatgccatcccttgctccatgatagatactggtattggcagccggagcacagcaacaagcgcaggtaaagctcgagcaagacaactggctaaagtttgttttatttcagatgagcgaccatctgccaagacaactttgcagggatattctctgccattaactgatagatattcttcatgaaaactttcatccctcccatatatatatgccaaagaagatgatgttgtccatgaaaagagggtattccacatagttgtaaaaggtgacaaagtcaaactgaaaccctctagtggagcatgaatccatgagtcatcagatccaaagatataagcttcagaaattccagtctttcttggccatttcagaatgactggataattttgtagtacgttctctggtcaaatcgcatctgttttcacgtgagcg

SEQ ID NO: 86243 - DNA, 1222 bp, Glycine max
  unsure (1)..(1222): unsure at all n locations
  Clone ID: PAT_MRT3847_48890C.1
gtacgcactggcaggntaccccggtnccggnnaattcccggngtcgacccacgcgtccgcggacgcgtgggggccgcactatagatgttggcaatcttaaaatacatgtcattaaggccattgccgaaggagggttctcttgtgtctacctagctcgagatgctgtacatatgtcaaagcaatatgctttgaagcacatgatatgcaatgacgaagaatcacttggattggtaaagaaggagatatctgtgatgaaggtgctggcaggacatcccaatgttgtcacacttcatgcacatgccatcttcgatatgggtaggacaaaagaagcattccttgtgatggagttttgtgagaggtctctggttaatgtgctagagagccgaggagctggttattttgatgagaaacaggtgcttttgatattcagggatgtgtgtaatgcagttcttgccatgcactgccagtccccacctattgcacaccgagacttgaaagcagagaatcttttattaggttcagatggcttatggaagttatgtgattttggaagcacttncaccaatcacaaaccacgcgtccggccagaagaaatggggattgaggaagacaatatcaggaagtacacaacccctgcctacagggcccccgagatgtgggatctgttcttgagagaagttattaatgagaaggtggacatatgggctcttgggtgtctcctttttcgcatatgctacttcaaaagtgcttttgatggggagtcaaagctccaagtcttaaatggaaactaccgcattcctgaattaccaaaatacaattcacctgtgacggacttgataagagacatgctccaagctagaccagataacagaccagatatcacgcaggtctggtttcgtgttaatgagcaactacctattaatttacagaagtcattacctgacagaccacctgaattgccctcatccaacgatcatgaaggtgtgtcaatgccctcaaacagatcacctccaatgcctcgtaggaacccacctcctccaccttcatctggagaacccaaaacttcaccacagccatcccctgcttctaggggagggggaagtgggggtgcacttggtgctttctggtccactcagcatgcgaaggaatcacttgttgctgaggataagagcaaacccattttggatgaagaaccatctagccccatttttccctgaaacat

SEQ ID NO: 86244 - DNA, 1314 bp, Glycine max
  Clone ID: PAT_MRT3847_48891C.1
cacttggccaagtctgaagaagcaagcaacattagcagctgaagcaaaagctcaatcccttgcgttaatggtggattgtcagatttaattcgattttggaaacaacttatcgatcccccaatccgctgtgaacagatcgagggcgtggcctgtttgatttgaactgaatttcggattgaaggatctcattttcttggagcattaaagcagtaatttgtagtattgtgtacatggttctctttatgatacagtgtagaataattgaatatgatattaagagtgagtcagtctacagcgctatggggtttccagcagcagcggtggccaaatgaccaaacccctttcttaacctcaaatttcaacagaagacaagtcataatatgcggcctccgttccagctacaaagcgcggcgtcgcacaaggatattgtcgaaagagagcatagaagtgattcacgcactcaaactcgccagatcccccgaccacgttctcaatgccaaactctctcgcctcttgaaacccgatgccttaaacctattggacgaattgcaaagacaaaaccaactccacttatctctcaaggttttccactttattcgtgaggagctagggcatgatacgctgctgcaactatacgccgacatgatactgctcctcgggagaaacaagaggattgacatggcagaggaattgttttctgaagctttggagaagggactgaaaccggacacaagactgtgcagtgaaatgattggggcttatttgcaacttgggatggcggacaaggctatgcagatatacgcatccatgaaggaagattgggcttgttcttcttcccccgataagttcactttcaccatattgatcagatatctacaaaaaaacggacaacatgagcttgcggaaactctcaaacaagattgtcttcactatgtggactcccctgataaattccttcagcaactccaacaaaagcaagccagaacgagacatgtcgatttcgtatgaaattttctatcagcgagcagttcacggtggcggttgttgcaacaatcctggaaatttacagcagcaagcaaacagtcttgtttagattgtttgtgggtggtgccaccatatatttgattttgatattgatttcggtatggtagaaaagtatactagtgctgctggcttcttctcatgttactaaacattgttactcttagcatatgaaccatgctgttgtaatgaaaatacttactgtgttgcatacaaaaaaaaaaaaaaaaaaaaaggcggccactcgcgatctagaactagtcggacgcgtgg

SEQ ID NO: 86245 - DNA, 1748 bp, Glycine max
  Clone ID: PAT_MRT3847_48892C.1
aattcggccacgcgtctgaagaaaagaagcagctacaatagctagttgaagctgatgctccatcccttgcgttaatggtggattgttagatttgatttgattttaggaacaacttatcgatccctcaatctggtatgaacagatcgagggcgtggtctatttgatttgaactgaatttcggattgaaggatctcattttcttggagcattaaagcagaaattttcttgcatcctattctgttttacctaaaacatgtggagatttaagccattcagtcacaaagagcagactggtcttgaaggccgcactatagatgttggcaatcttaaaatacatgtcattaaggccattgccgaaggagggttctcttgtgtctacctagctcgagatgctgtacatatgtcaaagcaatatgctttgaagcacatgatatgcaatgacgaagaatcacttggattggtaaagaaggagatatctgtgatgaaggtgctggcaggacatcccaatgttgtcacacttcatgcacatgccatcttcgatatgggtaggacaaaagaagcattccttgtgatggaattttgtgagaggtctctggttaatgtgctggagagccgaggagctggttattttgatgagaaacaggttcttttgatcttcagggatgtgtgtaatgcagttcttgccatgcactgccagtccccacctattgcacaccgagacttgaaagcagagaatcttttattaggttcagatggcttatggaagttatgtgattttggaagcacttccaccaatcacaaacgttttgagaagccagaagaaatggggattgaggaagacaatattaggaagtacacaacccctgcctacagggcccctgagatgtgggatctgttcttgagagaagttattaatgagaaggtggacatatgggctcttgggtgtctcctttttcgcatatgctacttcaaaagtgcttttgatggggagtcaaagctccaagtcttaaatggaaactaccgcattcctgaattaccaaaatacaattcacctgtgacggacttgataagagacatgctccaagctagaccagataacagaccagatatcacgcaggcaagcgctttgcttgattggccagatcattcatctccatcagtttaggtctggtttcgtgttaatgagcaactacctattaatttacagaagtcattacctgacagaccacctgaatcgccctcatctaacaatcatgaaggtgtgtcaatgccctcaaacagatcacctccaatgcctcgtaggaacccacctcctccaccttcatctggagaacccaaaacttcaccacaaccaccccctgcttctaggggagggggaagtgggggtgcacttggtgctttctggtccactcagcatgcaaaggaatcacttgttgctgaggataagagtaaaccaatttttgatgaagaaccatctagccaccatatttcaccgaaacatgataggattcttcctgaaaacgaacagttacccaaaaatgttggtcctaacaaagtggttaacacacaaactcataccgtgaaaagcaggacacatggaaaattacacaagcctgatactgtacccctcaaggattttgatatgaatctactaatggatgaagatcgcgtgcgtgagagggcaactgactggtgaaaccaggctggggacactggtggggggggggtgggggctgcggggggggggg

SEQ ID NO: 86246 - DNA, 837 bp, Glycine max
  unsure (1)..(837): unsure at all n locations
  Clone ID: PAT_MRT3847_48893C.1
gtgtgtgttttttccgaatttttcactattatgttgtccctgtatttgtttacttggtgagatacagatacgtataccatatgtatcactttattttagtatgatnnnactatttgggtcgtgttttatgcttggtggtgtgatactaaataattgtttgttttgcagggaatatatttttggtggcaagtgggggaggcaacacgggacatgatatggtataacgggattgttgggtccaagaacaggataaagttttaaaataaaaatatttttattgaaagatgaaagaaaaaaaaattccgcatcatgatttttttaaaaaatatatatataatttaaacattaaatactaatttctcttaatttcttaatcactaattagtgacagcgtatcatcgatagtataatggttcactattattgctgatggagtcactggttactacgatagagacccccaagcagaagctgtatcccattccatgccagaggctggatgaaatttgaaatgatgaaaggctgtggcgtgattatttatttgtggaatgagaatgaggatagaaaatgacttcaccctcaaaagaagaaaaacatgatgggatgaatatttcgaatttcccccccaataaacaaaaaattatttaaataatataattcaaaaattatttacacaaataacaaatttcatttaaggtgagaaattagtttctttcaaactcatttttcactttttttttcattttaatattttgaaatcgtttttggatcgacttgacatagttaaatctatcctatgcaacattgttttgacatcaaacatgacatcctctgtag

SEQ ID NO: 86247 - DNA, 793 bp, Glycine max
  Clone ID: PAT_MRT3847_48894C.1
gcgaacgacagaagggggttttgtttgtttttgtttgggacttgactttgcgctctttttgtctctgattccgagggaaactaactaaccttctcagtctcatagccaccaccatgaggaggatttatgatgaattgaaagagatagtgaagattcagaagttccgaagattggtgtcgtacaccggcttctactgcttcgctacgcttataagctacttttacgtcaacaacacgaccagggctggtttctctagagccgatcaattctacgcctcctaccccgctggtaccgagcttctaacggacactaccaagttgtacaaagctgctcttggaaattgcttcgaggctgaagagtggggtccgtttgagttctgcgtcatggccaagcacttcgagcgtcaagggaaatcgccgtatgcatatcatgcggtatgatgcatgatatatatatatagttcctctgattttcgttcgacaacgtaatttgaaggctatcaaatttcattcgattatgaaatcatatgtttggattactaaaatctgcccgttccggtgtcaatgactcccatggggttcgtgatgacagggaggatgaggaatttaagaattccacctattttagtggaattttcaattcctgtttctaacaaagaattaaaatgatgaggaattggcaattaaaatattctgcaaaattgcataagcaaggttaacttttgcattaatgctactgcaaagaataagattcttagtgcattgaggatttttgtttttttaaggagattttg

SEQ ID NO: 86248 - DNA, 391 bp, Glycine max
  unsure (1)..(391): unsure at all n locations
  Clone ID: PAT_MRT3847_48895C.1
agctcggaattcggctcgagcactgttggagtggcaatagagaaatttggtgctgcaccatagacgacctgccgagactgatactacactgaggctgatcactcataatgcagcgcgacgagtgataacatgagcgctactggcgtccataatgctgcaacattcagagtactaataaatcgcgaggaagcttcgatgatactnggtagtttcatagaatgatacaggcaatcaggtgagtcgtatcatggttgcagggagcgggcatggaatctgcctatgatggagctctgatgctgaagggtccatccagctcagatacaatcgttggaggattctaaagctgctacctgagtgaatagaggcacatggaacgcgcacagatgctctt

SEQ ID NO: 86249 - DNA, 295 bp, Glycine max
  Clone ID: PAT_MRT3847_48896C.1
gggcaattacaagccggaaccccctaaaattcccctggaaaaaaaaggggcccattactaggctggaaaccaaagattttctaaacccaaaggaagggccctgccggaacccttggggccaaaaccctaattggcccacgttgggggaacccaagttcccatattttgggttcccccgcctaaaagggacccaaaaacccggggtttcccaaatgcctaatttaacccaaagggcccccctaagggaagggcccacccctttaaaaaaaaaaggggccctttaaccaccgttttt

SEQ ID NO: 86250 - DNA, 345 bp, Glycine max
  Clone ID: PAT_MRT3847_48897C.1
tcttctgcgagaagacgacagaagggggccggggcgaagccagctgttacactatgtaggatgtggcccttgctgaagagaataaagaaaacgtagttactgaagagaagacggatgaggtatttacttatcctaagaagtgaagcggcagggactgtagagaagacggaaattgaggttactgaagagatgagagcagctcgagtgaaagaagagaaaaaggatggggaaggggcggcagagaagaaggaagccgaagtgactgaagagaagaaggaagcgggagtgatagtggaagagatgaaggaagctgagtgacagaagaaagaaggaagtggagtgacc

SEQ ID NO: 86251 - DNA, 120 bp, Glycine max
  Clone ID: PAT_MRT3847_48898C.1
cggggttttctcgtcagaagcctaggtagcctctttctgtcgccactgcaatcaacggcacggcccacagtaatgacaggagagagactgaatctcaacgcttaccctttggccgattcg

SEQ ID NO: 86252 - DNA, 796 bp, Glycine max
  Clone ID: PAT_MRT3847_48899C.1
gagagaactaatctcaagttttcagccttaataggagtggatccagttgatggaatggacaaaggaaagcaaacccccccacctgttctcacctatgttcctaactcatttgattttgatatggcagtgatggtcataggttcaggtctaggtgaagtgaaaaggaatcctttgtttcccccacgcgtccgtaagggtgtcaaccatgaaaacttcttcaatgagtgtaagaaacctgcttggtattttgtggcaaaggattatggccactctgacatgctagatgatgacaccaagggaattagggggaaagctaccaactgtctatgcaaaaatggagagtcaaggaaacctatgagaaggtttgttggaggagtcattgttgcattcttgaaagcttacttgcatgatgataatgaggacttgttgaccataagagacaggcatgtgagtctaccagtggagatcaaatttgattcttttctgtgaaaatcagagaagatggtggggagcatatatttctgttattatcatgacacatatgactgaacttttcagttacacatacacatgcattagattaaagttacaggtgaagtgcatcatgtgcaagatattaataaagtgtcccttttttgttgttgcatgtaggctatttctggaagacattaaaaccattgaccatagatgattgtacttgaagtaatatcgcaactcttttactttaaataaaagtttgaagaggtgccagaggtcatcagcatagtaaatgaatactttttttaaaaagaaggaa

SEQ ID NO: 86253 - DNA, 417 bp, Glycine max
  unsure (1)..(417): unsure at all n locations
  Clone ID: PAT_MRT3847_4889C.1
aattcggctcgaggccgtagtcatcctttgtcagtaaatgtaaacagatacagagtaattcaactttatttattattgccgaanaaaaaaaggaacaaaaaaaataaagaaaaggggaaaaacaaaaacaaaaactataaaacaagacgtgccccgaatatataatcctttacctcccgcgattaatatctctaccataacctggggggggcgcccccttaccggttcctgcacccctacaattattttcctacccggagccgtaggggaccccctcttccccattggggggcgctatcaaccctgggcaaattctgggccctcccttttccccggtaaaaattgtttcccctcaaaatttccccaaaacattcaacccgaaaaataaatggttaaccccggggggccctaatgggg

SEQ ID NO: 86254 - DNA, 521 bp, Glycine max
  Clone ID: PAT_MRT3847_488C.1
gttttgtgggtggctcctgaggacaaggcgaccttatggtcacaacttacttatgcttcgtgcaataatgtggaaacgcaagaggcttctcttgtcaatctcgtgaatgtggtacaagaattgacttcgcacagtccaaaggaagctcgccaattgacaaagaaagctctctctcttatcgaaagcatgcaaaaagctgatgtgcctaccatagcacatattgaagagttccattcgatgcagcagatgatgaatgctcctgattcaaatgatcacattgatttactgatgagcattgatttggtgggctcacaaggagcacgtaaagctttcccaaacaaaattgttcttgacgataaacttgtgttggctaacacacaccaattctttgatggacaccatccactggactcacggttaccaattgtagcgaattggctctatcctgtgactaattaccttcatacactgccgttgtaaatgtcacatgtggtagaagacgtggagcttcacccaccact

SEQ ID NO: 86255 - DNA, 357 bp, Glycine max
  Clone ID: PAT_MRT3847_48900C.1
caagaatcttacattaatgcgacacaaatcttagtctgtttggttgctcgttactaacactagatccatgtctgggctgaagccataatttataggttctgcatattatttgatgattgatacaataatttataggttctgcatattatttgatgattgatacaaaaatttggccaaaacttgaagtcacaaacgtgtgtttgaaacacggtactaatgccaagacatacaacttcatgggaaactatattgcagatagataaaccaatattgtgatgctcatactagaagctattgatgaggctaacttgggatatagctatatcatatttggaaggagatggtttgccagacaca

SEQ ID NO: 86256 - DNA, 437 bp, Glycine max
  Clone ID: PAT_MRT3847_48901C.1
gtccatacagaagcgtgatgatgctcgacagtttatgaagggtcttcatcctgatcttggcgggggtaattcaatccgattcttttttattagctctgaattggttagaattaattgattatgtatcagcgttgtatttgagatttgaaaacatttttggttagtcaaggataaagctgttttcttcagtttaaaaatatgtaatttctatgtttgatcttggcagaacttccagaaagatcttatggcgctgactgtcgtatatatctgcctgaaaaccctgcaagcaggtttaagaatgtttatgagacactttttgatgaatttgttctagctcatgttattggatggtgggggaaggcaatattgattcgtaatcaaccccttctttgggtgttatccattggttttgagttggtggagtacacttttcgtca

SEQ ID NO: 86257 - DNA, 1685 bp, Glycine max
  Clone ID: PAT_MRT3847_48902C.1
gttgaccttccccacttctgatcaaaatcaaaccgcgaaaaccctaaaacactacattcgagcaaagaaaaaaaaatgcattcgtgcattcctcagcaccttcacttggcttcttccctaaaccccaaggcgtgtaattctcccctacgcaatttgaggatccgtgctgtttcaaccactcataatcatataccagttgctccagtttttctgcccgaaggaccatggaaccagattcctggtggggttactgctgagtagggattcaaagctatggtaatgttccagttgtttacgtgtcaaaggtaaaaggactaatattgcgcttatgacatgcgttgttgatgcagtatctgcaggagtctttataacaaatgttggtgctcctcaagcaattaaatattgcatggggacttattagctttgaagcactgctcatgcttgttaaacggatgttgcacaaagaaatgttttcaatggagaagagctgggtgaagttttgataaggtattgtgggtaaccttaataatttaatgagtccgagttctatacatggttaatttgagtccacttgtgaattagtgcaaaataataagaatttgggctcttttatactcacttcacactttagtcaagtcactgttcttattctgttgcagggggcagattctgtagctttggcaatcaccactacagatcttgttagcaagagtgtggcaattgagtctctgtttggaggtactaaggtcagctttggggcaatggcaatagtttctgggatgatccaatcaaatatggctcccatgcttgggggaatagcagctgatgcccggttaaccggggtttcatgccatcaagttttacttatggtagagctgggggatattttactgatgtatggtggtgaaccacaattttttgaccgtactggtctaccccttgctacttggtgaaattgggagtggtgcacgatgctcccctggcatggatacattttctcttttcaggaatgcctagttgaggtaatgcatggtcaagccaaatcaatagcttgggatggggaaggagcaacatgcctcgttgaggtctgtgtttctggcgaaaataatgatgcagaagctgcaaaagttgcgcgttcagttgcatcatcttcacttgtaaaggctgctatatatggtagagaccccaattggggacgcattgctgctgcagctggttactcgggggtttcattccatcaagatttacttagggtagagctgggggatattttactaatggatggcggggaaccacaattatttgaccggcacgcggctagtagttatcttagaaaggctggggagactcacgacacggttaaaattcagatatcagttggcaatggaccaggacgtggacaagcatggggatgtgatttaagctacgattatgttaaaataaatgctgagtacacaacataggcaaaaggaaacctcacacgtacattggcatagtgatggggattggattatgatctaattagatattattcaggatttcaattttgatttcatatttagggatgttattttgaatttatggtaattagtctgcattatcttattcaggatttggttggaatttgatttacctttatctttatcttatgtttaggaatttcatctttactttaaatgtttcaa

SEQ ID NO: 86258 - DNA, 295 bp, Glycine max
  Clone ID: PAT_MRT3847_48903C.1
ggggagaaaaaaaacacctctattacaaaaaccatgatgcaggtgcacattattattactatataaagaattacaacaagacataatcattttaagttttcaacaaccccataaaacgtggaactttttgcggctatgaactgaatgatggatttccttcaataaaccaacttgtaatgaacatccatgcgatgcaaaaattaactaataaagtttcaagtctccatataaaaatggaggggtgtttactataaatgtcgtttatctaccctcgccagcaacaataacataagtg

SEQ ID NO: 86259 - DNA, 379 bp, Glycine max
  Clone ID: PAT_MRT3847_48904C.1
cacagagttcacttgaccttccccacttctgatcaaaatcaaaccgcgaaaacccgaaaacactacatttgagaaaagaaaaaaaaatgcattcgtgcattcctcagcaccttcacttggcttcttccctaaaccccaaggtcactcactctctttctctctggttcttctgatcatcaatgcgtgtaattctcccctacgcaatttgaggatccgtgctgtttcaaccacacataatcacataccagctgctccagtttttctgcccgaaggaccatggaaccagattcctggtggagttactgctgcggagggattcaaagctgcgggaatgtacggaggtttacgtgccaaaggagaaaagcctgatctcgcgctt

SEQ ID NO: 86260 - DNA, 287 bp, Glycine max
  Clone ID: PAT_MRT3847_48905C.1
aattcggctccgagtgccaattggatatttccttggtttcaagcagcatttaggggttaagggtctgtggggaggcacaatgtgcggcagtgttcttcagattttaatcctcttactgataatccgtaagaccaactggaccaaggaggtggagcaaactgctcatcgcatgcgaatatggaacgttaacaatttccgctcagacttggcagaaaatgttacatgaatgagaaggaaaaaaaaaacaatgttaacaatgcactttttaatcagcatctcttttggtt

SEQ ID NO: 86261 - DNA, 401 bp, Glycine max
  Clone ID: PAT_MRT3847_48906C.1
cgcgggcgggtaacgtaccgggagtcggtgaaagctttctgaatttgaccgaagggcctctttatgggctgctggatgtatataacaattccaactacttctttgttctagctctgctgttcttgaggattttgcctattgcaaagaaaaaatattctccatacctactgattgtgtttttacctatatatatttgagccggggtttatgtcttttcagtcacacaaagaataaaggcttgtctgaattattaccttaatttattttacaaactttaatttaatcatataatcttatttgaaacaaacacttgatctattcacacaccataaatattttttattttttattctatgacatttgaaatagtattttaaattttttattttcttaaatttttt

SEQ ID NO: 86262 - DNA, 185 bp, Glycine max
  Clone ID: PAT_MRT3847_48907C.1
gagtgtgtacgagtctgttgttacctcaaaacgacattaacatgctgagactcagacccatcatggtttccttggcggtgcattacctttgggaacatggacattccagggaacagggaacctacagttttcccccaggatccagaattgctcaagggaacgttattccgcaagttaaatgcgaa

SEQ ID NO: 86263 - DNA, 350 bp, Glycine max
  unsure (1)..(350): unsure at all n locations
  Clone ID: PAT_MRT3847_48908C.1
tggcaatctgttgttttccatgnaagatttttggcgttggacgagacatttacatgtataggcttcaaatggagttattatttggcatatttttgtggttctttttttattatgtgtattgagataacataatacatattctgtgctatgtgtaagcacatcttcaacgagcaaatggtcattacatagaattcttacaacaaaattgacagaaacactccagggcccaaattcccttggttatcaaatgataaaaatgctattttttttttgctttttttggtattggaaggagaattaactttgttattttaccctacgtttttttttagcctaaattaactgatttt

SEQ ID NO: 86264 - DNA, 337 bp, Glycine max
  Clone ID: PAT_MRT3847_48909C.1
tcgctcacacagacacagacggcgggcggtgacgagagacacacacaagcgcacaggcaaaagcttgacggagaatctatgaactgggacctgaaattctgacgacgggatatgaggctaatttgagacgagactgacgacattgaagtgtaaacgtatggtggagggggtgaagatttggctggtgtatgatgggatgtcgaatatgagaggcgctgattcactataggctgtatggggccaaatgttgtggtcgcgttgaagttatgaaattttgagaggttcattatgacgcacacggacaagcttacttgccacgttggaaactatctatact

SEQ ID NO: 86265 - DNA, 259 bp, Glycine max
  Clone ID: PAT_MRT3847_4890C.1
cgaaagtatccatgcttgatcaggtccagcactctaccatcatggtcaatgctaatggccaggtccatctccgtgactggcgtatctggtattaggacttatgaaggaggatactgccaccccacgttgtgccaaggatactcttttgggagttactccaatgctgcattgcaatatcgtgtgtatgacctcatgccaagctactatggactagtctgctgctgcaagaactgcctctcccgtctatgatgctgctcca

SEQ ID NO: 86266 - DNA, 304 bp, Glycine max
  Clone ID: PAT_MRT3847_48910C.1
acccgggacgacccacgcgaccgagcaactactaaaccctcctccagctgcagcacttggagcagaagtgaaggcgcaccacgagagcgaggactaccctggggccagaagagcacgaggagaagcacgcagaacaaacacaagggccagatgtgaaacactgcagcctccaggcaacaagaaccagctgccagagaagagcaaaccagccgaaaaaagggagcaccacatgccgaaagcgacggactccgccgatagagcaaggaaatacgaaagaggacaaagcgagacaaaacagccaagc

SEQ ID NO: 86267 - DNA, 286 bp, Glycine max
  Clone ID: PAT_MRT3847_48911C.1
cctcatttcctcgagaaaataaatttccattctttacactgagattctcttctcacaatttcttgattttcttcccactttaatttttttccccttctcaatgtttgtttccactgatctctccatatcaccgtcgtggagaaaacgttgacctttcttagacttgttcttcccatccaaagttttgatcttttttcagattttgaagttggaaaatgttttttagtcaactgggtcaaatgggtctcttccaaatctttaaattgttctaaatcttttctgggtt

SEQ ID NO: 86268 - DNA, 674 bp, Glycine max
  unsure (1)..(674): unsure at all n locations
  Clone ID: PAT_MRT3847_48912C.1
ccacgcgtccgatcttgcggttcctgaaggacttttgtagacatggagtgtttcctagaggtaccaactcttcttttatagctttaattgtcaaatgtgacaacacttaaggtttaaataatttaaaacctatatcgttggtaggttgtttgtataaaattttggctaaattattagctaataggatgataatggttctaggaaaggtgattgataattgtcaaagtgccttccttggtgagaggaaacttttatatagagtacgtgtggctaatgcggtgatggaagatgcaaagagaaggaaaaaatcttgctatttaaagtagactttgaaaaagtttatgattctatttctcgagaattccttctctatatgcttcatggattaggattttgagacagatggattaagtagatcaaatgatgtcttgagtttacatggacttcggtattggtgaatggaagtccttcacaagagttcaaatgtcacaagggacttcgtcaaggataccccttggctcctttcctctttttagtggtgaccgaaggtttgagtgcttttatgagaaattcaatatcgaaaggattgtttgatggatataaagtggaatataaagattgtgttgntagcttgttgtaatatgctggccacaccatcttttttggcgaagtaa

SEQ ID NO: 86269 - DNA, 1517 bp, Glycine max
  Clone ID: PAT_MRT3847_48913C.1
tgcgcacctgagcttcgtttcgacggagaacaaataacgcaacccacccaaggttcgcatcgcatcgcatcatggcccaagacaaaaaggagcgtaaaaggagcatgaagaagaagcagaaccaatctctgacaactctgcctcaggaattgatcagagaaattcttctgagattaccggtgaaatctcttctgcgtttcaagtgcgtctgtaagtcgtttctgtctctgatttcggatccccaatttgtgatttcccattatgccctagctgcctcgcccacccatagattaattcttagatcacatgatttttatgctcaatccatcgccacggaatcagtgttcaaaacctgtagccgagacgtggtttatttccctctccctcttccatcaattccatgccttcgccttgacgattttggcattcgacccaagattttgggttcatgcagaggccttgtacttctatactatgacgacagcgcaaatctcattctgtggaatccgtcccttggccgtcacaaacgattgccaaactacagggatgacataacttcattcccatatggttttggctatgacgaatcaaaagatgagtacttgctgattctaattggattgcccaagtttggacctgaaactggagctgacatctactccttcaaaaccgagtcttggaagacacagactatggtctatgatccattagataggtataaggctggtgttacaccactgtggaatgactgaatcctcagtggggctggatataagtgcggtcttcttggaatatgactttctcatccatacaccaatctggttcccctggatgccactctatcggggattcctctgcctctcgctgatcgttctactgtgcaaaaagatgcagtttatggtctgagaataatgggagggtgtctcagtgtgtgttgctccagctgtggaatgactgagatatgggtgatgaaggaatataaagtgcggtcatcttggactatgacctttcttatccatacttctaatcggatttccccaatatgcacaatcaaagatggtgagattttaggatcaaattgcgcgggaactggaagattagagaaacgcaatgacaaaggagagctgcttgagcatttcatggacaccaaaggtcaacggttcagctgtgccaatctacaggctgctatgtatacagagagtctactgccactcccaacgtcattttgggaaacaagtgaagaggactaactgtaatagacaacaaaaatcagggccatgaaatatgcaaaataatgtagacagtatcttgatgtcactttcctataaatggtgaagctgttggtagaaggcattgcacttgggagagaatggcatatatatgatattaaattatctattgttggggtagaactagtggagctaacttcacctagtggaataaggctttattgctgttgttgcagtgtagaactagtgtcagttttaatgctatttcaataaagttggagtttgaag

SEQ ID NO: 86270 - DNA, 273 bp, Glycine max
  Clone ID: PAT_MRT3847_48914C.1
aaaatttttactgatctggcgctttttccgtttctggtcactggtatgtttcttgctcgttaagcatatggcataaatgtccaagtacatatttgaagaaagtcgttactttgaatcatatgctgtagataaacggaattgaggctccagagaatatgccaaaatgtattaataattgtcacaacttggaaggcttttggaaaaactggcatgcttccttcaacaagtggcttgggaggtatatatacatttctcttgggggatctaagaaaa

SEQ ID NO: 86271 - DNA, 601 bp, Glycine max
  Clone ID: PAT_MRT3847_48915C.1
tttttttttttttttttttttttttttttttttttttttttttttttttttttttttttttttttttttttttttttttttttaaaaaaatttttattaattataaaaaaaaaaaaaaaaatgtaaaaatattggaagaagataaaaaagaacctccaaagggccccatgaaaaaaaaaaggttttttcgaaaaagtggggaaaacaaagggcggacccacgggtaaaaccgaaaaatagggaccggaaaaaaaaaaaaaaaatttttccaaaaaatgagggtaaaaaaaggctggcccaaaaaagggcaaaacagtatcccggggaaaaacgtaaacgggaaaaaaattaaaaaaaaaaaagagccgaaaacaaaaagggtaaacgcggggggaccaaaagggggaaaaaacagaaaaaaatggggaaaaccaaaaagaacaaatttccaaaaggaaaaactagaggccacgggcgaaaaaaaaaacagacaaccccccgaaaaagggggttcgaaaattaccccccaaggggggtataattttatgcaacccaaaaaagggaaaaaaaagattggcccccaccaaggggggagaccaat

SEQ ID NO: 86272 - DNA, 365 bp, Glycine max
  Clone ID: PAT_MRT3847_48916C.1
ctggtccaatcacgaaatcagataaactttctccacaattatgccataaaggcagtgcaagaagctgggaatacaaggacttttcaagtagagatggacaaacaaagctgaaaaccaatgtgttttttgcttcctttgaccaaatgagtgaacgagcctctggtgagagtgcgtgcacggttttagttgcactcatagcacactggctccacaccaaccatggcatgccaaacaagagcacaattcgaaagactcatcacacaaggttcatctgaatggagaaagctatgcaacggtgattactactcaaagctcttcccggataagcattttgatctagagacaatcatagaagccaatctgag

SEQ ID NO: 86273 - DNA, 501 bp, Glycine max
  Clone ID: PAT_MRT3847_48917C.1
acggctgcgagaagacgacagaagggattacgagtaaatttccatttttgttcacatgactgtaagcactatttacttaccctgactttacaaaactctcaattcagtccctgaatttgtaaaatttctattttggtccccatgactgtaagcactatttacttactctgactttataaaactcttaattaagtccttgaatttgttaaatgtttcaaaatttgtttctcttttgtcctttttcgctggcattagggattgaaatgaatgaaattttacagcattttatggagtcagggaccagagggaaagtttcgtaaagtgagggactaaagtgaataacacttacaatcttaacaaaaaagtgagaggtctactcaattggatatcagcagcaggttgtgatcatattcaaggtagtcaaactcgagagtctatgtagactcgtggagcttccgtaaactcgactcataaactcctaagagtttactcaatataaaa

SEQ ID NO: 86274 - DNA, 278 bp, Glycine max
  unsure (1)..(278): unsure at all n locations
  Clone ID: PAT_MRT3847_48918C.1
gtgggaattgcagacactatctatcctcagcgacctggacagattgaatgtgatgtaagcaaacacttgtcttatgttcctgacttatcagatttctacagccaatatgnatttggaatggtttgcacttgtcacatttatttgttgaatcattntagtatnaaattatanaatgcagggggctaaggtttcaattgnaagatctctttgtttantttanaaaacccagatttnagggnatccnttaatagtannatcccaacccttcnatggatttt

SEQ ID NO: 86275 - DNA, 591 bp, Glycine max
  Clone ID: PAT_MRT3847_48919C.1
tcgcccacgcgtccgcgaagtgacttcaaaagaccaagttttggtttccagcacactgaagaatagcatatctgctgatgaaacccaagaacaacaagaaatccttgagaattctacctcagattcttccaaatgttcatctgccaatgatttgaagcaacttaactcttgtccaactgactttcggtccaaaccaggaaagtcagattccattggtcttgcagctggaaagcctgtagtgagagacttgtctgataaagctgtgacaatgtccagtgttcctttgaagatgttggcctttcctgaatatgaatacacctggcagggtgtctttgaagtgcatagaaatggaaagcctcctgatttatatactggatttcaggcacatctatcctcttgtgcttctcctaaggttcttggggtagtgaacaagtttctacccaaagtttccctcagtgaagtttctcgcttgagcatgtggcctttacaatttcttcatggtggtgttagtgatgataatattgctctttacttctttgccagggatgttgaaggttatgagagacactacaagggtctattggatcacat

SEQ ID NO: 86276 - DNA, 706 bp, Glycine max
  unsure (1)..(706): unsure at all n locations
  Clone ID: PAT_MRT3847_4891C.1
agccaaggcaaaaggtgtcactggcagacatgtcacggcatatacacaggaaatgcaacagatttgagttgtcctnttagcacaaagaaatggccagcacagaaacaaaccaccgtcgcgtccatggacatgaacaacgatgtcaacccaaggatcagcttcctgggaagactgctatcgaaatcatgctcttgataccgagatgtgagtattgagaggaacagcaccagtgaggtgacagaacagcaacgagcaatgagagatgcaatggcaaaggctttgaattctggcctgtcttcaagggttggggcacctgtgtcatctttgaagttgccggggatggtggtggatgtggaaaaggctacagtggctatcagtgctgctaccaaggagcaggatccagcagtttttttcagccattctccaccactcctaacgaggtccttgtgagtttcgctgaggatatctctaggtgtcttgttttcattgttgtatcaacgaaagaaatgaagtgacatcgattccttaacaaactgcatcacataaccagcagggcagcaactggtctcaatgaccgaaatttgtaattaattttacagggataataattggattcaaatagaagctatagttggtgttaataattggtttagaacttatttgggttaatagttcaataaaatgtttatttcacaagtttttatct

SEQ ID NO: 86277 - DNA, 3785 bp, Glycine max
  unsure (1)..(3785): unsure at all n locations
  Clone ID: PAT_MRT3847_48920C.1
ggaaatttccatctaggattgatcgtcctgtggctattcggctcgaggtttggttgtttcatctcctaagggtgatcaaaagcttacacctcatgctgaaagcaacaaagcttcagcaatgaacaacaatcgagaattgaaggttaaccaggatggaaaatcaagtgcattatcaaggtcaatgagtaatataagccggaaaagtttggagcctcaagttagttcagagagaacatcaacccgtgttgatgaaactcaacaggatgtgctgcctcgatcacgagagacagcaaatcaggttgagaaaagcagaaatagttctagtgatcgtggaaggccagctgttccgacttcaaaaaaaccaattctgccaaaaatgtaaggaattcggccatgctttggaatgttgtacagctgtttctacacaggaatctggtgctgaaatatctgtcactgcctcgagtagttcaaaagaggagatgcataaagacaatatattgaaagttgcaatccaggctgctttactcagaaggcctgaaatttacaagaagaaagaagtatcttatcaaactgacgaggtttctacctcaggcacagagttgaattgtgaagtgacttcaaaagaccaagttttggtttccagcacactgaagaatagcatatctgctgatgaaacccaagaacaacaagaaatccttgagaattctacctcagattcttccaaatgttcatctgcccatgcgtcggagcaacttaactcttgtccaactgacttccggtcccaaccaggaaagtcagattccattggtcttgcaactggaaagcctgtagtgagagacttgtctaataaagctttgacaatgtcaagtgttcctttgaagatgttggcctttcctgaatatgaatacacctggcagtatgaaacattttgttttggattgctcttgctgctttaattgtcatgctttgcaataaagtgtgttgtacatgagctttgttgtttgcttgcaggggtgtctttgaagtgcatagaaatggaaagcctcctgatatatatactggacttcaggcacatctatcctcttgtgcttctcctaaggttcttggggtagtgaacaagtttctacccaaagtttccctcagtgaaatttctcgcttgagcatgtggccttcacaatttcatcatggtggtgttagtgatgataatattgctctttacttctttgccagngatgttgaaagttatgagagacactacaagggtctattggatcacatgattagaaatgatttagcacttaaaggagattttgatggtgtcgagctgctgatattcccttccaaccagcttcctgaaaattcacagcgctggaatatgcactttttaggaggagagaaaacaagttataagtgttttatgaagtgtcctgctgctattcatctcattgttttttttttaatatttttggtttgtgcagagagacagtgtaccaaagcatcgacaatacataaagtctaaacctcctgaagcaatgggaactagtgtaagtagtaggattgtggaaacaaaaactaatcatgatatttctgttaagcaagagaactctttgtcttcggggatccattccgttggttgccaagagatagatactgcaagcaatatcagtaaggataaaattttggacagaacaaacaatggtgagaatcagcaaaggcctaaacggaaacagatggaagatgatctcgatattaacgtggaggcaacgtttcagagagacctgactgtgaaagccgtcaactgtcagctacctaatgataaaaaagttaagcatatagatctttcagatacagttgtggaggcttctgcagttagttgtcagaaaatgccttggaatgaggtaaatggcaaatttgaagacagagaaagttatagcagggagctgcgaacaagttttggtggaattcacggatgttatgattctggagccggcgaatctttgaatggtagctctgcatcacttgtaaatgatcttggtttctgttctttaggggaggacatacggtgtaaagaacctggggtatatttagggggaggaggatcaatcacttagattccacaaaaaagatatgtattcccagtttgaatgtgatgccaaatgagaaagattttccaacagctgtcatgactttgtctgaaactcggtgttcacctaagcgcatggatgaagagttcattgaccaagatcacaatatggtaagtaggaattttgatggcaaagaaactatttttgaccagacacatttgggtttactagtaaacttagagagacaagacgctagaatcaacaccaaatctacatcagggattccaaccatcaggacacaattgtgtcaacaaatgaattccactggttcgtccctgagagatagtgttccagagcatcgacaatacatagagtctaaacctcctgaagcaatggaaactagtgtaagtagtaggattgtggaaacaaaaactaatcatgatatttctgttaagcaagagaactctttgtcttcggggatcccttcggttggttaccaagagatagatactgcaagcaatatcaatagggataaaattttggacagaacaaacaatgatgagaatcagcaaaggcctaaaaggaaacagatggaagatgatcttgatattaacgttgaggcaacgtttctgggagacctgactgtgaaagcggtcaactgtcaactacctaatgataaaaaagttaagcatatagatctttcagatacagctgtggaagcttctgcagttagttgtcagaaaatgccttggaatgaggtaaatggaaaatttgaaaacggagaaagttatagcaagaagctgcaaacaggttttggtggaattcacggatgttatgattctggagccagggaatcttttaatggtagttttgcgtcacttgtaaatgatcttggttcctgttcttcaggggagaacaaacggtgcaaaaaaccttgtgatgagaaaatcatccacgaggacttaggagcgatggaaagaaccttctttcctgttgatactcgtaaaaaaaaagactcggggatggtactgaatgagcctcgtgcatacgtggaccaatttcaagttggaattccaaatctagagcttggtttggggggtgaaacgaaaccgtcacacaagggtatgctgcctttctttgttggtgcggttgacaagaaaaatagccaggaaaagactccagatatattgacagatgagcgagaggatgagaatgttgctgcgtctctttccctgtctctatcttttccatcttcaaacaaggaacacgtcaaacctgttacaaaagctgaggatgggcataatgtgaattcgccgtatctcctttttgggagattcacggacaaataaatatgctgcgctgctatttctctaatcatgtacattatctatcttgttccagatgccttggataaggctatagcccatcatgtatgtaaccgtccagtgagaccttatacaaaggagacggccaactgttcatgtgcccagcaaaatataagtttttttttcctttctactcctttgtcaaatacatgcttttgtactctttttttggtttcagaacgcatggttacggctgtttgtatatatagagagaatttcagccgatataatttcagaaatgttacgaggaacttgcggatgaatattttttaaaaaaaaaaaaaaaaaaaaaaaaaaaaaaaaaaaaaaaaaaaaa

SEQ ID NO: 86278 - DNA, 1523 bp, Glycine max
  Clone ID: PAT_MRT3847_48921C.1
ccccgggccgattcgggatgtgcttccactctgcgctgtgagcagcgctttggggcatggtcctcagagaaagggctgctagagtgctcaacgaagcatcaaagcgagggctgttccctgaactttttcgtaactggaagcgggggtgggctgtggctgctccccgggtctggggcatgcgagtgtggtgcagctcctagtatttaatgcttcaggaatactgcccagtgtcatgtgctactgcctgatgctagctctttacgccaagaatgacaggttaaatgatgcctataatttgattgatgagatgatcacgatgagggtgtcggatattcatcaaggaattggacaaatgatcaagggagattttgatgatgagtctaattggcagattgtggagtatgtctttgacaaactcaattctgaagggtgtggattgggaatgaggttctacaatgcactgttagaagctctttggtggatgttccagagagaaagggctgctagagtgctcaatgaagcatcaaagcgagggctgttccctgaactttttcgtaaaagtaaacttgtgtggtctgtggatgtacacaggatgtcggaaggtggtgcattaacagcactgtcagtttggctgaacaatatgcatgaaatgtccaggaccggcaatgatcttcctgagcttgcaacagttgttgtggtgtaagttgcttttgcctctaaaaacttgatcttatttattttctgcaccacacacacctgagttttttaaccattggagttagaaataaggtggtaaaaattgtgcataataggttcgcatctgatccatcttagttatgaatatgggtggaaggtgcattgatctgcatttctggttatcaaaaaaaaagggggggagatatcctgtaccttaatctagatctgtcgctagtgcttgcttttatcatcgaagtttcaacagttgttgtgggccggggtcacatggagaaaaccacagatgcccaagatttccctatcgcaaaggctgccatttcattcttgcaggataatgtaccatcgtcctttgctttccctggatggaacaaaggtcgcattgtttgtcagcagtcacaactgagacgaattctgtcgggcactgaatcatcatctagtagaaaaaaaatggataaattaatatctttaagtaataccccattgactactgcaggagccataacatccaaatctgatgcgcaaagtggtaaagctaatggtgttgattctagaaccgatagtacaagaacagagcttctaacgagtgcaatttagattagattagaaagtatagaatttacattcatcactttcccatgccctgttttggtctatttgaaattaagattggggcttatttgttacacttccacgaaatattcccaagtgggactggctttttcaggtcgccgaaaaaaaaaaatatatattctcaaggtataatctatctgaacagttgtctatcgtcaccaatatttttttacctgtgt

SEQ ID NO: 86279 - DNA, 1045 bp, Glycine max
  Clone ID: PAT_MRT3847_48922C.1
acttcatctctgtacattattttgcttatctctgttctccctcccttggtgaatttgccttgcagagaccccggcgacatgctctgagcttgccccggagcccatattgttggtttcgggcttggtcgttctggtgcttggtggtgacctaatatatatgtgattgtttagaaagaatagaagaaatcgttgcgggtgaaaatttgtgatcaattgtgtacatggatgtactacttgttcagcttccagttcaagttggtttattcattctgccttcggcgtgctgtcgcagagggctggtcagaaaccacatatttaccgagttcaggaaaccttcgtatctcaagaggaaataagggaaccacatttgtgttacagaagcaaactgagcctaggcaaaggttattgacagctatttcctcggggaagggcattaaagaggcaatagatgaacttatttccttaaagcagaatactggtcaagaagatccagaactagaagagggtgagtggcagatgatgtggaattcacagactgtgacggatagttggatagagaatgctgtcaatgggctgatgggcaagcagattatcaggaagaatggaagaataaagtttctggttgatatcttgcttgggcttaagttctccatgagtggaaattttgtaaaaactggctccggagtgtatggcgttacaatggatgatgcagccataattggtggcccattcggatatcccttagaactgaaaaacaacttcatattggagcttctatacagtgacgagaagctcagagttagccggggaaacaacagtattcttttcgtacatgttcgtaccgatgcattgaggtgacctagtacatatgtgattgtttagaagaatagacgaaacctttgcgagtgacaattttaaatttgtgttcaattgggtatttaactgtacgacaatgcaaactaaatataaacataacatggacgtactacttgttcagcttccatttcaagttgtggtttattaaatgcttcaattctattttggc

SEQ ID NO: 86280 - DNA, 1539 bp, Glycine max
  Clone ID: PAT_MRT3847_48923C.1
aattcggctcgaggctacccagaacaagatccgcagggtttttgctttcactgattctgagttgttgcacgaccagataacatttgggaaaaaattggagatgcctcttttgacggcactgagagaaaggattctggaacttgccaacaattttgaagattttgttttaaaccttataccctctactgatcttgagcagccactgcatttggccaaagtagctattggacttgtcactttccctgtaaatggtgagatattgcttaagaactgttctatttgctgtgatgacaagccagtgccaattatgattaccttgaaatgtttgcacacattctgttcacattgcttgagggcctatgctgatggtaaagtacaatcttgtcaattccctataagatgccctcaaccaagatgcaagtattgcatgtctgtaactgagtgcaggtcttttcttccattcatctcctttggatcactggagaaagccctttccgaagaaaatattgaccattcagatagaatttattgtccatttccaaattgctctgttctccttgatcctcatgaatgttcatcagcaagggccagttcatctagtcagtctgacaactcttgtatcgagtgtcctgtttgtcggaggtttatctgtgtggactgtaaggttccttggcattcttctatgagttgtttagaataccagaacctgccagagaaggagagggatgtttctgacattaccttgcatcgtcttgctcagaataaaaggtggaagcgctgtcagcagtgtcgtagaatgattgagcttactcaaggctgttaccacatgacatgctggtgtggttatgagttttgctattcatgtggtgcggaataccgagaagggcaacagacatgccagtgtgcatattgggatgaagataactctgaagactcagtggcgcactctcttcaagaatcagaacaatgggcatgggagacattcaattctctctccatgatcgtggacgcatactcagaccaagaacgatcgcagcttgcacttattcaaaggttcctagctgggggtttcagtctcagtgaccataatccttaccaatctcctcctcgctgtacagactcctatgtagaccccatgaaggatctacatcaacttccatggctagagagatttgtgtctgtgataagtgacaactactatgatgattacattcaatgaatgaaactgtgatagatcatagactacctaataagttcatcaactttcaatctcaactaaattttgaaaggaggatgcagaaagagtttgtgactctgtccacttttcatcaagaggtgaagcaacatttacatcatgaaattccttgtttgttccccgcttggatatatttaaccaaaggtggaggatctgttcatgattattctctctaaggaaagaaaaaaagaaaaagtgatatttgggagtgaaaacattttacttgtggttgggaagaatacaattttaggcaattaaaagaattccggatttttaattttgcc

SEQ ID NO: 86281 - DNA, 575 bp, Glycine max
  Clone ID: PAT_MRT3847_48924C.1
ggctcgagatgacatccaaggtgttatcaccttgcgcatgtacacccccgagtcagaaatcaaaagaaattttagttctaggtggaacaaactgagccaaaagaaggatcctgaagagggtccttttgcattgaacacctttggcctttacgcctatgacacggtttggttgcttgcttctgcactagatgcattttttaagagtggtggaactttgtcattttcaaatgattcaagcttaaacatgttaaaaggggacacccttaaacttgatactatgggggtatttgttgatggagtcatgttgcttgaaaagattttaaaagtgaacataactggtttaacaggccaaatgatgtttagtcctgatggaaacttggtgcatccatcatatgaagtcattaatgtgataggcactggaattcggaggatcggttattggtcccaaacctttggccttcacactggggaaacttccaatcattccaatttcagtgaaggactatttggtgtcatctggccttgccaaacaacccaaaccccgcgaggttggtttttgccagaatggaagacac

SEQ ID NO: 86282 - DNA, 280 bp, Glycine max
  Clone ID: PAT_MRT3847_48925C.1
gtgagaaacgtttattttaaagaaagggggagcccacgaccaagaaagtgggagaaaaaaaagggaaaagccaaaaaaccaagggtggcccggacggaaaggaaaaatcaaacataacagcaaacacggacagaaaaaaagcaaagctccttgcttaagtaacagcaaaaaaaacactatgggaaggctattaaagcacacccgacaaattcctttgggacaaaacccccaagaacaatggtctgcaaaattaacagctaatgcacacaaatgggagggg

SEQ ID NO: 86283 - DNA, 210 bp, Glycine max
  Clone ID: PAT_MRT3847_48926C.1
tcggtctcaatctttcattggcaagtaggacctcgactgaaaatggatacgaagttttttcctccatatcttaataacactagtaatcatactttcaatgaaagcgagctcctacggatcaaaagcaagttcacaggatggctaattccagacaatgatacgtccacgcctcatgaactgattggcttcaatcttttcggttcttaccag

SEQ ID NO: 86284 - DNA, 567 bp, Glycine max
  Clone ID: PAT_MRT3847_48927C.1
ctttaaaatatttactttacaggtgttatatatctaatagaataattctaagttgtaacattaactggtgaaagtttttagcgaattaatcactggctgaggaaatatttatatcagaattcagaaaggcaacttatggggaaaatacttctgacccacatgcttcaaacattggggtagccaagattagaacaaatgctatgccaaaccattttatgttcttgtttgtcttcagtatatctcatatttgtttaaactttgagttcctgtctggaaaatgttttaaaacttcatcttatttttacggtgatttgtctgatacatatgatgaaattgtctttgaccggtgacaaattatgaaacagtctttttactttctgctccttaattggacattgatatcctcacttatttctccagctccattttatgcaaaattttcacggtatagattatgtgcacaagctgtactcacgaattggtttttgacctcattatattatgatgctgccttttctactcctttttgtcatgtcttttcctttcagtctcctgaaaggtaatggc

SEQ ID NO: 86285 - DNA, 391 bp, Glycine max
  Clone ID: PAT_MRT3847_48928C.1
ggctcgagaacgcgtgcatagcagagtcagagacagagacgcagccatggggcggagacctgcgaggtggtataggcaaattaagaacaagccataccccagggcacgttcttgccgtggtgttcctgaatccacgatcaggatttatgatgttggtatgaagaagaagggtgtggatgagttacctttgtgtgtccatctggttagatgcgagaaggaaaatgacatacgtgaggccctggaagctgatcacattgcttgcaacaagtacatggccaaattagctggaaaggatgcttttcacttgtgagtctgggagcgctcattccatgttcttaggaacaacaagatgcttccgcgtgctggtgctgataggcttcaaactggaatg

SEQ ID NO: 86286 - DNA, 1521 bp, Glycine max
  Clone ID: PAT_MRT3847_48929C.1
cggacgcgtgggggaaatatttcgccctaaaattttagatggttcagctgaaaacaccttgaaagggaagataaggattaccacgagatgcttatggcttgacaaagggaagctgatggatgcactctacaaagcagcccgtgcagctctttcaagctgccctgtaaagagtccactggctcacatcgaaagaattgtgtctgaggtattgaggaagatggtgaggaagtacagtggtaaacggcctgaagttattgccattgccatagaaaaacctgcggccattcttgctgatgagataaacacaaaattgtctggcaaatcccatgtgggtcttggaatgtcaacattaagtaaagcagtggatggacatgggaagggaaatcagtccactgcactgcaggttaaagatgatagtattgataatgcaagtggagctgagggtgatttatctgaggaagacaacactgcaagtgggcctgagggttatttatctgaggaagacaacactgcaagtggagccgagggtgatttatctgagtcagaggattcagatgaattttggaaaccattcattacatcattaccagttgagaagtcaatcaatgctgacaatggttatgtttcaccaaaggagcaaaaatccaatttgaagaaagatgagtctgaagacattgatgaagccaagtcagaagaaacatctaattctgaagccaagtcttcaaaatcagttaagagaaataaatggaaaactgaggaagttaagaagctaattggtatgcgtgaggaactaagtgaaagatttcaagttgtgaagggaaggatggccctctgggaagagatttctcaaaaattgttggctgatgggatctgcagaagtcctggacagtgcaaatctctgtggacatctttggtagtcaaatatgaggggatcaagaatgaggataggaagaaaagttggccatacatagaggacatggaaaggataatgtctgataaagaagcccctgcaaaatgattggaaatatggtggacactggacaggataagaaatattttggagaaccatctacattaaaattgttgataagtttgagtgtggtgaccgggaagataatccatgacttgcatgacattgaagatccctagtgttttttagggctgagggatagacagcataaaggggttggctttcatactggcacgggaatgtctgagtttatgggacgatttattctccacctccaatgcctgtccccgtttttttattacatttgtgtcataatttataatatttgttggtggcacatattgggtgccctaagcaaccatggaaatgtctacctcttttccagacattgaacactgaaaagaaagttttcatacttttaaaaacgagtgccaacttaaattcccagtgtgtttgaatgtgcatttggagctccaaattttttagaatgagtcaaatatgatttttgtattgaccaatatgtttggatgtgggcttgaaacacgattctg

SEQ ID NO: 86287 - DNA, 502 bp, Glycine max
  Clone ID: PAT_MRT3847_4892C.1
gaggcagtgcatctttacctattgtggtcactgtggtttcactactgtgccttttggttcttttggaacgtgctgatgcagcaacttacaccgttggaggacctgggggatggaccttcaacactaatgcttggcccaaaggaaaaagattcagagctggtgatatcctaagtaagtaaatttaattagtactccactccttgtatgtcacttcaaaaattaatgttagtaacacattttttttataagtctatctttttatactttttactcataattttataattttcaataaattttaacatgtaaaacatataataaaaaatgtgttagagaaattgtttttaagttgaattttctattgtcatgtagtcgatattttaaaaatatttttaagttgaatttatcaaaatgatttatattaagaaatatttaagtctcacatcatctaaaaataaagtcaaattaaaatatataaataaagaataatcctcacctcttg

SEQ ID NO: 86288 - DNA, 281 bp, Glycine max
  Clone ID: PAT_MRT3847_48930C.1
ggggcagttgaatatgattattcagtggagaaaaaacagtgtgatgaacatgtacgactatggattcttaaaagcgatgaatttgatgacgcagcaaagaaagcgattatcacacgatttaatctcaggcaagaaaacttgttaatgcggacgtacacgagacgtgaaatttcaacattcgatacattgattagaatgcgagtacatctaaagctcagatagaaatcgtaaaaaatgttttgaagccctacacgaatgaagttatgcgtatttatgggaat

SEQ ID NO: 86289 - DNA, 460 bp, Glycine max
  Clone ID: PAT_MRT3847_48931C.1
acgctgcgagaagagacagaacgggggagacatttgtttattacagaaatatcaaaggctatacaatatatcggttcagcaagaccaattaattcaggatatgggagaattcaaagaaacaggatgggaatgggacttcaagtggaggagaccactatttgacaatgagatagatcaggcggttgcatttattcaagaggtggaggggatcagaattcaaaatgtcattgatgatcagtgggtgtgggaggctgatatcagtggaaggtactcggttaagagtgcttatagtgtgcttagaaaggatatactgcaggaggctccagctgaagcatttaaggaattatggaagcttaaagtcccatctaaagtgactacgtttgcgtggaggttactcaatgataggctggcaaccaaagataatttgaggaggaaacacgtagagttgaatgatcactta

SEQ ID NO: 86290 - DNA, 299 bp, Glycine max
  Clone ID: PAT_MRT3847_48932C.1
atcacatttggcactcaaaaacacgatcaactcggcgcgcatctgctgaagttgcaggccttatctttctttcaaactgtagagacataagaaaaccaaaatgaataacgcgcgcgaccgatgagtttgtcaaaaatctctaatattttgtatgcatcattcatgcgacacacatatttattataacatacaaccgtacgcgattgtagagtgtcatgttaaatgccaacagatagcaaacatggtcttactacacgcgatgccaagcttcagaaagtcacaaaacatgaatctacaac

SEQ ID NO: 86291 - DNA, 775 bp, Glycine max
  Clone ID: PAT_MRT3847_48933C.1
ccacgcgtccgaatttaaatatctccctcctttccatcccaccccccccccaccgtttaccgtatagaccacaacacgcgaacaacacaaagacatcaatctcttgttgttgttgttgttgtttttccagaatggacccttgtccttcatcgaacacgaacaccgtgaacggtttctacacgttcgtgagccggggaatggaggagctggagcgagccttcctagccaacaacaacttcatctccgtccagttcctccagaaggtggtgtccctcctccgctccctccacacccagctcaccctcctcgtccacaagctccacctccccctcggcgacaagtggctcgacgagtacatggacgagacctccaagctctgggagacctctcacctcctcaaatccgccatctccaacttcgaacctttctactcccagggcttcaaccttctctcctccctcgactcatcccacccccaggtagtgagggctatatcagggtgcagaagggaggctttgggtttggaggagcagaaccgcgctctgatggagactcgggtccacacgctgtgtctgcgtctggacgagagggtatccgtggagtccaagctcaacggcttcaacggcttcaggggagttctctacgcaatgaggacgtgagttcgatgcttttaatgatcctgctgcacggtttagtctactgctggccggggacctccgagttggtctcgggagggtacgagggggggaggatgtttctgggggtcgcggtgatg

SEQ ID NO: 86292 - DNA, 421 bp, Glycine max
  Clone ID: PAT_MRT3847_48934C.1
ggattatatccacatgaagtactaaaagtgagtggaattaacctaagaagacaaggacccgaaattgggatagaagttaacgagggacttaggactgcccgaatgagatcaaaaaaatggagagctagctgccatgctatcctccttgagtgggtgagcaacgagctgtgttgtgggacattaatatgagcacgcaagagtggggcggagaagcttacaatgtattggtataagcgaatcaatcctactacttctggtcctgaagtatctgcgctagaaaaaaaagaactagggcgggtcggccaaataaggggcccggtgctacatgtagctcttcccgcagggaagaggcctaatatctacaacgctctgatagctaaggttcgagatactgtaggtcaacatatacaagagacttgag

SEQ ID NO: 86293 - DNA, 726 bp, Glycine max
  Clone ID: PAT_MRT3847_48935C.1
actgaatctactagcccccacaggttctaatgataacactagggaaaatccgggggagggagggtaaagaaaaaaacttcatacaaatgcggtgtaaaatttcttcctgttccgttatatgagagagagagactatcacccactcacccagagtattcttattggcttattcagaaaatatcggcctgctcttccaccacagtaaaggcatcatcacaattcacaggtaagaaactcgttatttcgtcgcactgtctgtttccggttcctgcccagagtatctcatggaatagaagaaagctaacattaactattttggcaatcaaacataagtcaaatcagttgcaaaacttaatcctcatgcgggatcgattgggtagacgttgaccttatgattgcctttgtcatcaaaggaattttctgtggaaggaatcgatgatgtcatattcatagattagatccatttttttcttctatataaatgaattcagtcatgtttggtttacccttagaagtatgtttgagaataagagcatattttgttcagtttgccaacatcaaaagtatgtttgaaggatcaaactcagtttggacagatgtttgggtgtccacaaaattaattcttctaacctaggtttgggacagaagaatcttgggacatgctttttatttttcagtttcaggtggaatcatttatgaaaaattacctcccattttacccaaaaa

SEQ ID NO: 86294 - DNA, 308 bp, Glycine max
  unsure (1)..(308): unsure at all n locations
  Clone ID: PAT_MRT3847_48936C.1
ntangcacgcntagtnactcgtnnttcngnctcnagctcngttncnagncnncnanttagagtaagtnanttgttntcttgnatgcaacaaggtttantgacnccananntacgngnnatgcgncntggggtcagtnctggtngtggacagagttncttggattatctctntnccagtggggtacctcgcnagcagtgcaaatggtgctcgnantcaaaatgcaagtnntccttcagcancggttgataagnanagtcnagcancagnaccagcaccagcanctgcacctgcagcagcagcagcaccn

SEQ ID NO: 86295 - DNA, 422 bp, Glycine max
  Clone ID: PAT_MRT3847_48937C.1
gatttaatttacggaaatgtcccttcctgtcttttgacctgacccacatgccccccgcaattgttaaatgacgcggttcagcaaaatgccaactgtgtagtacaaattgttccgattctcattggttggagttctgtgaaaagctctgtgggatattagtaatatgttttttacgtgtttccactttcacgtcttgtttcctaaacatgggtttatgctaaatctcactttactaggttgggtaattgaattattataggggatacaaagttacacaagattgcgattagtgatgttaattaataatttagaaaaatcgggggaaagtgggggctttttgggcgttgcacgtgatcgtgaggtcattgggaaaggggaatctctagctcatggcccaacagcaggcaacagccttatttacg

SEQ ID NO: 86296 - DNA, 289 bp, Glycine max
  unsure (1)..(289): unsure at all n locations
  Clone ID: PAT_MRT3847_48938C.1
ggcgtgtgttcnnngtctcgcngtttttctctttgcnttggctcttgcttttntttncccctcnncntgtcnngtggtgcngggnnnngtctcctgcgttgcctgctcttccnncttttttttttctgntnttnnggtttcggtggggtgtgntggtgtgnnnnncctggctttggcttcttcngnnnntggtgggttctttctggntgntcttccccttgncccccccccnccttcttcttctgngnntnnttgccttgcnnnnctttttggtgggcccgttcngctt

SEQ ID NO: 86297 - DNA, 335 bp, Glycine max
  unsure (1)..(335): unsure at all n locations
  Clone ID: PAT_MRT3847_48939C.1
tacggctgcgagaagacgacagaaggggatccttatctcaaactaaacaggacaacacttgtgcgcgggcaattgcgaacagacgcaacgttnaattgtgtctcactctcttttttctttttttctttctcacaggggctctcttcttcttcaatcaagagaagaaagaacacaccttggaaccatggaaggtggggtaccagaagctgatatggctgcctttagagaatggttggctttatcatggaagaatccttatggtcttcggcttgctttctttgcttggattggaggccctctttttgggtatgacactggacttatttctcggggtc

SEQ ID NO: 86298 - DNA, 592 bp, Glycine max
  Clone ID: PAT_MRT3847_4893C.1
ccacgcctcacgcgacgggttcggcataattgagcgatcgatggcggcgttgataaggtcaccggcggtgatactggcgatcctgacgatctcggcgtgcatcgcgtgtacggcgtcgtacgggggattggtcgggggaaggtcgaagatccctgacgtgaaggcgaacaagaaggtgcaggatctagggcggttctcggtggaggagcataaccggatgctgaggcaggcgcagaaggaggaggagcaagtcacgttcgtggaagtggtggaggcgcaacaacaagtggtgtctgggatcaagtactacatgaagatatcggccacgcagggtggcgacggtggagattccagaatattcgaatccgttgtggtggtgaagccgtggcttcgttccaagcagcttctcaatttcgctccttccacgcagtgaaatacgatcaatttcggttccgtttcaattacttttttaactcataataacatgcttaattggtttagtatgctttaatccttctaataaaaaatatgaaagagagaaataaatgtttacaatttctgtttcagacatgaatcaactggttaacaggtt

SEQ ID NO: 86299 - DNA, 701 bp, Glycine max
  Clone ID: PAT_MRT3847_48940C.1
aaggatggctagcctgacacagcatcaaccaaagggggttaatggaggtagcagccgcatagcagccgtcaatgtcacaccttctaataacctttctacaccatctcatcatgatgcctcctcaaatcatcagaaacctgggtggaaaaagttcctgtcatatgtaggtcctggctttctggtctccttggcttaccttgatcctggaaacatggaaactgatcttcaagctggagctgaccacaaatatgagctgctgtgggtaatacttattggactggtgtttgcgcttataattcaatcattggctgcgaatctcggcgtaaccactggcaaacacctttcagaattatgtaaagctgaatacccattattggtcaagtactgcttatggttattagctgagctggctgtcatagctgcagacatacctgaagtgattggcacggtctttgctttgaacatactcttccacatccctgtatgggcaggagttctaataactggctgcagcaccctattatttcttggtctgcatagatttggtgctaggaagttagagctgatgatatgaatcctagtttttgcaatggctggatgtttgtttgacgaaatgagctatgtctaacctgctgcatctggtgtattgaaaggaatgtttgaacctcaacttaatggtcaacgagccacaggcgatgcta

SEQ ID NO: 86300 - DNA, 988 bp, Glycine max
  Clone ID: PAT_MRT3847_48941C.1
gtcgattctctctttattggcaatatggcttcaaacccagaaacatacaagccctatgggaagcaacccgttaagggacaatggaccactggcctctatgattgttggatgacccctctcattgttgcttcacatggttttgtccgtgcatcacctttgggcagattgcggagatagttgatggagggacaatatccaaaaatgcagcgtgctgcatttatgttgactcgcatgggacgaaatggctatatggtgccacttacagatccaaattgcgacgactcttctcattgtcacaggaaccctactctgatccatttcttcatggttgttgctgcatttgtgccctcacccaagaatacaaagaactcaaaaaccgtggaattgatccttccattggttgggaaggtaacgttgagaagtggaagagggaaggcgtagatcctccaattgttcccaccatgtctcgttgattggggggaacttacgaattgttgccaccgtacgtgttgtaaagttggattgtttgagttgttacgagtataccgtatttgcatatggtctatcattattctagcagaagcttttttttttttaatcatcttaataatggtttttaattcttcggtgaaatccaacgtatattttcttacttacgaattgttgccaccgtacgtgttgtgaagttggattgtttgagttgttacgagtataccgtatttgcatatggtctatcattattctagcagaagcttttttttttttaatcatcttaataatggtttttaattcttcggtgaaatccaacgtatattttcttaagttttagtcctcacgagtctggatgaattatgagattaattttcgattcagaacttaattacacttcaagtttattattcttcatccctagctaaagatgtaatatgagaaaatcaaatttaaatcatttcttataaatttaacgttaccaattgaataatactca

SEQ ID NO: 86301 - DNA, 434 bp, Glycine max
  Clone ID: PAT_MRT3847_48942C.1
ctcgagccgaatcggctcgaggtcgtgcatgcattttatgcatctgttgctttgcatgcacacacactctctctttcctgtctctctctttctctctcatggctttctctctctacagacacacacgcctcgttttctctctctaaaaccccaggtcaaatttccattgccttacgctgatttgagtgatttctctctgtttttcttcgttgctttgcttctcttcttcttcagctaagtgctaatgtaagatgcgtgtggttcttgagatttgaggtgatagatttgatagctagcactgcaaagttgggttctctttcgttcatgtgaacgacccatttgttgtttttcatttggggtgagataaagtggaattttgcaatttggattaatgcgttccgacatttgcgttaagacatggtcgcgcactcacg

SEQ ID NO: 86302 - DNA, 285 bp, Glycine max
  unsure (1)..(285): unsure at all n locations
  Clone ID: PAT_MRT3847_48943C.1
ccacctccaacttctctattgttctctccgtctccctagccttctttttggtgctacttaccaaggcacactcgaccgataccgtttcttncacctgcaacnagttcaacccagnccaaccaangcatnataccnccncnaagatgctagtatttcatcctctggggtgttacaactcaccaaagttggcagcaacggcgtgcccanctcgggatctctcggtcgtggcctttacgcttctcccaatccagatttnggacagcganancggcaaggtagncagnt

SEQ ID NO: 86303 - DNA, 278 bp, Glycine max
  Clone ID: PAT_MRT3847_48944C.1
gatttacctatgcttttttcaaagcttttaaagcacctaatgtgaggcactctgggtgacggggcagagcagtatcaaatgtcaggtaagaaaaggacacagaatagttgcccaatacaccaaagaaagtgaaggagcacatttataattccatgatgaacaccacaacctaaagcctgatgtcatcaatgaattaacctacggatagaatatacaacccactacacactatactacctacatggtgtaccgtggatatccaggaataaataaggtat

SEQ ID NO: 86304 - DNA, 1096 bp, Glycine max
  Clone ID: PAT_MRT3847_48945C.1
tttccctggcacaattgaatcagatcacctatgtgtgttgtacgaccaaagatgttctgccttcctatatagcagagccaaaaatcaaaaagagtttaaaatcgaggtttcaatggtgttacgatcctcatccaaagaaattttgacactgccgcagcagatgtttaaaggattcgggatcagcctaatagacaccttgggattttgcagtttcaaacaacaaatggaattgcatgactcgctccatgtttaaatttcattaaacaaatggaattaggttgtgcttcgtatcatcccagtttcagggtgaacatctcactaaagcagatattagggactctaggggttattttgcaaaccacttcagaagatggcaccttgactcctcttcagcttaccactgacttgaagccaaccattttattgcagaaatttgaatgttgtttttgttagtctcatggaggcagagcatataatgcaatgtagagggcgagtattttgtttgaaaaatgaaccaggagtgtacagggtttggatgccaaatgtttgcactttccaagggaccaatttgaatgtcaatccaattagtataggacattaaataattatataattattgatatgtcttcagctccacacatccctggaaagaattgaagctaacattatcagcgtcacataaggaaaaagcagctcaaaggctggaatgcatgcataaatggaaacgtatgactagaggcattgctattgatgatatatcagctatttgcctcttctttcactctcacccctctcatcaactcctccccactaaaattgtccaataagaatggtgggcgattcaactgctcaattatgcttccttatgacacaaaaatactcgggcaatatttatttgcatgtacacttgggattctctgtgctttagtcttggactgtatttgcatgttgtttgttgaaacattttgcagtatgaatttgtttccaacgaaactacaggctttttctgatttgaccaagaatgcaactgagtttaatattcataccctttcaatatattgacagcataaagaatttttagtaaattacagttatc

SEQ ID NO: 86305 - DNA, 3250 bp, Glycine max
  Clone ID: PAT_MRT3847_48946C.1
cccatttctcaatgtgctgcactgatcatggacaagaagagcaggaggaaagaagaatccaatgttgaaatgaggagaaacccatcaatgcttcggaagctgcaagagaacaagctcagggaagcacttgaggaagcttctgaagatggctcactctccaaatctcaagaacatagaccagcctgactctgctgccaaccaggatgatggcattgggagatcccgatcgctcacccggctccatgcccagcgcgaattccttcgcgccacagcgcttgcggcggatcgaatcttcgagtccgaggaggaaattcccagccctcaggaagaatttgcaaagttccttactatgtacccaaagtaccagtcctcagagacagatgtttggtggtgatcagatgaatactcacatttgtcactaaaggtatgccttgattatagaggggtttggactcttctcttttgatcagagtattcactatggggagtcttctacggttattctgtgtgtcgtaaatgcacatctgtgtacacatgcactttatggctgtgccgagagagggaccgttgagtatgatataaaggctaggattatggactatttgaatattcctgagaacgaatatggccttgtgtttactgttagtaggggatcagctttcaagttgctggctgattcataccctttccacacaaacaaaaagttgttgaccactgttcgatcacgagagccagtccattgcttggatggctcagagtgccagggagaaaggtgctaaagtgcatagtgcatggtttaaatggccaaccctcaaactctgctccactgatttgaggaaacagatttccaataagaagaagaggaagaaggattcagccactggtctttttgtcttcccggttcagtctagagtgactggggctaagtattcataccagtggatggccttggcccaacagaacaactggcatgtcttgctggatgctggatcattgggccccaaggacatggattcccttggcttgtccctatttcgtccagattttatagtcacatcattttacagggtttttgggtatgatcccacaggttttggttgtcttcttatcaagaaatctgtgatgcaaagccttcaaaatcagtctggttgtactggatctggaatggtgaagattacccccgagtttcctatgtatttgagtgattctgtagatggtttggataaatttgttgggattgaagacgatgatgaaatcactgggattggtgataagacttctgaaactcgtcagggaacacagttgcctgccttttctggtgcattcacatctgcacaggtcagagatgtgtttgagaccgaaatggatcaagacagttctgaaagagatggaacgagcaccatatttgaggagactgagagcatatctgttggagaggtgataaagagtcccgtcttcagcgaggacgagtcatcggacaactccttttggattgatttgggtcaaagtccgttgggatccgacagtgctggtcaatcaaataaacacaagacagcttctcccctgctccatttctggtttaacgggaggaggaaccagaagcaacattctccaaaaccaacttccaagatgtatggcagcccgatgtatgatgacagagaggtaaacctaggtgctcatgaggaccgccgcgtgctgtcatttgatgctgcggtcctgatgtcacaggaactagaccgggtcaaagaggtacctgaagaagagcatgtcgaggaagttgatcattattcaagaaatggtaatgggtcagatcatctgcatgtcgatgagatcgtggaagaacctggaaccagtgaagctgtcaataatggatcttggctcaattcaacttctcttgcccggcatcaaagcttggagaatggctctacctctgaaatatgtcctgatgtcaaagagagtgccataagaagggaaactgaaggtgaattcaggttgttgggtaggagagaaggtaatcgttacggtggtgataggttttttggtttggaagaaaatgaagccactagcaggggaagaagagtgtcatttaacatggaagataatcgtaaagagtacctaagccagaccctagagccaggggatatatctgctactagttttgatgatgaagagatcacaagcgatggagaatatggtgatggacaggactggggcaggagggaaccagagataatatgtcggcatatcgatcatgtcaacatgctttggtctcaataaaactacactacgacttcggtttttgataaattggcttgttacctcgttactgcaactgaagttgcctgcttctgatgggggtgaaaaagcaagtcttgtccaaatctatggtccaaaaataaaatatgaaagaggtgcagctgtggctttcaatgtgagggacagaagtagggggctaatcaatccagagattgttcaaaagcttgctgaaaaagaaggaatctctcttggtcttggttttcttagtcatatacagattcttgataactcgagacagcaccgtggagctccgaatcttgaagacacaactctttgcaggccaatggaaaatggttggcgcgatggaaaaggtagctttgtaaggcttgaagttgtcacagcctcactcggctttctgacgaattttgaggatgtatataaattgtgggcttttgtggcgaagtttctcaacccaacatttatcagagaaggagggcttcctactgttcaagaaggctccgaggcatgagatggcaaattcgcccgtgactttattcaattttggaaaccgaacatgaaagattgtttgtgacaagttgcctacaaaagaggctgcagcaacagccatagtagcttcatgaagaatgcattgattggtgatgatttgtaagctccaatatagatgcaaacttagacaagtggggtggatttgttaattcatgtttcttgttgcttacatttttaattttcctcttttgttttttgagctgcttgtagagttggctttagagatttgttacatatcgggaagccatggtgtactttgaagcaagattgtatgtatgggtagagaacctctactgatatatataaatcgcttcttttgcatacagaaaggatttccaacttgtgtaaaaatttagtgttcattttcatgctatactgtaccataccatccaattggtgctttctttgttgatatgaattggttctt

SEQ ID NO: 86306 - DNA, 265 bp, Glycine max
  Clone ID: PAT_MRT3847_48947C.1
cttcgactcatctataggttaaaagatcgttttgacaattgtgaggggtagtggggtgaaagatgctcttaaaaacatgtaccacggcgggaagccccggaagccccaagtcattaataaggcatccttccagggtattattaaaattctatttggcaatccaaaacaacggcttggaaaaatgtgggtggaatggattggccggttgattaaggtgggggtaataggccctcgttttgttgtggtggcaaaaaaaatgaaaggt

SEQ ID NO: 86307 - DNA, 783 bp, Glycine max
  Clone ID: PAT_MRT3847_48948C.1
cgtcaaaaccgtttaaacaaacccacgctaaaatttctctctctttctaaacaccactttctcccaaaactcatctagattcttctctcttcaccattccagatgaagaagtccgtcctcgctgcctccgtcgccgccgccgcttcagccaccgcggcatctctctcctcttcttcccatcaggttcgcctctagctcgtctggctatctttagattcaagttgggaaagaatttttcaaatttcaatacacaattgcgaatttcaatgtacaaaaataataaaaaaagaagaatttgttgcttcggaaataaaagttcttgacttaaattcaatcatacaccctaatttggtggttgaacagcgatagttattgtaaacttttttgtatgtctttcatttttacggataaaaaaaaacatacactttaaatttcggtggatttgattatgctgtgtgaggctgatgtgggttttttttttttgcaggatgagagaagccgtgagaactcttcgtcgcagaattcatcttctacggagaaattcgctcccagatttgatggattgcgcttcattgaaaccctcgtaactgcccatagatgatgattattcgaggttccccacttctcactcaattggggcctcactccttctaactcatcccttccctttaccttttttttttcctttcagttatgccctttaggaaaaaaaaaatcatctatgggaaaattttcaagtcttttacttctgtttttccccctcttagtctttggagagtatag

SEQ ID NO: 86308 - DNA, 226 bp, Glycine max
  Clone ID: PAT_MRT3847_48949C.1
gattgctgtacacccgggaaagatccagtgttccgcaaggttcagtgtgatgaattcacaatcccccaacccaaacattctcataagggccattgttaataaaccagatcaacataataggttcccagatcaacaatcatattataagcaatcgaagccatctacatacattaactcaccccttatagaagcactaacctatcttacacactcatttagtcaactc

SEQ ID NO: 86309 - DNA, 1260 bp, Glycine max
  Clone ID: PAT_MRT3847_4894C.1
cgttaattcggctcgagtgagaggtgtagctgcaccaatctccctcagtgctgattcctgctcttcgtacagtgggaaatattgtgactggagatgatatgcagactcagtgtattatcaatcatggtgcactcccctgccttttgaacctgttgacaaataatcataaaaaaagcattaagaaagaagcttgttggactatatcaaacattactgctggaaataaagaacagatacagactgttattgaagctggtctggttgcaccccttgtcaatcttcttcaaaatgcggaatttgacattaaaaaagaagctgcttgggcaatctcaaatgctacatctggtggaactcatgagcagatcaagtatttggtgagtcagggttgcataaagcctctttgtgatctgcttgtttgcccggacccaagaattgtcactgtctgtttagaaggacttgagaatattctgaaggttggggaagctgagaagagcatgggtaacactggagatgtcaacttgtatgcacagatgatagacgaagcagagggattggagaaaattgaaaacctgcagagtcatgacaacaatgaaatatatgaaaaggctgttaaaattcttgagacatactggttggaagacgatgatgagacactacctgcaggaaatggtgctcaacccggttttaattttggaaacaatgatcttccggttccatctggtggattcaactttagttgaagactgttttgtgggaacctggttggatggagcagggtgatgctaggggactcgagtctgggtggggtggggtgggggagttgggggttgggtggggtgagtttagccttgcacctcatggtgtctgtctggtttaagtctggtcttgtgtcgtgtggctaatggggtgcagggatgggtcagtttaactaccatgtccaaataagaagggtggtggtgggttcaacagcagcataacgaccttgttagaagtttatgttgtgttatatatatatatatatatatatgctgggcataactatggggaggttctatattgcagtagcagggaccatattatgtggcagtggatgggttttcttgaatgcggcttttgagtcctattttttattgagtcatagttgtattggtaatttataccgagtcagtatttgatttgagttgaatacagtattcagaaaccaatttcatggtgtattcaaatgaaagaattagctatatttttgtgcgtgcggtgtga

SEQ ID NO: 86310 - DNA, 281 bp, Glycine max
  Clone ID: PAT_MRT3847_48950C.1
tttattcaaactgggattgcacgcaccagtttatttatatgcgttttaaggcactttctaccataaacaacttacttttttttataccttctaattaatcctggaatgcaacaggtgttacaatacatatacattgtgtgtatacaactcacctagcccctctttactttcagacaggggttactttcagtttgcgcataatcctttgctacatcgctatataaagcatgtgtccatttagactacagacccactgatgggctctccaactgaattacgag

SEQ ID NO: 86311 - DNA, 531 bp, Glycine max
  Clone ID: PAT_MRT3847_48951C.1
ggaaacccaacgcaaaatacataaacataaacattattttaaattttttttaaataaccttatttaaataaaaaagggaacgttccccttttcttagaaaggaaaacacattaatttcttctttaaaaaacggcaatgggtcttaaatccccaaaaaggatttgattgtcttgaacccatgatgggcaggggggggcccattcccagggcgaataaaaattatcacctccaaacctgcagccgtggaagggggggctttttgatatacatcagggacaaaaaaaatatcggggggtttttcaaccccgggggacccaaaaatttaaacaaaacgggggggcttttttttgtcccccattgggggggcaaaaaacccaaataaatattttcttaggcccccagggggggtttttccaaaaattagcctttgagccaatcggctaccactaaaatatatgtatccctttaaacccaaggggggccatttttttagagcttcgggaacataatcaaaaactatcccctccaatt

SEQ ID NO: 86312 - DNA, 210 bp, Glycine max
  Clone ID: PAT_MRT3847_48952C.1
gattctgagtggtcacaaactcaactaataagccaatccacacgaatctgcggtgatccgtagaacctccattccccatcattatatgtcacgtcgcccccacgcagcgccgccgctgtcgccgctgtcacgccagaggccacactcgtggtcgccggacatgcgccgcgacgaggcgtggccgctgccgatggacaaccttcaccccgt

SEQ ID NO: 86313 - DNA, 151 bp, Glycine max
  Clone ID: PAT_MRT3847_48953C.1
ctccacactattttatgtgttttcgtaacaaaccaaacccaacaaaaaccttcctcacctctctagcttctcataggcactcatgctcatgaacagctagcccagcactctgagccactggatagccttcgcccaccctgtcaccagattc

SEQ ID NO: 86314 - DNA, 352 bp, Glycine max
  Clone ID: PAT_MRT3847_48954C.1
aggggcacaagtgaggttgttgatcgagataactagaaacagtgtgatgaagatgaaggtccttgatttcgtcgtagctacaattttgggagcatgggaatgccatgcgtaagagatgttccctcaccgaatgaacactggatatgggggccgtaattcggaggtgatatgcgcaacttgggggcttgctgtggaagcacaaacatctttggcattgggaacaatccctggaaaatgcgttggagcaacagacgaatacgtccatggcaaaaaatgtcaatgagaatcaagaacagttaaccaacaagcttacttttaggccagagacctcgaagtcaatcccaaggacaca

SEQ ID NO: 86315 - DNA, 314 bp, Glycine max
  Clone ID: PAT_MRT3847_48955C.1
actggtaatgggagaagatatgttattaatttattatacaagaaaataataacactgcagtaatagtattatctatggataatccacttgccggggaatataactaggttatacaagctctaaagttcaaatctcactccctttattacacaaaaaactttttttatggatatgtatacaggacattacacagtagtcattaaacgccaattggtgaacaacaatcaaatcaatttttcgccaaaataattgggactatccctgtgggcactagctccaaataaccatcccgggggacataaacaacataaccc

SEQ ID NO: 86316 - DNA, 811 bp, Glycine max
  Clone ID: PAT_MRT3847_48956C.1
ccacgcgtccgatttctctttctctctcgatcttcgcttcccaatttctttgcttctcatatcatatttagccatatactagaaattaagctatccgattctgagggtttcgttttttttttccttgcttaggtgctttgcagacagccaatcttgatcatgggtttcaattctgtctatagaagcttgcaggagatatttccgcaggttgatcccaggctactgagagctgtggctattgaacacccaaaggatgctgatctagcggctggaatagttattgcagaagtcatcccattcatgtccaaaaaattacctgctgcaattcctccacagcacaataactatgtagcctcactaaatgttgaagttgaaagtgaggaggaaggcaataggttgaggcaccgtcagcttgttgatgacgtaactgtggggccttcctctgctccacattctatatctgtagaagttatcaaaacagctgattattcttttgtaccagatctgaatgaggctctggacaagtctacaatgtcaaatgatggtactgataaatttcttgaaatgaatgatattaaggagctagatatttaccagaatgctgaagataacttcagtggagagaccttgaatgagattgctcaggagatgtcaaatggctttagtcaggaagataatgaaaattttgagagacgatttgttgatgttgattgtgaaaatttgatatcttctggtatttgtcaagagatggaacctaagcataataacctttacaaggaggctgcttgcaataatggtggatggcatagaa

SEQ ID NO: 86317 - DNA, 552 bp, Glycine max
  unsure (1)..(552): unsure at all n locations
  Clone ID: PAT_MRT3847_48957C.1
ccacgcgtccgggaaattgcgcattttacgtgtgctccttaattcaattccactcttacactggtcaaggtgctttgcagacagccaatcttgatcatgggtttcaattctgtctatagaagcttgcaggagatatttccgcaggttgatcccaggctactgagagctgtggctattgaacacccaaaggatgctgatctagcggctggaatagttattgcagaagtcatcccattcatgtccaaaaaattacctgctgcaattcctccacagcacaataactatgtagcctcactaaatgttgaagttgaaagtgaggaggaaggcaataggttgaggcaccgtcagcttgttgatgacgtaactgtggggccttcctctgctccacattctatatctgtagaagttatcaaaacagctgattattcttttgtaccagatctgaatgaggctctggacaagtctacaatgtcaaatgatggnactgataaatttcttgaaatgaatgatattaangagctanatatttaccaaaatgctgaanataacttc

SEQ ID NO: 86318 - DNA, 1553 bp, Glycine max
  Clone ID: PAT_MRT3847_48958C.1
aataataaagttactctagaggatgcattccccttatatgcgatttataaagagttccactattttgatatatatcacttcttattacacttgattcatacttctctcttttgctttatagcaggttatgtgatttaattatccagactagtgttaaatagacatttttcttataagaaaaagatacaaacacttggggttgacgacagagggaaagtttgaacataaatttaatccagtagttgtaggtctggacgtaagtgcattggcacaacgtgcagcatatagtaattatctagttgtggttggtagtagtagtgccccaaatctcctccaactctcgagcaaaggctttctgtcttccaacaacaatagttatgtggtctttgttgtcaataactctaacttgggcacgtggaattcgtttttgcacctcgtagctgcattcaactgggatcacttcatcgtttttgccatgaaatatggtcactttgcaattacggttttctctaacagcctccaaataggatccaattttccccgcggttccacatataatgttgtgtagggtatgccatgccacattgtgagtgtggcaaaagaacccttcaagcaagaacgtcctgaccctgttccgagtgatgagtttggcgagaaattcccagagacggtggttcttgcaaatgagcaagcaaatcaccctagttatgtgttcgtaccagcatgccaaggacgctccaaacgccatgggtggccacacgcgccttggagcaacctttctcataacatactgagtagcctgtgtttcaccctttggcaccggatagaagggcggggcaagcaaggtgagggacttgacggattgagggtgtttgacggcaagggcaagtgcgagaatgcatccaagggaatgggccacaatgtggaaggacttaaccttatgggcctccaacaccgacctctctatcatctctaaatgctctcttaatgtgtacagcgacgcgttcggctttggactcctcccaaacccaggtagctcaaccgccaagcatcgggaacacgacttcgccaggtgcgggaacactgtctcgctccaaaattatgccgatgaaatgaccccatgtaggaacaccacatcctctcccgcttcatctgtggtggggcattgggacttcagaaagagagtggctttggcattggtgttatcgttatgaggagaggaagaagagccggtccaacttgtgcatagtttgcaatcgcagtcggaccatctaggaatgggatgagtaaggtgccttgcaatttttccctgaagcatttctacaatggtggtgttgacagtgaacgtggaacagcgcgagttggtgcctctcttggactgcaaaacggggtcctccagcttgagcctcttgagctcagtgatggttaacctcgagacctccgagaccaaagagggtcgagagtagagggtgtcagagatgtcctccaactgaagcttggttgagctaagaagagagacgatcttggattctccgccttgctcagaaaccaag

SEQ ID NO: 86319 - DNA, 721 bp, Glycine max
  Clone ID: PAT_MRT3847_48959C.1
aattcctaattgatcgtgggcgggttgttgatatgttgcaagggaaattctctgttatttgtcaggatattaagcttctaaaaaagaaatttgatgctaatcttccgttgagtaaatctttcacctcaagccagactagttgcaagttagcttcatcaggttcttcccacaaaacattggcatctgatgcgggttctgaccatagtgagtcatctggaatacgtaagaccacgcgtccgcccacgagtgaaaccctttctcccaagacggggcaggacgaggaaaaatccaaagctgatcacaatgctcttcttgatgatgggtgggatatttttgagaaagatgcagaactgaattccggagtttgctgactttttattctgctgagagggggaaacatggggagttaatgctaatgtttatacaacaaaataaaccttagaatccttcgatgatttttctttatgtttcagtagcatactagcatgcatacaatttttatgtagtcctcttggggagttaatgctaatgtttatacaacaaaataaaccttagaatccttcgatgatttttctttatgtttcagtagcatactaagtagcatactagcatgcatacaatttttatgtagtcctcttgagtttgggttctcattgttttccagattttgtatagaaaacgtcacagcaaattacttgatttcttcattacttgatttctt

SEQ ID NO: 86320 - DNA, 1086 bp, Glycine max
  Clone ID: PAT_MRT3847_4895C.1
ggctcgagctgggtatatccacgttagagcaagaaggggtcaagcaaccgatagccacagccttgctgaaagggtgagaagagagaaaataagtaaaaggatgacgacgttgcagcgacttgtgccaggctgtgataaggtaaccggaaaggcccttgtgttggacgaaataatcaattatgttcagtccttacagaatcaagtggagttcttgtcaatgaaacttgcatccgtgaatcccatgttctttgactcggccatggacttagacaccctcatggttagacccgatcagaaattgagtaatatagcatcaccatcaccactaccatgtgtagcacaattcagaccccaccaggccattgcttttgctgacacaattaccaccccgaccaccactaccaatagcttccccacagctaataatgatggctatcttttggattattcatcctcactttttcttcaaggccatagaccaaatatctttgaggataacggtggtcagttttgggacgtagaagaccaacgacaaaagtttcttcatccatatagattcggcaataattcgggttctttcaattgattaatatcatattcaaatagcctttcaagtctacaaacatagtatgctgaactattgtttttagttaggttgggaaattccaaacaagtaccagtatctcagttggaaaaaaaatcttacatgcatgagcaccaaataccaaagctacgattggtatcacagtatcatcattttgagggaaattcgtggtttggtttggttccctgtcccccaaattgaagaggcctttgaacacgatgaataaagtgcagtaaaattgatggatgaagaacacaacacaaagtgccgaccaaataagaccatatcttttgctagatccgttgttccgttcctgtccaagtcatacatatagatgatgcacaaattccaagagactgtgtcaatcctacagacttgaaaattatgtcatgtaattattaattaaattataaaattatatgttaaagaaaaatgattcttgtggtggcagttattctgttgatacagttaatttcaccgtt

SEQ ID NO: 86321 - DNA, 214 bp, Glycine max
  Clone ID: PAT_MRT3847_48960C.1
gacatcaaacactatcaggaagggaaaattaaaaaaaaagcaggggaaagcggtcgttctagagtgattcaagcttactttcgctttcatgcgacgtcttatctgttttatattagtcactttaatgtaattcacttgtcatcgttttataatgttataactgggaataccttttctttatccatcttaattactattgattttattctttttt

SEQ ID NO: 86322 - DNA, 284 bp, Glycine max
  Clone ID: PAT_MRT3847_48961C.1
ccctttttgtttttttccttaccttattactttttcatttggttgtttttattcgttgttcgctatgtgcccgtcaaactttaacatatatggcctccccaagcccaaccaggacaaacaaccatttactgaaacaaaaatggatcgctaccagctagaagttaactctgtgccagacaatggagatttaactgactgaaacctctgcgaacaacaaaccaaaagaccagcagcaatactgtaggggctgacgagagatctgaaacgagacttacaggagactt

SEQ ID NO: 86323 - DNA, 532 bp, Glycine max
  Clone ID: PAT_MRT3847_48962C.1
ggctcgagagataatgaaaattttgtgagacaacctgtggattttgattgtgaaaatttgatatcttcagctgatgattatgatgtcaccccaagtcacagattggaagaatgcgaaacttacttgattgagttagaaagttctgaggctcaagaagtttgtcatgttcaaggcgatacattaaattctaaagatagtcttcaatcagaattggatgctggttcttctactgctggtggcaatactagtgatgttgaaaatgatattggtgcaaagagtgcaggtagccaatatagtcaagtatccaggattgatctgcttgaggaaatcattgatgaggcaaaccaacaagaaaacgttgttttcatcaatggaatctcttatcaacttaatgagagaagtggaagttcaggagaaagctgcagagcaggctaatatggaagctgctactggagggtctaatattctggccaggattgaagaatacaaaacaatgctggtgcatgctaaagaagcaaatgacatgcatgca

SEQ ID NO: 86324 - DNA, 2492 bp, Glycine max
  Clone ID: PAT_MRT3847_48963C.1
ggaatcccgcaccttctccttctccccctctctattgccttttgggaaacagcgtaatttacgtgtgctcctttattcagttcctcttctcacactggtcaagatagtctatcttgatcatgggtttcaattctgtctatagaaacttgcaggagatatttccgcaggttgatcccaggctactgagggctgtagctattgaacacccaaaggatgctgatctagcagctggaatagttcttgcggaagtcatcccgttcatgtccaaaaaactacctgctgcaattcctccacagcacaatgaccatggagccccactagatgttgaagttgaaagtgaggaagaaggcaataggttgaggcactgtcagcgtgttgatgacgtaaatgtggggccttcctctactttgtcaaatggctgtaattcaaaagatgatactgaaaaatttcttggaatggatgatattaaggagctagatatttttcagaatgctgaagataacttcattggggaaaccttgaacgagattgctcaggagatgtcaaatggctttattcaggaggaagataatgaaaattttgagagacaacctgtggattttgattgtgaaaatttgatatcttcagctgatgattatgatgtcaccccaagtcacagattggaagaatgcgaaacttacttgattgagttaggaaagttctggaagctcacgaggtttgtcatgttcaaggcgatacattaaatatttgtcaagagatggaacctaagcataataaccttagcaaggaggctgcttccaataatggtgatggcaatagaattggaaacgattcaaatgaaatggggtggttagaagttgtaagttctttagttgatgattatgatgccactacaagtcacagattggaagaatgtgaaacatacttgattgagttggaaacttcagaggctccaaaagtttgtcatgttcaaggcgatgcattaaattataaagatagtcttcaatcagaattggttgctggttcttctagtactggtgacaatactagtgatgtcgaagatgatattggtgcaaagaatgcaggtagccaatatagtcatgtatgcaggattgatctgcttgaggaaatcattgatgaggcaaaaactaacaagaaaatgttgttttcatcaatggaatctcttatcaacttaatgagagaagtggaacttcaggagaaagctgcagagcaggctaatatggaagctgctactggagggtctaatattctggccaggatagaagagtacaaaactatggtggtgcaagctaacgaagcgaatgacatgcattctggagaagtttatggggaaaaagcaattctcacaactgaactgaaggaacttcaatcacgcttgctcggcttgtctgatgaaagggacaggtctcttgcaattctcgatgagatccgccacattcttgaagtgcgactagctgcagcagaagaactgaggaaagcagctgagcaactaaagctggaaaaggaggaatctgcacggaaggctcttgttgaacaggagagactggtggagaaggtagtacacgaatcacaaagactacagcaggaggcagaggagaattcaaagttacaggagttcctaattgatcgtgggcgggttgttgatatgttgcaaggagaaatctctgttatatgtcaggatattaagcttctaaaagagaaatttgatgcaaatcttccactgagtaaatccttcacctcaagccagactagttgcaagttagcttcatcaggatcttcccacaaaacattggcatctgatgcaggttccgagcatagtgagtcatctgaaatacggaagacaagccggacagcctcaattgaaagcctttcttccaagagtgggcacgacgaggaagaaaaatccaaagctgatcacaatgctcttcttgatgatgggtggtatattttgtcggactgaattccggagtttactgactatttgttctgctgagagtggaaaaacataggagttaatgctatattgtttatacaacaaaataaaaccttagaatccttggatgattttgctttatgtttcagtagcatactagcatgcatacaatttttatatacgttctcgaggttgggttctcattgttttccagattttgtatagaaaacgtcacagggaattactagattacttctttctcttcgaatccttcgatgattttttctttatgtttcagtagcatactagcatgcgtacaatttttatgtagtcctcttggggagttaatgctaatgtttatacaacaaaataaaccttagaatccttcgatgatttttctttatgtttcagtagcatactaagtagcatactagcatgcatacaatttttatgtagtcctcttgagtttgggttctcattgttttccagattttgtatagaaaacgtcacagcaaattacttgatttcttctttttcc

SEQ ID NO: 86325 - DNA, 454 bp, Glycine max
  Clone ID: PAT_MRT3847_48964C.1
attcccggcggacccacacaccgacctccatttcctttatgtttatggttttttcgtgcaacagtaaagaccaagcagagacagcttttaaaaattgcgggtatttattaacatcaatgtttcatgcattatctgcccctagcttttgtttaagctatcccgttaaccttcattatcctccttctttatttcaaaaaacatgtttttctattcactgttctttttcacacacaaaataattatctaaaattgaatatactccttgtctcattattgacttgtgcaatccttgtaacaaataccatgtcacaattcacaatgtttgatttgaaataattcatagcctttctccagcacaacgtattcacatgaacacaattcattcaaaatccctcattcgaatatgtcctatttttcaaaaaccaatttttccttccatatcccctaacataca

SEQ ID NO: 86326 - DNA, 436 bp, Glycine max
  Clone ID: PAT_MRT3847_48965C.1
acggctgcgagaagacgacagaagggcgccgcgccggagggtattcttggccgcagagaacctcggagaggaggaaagagaagagagaaaaagggaagagagaaaagagaagagagagaaaagcttttaaaaaatgggaaaaaaccggccccgagcccttatatagaggtcggaccggttcggttttttttccttgaaccaaaccggtccggttctcccttttttggcccgctggactcacctctggcccattttttttcttttctctttttcttcttttccgattcctactctcacccccctttttccttactgcacccttttctttttctttgttttttttttttttacgcaccatatttattttatgtcttgcatttttatttttacgcatcatatttaattttatgccttgcatttttattttctttaattt

SEQ ID NO: 86327 - DNA, 309 bp, Glycine max
  unsure (1)..(309): unsure at all n locations
  Clone ID: PAT_MRT3847_48966C.1
agcaatcaaacttgcgctttttgcatgtttttgcaaagggccctaacatatataattccctatttaatatttttatttttatatatatatatatttatatatttgtatatatatatatatatatatattttatagaaacccctaatttgttggggaactaattgtgggggtgggggccctcgtgtttctttcctcgtgtttnaaagaaaaattaaaaagctcgcctcagaccatacacttgggattatttttaccctcgggaatgtgggccgggggaaacacccccatcgtcccccccgtggggtttcc

SEQ ID NO: 86328 - DNA, 298 bp, Glycine max
  Clone ID: PAT_MRT3847_48967C.1
ataagatgtttgatttggactggttacatgggctgaagccccctttataacacgccaatggggcaaaagattcccgaagatgagacacaacatgagatgcccaggaaccaacccccgaacacagaagtggcgcctgcgaacaaacaaacggctcccggagtgaaccagggctgacggaaaaaaaaatttcttttgcaataaagggacaacctttgggcggaaaaaggaccctacccaagggtaggtcccagggggcaaaaaacgggaccgaaaaattccccaaagggccccacggggg

SEQ ID NO: 86329 - DNA, 237 bp, Glycine max
  Clone ID: PAT_MRT3847_48968C.1
tcaaataaacatgcacaactttcactgaggagtagatctcagtttggatgtccaaacaccacttttaggtaatgattgggttaaatatccatgaatgcatatgacatattatttcattctttaaaagaaaaaaaaaataacctaaaaaaaaaaaaaaaaaaaaaaattaaaaaaaaaaaaaaaaaaaaaaaaaaaaaaaaaaaaaaaaaaaaaaaaaaaaaaacttggggggggggc

SEQ ID NO: 86330 - DNA, 374 bp, Glycine max
  Clone ID: PAT_MRT3847_48969C.1
ccggccggggggccccttccgggtttttaaactcttccttccctggggccccctttggatctttaaacttttccttccatttctctccctccttttccccaggccaatcttttttttccggggatttttggggacccacaatggggcgcccggggcgccaaaaagaaacagaggcttcccaggaggggggtacttaaacttccattacataattttcctttcccacagattcacaaacctttggaacaggttcatccacttccatggacttacgacccggttaataagacaatccaacagaaccaacaccttttcccccctccttttcaccctaaaaatttttggggtaaaccactccaacattttccactttt

SEQ ID NO: 86331 - DNA, 290 bp, Glycine max
  Clone ID: PAT_MRT3847_4896C.1
tcgagactcaatctctatctgtctctttctttgccctctctttctctctttagaaagctcaggtttgcggggcgagatgatgcagcaggcacgacccggcatgggaccttccaccatgggccaacaaccgccgcaacagtaccagcaggctccgccgcagtatcagcaaccctacgcaatgatgccgacgaaggtccaggccccgcaggcaatgtgggccccttctgccaaaactcggcctaagaaaaaacccccctggcccatcaaggcccaaaccctttggaccggga

SEQ ID NO: 86332 - DNA, 457 bp, Glycine max
  Clone ID: PAT_MRT3847_48970C.1
ggctcgagaaaaaaaaaaaaaaaaaaaaaaaaaaaaaaaaaaaaaaaaaaaaaaaaaaaaaaaaaaaaaagaaaaaaaaaaaaaaaaaaaaaaaaaaaaaaaaaaaaaaaaaaaaaaaataatagggggcggcccccctttatgggcctcttccccccggaatttatttccggcccggtccttggggggttcccatttttcctttttgggggtcgttttaaacctgggcgaaaccttggccatagttgtcccctggggaaaatggttttcccttcccatttccccccaacttacggcccggaaccttaaagtttaaaccccggggtccctaatgggggacccacccccctttttttgggtggcccccaccgcccgttttcacttcggaaaccctgtcggcccattttttttattaaatcgccccccccccggggaggggcgttttgctttttggccc

SEQ ID NO: 86333 - DNA, 260 bp, Glycine max
  Clone ID: PAT_MRT3847_48971C.1
gatctgcttggcttgatttcatatgttgacgatttctactcaaacacttgctcgactccaccgtaaggttccaatcatccgaggcctcagcttcctcagagacttcgccatcggcccactctaattcagtcgcaagagtgtgcaacgtcaacaacggacttctagaaggcttgcttagctcctagccagttccacatccgccggctcacgggtcactagccgagatggacgatccattcgctgagctacagcttcctgag

SEQ ID NO: 86334 - DNA, 335 bp, Glycine max
  Clone ID: PAT_MRT3847_48972C.1
tcggaggccgccctcctatcagggggggctttataccgaattctcctttttttaccgacacttgctatggaacaacacaagatcactaaccaacatccattaaataccaattcataaaaactggtaaaccagtccaaaccaaaccaaaccaaacttatgccaacaccacccatcaaacagaaaaacaatccaaacttccaaaacttacaaacacgagaacaactcgaaatacctactaacaaaaactggaccaactggtcaaacaccacgaaatatgatctggtccttacggacaaggccagccagaacgaggaagagggagacctctttaccct

SEQ ID NO: 86335 - DNA, 369 bp, Glycine max
  Clone ID: PAT_MRT3847_48973C.1
agtcggcggccgcccttggtcgccctttttttttttttttttttttttttttttttgcccccatacattttttttgggtaatatggtattttttttttaaatgggtctttttgaacaattattggggcttaaaaaacccccccttgggggcaaacctcggtgttcatacccccctaaaaatatatccgtctgtttaagcccccttgtttttgtgaggaaaagaggaattttgggggttgatttggaatttttaatttaaaccaagggattttgcggccttaatgtctttaccccccgggggctatccatgggggctcttcattggtcttcaccctacccagggcgaggccttggtggtttccttttttc

SEQ ID NO: 86336 - DNA, 640 bp, Glycine max
  Clone ID: PAT_MRT3847_48974C.1
cccgggtcgacccacgcgtccgggaaattgtttctctcggttctatttttctttttccttaagtggattgttatgcttcttgcttgttccaatcttaatcgagtttgtgtttttccgattgatacccttttattggaattgaagatcttaagaaattgatagtctagtgactttttacatcaattatttgaattatagagcatttttcttcattttgtcatggataatcatttatctaatagttgatggagttgaactgtttgtgtttcatcggtttgcagcacgttaagattactgtgtcagattgaagattaaaatataaaaagatatcatgcctgatacggtggatttaaaatgctaactgttctcgataaacctaatttcttctttgattttccactattgttcaatttccctggaattgatcacgaaacacacggattgaattgtgaacctgttttctgcagtgtagtgtttggaatagtttcgtgtaatgttctgcgtagtgtgaagccgcctcgtcaatggtttggtggtgtcgacttgttgaatattcttggatttgtctctttgtttcaatgtttcacttagttttctaggtttaatttgctgtgacttgcgcttgggtcttacagggaag

SEQ ID NO: 86337 - DNA, 420 bp, Glycine max
  Clone ID: PAT_MRT3847_48975C.1
tacggctgcgagaagacgacagaaggggatgtgaggatagcacaacagcatgctgatacatttgcagctgctctggcttgtgaaggccttaagtctttttgtgcaatgtactcatcatttatgcagagagcttatgaccagttggtgcatgatgtcgatttgcagaatctgcctgtaagattcgctttgtaccgagcctgattagctggagcacatggacccacacacatgcggtgcagtttgatgtcacttttatggcatgcctacgtaacatggtgtagatggctccttctgatgaatcatagctttttcacttggatgcaactggacttgccattgatgatcgacccagctggtttctataccgctcgggaaatggatttaggtgctgagctctatacattggagttagccactcct

SEQ ID NO: 86338 - DNA, 820 bp, Glycine max
  Clone ID: PAT_MRT3847_48976C.1
cggacaccgactttaaaaacagacatagggtgcagaggatgtttgatgcacagcacagccacagagcaactgtacgaggaactgatatgctaagagccaaggtacttggatttgggttcacgaactcaactttataaatctctattcttgggccccattctctaaacactacatgctctttccttttcttttcttctctttgttttcttcccttttcgaacacaagaaagaaagaaagagaagggaagatctcaaagggatttctcctcgatctgcatccttctcttttcttcaacgcgttgatttctgcatattagctcatgtctggtatggtccgttaacctttcttctgtttttcccctcacttttgcctcatgttatgagatttgtcaatataagcgattttttcgtgggtgcttttcaaagcccactgacttggtgccatggaaatcactcctcctcctcttcttcttctttttctgttgttgttctttctttgttatcttgttctctgtgcctctgccaccgacgtagattttgacaactgcaactgcgatgatggggaagggatttggagcatacatagcatactcgttggccaaaaagtcagcgattttttcattgccgttgcttatttttccatacccattgaactcctttactttgttagccgttcaaacgttccattcaaattgctcttccttcaatttattgccttcatagtgctctgtggcatgacccatttactcaatgcttattcttatcatggccctccttccttccaattgctgctctccctaaccgtcgctaaattcctcac

SEQ ID NO: 86339 - DNA, 400 bp, Glycine max
  Clone ID: PAT_MRT3847_48977C.1
agatgatcatgtacaaaaaccaatgtcacatgtagctgttccaacatcaagcctccagtaacccaaatgcatcccacattcgaatactatgacacattagccacgggatcatgttctaagatgcccctccaatacattaccggcgatacggagtcctaatagtacgggaagacctaccaccgttcaggtcctggaagaaatgaaaccatggacactcatgagggagctgattgaagcgctctatcgcaacttcttttagctgatgatacccgttggacccatacatgctgtgggggagaaagtttcagctggctggatgactcgatcgatggctggccgagacgagtaccgcatacaactagattggctggggggtctggatccctgagattcttgctaa

SEQ ID NO: 86340 - DNA, 523 bp, Glycine max
  Clone ID: PAT_MRT3847_48978C.1
aaaaaaaaaaaaataattttttttttaataacccaaaatttttttttttttagaaacccgaacccgggggggagggtggttcttgcccaaaaatttatccactggcaattggagaaaaaatacttttcttaaggaggggggaaaaaaaatggggggcctaatgaggcaaaaaacttccatttaataaaaatgaatatactgcccaatttaaaaaaaaaaaacatgccgaaccatttaaataaaaaaatgggggggcttatggggagaggcattaaatttttgtgggcgagggggattctctttttaaaaagaaaaacgcgttacgctgttaattaaaaataactgcccccccggggggggggggggtgtggtttttgggggcagggggggttttttttttttcttgaagagggggggaaaaaggtggttttcttccccgcccctgccccgggaaaaaaaataaaaaaaccgttgtcttatatttttttttgacccacccgcggaaggaaaaaaaaattttttt

SEQ ID NO: 86341 - DNA, 555 bp, Glycine max
  Clone ID: PAT_MRT3847_48979C.1
ggtcttgaagctaagctgtatatacaatggaccatcatcttaaactacgggatgtgcaccataaatcatatacaaagtgaccttctaatattaacttcccctacgttcagtcccccccaatgaaccatactcaaactaaacctccagcataaaatgtttcagtgcagaacactatcatcctatcaaattatatccattaaaaatcaacggcctaatgactaaactcaaactaaaccagacatctttacttaaaagaattctagcagaaaagcttaggggaaaacgaatgaacagtattccatacaggatcaagaatgaggggttgtatatttcggaaatctgagctagctatagaacaaagggagaattgatccacatgcatagtattatattgattttaagattcaaaagtattataacgaacataattgtgctgagttgattgtggggagagttcaatagatggctaatgaaaaataaagaaaatttgtacttcaaatttgctaggaaaagcggaagtttgacattatcccagagaagtatcaagttaattgc

SEQ ID NO: 86342 - DNA, 704 bp, Glycine max
  Clone ID: PAT_MRT3847_4897C.1
cccacagaatagtagtacccatggtgaattatgagtttgatacatcaactggatcattgaaaatattaaatggcaatgagcattttgtgtctaatttatccttgctgttgcgttggtcaccatattcatcagaagcagatcttctgaaacaagtcagttttctatattttccctttcatccatgataatttgctggctttgttagaatatacttaatggttggcatatttattctttcccccccattgtagacaatacagcctagtatcatgaatagatagatagtttagtttgagacttattttctgacctttttcctgtccccttaaattaggctttttctcaggactgtagtgttttggctttgaatgccaaattataattgtatatttgttatgttgtgatactttgagatttggcatcaaatggcatttattctctcattctctctctttctctgtgtatatacatatatgttaagtgtgtcctcactgtcctgtatcagtttgtatgaagtttttttggtctttatggtatcctcctctaatgactcctcacatacatcattgagacttctagttgtagtgcctgaccacatagttacagattcttattgccaattttatctgcttgctaaccttatattcttatcattctgctgagaggtgatagctactgctgtactagtcaaagatggggggcta

SEQ ID NO: 86343 - DNA, 394 bp, Glycine max
  Clone ID: PAT_MRT3847_48980C.1
ggtggaaaaggggaaaaaaatgggttttcctgggggagaaacccatttcctttatggcgctgccaatttttttgcttaaatggccaatctccttacctttccaaccatggggattaacatgaaaggaaaacttcccattgtttttgaggtgggctggggggttcaaagcttggaaggatttcttctttcttctgaggtaatggcaatggcatcagccccaatggatgtctttgaaacccaattccggtttgttttaaaaggagcaattccggcttatttgggggctttggggacactatgactctcttaccttagtagatctttggaactggcccattgttctcgttgtcaattccattggctccgaagagatgccatctttctcctggagcta

SEQ ID NO: 86344 - DNA, 263 bp, Glycine max
  Clone ID: PAT_MRT3847_48981C.1
atcactatgaattttctgtttttgtaacaaaagtaagagaccgagggattcccagttgacaccaatgctcaatcaggtgaagtgtttgtgtgtgtgactgagaagagaaagagaagtcgaatcttttgctgtctgtctctcatatcacaactcacacctctcttttgcttgaagtattcaagggttaggatttatcttcattgctgttgagaaaagtttcgtcctttcttgctcttctgttcattcgttcattcatcttttgg

SEQ ID NO: 86345 - DNA, 612 bp, Glycine max
  Clone ID: PAT_MRT3847_48982C.1
tcccccccccccttacttacactacacgcccttcttcttttttgctagttctgtgttagcaaacccctgcactcacttctttccttcccatttttttttttttttgaagcacaaaagctgcttctttttccttcctcctttgaattaatcttgatgcttatattatatacctctattatgtatgttactaatatgtatttacattcatgtctccagtcctcagtgaaatccttcgttccgggtttatgatcaattcctcccttagacgcaggacccacttagttcaatccttctccgttgtcttcctctactggttctatgttttctcatagttaattcccccacaacactttcctttaacaccacttccttcttatattatcttgttctatgtcatagtaacaataacaatattagttatctatattagcattatccaaaataatttctcttctcttcattttttttttctttttcccaacctttgtttttattttggtagtatagtactcactttggtgtatttgtaaatgctgtccgggggggcttcgggcgtgtgcggtgttcttcttccgagctctgcctctgggggggttgtgcgggttgttgtgg

SEQ ID NO: 86346 - DNA, 364 bp, Glycine max
  unsure (1)..(364): unsure at all n locations
  Clone ID: PAT_MRT3847_48983C.1
cccagcacatctcgaaaaattggtagcgcttctaaaacggtgggggcctctctccctctccncaacccttcccctaactattggaggagaccttatctctgcctgcgtctatcggccaaacaccgctacagctacagcggtgacgtgaactccaatggcgtgtcttcaactactttcactcgccgatcatggactctagctccttcctcttccattaagtgtaggcctctccctgcccgcgccgccaaaagcgccgttcccgaaagtgcgcccgtcgaaaacccactcttcaaaactctcgaactcggcgcctagcttggcctgtgataccatcttcacatgtacctgaacatctacaacaaac

SEQ ID NO: 86347 - DNA, 396 bp, Glycine max
  Clone ID: PAT_MRT3847_48984C.1
ttttttttttttttttttttttttggtcatttattaaacaaataaccttactagacctcggcgtgtatttttacttttatctcactgcattctaactcttctttttcaatcataaaatctgtccgctcaaatataaatccaaataaaaacatcacatgcctcctctctctctcgaataaaaccaataatgattaactattcaaactactgatattcatccattttattattacctctacaaaattcatatctcaaatccttatcatcttgcctaccctcttaaaacttaaccgacttagaaacagaatcctgaagaaccttatgaaaacacataactgtgaacttgtatttacttgcttcaattccacaattacacatgtctatttttcccgttcg

SEQ ID NO: 86348 - DNA, 327 bp, Glycine max
  Clone ID: PAT_MRT3847_48985C.1
atggtaaagcaaggtgttattggaggattggcaatggtgattctactcatgtctggactcaaccttggctctaacaataatcttaatccttttgtctcaaccaccccaataatggatgctcaaaaaattcgttccctaacactattgaatatcacggagagagatcaactaagccggaaatattcaacgaatggtgagtacactgttaagagcgcatatcatgccattatggatcatttgctagacaatagccacctcaaggttaaagggaattggaagaccatttggaatcttgttgtgcctcaaagaataaagcacttcacttga

SEQ ID NO: 86349 - DNA, 536 bp, Glycine max
  unsure (1)..(536): unsure at all n locations
  Clone ID: PAT_MRT3847_48986C.1
gtttgagcagaaatggccagcccctccattgacattggtctgcttgtcctgcgcggaaatgaggaattaatacggcaaaaattgaaacgccttttggcaataacaatgccaaaagtacgtcaaaagttgtacgtgcatttggagcaaatggacgtcatccgggcacttcttcccgccatttacattaatgcggcatccattgcgccgaaaattgatctccgagtccttctgaaccgaacgaccagcgtcccagttgaccgggttttctatgacgaggtcaaagacccaagccatccgatttttccgatgcttcgcgaagagaatgggccattttcaagatggattcttttgccacctcccatcacatacttccggaaaagccgtatgaccatgtcgtgttgggcgggacgttcgaccgattgcacaacgggcacaaattgctgctctccgaggcggcaatgatggcacggacaagaatcactttgcgagtgacngacgggaaaatgaatgaaaaaaaaattctttacgaactgatg

SEQ ID NO: 86350 - DNA, 246 bp, Glycine max
  Clone ID: PAT_MRT3847_48987C.1
tagaccgcgatagccgagaggccccgacgtactgtcggtatcgacaaaggactctcactcatcaaggattggaacaaaatttcctctctcgctaccaacagaacggtcctagactgcaaatcctatatcccccaggaggcggtaaactatacttagattaacgaccgtcgatctactacccccggtaaggcgcacgacgctatttcccctacggacgactactttggaggccacgagaatttccca

SEQ ID NO: 86351 - DNA, 2004 bp, Glycine max
  Clone ID: PAT_MRT3847_48988C.1
aaaaaaattaatggctctgcaaattactccctcttagtgtctttctctattgatgaatttagatctacactctttgaaatggattcagataaatacacatgaccaactggtttgaaaccaacctttttaaagaaattttggcatctttgtggatctgagctctttaattctagagtctcatggcttgaaactagccaattcccacctcaggtaaataaaacaacaatttttctcatccctaaaatcctagccaatggccttaagcttattcttccaaaatgtatctctcctaaacattctgcttttatccaagatcgttccattttggataatgtccttatagtctctgaaattattcaccacataagatgcaaacaaaaaggaaaactatgagaaattgctttcaaaattgatatcagcaaaaaaatttattgagttgactcgaactatctttttggcatcatgggtaagatgggatttaacaaaaaatggataaactgaatgagaatttgtttcccatcaatccaattctaggtggttgttaatggggataatgtgggggaaatttttcgagggagaagacgaaagatagaatgactcactaccatcctacctattcattatttgcactggggtctttcaactattcttaaaacacggggaggtgagaggtgacatacatggtgtgaaggtgtgcaaagggactcccctcccccctctcacttattattgctaatgattgttttcttttttgtcggcctaaaaataatgaaattttcaccctttaggagatcctagacacttatggaaaagtatcaagacaacttatcaattttcaaaagtctgaaatctttttgagttcgattattcaacaacaacaaagacacaaaatctcttcctaggtgtcactaaaagcattggatccaacaaatatttaggacttccttcaatcattggcaagagggaaaagctatttttgggttcatcaaagatcgtctttggaattggctcaatcattggactagtaaacaactctcaaaagcgggtaaagaaatcctatcaaatatgctgctcaatctatacccttttgctgcatgagtgcttttttgctccattccactttaaaagatgattttgaagaaaatgatgaagtgtttttggtggggcaataacaacaaaggaaatgaatcaattggctcagttggataaaattattataaaaaaagaatttggaggaatgaaattaagacacttgtacgcctttaatcttaccatgttaggaaagcaaggttgaaaattcactaccaaccaagatactataatgttcaaaatcttcaacgctaaatatttttcatcaatggatttcttggatgtccaccttgggcacaatcccatttttgtatgatttagtattcacgcttcacaggtaatggtaaagcaaggtgttattggaggattggcaatggtgattctactcatgtctggactcaaccttggctctaacaataatcttaatccttttgtctcaaccaccccaataatggtatctctcctcttaaagtttctgaccttattgatcatgctaattgcctttgaaggaatgatattctagattcaaacttcaaccaagaggatgctcaaaaaattcgttccctaacactattgaatatcacggagagagatcaactaagccggaaatattcaacgaatggtgagtacactgttaagagcgcatatcatgccattatggatcatttgctagacaatagccacctcaaggttaaagggaattggaagaccatttggaatcttgttgtgcctcaaagaataaagcacttcacttgaaggcttcttcgaaaatgcattccaacaagatccaacctgcgcaagaaaaatatcctctatcccttacattgtgtttgctgtgattcaaatattgaaaatgagtggcatctcttccttgcttgtgatcatgccagactcatttggcaagctgctgactta

SEQ ID NO: 86352 - DNA, 398 bp, Glycine max
  Clone ID: PAT_MRT3847_48989C.1
aggaaataagggctttcttaattcgttaaaggagaaagtattccacttgcggaaagtgggtacagagagcggatgcatgagagaagatagctattgggcgtacgtggggagacaagatagagagatgatccttgtgtttaggaccacactacaagagacacgcaactctgtaagacacccatgggagcacacggcataaggaacatgatctgctcaactatctgcgattagcagctggcgctgaggggggcggaaaccagatacgcgggataactgtcataacatgtgcagatactggacagtagcaggagcctactgcatacctttaatgaccgagtgacatagacccatagtgtccaccggcaaagccaggagcatccttccaatggggtggacct

SEQ ID NO: 86353 - DNA, 883 bp, Glycine max
  Clone ID: PAT_MRT3847_4898C.1
aagcaccatcttataatccaccagcttacaagtcaccttcctataacccaccaggttacaaagcaccatcttataatccaccagcttacgagtcaccttcctataatccaccaggttacaaagcaccatcttataatccaccagcttacaagtcaccttcctataacccaccaggttacaaagcaccatcttataatccaccaggttaccagccaccttcatacaatccaccaggttacaaagcaccagcttataatccaccagcttacaagtcaccttcctataatccaccaatttacaagccaccttcctacaatccaccaggttacaaagcaccatcttataatccaccatcttacaagtcaccttcctataatccaccagtttataaagcaccagtttacaagtcaccttcctacaatccaccaggttacaaagcaccatcttataatccaccagtttataagccaccttcctataattcacctgattacaagccaccttcctacaatccaccagtttacaagtcaccttcttataattcaccagattacaaaacacctgattacaagccaccttcctacaatccaccatatgggaagtcaccttacccaaagtaccctccaggatccaattgaagacacctagtaagttaaggggtgtattaagtatatgctaaataagaggtgtatcaacaacgatcgccatgctcatcaacatgtagtttagtttacaattatggcaaggttaattacacctggcttcttcgttttgatcgtttgtgctatggccaagataaaagtgtcatgaatgtatgaatgtaaacgaagaaaataaaatggtattttgcactcctaaaaaaaaaaaaaaaaaaaaaaaaaaa

SEQ ID NO: 86354 - DNA, 763 bp, Glycine max
  Clone ID: PAT_MRT3847_48990C.1
ccccctttcccctttcttctctatcagttccttgattatagctttcaatgggattctacgctgaagacactctctcaggcttgacaataggccaggccatatacgaggtagctctgatgattgcggttctgagatgggtcttgtgcttgatcttcagagtgatgaacgacagaagaagaacagaatccgatgagaccccagccgcagaagcatgttgtcagaaggagtacaacaacactcttgtgctgacgacgttcggagagattaaggagaggctgccgcagacggaggagacatgtgcggtgtgcctgagccagctgagcgtggaggacgaggttagggagctgatgaactgctaccacgtgttccacagagagtgcatagagagatggttggagcacgagcatgagaatcacatccccacgtgtcctctctgcagggctcctttgctgagttcttgctgccaccacagctccaccacttgtgtccctcctcctcagcctagttgggctgtggagagacttctatatctctttggggatgatctcttgccttgttagttctttattagattctgctaggggattcattatttgttatctttatcatcctatatgtaattgttgcttgctgctacaaaataactaaactaggacacaaactagcttccagtttgtgtgtgtatatatatatacatttaatctcttcaatttttatgattatctgtttattgtaaaaggaacaagggccttctcttctcttc

SEQ ID NO: 86355 - DNA, 480 bp, Glycine max
  Clone ID: PAT_MRT3847_48991C.1
tacggctgcgagaagacgacagaagggtactgattatctaataggtgtttttccctatataaattgaattagatgatatgtgtcatagaatcccttactgatacttggtatttgatgggttcttttaaactgtgaatttcatttggaactgcttgtgagctccaccctgtatataactcttcaaaataatattccttttacgtgtggcaccctcacggaaccattgtgaattggtggttttaatttcaaaactccatgttggaagtggtgtccagttggtcatcaataagccatgagaatggttctagtggcttgtagcctttcattttatcttcaaatgccactaatgactaaagtagtaataggctggaaattctgagttttagatggtctccaaaattttcatttttattaaatgcttatgcttattatgcagtaatctgcaatgtaccaaaatctttctttgaattcttcatccat

SEQ ID NO: 86356 - DNA, 397 bp, Glycine max
  Clone ID: PAT_MRT3847_48992C.1
atttgactccgcttacagtctaaactttatagatggtggaattattttatgagggtgatggttttcatgcactaaccgtgtaaaactttcattcaattacaaatcattctttatatgacttttaagataattattatgatggtttatgattagatgtcagtgtaaaactatttgacagttgacactgttagcgcatagtcttttttctcttatttgatttgtatgattattggtgtaaagtggacactcatgagcattttatgtcataagtctgtgtatgttgttggagacgattaacatcaaggtggaagaatcatgcttaggtttcaaagcaatggtagtttggtgtctgataattctaaattttgaacttgcttttttattacactttgtttat

SEQ ID NO: 86357 - DNA, 124 bp, Glycine max
  Clone ID: PAT_MRT3847_48993C.1
gtgagataccccccaggttgtagcatttttcccacaaaactgcatcgatcatgggggactttagaacgcacgtgcatgccattataaaggtcttgactgaccccttccacatcgttcctgcctt

SEQ ID NO: 86358 - DNA, 286 bp, Glycine max
  Clone ID: PAT_MRT3847_48994C.1
cgcacgcccgataacacctacgactggcacgggttgctgaaaatatcatgtgaaagaacatcactctgcatgggtagatagaaccccttatagattctcagggcgctcgaacacccaattcaaccctaggaggagcaccacaagctagaatatctaaaacttgagacattcatgttaaggctacctgacacgcccggccacacagaatgaacgaacaccttcaatcacttgcctatagtcgaacaattcgcctagatattgatgcaccgtatagtccaaaaatgac

SEQ ID NO: 86359 - DNA, 339 bp, Glycine max
  Clone ID: PAT_MRT3847_48995C.1
tgccttaacttacggggcggcttcctttctgaactctgaaaaaatccttgagctcaacttaagcctaccctctgtatacattaccatgggataacaccactaaaaactcctcctaatgtgtagccctttgggctcagtgtcaagactttcagggacagacccccgcacacctataccaaaaagaacggttaatttcttttatataccaaaaacgatcatctccgaaaaccctctcaacaattggactaactaatttttgtcccaagccattggctggaataccatcagattcttccctagtatcaaattttatcgacgcccggtgcggaacaatttaaa

SEQ ID NO: 86360 - DNA, 373 bp, Glycine max
  Clone ID: PAT_MRT3847_48996C.1
taccggctgcgagaagacgacagaaggggatctatgatggttttcagagactgcattatctatctgtagtttcttcaaaggagttgaagataatcgtaattgactgataccctttagttgttctactatgatctctgtctgtttcgcgacatatttctcataaatagctgacttatcattttatcaagtaaataacctgcacctgtgaaggctgattaggggttcctgcctaagaaaccccactgcaggggaatttatgcttttccttattgccatgatggttctcgggtgcagatttatatagtaatggctattggaaattcgacttatattctatgaatttcaaatggacgcagctggtgagtctgctttg

SEQ ID NO: 86361 - DNA, 321 bp, Glycine max
  Clone ID: PAT_MRT3847_48997C.1
ttttttgatttcaaattttgtgtgtacagattttatttatttaatcttttaattcattaacatacaaaatatgccattatttaatttttgcccattcaaggacaaatgaagtggccgtatggggcaacgcccccgcgaggcatacatacatatattggggaaaaagaaacacactttgaattcaaaaaaatgtttgtgcaaaacaaaccaggtcgaatgacttaagctttaagaagcagttgtggtcctttttttaataaacatggggggaacattaccaccggtgacagcacctgtgattaacagatgggaccctccatg

SEQ ID NO: 86362 - DNA, 303 bp, Glycine max
  Clone ID: PAT_MRT3847_48998C.1
ctcacgcgtacacacacgctttctgtaaggttcactttatatatatgacaatagcgatgatggataatagtggaacatatatgaaaaggtcaccgtcatgtctgtactgactcaaggacttgctgatgctgattcaatcacttgcattgcatgggttatcttctacctcaatccaaagttagagcttgtatctcttgcttaacgagcaatcgtcctgggacgtgaactatataaagctctacatgaccttgagacgtcagaggatttgttatgagtatgagcttcatatccagctaacttatt

SEQ ID NO: 86363 - DNA, 359 bp, Glycine max
  Clone ID: PAT_MRT3847_48999C.1
cgtcaggccagccttcctcgcccgcgttagctctgtccatttccgtgctgcctggttggttgcatgtgccagtgagcaactggcctgtatgtacgactgttgactcgaactggcataggatgatggttacactaaagatcgaccagtcgagcactgtgtacatccggcttcatccttgggagcctggaacctggaatgcctgcccctctatcttacgatacgaatgttgtgatagattcgcttatgatgggatgagcactaacctggtgctttaatcctagaaccggctgattcagcatagtgctactgcttccatgaatgtcgctaattggagtcgaacgtgctctatcacaccattg

SEQ ID NO: 86364 - DNA, 458 bp, Glycine max
  Clone ID: PAT_MRT3847_4899C.1
cggtcgcgtggattggccgttgggctgctggaaattgcgcgtatcatttgataactgtcatacatattttcgccaaaccggcaattacgttgagcgtttgtaccgtaacgctcaagaaggaggcacaggctggtggagctggttgtggaggaggaggatcttgatgggatagcatgtgcaggtgttgggcaaagtagacgcatggatctctatgatctcatgtatagtgagcttgatgttacttcatgccaacttcttgagaatgatgggttctttagggatacagtttttaaaaaacaactttcagacaccgtgagctggttactagattgaaaggttattcccattgtcaatgaacatgatgctgttggtactaggaaggcaccctatgaaggcaagaactgtctggaggattcttctggtatattttgggacaatgacagtttggctagtctatt

SEQ ID NO: 86365 - DNA, 1129 bp, Glycine max
  Clone ID: PAT_MRT3847_489C.1
ggcaacttgacgcgtccgatacgaaacagttgttcttctttttcagcatccaatttgcatctcttgctcgaagaatcaatcctttacttttgtttcatgggctcattttgggaccatagagcgccatgacgccatgaccaaacccaacactttctttcacaatctaatcaagcccttcaaattcagctccagcaaagagggacaaaccgaagaaaacgaaatacagaacttagctgcacaggagcagaagatcttcccctacgaaacattggttgctgctaccaacaaatttcatattcttaacaagctaggtgaaggaggatttggacccgtctataaggggaaattgaatgatgggagagagattgcggtgaagaagttatcgcatagatcgaatcaagggaagacgcagttcgtcaacgaggcaaagttgttggcacgtgtgcagcaccgtaatgtggtgaatttgtttggttattgtacccatggctccgaaaagcttcttgtttacgagtatgtccgtcgcgagagcctcgacaagcttttattgaaatcccacaaaaaagatttgtttacttgatttaatttaattttatcaccaaatctgtgtacgaatatatatatatatctacacgaagactctcacaactgcattatacatcattagataaaggcaagtaacatcttactcgatgaaaattgggtgcccaagattgcagatttcggtgtcgcacgactcttccccgaatcccaaacccatgtcaacacacgtgtggctggaaccaatggctatttggctccggagtatctaatgcatggacatttaaccgtgaaggctgacgtatttagctatggggttttggtgttggaattggtcagaattaagtcatcagttgagttgtatatggacgtgagtgcttcctagctcgttggggaaacagacaggctatacaagaaagacctcacctcaaatatcgttgacccaacacaaagatcatcagtggtagcagaacaaggtgaaatgtgcattcatctttttcaaatatttcctttttatttaaagtcaatcaacccactcctaacatcacaattcaccaccaagctgtgggtcctaagacatttttttttt

SEQ ID NO: 86366 - DNA, 177 bp, Glycine max
  Clone ID: PAT_MRT3847_48C.1
actcttctcaacacaacattaaacgacatcccatgcaactcttactaataaactctgttctctgaaaaccctcatttctcttcttctttcatcatctctttctcttctatcaacttccatctatgcctctcaaaatcatacatttcatttaaacccacatcatccactccattattc

SEQ ID NO: 86367 - DNA, 331 bp, Glycine max
  Clone ID: PAT_MRT3847_49000C.1
cctgacctatgcagtggtaagcattggaggatacaataagggtgtgacagaagcaaaactgaaggttgccataaacggatttagaatgattggaaggaacttcttgatgtgctagcactgtctcaaacactcccctcttgatgtcattagcatcaacgacaccatttgcttgaaacaatcctctcaccttgtcaaatactattctatcctcataaccttcgatactaatatcaagcctattgacatcgacatcagtctcttcgattatagaaaaatcaaaattatgtcttaccgtgaccctaccgacctttctgtaaaagatgtaattata

SEQ ID NO: 86368 - DNA, 936 bp, Glycine max
  Clone ID: PAT_MRT3847_49001C.1
cttgatacctgaggacttttttcatcatctccattaggcatattttttcgccaggtttggcagtgttttctcaaccgataacattagagctgacacttttcggtcgaaaaaaaaccacggttaaatcgcacgaaaaacccaacccgacctcgagtctactatttatgggtgacatcagacaataaaacttctcaacagtaaaaatatattatcccccggcgttggtaaaaattacaaaaacctttgcacaatgtcggccgaaaaacaaccgttcttggtaaatgattttcgatgatgtttctcgatgaatatcagtcggctgtatttgacgaccgatgtcgcctatggttgttttcctcaatccttgaaaatcaatcggttaggaactattcggttaacgccatcctgtgattcttgttgggagacttggaccggtcatctttctctgcagcatttttttcgatcaatctcccatcaggcatattttttcgccaaggtttggcagtgttttctcagccgataaaattagagccgacacttttcggtcgaaacacaacctcgggtaaattcgcaagaaaaaccctacccgaccacgagtctaccattgatgggtgacatcagacaataaaacattctcaaccgtaaaagtatattatcgcccggcgtgggtaaaaattacaaaaacctttgcacaatatcggctgaaaaacaaccgttcttggtaaatgatttccggtgatgtttctcgagaaatatcagttgggtgtatttgacgaccgatgtcgcctatggttgttttcctcaatccctgaataatcaatcggttaggaactattcggttaacgccatcatgtattcttgttggagactggaccggtcatctttttctgcaggtcgactctagaggatccccgggtacagagctcgaattcgtaa

SEQ ID NO: 86369 - DNA, 531 bp, Glycine max
  Clone ID: PAT_MRT3847_49002C.1
cacacacctctctctctcttcccttcaacaatgagaacccatcaacaaccaaaactcaaaacccaactattctcatgcgccttcttccgccactgcgcccaaaccctcctcagccccaccgccaccacccctcctcccttccaatgcgaatcctccacctcctcctcctccgccacttcccaaagcttcacccagtggagattctctcctccaacccccaacaccaccaccaataacaataacaacaacctcatccaaacaaacactaatcctccttctccacctccaccacctcaaatccacaacctccaagaactcttccacatttcagaattccaactatcaaccgaccccacctcagccctcaaccttctagaacgttctcttgtccccaatcctccccaagagcaaccgccgtgccctcccaacctcatgcgcgccctcaccgccaacctcgcccaggccaagcccgccaccaagatcctcttcgccctctgcctctccgacgccaaccgccgcgtcgccgtcgag

SEQ ID NO: 86370 - DNA, 302 bp, Glycine max
  Clone ID: PAT_MRT3847_49003C.1
ggtaagagtttgttgtgaccaacactccatctgatcgtgaggacaatataaacttatctgtcatcactgtggctccatcagtgttgctagcacagccacactctcatgcacgatatcacacgttcactcactgagtgaagactggctacgatgatcttactgcgaatgtaatatgcacatgtcctaagcctgctgtgaaagcactgacaatcagattcattatcacaactcatgatcattacgtagatccaagcgaggacttgataaatgacgattcatatacatcagactctgcaccagtt

SEQ ID NO: 86371 - DNA, 438 bp, Glycine max
  unsure (1)..(438): unsure at all n locations
  Clone ID: PAT_MRT3847_49004C.1
ccggaattcccggtcgacccacgcgtccgcccaaatggagtacaggccctgcaaacattgaccatgacaaattcaagcagtgctcagcagggggcgatcctccagtacgcgcagacctctgacggacagcagatactcgtnccgagcaaccaggtggtggtgcagactgcatcaggagatatgcagacctaccagatccgtaccacaccatctgccacgtcacttccacagaccatggtgatgacttctcctgttacccttacatctcagacaacaaagacagatgacccccaactcaaaagagaaatacggctgatgaaaaacagagaagctgcccgggagtgccggcggaaagaagaaggagtatgtgaagtgcctggagaaccgagttgctgttctggaaaaccaaaataaaaccctaatagaggagctaaagac

SEQ ID NO: 86372 - DNA, 554 bp, Glycine max
  Clone ID: PAT_MRT3847_49005C.1
aaaaaacaaggggagcccaattaaaaaccggaatctgggattttacatggaaaagttttgggataacaaaaaaaacccattcaaaaggaaaaacaattagcgctcgggtggggggaaggaaaagaaaattacccaaacatgggggggggggggaaaaaccttataaacaatctccgggttaagggctggaatcgggaaaaaaagggactggagggtttcttcctttggattccccaagggagccaaagcctccgggagctaaacccccatttttttcctcccctaaaaaattttttgttccacctaagccggggtttcctttttaatgggggtaagcgccgccgttatttcggcccaaaaagcccccatgaaagaattggccttttcctccagggggttcacctcctccgacgggtccttcacgctggtaaatttttcccggaacgccgggcccctttgggccatgaattccccaaggggggggaaccatattttggccaaggcacccatcagggggaaaaacccccccattattatgggaagggggagggtaa

SEQ ID NO: 86373 - DNA, 232 bp, Glycine max
  Clone ID: PAT_MRT3847_49006C.1
cgcggactggcgcgggagtacgaagtggaagagtaggtttagagacggtgggccgcagtggacgggtgcacttcccattgggaacggacgcttgggaggcatggtctgcagccacgtccacgccgaaaccataaacccccatcaagccacgctctggactaggacacccgtagactacactaattccaatgctccaccagcaactactcacgttagaccactcttcaccgac

SEQ ID NO: 86374 - DNA, 271 bp, Glycine max
  unsure (1)..(271): unsure at all n locations
  Clone ID: PAT_MRT3847_49007C.1
gccaacgcaaaccactcccggacatggtcaggagacacctacccataccggaggggtcacactcatacactgatgggtctcggtacaatagtaagagcagtgctaccgactccccttaacaaggcaagagtgggaagtgaagccagactcaagaaccatacatacacagcccactggagcaagacaagacggagnggaagcctcagcttacggtagggtttgggcgggcggggccgggggacccactgttgatatgtgtgcgactttgaca

SEQ ID NO: 86375 - DNA, 403 bp, Glycine max
  unsure (1)..(403): unsure at all n locations
  Clone ID: PAT_MRT3847_49008C.1
gatttattatgatttaaaattgatatttttnntagtggtatgtgtttaaaatggaaataaaatagatggagattataattaggatttgggtttctttagaatttggggatatttagttagtgaaggatttgtgtaaatattattttttaaaaaggtgtgaaatttaaataaatatagttttggtagttaaagtgaagggataatgggattttgttaaaaactcttgtgttgcggtacaatatgggacaaattgtaaatatttgttttggtttaaattttggagttaatacaggtatgaatattgttgtggaaagtgctgtacattggttaccttttattgttatgtgtgattgcaatgtttggaaatttttaatattttttttggattctaaattaagatgtt

SEQ ID NO: 86376 - DNA, 827 bp, Glycine max
  unsure (1)..(827): unsure at all n locations
  Clone ID: PAT_MRT3847_49009C.1
cttgcatgcctgcagatgccttaggaaggcatggctttattaactactttggtctcaggtactttctaagtcaacttacaccctcttccccattttgtgtgtctttttcctctctgattagttttcacttggttttgttgcgataacatacaattggatagctaccttgtgttgtgctactttagaggtcaacttcctgaacaagcctggggggtggggggggagtgatctctgatgacatgtagcctgccctgtacactattttgaactgacatatgcagtaggattctgcatatttatcattttcccattttcctttatatttacaagagtcggcaaaaattacctcttggatgctagctatttgaaaagcaatctcttgaagtttcattgtgtccaacatttgccagccctgtggatttgtaatacaagcttttgttttgttgtattttttgagatgacatacatactttgtcgtaaaaattattattatgttgcttaaattaaggacataagaagcttaaacatgttggaaaagtatacccatcttcatattccccatttcttgatgagaaagtttttctattaaaattctttgcaagtccaaactccaaagcttgcattaaaatgtaaactcttgttttacattttgttttttcatggttttgcatttgcttagtgttgaagcatttcacaaagtaacaacatggtgttttagactgtgttaagatgtgccaagttggactgaaaatatggctataatactccttataaggctntgcaatccttttctcttgaactangctttgtgcataagctaggccttg

SEQ ID NO: 86377 - DNA, 259 bp, Glycine max
  Clone ID: PAT_MRT3847_4900C.1
cctatttcacattcacattattcatatcaaacttgaggtgacaccttattaactctttttttatctcttaaaaattcttgtcaattaaaaaacatgattatttatcacattaacattgataggatcatatggtttgaggaatcatgcaacaatttctcatctaactaagattaatctgctgattttaattcaacatattatttttttacaggtcactttgtccaccaaaagtcatttctataacctttaagtgtagtcc

SEQ ID NO: 86378 - DNA, 451 bp, Glycine max
  Clone ID: PAT_MRT3847_49010C.1
acggctgcgagaagacgacagaaggggactttcatttgcttcggaattcgagaatgagagaagaggttatgagctacggaggcaccgttgatgcaacacctgctgcaagttctgctggggcatcatccccagctgttccaatgaatgttggcagcatagatgggtcaagtcatggacaagtctctaaagcggcttctctctcgtgtgttggttcacaaccaccatggacttcattgagcacaagtgctggcggttctgctttttgattcttcaagatcttcatgtagaccttgggaaagaggagatttattaagacgtttggctacatttattccttcaaattggcttgggaagcctcagagaactggatgaatctctaagaccgggtgtcgttgctttaatagatgcttgctcacgtgatgatattcaatatcttcatactgtatttggg

SEQ ID NO: 86379 - DNA, 3733 bp, Glycine max
  Clone ID: PAT_MRT3847_49011C.1
cggaattcccgggtcgaccccgcgtccggagtcccgcgctctgacacttgcttatatgcgcgaagctggcattcccatttcccactcggtccttttcatttgcttcggaattcgagaaatgagggaagaggttatcagctccggaggcacccttgatccaacacctgctgccagttctgctggggcatcatccccagctgttccaatgaatgttggcagcatagatgggtcaagtcatggacaagtctctaaagcggcttctctctcatgtgttggttcacaaccaccatggacttccttgagcacaagtgctggcggttctgcttttgggttcttcaagatcttcatgtagaccttgggaaagaggagatttattaagacgtttggctacatttattccttcaaattggcttgggaagcctcagatcatcagttcattggcttgtgctcagaaaggatggatgaataatggtgtagacaaaattgcttgcgagtcatgtggttcttgcctgagttttacagcattgccatcttggacgctcaagtaatgacgcaattgccctttgccgttggcagctgacgttagatgctttggatgctttgtcgttggggcacaatgcaattccaacagtaccgtctgagtctgctgcatccttgtacaagcagaatgatcagcaagcacctggtcaaaaactctttatcaactactctatgagcaaaagccatggtcagtttgcgtttttgcttcgagtattaggtgtttccatttccttgattaaagaggcggatttgaacaaactatacgtggtatgcttgcatatttcagtttcccttgcttaaagttcagtgagattgtagcagacatgttgctttactcccggctttttcacatgctaatgccgcaagggaaaccggttattcagcagaacggggatcttgcatcattctgtgttgccaatcaatggtagtttttttttttttttatcaaactatttatttacttaaaagacctgtagtttgagcattaaattaaaaattgtaaatactggaaattccttttatggcggaattgtgtcttggcctttggccctttagtaatgtgttaaattagatttttccttagcttgtgtggtgctacagttagaatttcagattttctgggcttcccacccgtccgtacagagaaagatcagactgaagacgtccgcgaagttgcaacaacgaatgaggggaaattgttggcgaacacggatttagatttaaatcttaccatggcagggggttttccttttactcctttgagcaggacagcaacatctgaatatactcacgatgatatgggaagggatttaatgatcggtcagccttcagggagtgagattggtgatcgtgcagcttcatatgaatcacgtgggccaagctgtcgtaagagaaatcttgaaaaaggtggatgctctgataatcggcctgttcttaggttgcaacagcaggctgatagtgttgaaggaactgtcattgatcgtgatggtgatgaagttacagatggtggacaatattcagctggtccttcaaaacgtgcacgtgactctgatatttttgacacatattgttcacctcttcgaagagactcatctggtgctggcccaagtcattcaataggtttagaggcttacgctactggaaatcgaatttcttcataagtgaccctatcaggccatttgacaaatatgtcatacgtgatgcaaattcggctcgagctcagcaaagcacttgcttacaaacagctactgaagttgcccgtggtgatgtgggtgtcagtagtacaaactatggggaagaacttttcaatgcagaaactgtgactgctcaggctcgtgatggaatcagtttgggcatcagtggagggagtgttggaatgtgtgctagtcatgaagctgaaatccacggggctgatatatatgtgcacagagctgatagtgttgttggtgaaatggaacagagagtagaagatgctgaaaaccagggacagacaggtgagtctgttccagatccaggtctgatggatgagattatccctgatatgaacagggaagatcctattggtgatagccaggagatgatgtctcactctgcaggaagaacagacagtgggtcaaaaattggctgctctacagaatctgttgaaagtggtgaaaagattagtcaaaactgcaatcttctacctgctaatagtagtcacccttctcgttcttgtaatgctaatatttactctggttgtgaaaatactaaggaagagatcatgaagcgtgataaatcatcatttgccaacaatagtgctctccctgaatcagattttgccattgcaaatgggataggccctccaaaaggagagagtaattatgaagctgcagagtttgatcctattgtgcatcacaatcaatgttgcccttgggttaatggcaatgttgctgctgctggctgtgctagttctgttccaagcacaagtagtgatgcaattgccctttgtggttggcagctgacgttagatgctttggatgctttgtcgctggggcacaatgcaattccaacagtaccatctgaatctgctgcatccctgtacaagcagaatgaccagcaagcacctggtcaaaaactctttcgcaaccactctatgagctgaagccatgatcaactctaagattttgtttgagtattgggtagtttccatttccttgattgtagaggcgtattggaccaagctatacgtggtattcttgcatttttcagtttcccttgctaaaactcagtgagattttagcagaaatgttacttttctcccggcttttgcacatgctaatgccacaagggaaaccggttgttcagcagagcgggggatcttgcattattctgtgttgccaatcaataatagtttttatcaaactatttatttacttcaaaaacttgtctgtaatttgagcattaaattgaaagttgtaaatactggaaattccttttatggcagaattgtgtctaggttttgtaacgtgttaattagaattttctttaaaaaaatttcgttctgtttaaatttctagtggtgtacatttttactactgaataaatgtgaatttcgtcatttcatttgaactggatgaatctctaagaccgggtgtcgttgctttaatagatgcttgctcacgtgatgatattcaatatcttcatactgtatttggggaaggaccttgcagaaatatcctgttaactcttgtgggtgatcgcaaacttaccgaatttaaaggaaaagtttgatcttgaaattctgttggtggtaattttttgtgcaatcattttatttccccgcagaactttcaacagagattgataatgagaatgtcgactaatattcatagaaagcaattactactcccatggaaaactttgtttatgcaaattctatatgttatgaaatcagatcttcggcagcttccatttttagtggaacttcttttttagatgcctacttcatatttaagaacttgtatctttgtcatgggtaccttaatggtagtgagatgtattcatttttcaggaacagtaaataccatttgcattcggtttgtagtacagtacaacattagcaatattcagatgaaagcaaaaactatcatatacctacttattcaatgaggagagattaaatgcaaaggctctaagtgtttgttctttcgttaaa

SEQ ID NO: 86380 - DNA, 3856 bp, Glycine max
  Clone ID: PAT_MRT3847_49012C.1
catgcatctagaggtatatgaataagtctcactgtctttcttggtctgctgtcggtgtttgtgacatcgaaatttcgttcaccagtttttgggttgaattttgcatacccctcgagtatttttcagtttcccagaaaaaatattggtgtggctagtcaaactagagacttggacaattttggttgctattgtgtgcatcttggtatttcttctgaaggagtttgttatgggagggaagagctcaaaagggagtggtaggaggtatgattttggtgcttcttcatcttcaagggataatagctatggtggataccctccgcaatcaccatacacttcttatcaaacacctcagcacccttgtgcatcagcatcagcatcagctccattttatgactatgcacagccaaaaaggaagttggataagaagtattccaggatagctgataattaccgttctttggatgaggttacagctgcacttgcaaatgctgggctggaatcttctaatctcattgttggcattgatttcaccaagagcaatgagtggacagggaagaggtcattcaatcgaaaaagtttacatgacattagaagtggtcaaaacccttatgaacaagcaatttctattatcgggaaaactttatctgctttcgatgaagataacttgattccttgttttggatttggagatgcatctacacacgatcaagatgtatttagtttctattcagaagagaggttctgcaatgggtttgaggaagttctgacacgatacagacaaattattccttccctaaaactcgcaggacccacttcgtttgcccctattattgaaatggctatgactattgttgagcaaagtggtggccaatatcatgtcttgctaataattgcagatggacaggtgactagaagcgttgatacacaaaatggcaacttaagtccgtatcagatggatatcaggagcagaacacaaaagacaattcactagatgcaatcagtgcactgtcaaagcatagttttggtgggagttggagcaatgggaaatgatgagggaatttgatgataacatcccttctcgggcatttgacaattttcagtttgtgaattttactgaaataatgacaaggaatgtagattcaaccagaaaagagacagattttgccctttcagctttgatggagataccttctcaatacaaggcaaccctagagcttggcatattgggttcacggagggggcattcaccagatagggttgctctacccccacctctttatagtagaacctcttccagcatcagcacaaaatctacaaggtctaacagttttcagcagaggacacctacacatactagctatgatagcagtgttcacacagagacatcatcaagttctttatatgataataaggtttgccccatttgtcttaccaatgcaaaggatatggcctttggttgtgggcatcagacttgttgcgagtgtggagaggacctccaattctgtcccatttgccggagcacaatccatactagaataaggctttactagttagctttgatgcagaagtcctgtcaatgaaaatttcgtcatttccagaataaggggctgcaaaaggatgtgcagagttggtctggctcttttcacagatggtttcttgtccataaaaactgcatttgcaatttccaggcgaaacttgtattcccagttacacttaggaagagctctttacagaaagaattggccttccccgttgtatatatgtagttcatgtgtctcggaaggcgtcatgtttttaaatgaactgcttgcattaaaattatttgtattgttctaaagagcatttatcattttgatcgaatctagattgtctttctactaaacatgggccgtatgtagctctccattatcagtaggactgtgagataaccagtcaagaatctgtgctctaagtacaagagcaaaatcatttggctctttaccgaagagcttaaaaacaattcgatctgtgcgactctgagcttctccactgaaactagaaggagactgggcagatgcagaatcagaatttccacttgtttgaggtggacttgactgatgggaatcttgttgtgcccatggtaatcaagagagctagtcacaagatttgtagagacgggcaatctttctaaatcttccataccatcatctgagtcaatatatatgtcattcaaatcaaaattattcatcttgatctgtccagcggtactgtctctggcttctgagtaggccggaggactgtttgacatgctgggctttatagaagatgtgatttgctgatcagaagccccagcatcatgtgcatgcatcacttgttgctgcattttagccatagatacagtttcatgttgtcttgtatcagttggagagccttgagaaccattggagaataaagtagacatcatttctgacttccttgatgaaccatcttctctcaacaaattctctggttctcgcaaaaggttagctatgttcttgctcccttgctcaccattctgactagcaagactcctcagaatatgagttagtagatcctgatctgtagtctgatctgacctgtcagaatgcatatttgaaagtatcttcaataaacttatcaacagatagctacttgtctgatcatcatttaatgaacttccattaggaacagcttcatgatttgttttccttcttcgtttattatgccctgccaaacgtcttcggcagcttctctttccttcatcaaactcttgaagcaggtgaaacctactgcattgttgacagaatctctgcattgcatttcccacaagcgccctactggccttggagtgcatctcacaaactttatgtcgcctgtgataatccttagctttgctcagatcagcactgcagtcctccacctgacaaacagctcgatttgaagtacttcccgacactctacttttcttcccattcgtaccgtcccagcttgcaacttccctatccaccactgcagaagcatggccaccaagctttaaactaagagtacccccttcctcattcaacccatcatcctccagcacaataaattgattttttttacttttttaaggttttgttaaaaaaataggtttttttttccttttcttgtccccttcttagttccccttgggatcccttggatctacttcctcagaggtggaagaactgttggatggacctccggccaccgggatcccagccggacccaatagggaaaaattgctgtcccactccaacaccatccgccggcaccaccggattcagccggctagcgatgaacagatcaccatcccatctccaatcattcaaatcccactctgaggacctcttccccacacccctcaaatccgaggaagcacccacaccgtaaaaatgataagcctcagctccaaatttagcttccatggtcaaaaacacaaactacacaactaaattcagttacagtacgaaatcaacaacacggaatcacaatcaattaaccttacttcacccccaacagtcccaaaaatagcaaacccacgcaaccatgattccaattcagtcgaatccgcatggccaccaccaacacttccaatttcccaagtcaactagagtaacacaaaacctagctcagctcaagtaccgcgacagacacaacaaccttcttcaactaaaaattatctaaagaaacgccaggaagaaaaaattaaaataataaaaaaggttagaaagtaaaattcaagaagaaattgatgacgaagcgaagacaacggtcgtaccggtacgtgagaggtttggcgtgagaagcatagcagatcgacggcgagtggatgtcggta

SEQ ID NO: 86381 - DNA, 596 bp, Glycine max
  Clone ID: PAT_MRT3847_49013C.1
tctatagttttgaaggatatcgtattgcatgtgcacctaaggtgcagtcaacggacaaggtttgattaaaattcatcatcaaatattaaatgtttgactttgatctgaaaaaatgtttgacctcataaaaacattaagtatggataaatatatgatatgaaaatgcgtagcaaaacacatagataatcatatatattatgcagcattgactgcaattttcatcccattcagcaggcagtgaccaggaaaaccgcagatgaagtagtttagatccttgatcagagtaaagcactaacataacaatagcattgttgcagcactgcctcttccttgagccattctttttagtatcgattataacacttaacaccaattcagatttcagaatattgtgattcaaacaaagagtcaaggaagggttttatatataattgaggaatgttcaagacccgtcattgaataattaattaaattatataatatatttacttacatatcattcaattattatttattaaacatttaattatatatttataatatacatgatatattaaatttaattaaatatcatttagttacaaaatatattatgt

SEQ ID NO: 86382 - DNA, 1247 bp, Glycine max
  Clone ID: PAT_MRT3847_49014C.1
gcaaacaagatatcctgttgattgagtaagagagggttattaaatagaatgatttaaacattaaatgtttgcatgaaaataaataacaaatgatattctgctttgttcagatataatttacaattttcagtgatttgccacatcttgatatcataattaataccatttattccctttatacacattgtatatatatgaacccggtaaataaagaaggttaaattacctactacattgttgacagaatctctgcattgcatttcccacaagcgccctactggccttggagtgcatctcacaaactttatgccgtctgtgataatccttagctttgctcagatcagcactgcagtcctccacctgacaaacagctcgatttgaagtacttcccgacactctacttttcttcccattcgtaccgtcccagctcccaacttccctatccaccactgcagaagcatggccaccaagctttaaactaagagtacccccttcctcattcaacccatcatcctccagcacaataactctccttttcttgtccccttccttgttccccttgggatccctaggatctacttcctcagaggtggaagaactgttggaggggcctccggccaccgggatcccagcggacccaatagggaaaaattgctgtcccactccaacaccgtccgccggcaccggattcagccggctagcgatgaacagatcaccatcccatctccaatcattcaaatcccactctgaggacctctttccccacacccctcaaatccgaggaagcacccacaccgcaaaaatgataagcctcagctccaaatctagcttccatggtcacaaacacaaactacacagctaaaattccagttaccagtacgaaatcaacaaaacggaatcactcacaatcatttaaccttacttcaccccccaacagccccaaaaatagcaaacccacgcaaccatgattccaattcagtccaatcagcatagccgccaccaacacttacaatctcccaagtcaaccacagtaacacaaaaaacctacctcagctcaagtaccacgacagacacaacaacctcttccttctttccttgttcaacataaattatcggcacgtgagtggtttggagtgagaagcaaagaagatcggcggcgagtggatgtcggtaagtgcgccacgcaaaatggcgaacatgttctgtggacggaaaccggacgcgtgggtcgagccggtgaattccgg

SEQ ID NO: 86383 - DNA, 421 bp, Glycine max
  Clone ID: PAT_MRT3847_49015C.1
ttggagctaaaggcaggcccgccttcagcaacgaacaaacccgccaagccgttgtgttgggccgtgggccctgacaatgctgaatcttctgagcccgacgctccagggccggtacccaatggtcccgttgatcctgtgaagctggcgtttagcaaggctgaagcatataaagagtccataaaaccgaactctggtctgggaactacgcaaagcgcagctgataataatgatgacaatgaggcccaaaaggatttgccagattctgtcaagatcgcaacggagaaagccaaaaagtacaagcagaataaaggagttgcagctgttagtgaaacaactcaaggatacctgggagtgagtgataggagttcaggaaaaaatgttatggacaataaggctgggtagaagggagaactttcagttt

SEQ ID NO: 86384 - DNA, 1675 bp, Glycine max
  Clone ID: PAT_MRT3847_49016C.1
ttggttgaattttgtatacccctcgagtatttttcagtttcccagaaaaattattggtgtggctagtcaaagttgtgagcttttgtcccttttggttattatagtttgattccttcacttcaccaagttatataaacatgctgtatgtgttatgcatctagagctagagacttggacaattttggttgctattgtgtgcatcttggtctttgttctgaaggagattgttatgggagggaagagctcaaaagggagtggtaggaggtatgattttggtgcttcttcatcttcacgggataataactatggtggataccatccacaatcaccatacccttcttatcaaacacctcagcacccgcgtgcatcagctccattttatgactatgcacagccaaaaaggaagttggataagaagtattccaggatagctgataattaccgttctttggatgaggttacagctgcacttgcaaatgctgggctggaatcttctaatctcattgttggcattgatttcaccaagagcaatgagtggacagggaagaggtcattcaatcgaaaaagtttacatgacattagaagtggtcaaaacccttatgaacaagcaatttctattatcgggaaaactttatctgctttcgatgaagataacttgattccttgttttggatttggagatgcatctacacacgatcaagatgtatttagtttctattcagaagagaggttctgcaatgggtttgaggaagttctgacacgatacagacaaattattccttccctaaaactcgcaggacccacttcgtttgcccctattattgaaatggctatgactattgttgagcaaagtggtggccaatatcatgtcttgctaataattgcagatggacagatattcattgtttttttccctgtgctagggcttcaaaaactgatactcagcttgttgtcacaggtgactagaagcgttgatacacaaaatggcaacttaagtccgcaagagcagaacacaatagatgcaatagtaaaagccagtgagtatccactgtcaatagttttggtgggagttggagatggaccatgggaaatgatgagggaatttgatgataacatcccttctcgggcatttgacaattttcagtttgtgaattttactgaaataatgacaaggaatgtagattcaaccagaaaagagacagattttgccctttcagctttgatggagataccttctcaatacaaggcaaccctagagcttggcatattgggttcacggagggggcattcaccagatagggttgctctacccccacctctttatagtagaacctcttccagcatcagcacaaaatctacacggtctaacagttttcagcagaggacacctacacatactagctatgatagcagtgttcacacagagacatcatcaagttctttatatgataataaggtttgccccatttgtcttaccaatgcaaaggatatggcctttggttgtgggcatcaggggctgcaaaaggatgtgcagagttggtctggctcttttcacagatggtttcttgtccataaaaactgcatttgcaatttccaggcgaaacttgtattcccagttacacttaggaagagctctttacagaaagaattggccttccccgttgtatatatgtag

SEQ ID NO: 86385 - DNA, 368 bp, Glycine max
  Clone ID: PAT_MRT3847_49017C.1
taactcatataccatcctacctatggaaacagaggaaattttataccctagccaatccataactcataattgacactctccaacaccaatacaaaccccaattttctaatactattaaactttctaattcactacaattttacaccaaatctaattctctaacataacaattacacctcaaaacttttttatttttttcttcaaccccatcactctataaatcatttacccactataccccatgaagaaagaggacaaacaaaaacactgcctctgaatcaacaaatttatccctccttactctataaacacccttaccccaaagaacaagggtgctatcaacacaggatctacctttttaaaatgca

SEQ ID NO: 86386 - DNA, 440 bp, Glycine max
  Clone ID: PAT_MRT3847_49018C.1
ttgaatgagctgaagctgcttcaaacaaagctatctataatggaaaaatatgctagtatacttcatggttctatttttggaaaaccttttgatgaacaagatatccctgtttcattgcggaattcaggttcatttgacattgcaaaagaatgggagagtatgttggaggcagcagatcaaaggaagctgattaggttggaaatgttttaccgtgacatgcttactggagtgaaagatgaactaatgaagagaaggatcaaggaaattgtacaagagtgtctccaatcttcagaggtgaaaaaatagtatgtataaataaaaacaaaatgcatcccattccgaacaaaaggatctcggataaaaaccaacgagctatttgatcattccattttgcaccattggtatgcccatttattttttatttgatcattttattttgc

SEQ ID NO: 86387 - DNA, 371 bp, Glycine max
  unsure (1)..(371): unsure at all n locations
  Clone ID: PAT_MRT3847_49019C.1
cccacccncgngtngtggattggtgagttagtgnacgggagngcngnnacataaatanacantcncaaatagtgncagtaccngaangcagacatgncgnaacannnagagtattgcgtattcnggtcagnnattcaatnctngaanttgnncggncagcatnatcactttatcnattacaccttaatangcgacttatcnatcttttncaatcctcaaacaggncangcagnattatcnngtagngccctcannnnnnnnnagccccccnttggttgctantantcttgggttctcagggantgngatggatcnagagnaancgaanaagccgccnttggtaacacaagtaaacantggcccaattngga

SEQ ID NO: 86388 - DNA, 435 bp, Glycine max
  Clone ID: PAT_MRT3847_4901C.1
tttttttttttttttgtttttttttttttgggttttttttttttttatacactgaaactttttttttttttaaaaacaccggggggggaatttcccgggtccacatcccgtatttggggctcaaggagaaaaccttttcttttttaaacaaaagggggaaaccaccccttatttttatttccccccccgccctttgccccaaaaaatttaaagggggggggtgaccgtttattcccgtggtttaccaaacccccaaaaaaacacatgttttggtttctcaaaaaacctgccgaggggctgcccccaccagacgcccttttctggaggaaagggggcaccaatttcccctgcattaaaaattttgaatggccccccctatacccgaataccaaccccgggggccgctcccctttttttttggccccggggttcccc

SEQ ID NO: 86389 - DNA, 750 bp, Glycine max
  unsure (1)..(750): unsure at all n locations
  Clone ID: PAT_MRT3847_49020C.1
ccgcccttgccaggtacccggtncccggacttcccgggttcgaccccacgcgtccgattgtgcgcaacccccaattgctctactgctccttttgcagtgcctagccggggtctcttgggggaaactacttggactttttgcctttcttgctattcttcatttcaagacttgggagcacgtcaattggcagtttcggtgcggtgaattatccatcttgcacaactgaaagaacgagaatatgccctttgcttctgcttccatggaaaaaaggagtgaatagctaggattaagcttaatgaacactgattctgctaaccatgacaggattcctggtgttcgccaccagaatgatactaccgtccctctgcctctggtttcaccatctcctttcccccactggcatttgcatgaaacatcccaatattataacaatgaaccagctggagttaattcaatgattgattcctctcagttcagaagttatcagaatttccagatggaccataattactatcacagagcagaacataatttccttccatgcgaaacagattctcgttttccatgtccagaaggatacatagggtggccatatcaatatgataggcacaataatctagcaatccctagtaatgtgagggatgcttccttcaatctaaataattttgagaagcctgacaatggtgggatgtgtgtgaccccaatttacggttcggctagcaggctacaaatggggtcacacacatcaca

SEQ ID NO: 86390 - DNA, 363 bp, Glycine max
  Clone ID: PAT_MRT3847_49021C.1
ttttatctattttacaagttttattgaatcttgaacaaaaccaagacggggctattggggaaaattatgcagcgtgacactaaaggccttacaagaacatgattaacaaattctatggggactgacacccaacaacggtaattaattgactgcaacacacaccggtcggaagaagcccaaggaactgtaacaaggtcgtggcttgttaccctaagttaacgctatgcttgatgatgacaccatggcaattagcattgcaaggacagaaaagaacctttctcatgaggctctaagactcaatttcgataggataactgaccaacatctatgggaggtgcaccaaccaagtttttgggagttact

SEQ ID NO: 86391 - DNA, 291 bp, Glycine max
  Clone ID: PAT_MRT3847_49022C.1
gcacgaggatatataaagggactacaaagaagatgaagatctctagagaaattgcagatgctagtggtctgcgattttcacttatgttgattgcttggcctgaaaaattacacttgagaacatgctcatcggctgtcctttgtgaatgctattttagctatccagtgacttgctttattttttggtgcatctattccatcttctgtgtgcaatgttcaagcctccattgataggtgttttagtttacacaatggttaatgcttaaacggtctttttgttagtgtcgtttgc

SEQ ID NO: 86392 - DNA, 594 bp, Glycine max
  unsure (1)..(594): unsure at all n locations
  Clone ID: PAT_MRT3847_49023C.1
tttttntgaatctaaaaagcaacaatattcaaaagaaacttttcaaaatagtgtttactgttgacaattatatcacgcttttgttacatcacaatcaaatagatgatgcaagtatgcaacaccgtgagatacattgaacttgggcacaaatggcatactgttgatgcaaactctttcaagttgaaattccaaaaagcactgtcttgatttggaacgtgtgtttgcctcacctctgaagtccatatcgtactggatgctgcttgatattgaacaatcaaccacgttccacagcattttaggatgcgaaaattgtatgatgctcaagccaatgtaaccttcacaactcgttgaaattcctgctggtaaacctgcttgatcatgacgacttagctgcatagaagatgcgttttcatcccaatatgctgaaaatgcagggagggagaacacagtgaagttcttctatgatataacctttttagaagaaaaactgcagtgattgttcacagtcacatactgtaaagagtcataacttttataaacaaaatgatgcataaataggttttaaaacaagatgatttatgatagttaacatgt

SEQ ID NO: 86393 - DNA, 247 bp, Glycine max
  Clone ID: PAT_MRT3847_49024C.1
gcctttcaagaagtacattaagatcaaaaaggttactcaaatcaactacggcaaagaatataacaagctcatcatcatcatcaacatcattaaccaaaacagagcacttatcaatacccctaatataataaggtcccaagtcaatttcaaaaagctttcccttaccaacatcaagattaacatcaagaaggtccctaagaagaaaaatcttatcaaagccataaaaaatactaatattaagaacaag

SEQ ID NO: 86394 - DNA, 309 bp, Glycine max
  Clone ID: PAT_MRT3847_49025C.1
aaaaaatctttatgcattcggcacaatcgattatgcttaatgttgtggtcaccgattcatcacatcgagttacgcatatctcacacgcacgaaatctagtactaacatcaacaaatccgtcttgctatacaaattgctgcgaaactgtggtggcatggatctcatctatgattgtgctgatccttatcctgattgtcgagtcttgtatgcatttgcatctatcagcatttaagactcattcatgtttgagtgtaaggaaacaactgctcatctgagctacgctctatcttttgtagggatatatgtatc

SEQ ID NO: 86395 - DNA, 271 bp, Glycine max
  Clone ID: PAT_MRT3847_49026C.1
ccagacagcaagctcatcctagcgttgtaaaaacggtagcagactcctccatgggtctctcttccccatccttggctggcaaagccgtgaagctgggcccatcaggccccgaagtcgggaaggtcagcatgacgaagaccgtcaccaagcaggactcctcggaagcccatggtacggcccagaccgcgtaaagtacttgggcccattctctggcgaacctccgtacctagtcactggcgagttccaggtgactaggctgggacactgctgg

SEQ ID NO: 86396 - DNA, 697 bp, Glycine max
  Clone ID: PAT_MRT3847_49027C.1
tcgcccctttctctctctctacactttctctctctctccaacaccaccttttatttttttttccccttgagacaaaaacaaaagtaaagaaagaggtttatttttatttgggtctttttttattagcgaaaaaaggaataaaagaaaaagataacggaaatgtcggaggcaaaagacccggcgatcaagctcttcgggaagacgatcccggtgccggagattctgccgggatccaacggagctccggcttcgtcttccggtgatgttgttgttgatgacagtgttgacgcttcttccaccaactcttcaagggagtctcataccaacacagatgcacaagagaaagattttgataaggacacattgggagaaaaaccaactgatgacaagaaggaagatggagcccccgcccaatcatcagaagaggtcaccaatcttgatactgcctctggaacctgtgaagaatccatcactctgtccaccgagagggaggctactacattgaaaactacaaagactgaagaagaacagggcgagacaagttattcacaagataagaacctaaaaaaaccagacaaaatactaccttggcctcgctgtaatagcatggacaccaagttctggtactacaataattataatgtcaaccaaccccgtcacttctgcaagaattgccagagatactggactgctgggg

SEQ ID NO: 86397 - DNA, 259 bp, Glycine max
  unsure (1)..(259): unsure at all n locations
  Clone ID: PAT_MRT3847_49028C.1
tttttttttttttttttttttttttttttttttttttttttttttttttttngggggaaaagcccgctacaaaacttttattttagggaagcaatcaataattaatttaactcccattcttgccctacatttcctagaataaagatcgtttatttccgaccacacgcatgatttgtccacatattgaaagaactaattaatgaattccccttgtgtaaattttaaatgggataattatacaaataaacaattttttttg

SEQ ID NO: 86398 - DNA, 389 bp, Glycine max
  Clone ID: PAT_MRT3847_49029C.1
acatattgcagcgaggtattctatttgccaggagcattattcagaactctgaagcagggacaaacaaactgctaagattatgctcgagttctcgatattaaggaaccatgacacatatacacagcttacctctcacagagatataagtaaccatgaatcgaacatgccactaagccgatctcatgatagtggaccgaattaacctagcaaagcgtgctggatgactctggaaactctgcatactgtgggctgagcacgatgccgccattgtagcgcactgtcaatgctggaccatttaaacatgataatcgattccagagactgactgaagagcgcgagtcattactgacccgagcgagcataaacaaaacgcgcataccgtgacattc

SEQ ID NO: 86399 - DNA, 415 bp, Glycine max
  Clone ID: PAT_MRT3847_4902C.1
tttatatgctgcacaagttgttggcgagcaataagaatatacagctgtgataaaatggtcaatagggtaaatctactatggcttcgctcagggacaaggaaccagcgccatcacataatcccaccatcttttctgagcagcacttgtcgatacgcccataccatacggatcccaacacactcgccgaaggaggttctgctggctacttcaagcccgccgaactccaccgtgatcctcctcccgattattccacctctgatcgatatcccgacgaacctggatatataattcgcgcaggttcctcatctgcagtgcaccacacagatgccaatcgccgaattgctgctgataataataactcgtcacaaatctcggcttatagtgaggggagagatccaggaatatatcttgaccc

SEQ ID NO: 86400 - DNA, 338 bp, Glycine max
  Clone ID: PAT_MRT3847_49030C.1
agacggcagagcggacatctaccgtatactttcactctttcttccactgccacacagccagatccatgggcttcccaaccaaccacacctctacggaccatcccctaaacttcctcatctaccgtcgatcagactgtataggcgacctactacactccctctgccaatcccacagcatttccttccattactgctcaggccgcctagagaaccggacctacctcaaaaccaacatacccctcctcatgccctcaacacatcttaaacgccctctgcatcacatgcctacccaacgccgactggttccagtcccacaaattcttgaccatccgaaccaa

SEQ ID NO: 86401 - DNA, 274 bp, Glycine max
  Clone ID: PAT_MRT3847_49031C.1
cttgcaaccatactcgtggctcgcgttaccgatggtaggaagaatggtacctgcgcttgactgaagccagatggactgacacaagtgactgatgagtgctacaatgacactggtgccatggtcacaattctggatcacactgcactaactgccacacaacatgatgagactgtgagcactgaccaaattgctgctgaccttagagagcatgttatcaagcctgtcattactgagaagtgcctgtatgagaagaccatcgtccagcttaaccatt

SEQ ID NO: 86402 - DNA, 1147 bp, Glycine max
  Clone ID: PAT_MRT3847_49032C.1
acgtgggcagtggattcccacgcgttcggcctttgaagtttaaagaaaggcatccctggggtttctctctctgtgtgactaacataaaataattagagagagagagagagagagaggatatgggttcgaagaggtatgcgctattgatgtgcggtgaggattcggagtacttggtgaagatgcacggaggcacctatggggtattcatgaagttgctccaagagcaagaggaaaagtgggacctctacaagctcgtccaaggagagttcccggagcagcatgacttgcctctctacgatggctttgtcatcagtggaagctgctatgatgcacatgccaatgacccatggatccttgacctcattgctctcgttatcaaattggactccatgcacaagaagatccttggcatttgctttggccaccagataattgggcgtgcattgggaggaaaagtgggtcgctctcccaatggttgggacattggtgttaaagctataaacgtgtcatcatctttacccttggctttctcatctcttaagctcccatcaaagctttccatttacaaatgtcaccgggatgagatcctagagctccctccaaaagcagaggtgattgcttggtcagaaatgactggagttgagatgtttagctatggagaccacatgtttggcatccaaggccacccggaattcacctatgaccttctcttgttctttattgaccgtattattcagcgaaatttggtccaggaagcgtttgctgtggatgcaaaggttaaggcggcatcgcaagagccagataaagagatattgaaaagattgtgcgttgattttctaaagggtcgattgtgactgacaattcaatatgaatagacaaataatatttttgagatattattattgtgtaagagggtttttattaattagaagaagcaacacttgggctgcgtgtggcctttgcctaatgttagccatgctattgctaggttggtatccattatgaacaatgactatgggtgcagtcaatgccccggtattccacaagaattatctaatttcttcattctaattcaataaacaattagtaattccgaagtcaaaaccccggtatgccccaagaattatctaatttcttcattctaatt

SEQ ID NO: 86403 - DNA, 1812 bp, Glycine max
  Clone ID: PAT_MRT3847_49033C.1
ggtagtgcctctgcctctgggccttcaatcatcatcgatgccagctatcagaatgaccagccttgtctctataacgtgttgggcttgtttaagtctgcctctggtcatgggaccttcaagtgattcatggtcgttggcccttggttatgtcatcatcagatatcgagacgctcgtaattgaaatggaaatttgtgagaaaaatcaaataaaaatattttttaactcggatgtccgattgagtcccgtaatatatcgagccgctcgtaattgaaaatggtaattataatttttaactcggatgtccgattgagtcccgtagaatgtcgagacgctcgaaatagaaaaccgaagctctgagcaaattcaaacgacaattaccgaagctttgagcaaattcaaacgacaataactttttactcggatgtcggattgagtcacgtaatatcttgagaacctcgaaattgattatcgaagctctgagcaaattcaaacgacaataactttttacacggatgtgcgattgagtcccgtaatatgtcgagacgctcgaaatggaataccgaagctctgagataattcaaacgacattaactttttactctgatgtgcgattcagtcccgtagtatatcgagacgctcaatattgaatgccgaagctctcagcaaattcaaacgacaataactttttactcggatgtccgattgagtcccgtaatatatcgagacgcacgaaattgagaacagtaacgctaagcaaattcaaacgacaataacttttaactcggatgctcgattgagtcatttaataattcttgacactcgaaattgaatacagaagctctcaccaaatttaaatgacaataactttttactcagaagtctgattgtgtcctgtaatatatctagacgctcaaaattgaaaacaaaagctctaaggaaattcaagcgaatgtaactattgactcagatgtccgattgagtcatttaataactcaagacgctcgtaattgaaaacggaagctctgagcaaattctaacgacaataactttttactcggatgtccgattgtgtgctgtggaatatcgagactctcgacatttaaaacagaagctctaagcaaattcaaacgacaataaccttttactcggatgtccgattgagtcccgtaatataccgagaagttcctaattgagaacagaggctctgagcacaatccagcgaaaagaacttttttctcggatgtccgaatgaatcccgtaatgtatcgagatgctcgtatgtgaacacgtaagctttgagcaaattctggcgacgataacctttttctcggatgtccgattgagtcgtgtaatataacgagttgctcgtaattgataacggatgctcgtagcaaattctgagacgctcctaattgagaacagaggctctgagcaaaatccaacgacaagaacttttttctcggatgtccgaatgaatcccgtaacgtatcgagatgctcgtatgtgaaaacataagcttccgattgggcccagtagtatgtcgggacgctcgaaattcagaacagaagctctgagcaaattctaacgacagtaacatttttctcggatgtccgattgggtcccgtagtatatcgagacgctcaaaattcagaacagaagcttgggttgtccgattgtgtcccgtagtatgtcgagaagctcgaaattgagaacataagctctgaggaaaatataacgacaataactttttactcggatgtccgagtgactcccgtaatatatcgagacgctccaaattgagaacggaagct

SEQ ID NO: 86404 - DNA, 439 bp, Glycine max
  Clone ID: PAT_MRT3847_49034C.1
ggctcgaggacgcacacgagagtcggcagcacctccttctgcgacgattgctctctctctgtcgcgctttgatcaccgacttaggcggaaactaaagactaggcaaaggggtgaagccaacagctgaagagctgcgtcgcatcatgggctagtagcataatacccggaatatgtctgtcactgctcatggtgatcacggaaaaccaaccctgactgacactgtgcgtggctgctgctgggattattgctaaggaagttgcaggggacggccgaatgactgatacccgtacagatgaacctgcacgaggtattacaatcaggtgtactggtatctcactctactctgaaatgactgatgacagctgctaagagatgtaggggacagcgcaatgcgaaagagtagcacattaatatcattgacctgccggggcacgatgac

SEQ ID NO: 86405 - DNA, 260 bp, Glycine max
  unsure (1)..(260): unsure at all n locations
  Clone ID: PAT_MRT3847_49035C.1
gcacgaggaaaaccctattcctctgtaagtttcatccattctaccaacggcgtagctttagttgtttcaattttctttatttaatgttcatttgcctcttgagatgcctttgattcaccggccatgtattatgggttatctcctaatcaatgataaaaagaggcatagatttttcgcanaaaaaaaaaaaaaaaaaaaaaaaaaaaaaaaaaaaaaaaaaaaaaaaaaaaaaaaaaaaaaaaaaaaaaaaaaaaaaaaaa

SEQ ID NO: 86406 - DNA, 244 bp, Glycine max
  Clone ID: PAT_MRT3847_49036C.1
tcgcctactcgtccggggacgcgcggactgacgcgaggagtccacagtcggcattccggagaatacaggaacaccattggcctgggctatgaatagctcgtctaaggggcgcgcctgttgtgatatttacacgcatcgctctaaagacatggaataacggaatacatgctgcacaagagcaacgactatgtcatctagtccaaaaccgcgtggtgaggcatggagtttgcaatttttgaagcga

SEQ ID NO: 86407 - DNA, 172 bp, Glycine max
  unsure (1)..(172): unsure at all n locations
  Clone ID: PAT_MRT3847_49037C.1
aaccgtgcctcctcttcctctaccataatcaacaacctcttcccaatcccaatggggccaaccaanaancgcgagcggggagcagaacggggtcaacaacaacgactcttccnaccccctcaanctctccccctggggggggcggggagcgtcatcnancggcgttcacctc

SEQ ID NO: 86408 - DNA, 365 bp, Glycine max
  Clone ID: PAT_MRT3847_49038C.1
tttttggtcatatagtgcttgtttggaaatgcagtaaatcaagataaaattatggtagttataaagctactttttagtataatgaaaaattatgatagtggtggtttttggatctcactgccaatttaaacacaaatattaaatattcaatacatatttcctttttcttttattactttgcctatttttttcattttttcttcacatgacttgttatatttattatttcccctctcccttcatttccatagatgtaagtttatcactctcttcatagctgcactcaacgtaaaagaaacaagaaaagtataattatctactcacttctaccttcattatcttttcattactctcttcttttctat

SEQ ID NO: 86409 - DNA, 290 bp, Glycine max
  Clone ID: PAT_MRT3847_49039C.1
gcacgcgtcaacaaagctgatgcttctcctgcttctatttcgcaggactttttttcactacacaattacttggtttaactcacttggacttagttatctgggttggcaacatactacccacccatattttggtcactttacttacttacaaactctctttagcatgttaacaccctgagagacaggtttcatggttgggaccctcataatgacttgttgccgaaaaggccaatacacctgacctcagtgagcacagatgtcatggggggaagggccgcctagagctttta

SEQ ID NO: 86410 - DNA, 256 bp, Glycine max
  Clone ID: PAT_MRT3847_4903C.1
cacatacataccttgtcatttctcccttctcccttctctcttctctctctctctctctctatctttctctttgccctcttctctcaatctcaaatctctgctctgcaactactccaaattgattgaatgctccaaactccatccacacacaccttcaaaactcttattaattaccctcacctagcaaccagttcgtagctcctccctcccggcctccacaaaactcaccacacactctcttccaatcttcaaaatt

SEQ ID NO: 86411 - DNA, 249 bp, Glycine max
  Clone ID: PAT_MRT3847_49040C.1
cttgcatatatttaattaacacccccccatatcactcttactcatttatatatacgaatacgatggagtttgtgtgtgagagcatccgcgacgcgctctgagattgtctgcctgaaaacagcgtttgaagtggcagctcctggatgactgattgagcgccttaaatagaactaagagcaaggctgacccgccgtgcattagcttctacgattgagccgcaagagagacatttcatatcgaagaaactat

SEQ ID NO: 86412 - DNA, 302 bp, Glycine max
  Clone ID: PAT_MRT3847_49041C.1
ataataaatgaatgtgacctcaggcggacggagatcctcaaacagtgaggggcacattacctagccatgctcttattgggtccaagataatgtaacccaactaatggggggactatcccccagggaaatgctacccctattatgatatgcgcctagctcacaacgtcttcttctcataaccaaagttcgttatcaattagatggacccccaaggctgggtgtccaacattgcaaacatgaatcttcatttaggagcccttacgggagttgcatgctccagcggtgggttaggatctgtattg

SEQ ID NO: 86413 - DNA, 790 bp, Glycine max
  Clone ID: PAT_MRT3847_49042C.1
ggtcagtgtcacgcccaccacaataagttgtgcctggagaaggttacaaggattctgctcaaaaggtcaaggcaattaaacttgcaaagaaatctgtcaagaagagaaacaaggatgcccgtcgtggagaagctgatagagtcatacctaatctgaagcccaagcacttgttttctgggaagcgttccaatggaaaaactgagagacgctaggacaggggatgctgttttcttcattttagagacacctgttggcatttttcgtggctgccaaaattttgttatttcatattagtgttttgtgttggagtttaaggtgctgtgttggcaacatagtttacttatacatctctgccttttattattattgttatcaaacttgtcattctttaagttgcaatgttacagtttcctttgttggtatttacttatttagttcaatgtcggagacctctatgaatcaaggaagctgctgttttgaattttatgagtcacaacattgactgttgttattggaacttggaagttagttccttccttctagtttgattgctctttaatctcaacttccacatgtgggtgattttgttctagtattgctcaaactggtttaaatattgtatgcaatatacaataaaaggctcacgagataggatagcagcaccctattggttcatcggaggggggatacactgtgttggagggcctttattgtatgtaatgtaaggataatatgctcaatgaagaaccacatttgatctaaaaaaaaaaaaaaaaaaaaaaagaaagag

SEQ ID NO: 86414 - DNA, 683 bp, Glycine max
  unsure (1)..(683): unsure at all n locations
  Clone ID: PAT_MRT3847_49043C.1
cacaaaccctagaagccaacgtttttcagggtgagtctctccttcgcgtgctaatccatatagtcgcttgttaatttctcaggttgttagagcacgatggttcagtataattttaagaagatcactgtggtgccaaatgggaaggatgtcgtcgacatcatcctctctcgcacccagcgtcagacaccaaccgttgtgcacaaaggatatgctatttcacggcttcgccaattctacatgcgcaaagtgaagtatactcagcagaattttcatgacaagctctccacaataatcgacgagttccccaggctcgacgatattcatcctttctatggcgatctcctccatgtgctctacaataaggaccactacaagcttgctcttggccaaattaacactgccaggaatctcattggtaagattgccaaagactatgtgaagttgttgaagtatggtgactcgctgtatcggtgcaagtgtcttaaggtggctgctcttggccgcatgtgcactgtgatcaagagggttggcccgagttttgcttatctagaacaggtcagacagcacatggcttaggcttccctctattgatccaaatacgaggactattcttgantctgtggattatccaatgttggcaagagcctcgttcattaacaagattactagagctgatggggggt

SEQ ID NO: 86415 - DNA, 3346 bp, Glycine max
  Clone ID: PAT_MRT3847_49044C.1
ggctcgaggtcggtgtctgcctgcagttttcaacttatcagagtctataagattcattcatcacatagaccgcaaaaccttcgctcgcgttcacaacacaaaccctagaagccaacgtttttcagggtgagtctctccttcgcgtgctaatccatatagtcgcttgttaatttctcaggtttgggcttcggatcccaactttatgtggctccatggatttaatttatcttgtattttatttatgattcattccagattctcaatacctgtatctcgttttacttttgtagtccattttttattcagcgcttttgtaataaaaattgttaattttcagttataatttctctgtggtaggaagggggctcgaaacctctcgtcacaatcgcgggaggcacgagggccggctgcccccaagagcgggtccgacccacgcggcgtgcagcagggagctctgccgcctccaacaaaacagagttcagaacacaaaccctcgaaccgaacgtttttgagggttgatagagcacgatggttcagtacaattttaagaagattaccgtggtgccaaatgggaaggatgtggtcgacattatcctctctcgcacccagcgtcagacaccaaccgttgtgcacaaaggatatgcgatttcacggctgcgccaattctacatgcgcaaagtgaagtatactcagcagaattttcacgacaagctctccaccataatcgacgagttcccccggcttgacgacattcatccattctacggtgatctcctccatgtgctctacaacaaggaccattacaagcttgctcttggccaaatcaacactgccaggaatctcattggtaagattgccaaagactatgtcaagttattgaagtacggtgactcgctttaccggtgcaagtgtcttaaggttgctgctcttggccgcatgtgcactgtgatcaagaagggttggcccgagtttggcttatttagaacaggtcagacagcacatggctaggcttccctctattgatccaaatacgaggactgttttgatctgtggatatcctaatgttggtaagagctcgttcattaacaagattaccagagctgatgtggatgtgcagccctatgctttcactaccaagtctctctttgtgggtcatactgattataaatacctgaggtaccaagtaattgatacgccagggattttggacaggccttttgaagatcgtaatattattgagatgtgcagtatcactgctctagcacatttgagagctgcaatcttgtttttcttggacgtctctggatcttgtggttacagtattgctcagcaggcagcgctgtttcacagcattaagtctttgtttatgaacaagccgttgattatagtctgcaacaagactgacttgcagccactggaggggatatcagaggaagacatgaagttggtcaatgagatgaaagctgaagccttgaagactctagttggtcaaggaggtgagcctacagacaataacagtgtattgttgaccatgagcactttgacagaagaaggggtaattgctgtaaaaaatgcagcatgtgagaggttattggatcagagggtggagataaagatgaagtcaaagaaaattaacgactgcttgaataggtttcatgttgcagtaccaaagcctcgtgaccagaaggaaaggcctccatgtattcctcaagcagttttagaagctaaagctaagcaagctgctgagaaggaaaagagaaaaactgaaaaggatctggaggatgagaatggtggggcgggtgtatactcaatgaacttgaggaagaattacattttagccgatgatgaatggaaagaggatgtgctgccagaaattttggatggacacaatgtgtatgatttcattgatcctgatattctgcatagggttgaagagttggaaagagaagaagggatgagacaggaagaagctgaggatgatgattttgagattgatggaactgaattgacacccgagcagcaagcagctttagctgagatcaggaaaaagaaaagcttgctcatccagcagcataggatcaaaaagagcaatgcagagaatcggccaactgttccaaggaagtttgataaggacaagcagttcacatcagaaagaatgggaaggcaactgtcatctttggggcttgatcccagtttggcaattaagagaatgcacagcagatctgtctctagaggtcggaaaagggatagatcgcctgaaacaagaagtgctgatggtatggatactgatggtgacacacctagcaaaaaacagcgtctgagtagatcactgtcacggtccaggtcagtgtcacgcccaccacatgaagttgtgcctggagaaggcttcaaggattctgctcaaaaggtcaaggcaatcaaacttgcaaagaaatctgtcaagaagagaaacaaggatgcccgtcgtggagaagctgatagagtcatacctaatctgaagcccaagcacttgttttctgggaagcgttccaatggaaaaactgagagacgctaggacaggggatgctgtttaatgcattttagaggacacctgttggcatttttcagggctgccaaaaaaaaattgttatttaatgtaagtgttttgttggagtttaaggttctgtgctggcaacatagtttacttatacatctctgcattttattattattgttatcaaacttgtcattctataagttgcaactttacagctttctttgaatcaaggaagctgctgtttgaattttatgactcaacattgagtgctgttattggaacttggaagttagttccttctagcttgattgctctttcatctcaactcccacatgtggttgactttgttctagtatattgttcaaactggtttaaatattgtatgcaatatacaataaaaggctcacgatataggattgttacagtttcctttgttggtatttacttatttagttcaatgtcggagacctctatgaatcaaggaagctgctgttttgaattttatgagtcacaacattgactgttgttattggaacttggaagttagttccttccttctagtttgattgctctttaatctcaacttccccatgtgggtgattttgttctagtattgctcaaactggttttaatattgtatgccatatacaataaaaggctcacgagataggatagcagcaccctattggttcatcggaggggggataccctgtgttggagggcctttattgtatgtcatgtaaggataatatgctcaatgaagaaccacatttgattatgatttaaaagaaaacccagggcgcaaatcta

SEQ ID NO: 86416 - DNA, 239 bp, Glycine max
  Clone ID: PAT_MRT3847_49045C.1
tcttgataggtctcgtgggggcaactacttatattggcgctggactatgtgcggacgttgactcatgcacctgcccaaactggctgcctatagtaaagaaaggtgtggtcaatgccattcataaagaaccgcgcatggctgctttctttctacgattgcacttacatgactgttctgtaaacagttgtgatgcatctatactggttgatgaatcaagcatcttgattggggagcaaaca

SEQ ID NO: 86417 - DNA, 333 bp, Glycine max
  Clone ID: PAT_MRT3847_49046C.1
aaaaaacacgacttatctacaaaaacactaactggttggaataggtgcatcaatttttaatttacttcacaagcaggcgcaatccacaacaccgttagtggccaccgcacaatgtattatatgcaggggagaacacagtgctttcttaactgagacaaccgttgctgactgttctagaacaaatatgccgaattggccattgcgattcaagcatgtgttgacacacgaacttctatctaaacaaccacactacctaagatcaagaaggctatggctactgaggcttaactcaaggggcaacatatggccacctttcaagattgaacctttcac

SEQ ID NO: 86418 - DNA, 382 bp, Glycine max
  Clone ID: PAT_MRT3847_49047C.1
ccaacgcatgcgaacagctacaaaatgacgacaaagtgtgatgtgattgcagaaacagttggggcactgattgttgtgactgagaaagatcccacaaatgacactgcgacatacaccacgacaaagatgcatacaggtctctcaacagacaaattgcagggcttacactccacatacttgttacacgctgctgaaacaacaaaaaccatgcttatatggctacctcaaaaacgctagcttgaaccaggatgctaactatactaatgcccgaaaaaccgctgcttcttgtaagatggcgtctccaactagttaaataattaagccttcatataattaaagtgtgggatatatgtatatgtctaaagtacactcatctttatta

SEQ ID NO: 86419 - DNA, 377 bp, Glycine max
  Clone ID: PAT_MRT3847_49048C.1
aactaaaaagactacaacctcggggatgatatcaaacaaaattgttatccttgaatcttaaacatttactcagcatataggaaacctgccaaaatacttaaataccaacttagcaacttaaaataattcaagttcaatgaaaacatttgctagattacagcacggtgaacaacaacacaagaactgtctgttatgcataaacaaccatgtcatgtattatgcatcaaaaatctctaaaaagctgcccacaactctctgcatttcttatgtttacccactatttaaaaacccaccaaagtagcaacttaatagaaattgcttcacattaaatgaaaaatcattatccaaaaaatacactttattcatcaaccggacct

SEQ ID NO: 86420 - DNA, 477 bp, Glycine max
  Clone ID: PAT_MRT3847_49049C.1
gcgggttcaggcacgggctgcgagaagacgacagaggggggtacttctgttcattacgtttagtttatcttagctttatctttaaaaggaaaaaaaagttgtgttctgtatgaaatcttatttgtaactccgcggtatggtctactttgattatgcataacagtattgcgttccagggtcatacttttaacttccaccgtgctctagatttgataaaagttagatcatggacatggtttaaggccaagatgaataatgttgaatgttcctttttcaattggtgcaataagcctttagtttgcttctctttatccctctgatctagcctgcaagactctaattatggattagaataccccccttgtattcagtttcataattaacattttgcttgttaaatcctatgccattattctaaaacaaaaaaaaacttataaatcattatcatcataaatcacttcctattgtctacaaata

SEQ ID NO: 86421 - DNA, 547 bp, Glycine max
  unsure (1)..(547): unsure at all n locations
  Clone ID: PAT_MRT3847_4904C.1
ggctcgagccaaaactaaaactaaaggagttagaaacatcaagagagtcactgacaaccaacctggcatgccaagtcctaacttcattctttgttaatttctttcccttccatccactcctctctatcttcttactatctcaccttaccaaaacaaattgtttactttcattcacgtccaaaacttgaacatgaaaccctacacgtcatcaccatcatcctccaagtccaaaaagaagccaacaacaacacaacaagatcatgaaacagcatggggaggaaggtaccttggagtgaggaggaggccatggggaaggtatgcggccgaaattcgcgacccttccactaaggaaagacattggttgggcacgtttgataccgcagaagaggccgccctagcatatgataaggcggcccgctccatgcggngctcacgtgctcgaaccaacttcatctatccggatactcctccgggttcttctgtcacctccatcctctctccagacgagcaaacccaaacccaaatccaccaggcccaagaagagctc

SEQ ID NO: 86422 - DNA, 507 bp, Glycine max
  Clone ID: PAT_MRT3847_49050C.1
ggtttttgctagcctaactgtgctcgtcctgaacacacagaaacgggtgcttacatcatgtctgttgggagctactggaaagcgtaaggaaacgacgtgttccaaaaggcatctggtgaactcaaaattaatgtttgctgtcatatctagacactatgatatccaacacattatccatgcaccaggatgctcttctaaattcagatctttaagaataaatatatctgcgagatggcaactaacgaaacgtagagatgcatttaaaattcacgctttaaaaatccatcctgcacatagcttttacaagggacaagaatttcacttgcatgatgttatatacgctcctcagtttctctataagaaatctcagggccattcttgaaaaggcacggaatctagcaaacgaagccatggattctcactatggcacatgagtttcgaggaggacaatcttgccacactacttcttcagcctcatactaaaacgagactttagattgaccctgc

SEQ ID NO: 86423 - DNA, 741 bp, Glycine max
  Clone ID: PAT_MRT3847_49051C.1
accggcctgcaaagtgcaaacttggttgtggacaacctactcaacgatggtatcacgtgccaagatcatggttaaagccaacaaagaacttgatagtagtatttgaggaattgggtgggaatccttggaaaatagctctagtaaaaaggacaatacatactccagcaaactagtgaacccaattcaaagaactgaaaaaagacgtgaatatgagtagtcaaatggtgattgacagagcaacatgcgatgggaccatagtatagaaaatggttatgcccacttgtgccgttctctggcttccgttggcattggtagatcataatgttgagggaataagtaaatgttaggttcaagcgttgatgtgttcatctccaattcttcattcttcttgatcttgcatcaaagtagacaaccgtggatgatacaaaaaaaaggtgtgaccaagttgatttttaatttattcttacagtatgtacttaataagagaaaataacaaagttcagaggtgtgcttttattcacttgtgtaatttgtatatcttaaattctcaatacatgcaatgcatttaaaaaaaaaactttttaaatgttaatcataacagtatcttatttgtcaatcatcacccaaagagaatgcttttaaaaaccggggggggcgccaacaaaggagggcgggcccccgggattaatttccggcccgcgccctgaaggctccccccccctccctttggggggccctttt

SEQ ID NO: 86424 - DNA, 329 bp, Glycine max
  Clone ID: PAT_MRT3847_49052C.1
tgttcgcgcgggtcaaaaaacagctcatagagagacttattcatcaaagctgcatatgcttattatcattgaatcaaccccaacacgcaaccatagttgctgttgccttatatgagtcttgaacaccactccattgaacacgaaaagatactgcgtggtagaagcgggagctgaagcaaggggtgagagtcaattggaccaaagaaggctatgctggcttatcagagggacctgcacagggaggtggttctaaaaggacctgacagtggcctgcacctcaaggctaccgacctggagatcggatacggatgggtgcgggacaccgacag

SEQ ID NO: 86425 - DNA, 368 bp, Glycine max
  Clone ID: PAT_MRT3847_49053C.1
gggcccaaaagaaaaagggggggttgaacaagaaactagattgcccgagcgggttttggggggaaactgaataaaaaaacacacaggggggctaaagaggggttttttaaaccatagacatttataaaaaaaggggctgggtctcctaccccaaagggggggaaagggttctccaccctcaaaaaagcccggggggaaggtagctacaagtttttccaacgggttggctccattaaggagccctttggggttaaacggaaggtttgggcaaggaaatttttccaccagcttcaccaggggggtccccacgggggggtttctgggggggttgaaattcagcccttaaaggatccctcccccgcgggaaa

SEQ ID NO: 86426 - DNA, 332 bp, Glycine max
  Clone ID: PAT_MRT3847_49054C.1
gcgctgagagcaacacgcctcgagcccacactcgcttacatgcattgctttgctcggctcagattggccgcgatacatcattgacacttactagcggatcctgacttttagcgatgtgtggaatatgtatacataccatgatatatataaccgcactcacatcatatatcggatgagaggcgacctggaaaaatgccgactcaatgagcgataaaggtgcttgggccatattttgctcctgctgtacggggaggaccggtcctcacagcgcacttattgctgtgttctaaaacactgcgaggaatttggtggggactggggaagagatactt

SEQ ID NO: 86427 - DNA, 405 bp, Glycine max
  unsure (1)..(405): unsure at all n locations
  Clone ID: PAT_MRT3847_49055C.1
ttcaagaacaatttattgcacaaatattgactttaaccttactcaanccnatatcaaacacggctttttatcaatttctaaacaccctcaacactttaaacttctattatattaccatcattcaactctaattgcttttatttaattcacactttctcacatttcaattacatctctaatctgtattataatcattctgcgttcacttcccataattctaattccatccaatacaccacttctatcacatacttcctcccctactatgcactgaatcaactttccatgtttcttatattaattactccttacatatatttacatatatatatatacatataaacaactcttttctaattaacattttccatctacttcatacttttatcctcatatcttacaata

SEQ ID NO: 86428 - DNA, 330 bp, Glycine max
  Clone ID: PAT_MRT3847_49056C.1
gattgacatatttttttacaaagtgtaaacagttggatttttacaagctgggatcggtgggggcaacaacagaaaaaaccaaacaaaagaggtccaaaccgtgggaaaatctctaccgggggaaccccttatcacctaggaaagggcgaccccccacggggggctttcaggcctggagggcccaaaaaaattgacaacaggcaaaaaggggggggggcccaattggggagagggggagggggtttttcacccgaggcaaaaacgggaaacacccttatttctccaaaacggggaaaaaatacaagctgatttttggcccaaaaacagctt

SEQ ID NO: 86429 - DNA, 495 bp, Glycine max
  Clone ID: PAT_MRT3847_49057C.1
agggcacccaaatttttcccttactcatttaaggggctaatttttcgcaatttgggaaacacatttgctttaagtttttcccgcccaaaataatacgggcacggattattttttggtccccaaggggggattaatattaaatgggacatcccccatggaaaacatgcggggacaagcgggaataaaagttgaataaccccaccctgggtttttttttcaaaaatgttaaacgggtaaaaaattaccccttttccgcacagtgcttgacatgagcacttaaaggggctgattgttgaagctttccaaggtcaatgttaccattgcctgtggcccaaaaggccttggcaaccccagaggcttttccttcccgaaaaaagagggccagaaccctggaatggtttttaaaacccccctgggatttcccctggctttggagggggggtcctaaacctttagcactttttttttttttaaaaggatcttttttatttgggg

SEQ ID NO: 86430 - DNA, 292 bp, Glycine max
  Clone ID: PAT_MRT3847_49058C.1
atagcaagattatcagtttcatgcgaacctaaaaacaaaaagggtcatcaggatatataacaaaaggcattaccattggtgatgctttactataaaccacattattgctgctcctgccaccgttcattgttagcattggcaaggcaaccccgctctttcaggttaaaaggaaaattccatgggatcttaaaccctatctcgtcgttcatagagagcaagcctggcgatggactgttccatatatttacggccattaagacccaccttcagagatctgatgagttgaaggacc

SEQ ID NO: 86431 - DNA, 330 bp, Glycine max
  Clone ID: PAT_MRT3847_49059C.1
cccacacttaggctatttccttctgaatgtatcaaatttggcttttgttggaaactaaggcctaatcaaactggcgaagatcacagttgtcgcgctactaaccattctggactatatgcataatattccgttatcgtctgaactgctcatgtgatcaggaaaaaacccaactgattctaccgtgtgtgctgataaagataagaagttgccgagatgccgtatgactgatacccgcgcatatgaagcagagcctggatttaccatgaagtgtacaggtctgggactatactatgaaacgactgatgaacctctcaaaagttttaagggaga

SEQ ID NO: 86432 - DNA, 171 bp, Glycine max
  Clone ID: PAT_MRT3847_4905C.1
ttcggttttaggcaagatcgggggattcacccgtgaacctttgtcatctgttcgtaatgccaattgaaaggttcaactatggatggaaggtttggctccggaaggaccacagttgtacttggccccaaaaatgtggcaaggttgggggaatccccttcaactgttgggcaa

SEQ ID NO: 86433 - DNA, 221 bp, Glycine max
  Clone ID: PAT_MRT3847_49060C.1
cattggatctaacatcacaaaaataggaggtatttgcctttagaagggtatctctactggtggtagctgaccatgcattttcaacttctgaatttgtggttgagggttcatgtcttagacccttcccattaggctcaggtatttccacgtcaattcatcagggggctaaggaccatcatgcaatccccatgtctttggggtggcggcatgtaactgacttt

SEQ ID NO: 86434 - DNA, 1182 bp, Glycine max
  Clone ID: PAT_MRT3847_49061C.1
gccaatggccggtgatgatgttattgttgttcactctgaggagcgagctagaatgcttagttctggtaggcaaaggaaatatgaggagaacaggcttaggaataagatgatacaggacaagccaactacttcagatgattccaaggaggttccgcagtgggttgaaatgccagtaatagtaaaagcagatgttcagggaactgttcaagccgtcactgatgcattgaaaactttaaatagtgctcaggttttcgtaaatgttgtccatgttggcgctgggcctatttctcaatctgatctagacttagcacaagcttgtggtgcttgcatagttggattcaatgtaaaaagtccacctactgctcttagtcaggaagcagctcgtgccggtatcaagatagttctgcaccgtgtaatttaccacctcttggaagacataggcaatttgataatagagagggcccctgggacttctgaaacccatgttgctgggcaagcagaagtgctgaatatctttgaaatcaaagggagcaagtccaaggggcctgatgttaagatagcgggttgtcgtgttatcgatggttctgtgacaagatcagcaaccctgaggcttcttaggagtggggaagttgtgtttgaaggactttgtacatcgcttaagcgggagaaacaggatgtggattctgtgaaaaagggaactgagtgtggagtagtaatcaataattggtgtgatttccagattggagacgttattcagtgcttggaacaggtcataaggaagcccaagttcattaagtcagagagtggtgctgttcgaatcgagtgctgatcaagttagttgatgattcttcaacgcacattttttataacattacactgagccgacaaaataacctcgtatgggtggattgttagagtaagtatattttgttgcactgaaagaaagtgtaattaaattttgagcactatttgaaacgcctagtagttattttttgacatgtgctttgcaagaacaatagtcagggttttagaattataagtttcatcttccttcagttttataattccttaaattaaaaaaaacttttattgtaattatgaaaataataatgagaccataaataataataataataaggagattcctaaatggataaaatgtcataaaatttcaaaaaaaaa

SEQ ID NO: 86435 - DNA, 459 bp, Glycine max
  Clone ID: PAT_MRT3847_49062C.1
atactgtgaaaaagggaactgagtgtggagtagtaatcagcaattggtatgatttccagattggagacgttattcagtgcttggaacaggtcataaggaagccccagttcattaagtccgaaagtggtgctgttcgaattgagtgctgatcaagttagttgatgatccttcaacacacattttttgtgagaacaattacactgagccaacaaaataacctcgtatgggtggattattagagtaagtaatttttgttgtactaaaagaaagtgtgattaaattttgaggcactatttgaaacgcctagtagttatactagtattttttgacatgtgctttgcaggaacaatagtccgggtttttaaattaagcttaaatgtaattatcatcttcctattttgtttgatttgtaattttaatctttttattttaaaattgagatatttaattttttttttt

SEQ ID NO: 86436 - DNA, 475 bp, Glycine max
  unsure (1)..(475): unsure at all n locations
  Clone ID: PAT_MRT3847_49063C.1
ctactattggcttgagaggagcaatagaactatctgtgacttactgtcccatgacacatgacatgctgcatggtgcagattactccacngagcttcatactcaagtgcaggatgacgccacgcggatctgatatgttccatgttgctacgaacactacgtcctgaatacattgaggagctggctgatatggaaactaatccgggcaaagtgtctcttggtgatgatatggtcctactggtactatgctatcagatgtcgtgtcactgtaccaaatgcatcttgatgatgcacatggtgcttactccagtcttcgaactgatacatagtagattcttcttacatagagagatgtggcaataggactcaatcttgctgctactcatcttgtgaaaggtgtgttaaagaagcccgcctcgagagtgattcctgacattgcatgtgtgagtctatccccatctatgaagaagatcatta

SEQ ID NO: 86437 - DNA, 523 bp, Glycine max
  Clone ID: PAT_MRT3847_49064C.1
ttttttttttttttttttttttttttttttttttttttttttttttttggggggggggaaaaaaatttagttttaggttcaacctcagtttggccattgaattcctcaaatccaatattgcgcgtaagaaataaggacgagcccgattaaaataggtggccctaccctcacttttttttttagaaacaaaaaaatattggcgggttttattccattggaagacaattcaggggtaaccaaattttcaactacaagttggaatttttaagccccagatcccttaacgcatttgttgcggcatccttacagttgggatggggtggctttggtttccttatggttttctcaactccattattaagcaggaataggtctgttccttggaattctcattacaagattttctgatctttaaacaggagtttttttgcatttggtgtgccccacgaaattttttcctggctttgacaccagggtcccccacccccctttattgggccgggcttcttttgttggggtttct

SEQ ID NO: 86438 - DNA, 342 bp, Glycine max
  Clone ID: PAT_MRT3847_49065C.1
ggctcgagccttatcatagcgcagacaaaccacaatcattatcactagaggactgctaatgagcggggaatttaaaagcaaatatgcccttcatatgttaccggtgaaaattgaaggctataacgatagagaattgttaaggctaagcagtactgacaaacaaagctgagtattaggaatgctgataattgataatgccaaacaatatagatagaaccagatggaaggtgcagctgaagacgacaggaacattgactagatgtgttgcttactagcaacatactatctctgagtatggacaaaacatggagttggcgaatatatgactgaaatataaactac

SEQ ID NO: 86439 - DNA, 642 bp, Glycine max
  Clone ID: PAT_MRT3847_49066C.1
gcagtagtacactagtacagtgaactcttctgttcattttctttgcaaccaccacgaaagcttcgttatcatcggcaactacaagcatggtgaaagctatcagagtttaccacttggcgaccctgaggttctgaagtgggaggatgtggaaatcggagagccgtgtgaggaacaaagctgttggggttaatttcattgatgtctactttcgcactggggtttataaagtcccctccttaccttacactccagtcatcaggtacacctgattcagttccattatcatccctggctacaaagtccttgttcactttaaagcattataatgtcactcgggatgagctattggaggctgcttgagaggtgtttgccaaggttgcttctggagtcttaaaggtgtgggctaatcggacttacccattgtctgaggcagcaaaagcacatgaagacttggagaatcagaagaccatgggatctgttgtgttgctaccctaaggatatcaattgtacataggtcttaaacaccaagtccatgtttgattcctcttgagaggaactatggtttgtgatactataactattgtatgcggtatgccgctgaaaatcacaggtctttgttcttaaaaaaattggtttttttaa

SEQ ID NO: 86440 - DNA, 305 bp, Glycine max
  unsure (1)..(305): unsure at all n locations
  Clone ID: PAT_MRT3847_49067C.1
cttattaaactatgatattaccatgaattggcattaatcaaaattatcttcgtgtgcaatcatatttatcaaagtacattaccaaaaattatgcatcaggatccattaccaaagttagaaagtttattagtgtagctaagagtagcagttctcattgcccagctggcagatgttaatacacgtggcaaacaattattagatagattcattttgataagtgatgttcagttagttataactaatgcagagttatgctattgtaacagntacagacttgtgataagataaccccctctctctttata

SEQ ID NO: 86441 - DNA, 257 bp, Glycine max
  Clone ID: PAT_MRT3847_49068C.1
gaccaggacctccctattctgctcaagttcataggttgggtttttgagtatattcccagattcaagatctaaaacccaacctatgattttgaccatgacctccctattctgctcatgtgcaagaagacgagtacagaacagctattcggttctgtcagttcaagaaattctctacttgagctttgttgacctgagggtaacatacatgggagagatgacgttgttgtgagcttgacatgtagcacgaggacagacac

SEQ ID NO: 86442 - DNA, 1554 bp, Glycine max
  Clone ID: PAT_MRT3847_49069C.1
cccacgcgttcgcccacgcgtccgcctatgtaaacgacacttgatggtttttgcgtttaacctaagaaaatcgcccaagacgacacaaagtatccaaaggaagttcccactaaccagaggaacgagtgttgggaagcaagtagtagtagcagaagagggtggaaaatcaaaaatgggagaagagagagaagatccacagaagctaaagcgattagcggcggattcatacgactacgacaacgactctcgatggcccgattactggaacaacgttctcatccctccccacatggcctctcgtgacgacgtcgtttcccacttcaagcgcaagttctaccagcgctacgttgatcctgattttgtggtggagccaatgtctgttggtggcagttcatcccagccagtgcgttcatcaactacctcctcatcgtcgcccctgacaaataatcaacctcgtgcaagaagttctggatcaactaatagaacttcagggacatccacaactgcaggtccaggtcctagtccaacacctttgcgttgggatcggcagacagttctattttctgtcaatgcttgggtttttgttgtggcttttcttgcagccattccactggtaccaaagcatctttctcatagggcttatcgcctttgttttctgggcactctttgctcttctttgtactcattgtactcacaatatgggaaaccaagagcatggaattggcaggccttgcaagtttactttcagtcaataattgcttcgaaggattttttatacttcatctactgccttacatttgttacatctcatctttgccttaaatttgctttgatccctatcttatgttggtcctttgaacatgttgccaagttcctttgtcgtaatttcagtcgctctaccttgtacaggaagtacttggaagagccttgtgtttgggtggagtcaaacagttctaccctcaatatagtgacatcacatgccgagattggacttggattcttgctgataatctcattgttctcgtggcagcggaacataatacaagcattcatgtactggcagcttttgaagctcatgtatcatattcctgttaccgccccttaccatcagagtgtttgggcccaaattgggaggtcggttaatccactcatccaacgccatgcgccatttttcaagactcctatatctacaattcaaagatggtggctaaggtagaaggtcggctaaaatgtttcaatatgaaacactcaagtaactaattttcagttcctttttcttaaattacaagattggtttcacatcatgtggccagttgctcatattacaaagaactgacgtagattttgggttgaataatgttataaccccatgaatcttagtttgattgattcgaagaactgacggtagatttggggttgaataatgttataacacaatgaatcttagtttgattgagtagtgtgtttattttatttccacttaagcattcattattcgtactgatccatgcttaaacatgtagttggtaatttgattatttacgagaatttgtt

SEQ ID NO: 86443 - DNA, 883 bp, Glycine max
  Clone ID: PAT_MRT3847_4906C.1
atttagagagggacctcactttgtattatttttttattgataagaataaaaaatagatacaagagaatttacaagttagaacaactcacacagtatataatgagagcagatgctttaattgacagcacaccccttttagcaatctatcttgagtatcctctatatttttcttgagttaattactagtggttacagaaaggaacatgatcacaacgttaaaaacaataaacctatatatcaacattaattgaaaaataatttacagcaacataggaaagtatcatgcccaaattgcaagtgaagacatcaatccagccccaaggaaaagcagacagtaacatattatctgaaacctaaagttacaacgcattttcttgctaagaaaatctgcagctattaagtccactaaagccatatacactaaaatcccagctgacaaggcgtccaagatgccttcagtgatgagtgctactggactgtaagggttaaaaattgaagcaacaccagctcccgttgcttcgccacgtggcgttgttagtgcaaaaaaacatgacattattgttgctgataaggtcttgaattgggcttgggagatgcaaccaccaagtgcaaatccttcaaagaattgatggaaggataatgccacaattaggggtttcatggtacaggggctttgtgaaactcctagagataacccaattatcatcgaatgtgatacaatcccaagttccaatacctgtgaaacgacgacgtgtcgaacactactttccacatcatcgccgtcgtgagagtgggagtgtcttccccctcgcccaagatccttaacctccacgattcccgtttccaacaacgcctcgtcacaaccctcatcataatcaacaac

SEQ ID NO: 86444 - DNA, 431 bp, Glycine max
  Clone ID: PAT_MRT3847_49070C.1
agcggaacataatacaagcattcatgtactggcagcttctgaagctcatgtatcatattcctgttaccgccccttaccatcagagtgtttgggcccaaattgggaggtcggttaatccgctcatccaacgccatgcgccattcttgaagactcctatatctacaattcaaagatggtggctaaggtagaaggttggctaaaatgttttcatatggaacaccaagtatacattttctgttcctttttcttaaattacgagattggtttgacatcatgtggccagttggtcatgttacaaagaaccgaagtagattttgggatgaataatcttataacaccatgaatcttagttagtttgattgaatagtgtgtttatttacacttcagcattcattattcgtattgatccatgcttaagaatgtagttgata

SEQ ID NO: 86445 - DNA, 533 bp, Glycine max
  Clone ID: PAT_MRT3847_49071C.1
gcaaagacgaaggatgcttatgggccaaggggggaaaaaaaaagaacgggcaaagaaagcccatttttttggagacgaacaaaacccgttgtaaaaaaaaaagccctagttcaaattaaaggggagaaaagaagaacccccccctaagttaaaaaggggaaaacagggggcccaaaaaacaccccccctttttaaaaaagcccggttggggaaaaaaacccctttaaaggggggggcggggaaaatttttttaaacaaaaaaaatcagttgagagggaaaagccccacccccccacacaagaagggcaaaacacgggaacccccaaaaaggggaacttcagggcccttgtaaaaagagacaactttccccccccctgtgttaaaaaaaaaaaatgaaaaagatacacccaaaaacgaactgtgaaaaaatggttccaccaaaccaagaaagaaccccccccaggttttgggaaaagggccaagtgtttttgggaaaccccactttatttttcctaaaataaacccaaaaaggg

SEQ ID NO: 86446 - DNA, 396 bp, Glycine max
  Clone ID: PAT_MRT3847_49072C.1
gcgccggctgcgcgcgccgcggacggaatggctggaccgacccacgcgttcgtctacgggtgcgaggagatgtgtgtatagataaggctgcatgggcgaatccacatctaaaatcagagggccattagcaagtggtatattgcaggccattgagcgggaccggtcaagacgaccaaggtactagacggtggatccgtcagctattaacatggaaagaggaacattgggatcatgggggatatccagaaaactattgtcacctaagcggtaatgaaagattccgccgatgctacaaatgcagaggtcacagggggaggactactgtatgcatatagtcagctgtcacacaccaagtggtacattggaaggtggcgacgacggtagcctcgaatctaa

SEQ ID NO: 86447 - DNA, 410 bp, Glycine max
  Clone ID: PAT_MRT3847_49073C.1
gctgaacagaccgtggaccgtcttaaggagaaaacgcctgcgattgaagagagagaccaatgagcagacggtgctgataaggggtcttccatataaacaatgaatcctataaatagctgagaatgactaacaacattaggaggcagctgataaactgataaagaaatgctgcgaagaaccagtggtacattggtagatttctgaggcctgatggatggtatatataggacacaactgatatgccgtgccctgcacaacaggtgcaccatatcatatcataggcgaacatgccagtataacacaggtactggtacaaccattcagatacgaaccactgacatgcagatcatcgaaattaaacgcctattataataatgaaacagatcctcgaacacctatgcaagtgcatg

SEQ ID NO: 86448 - DNA, 795 bp, Glycine max
  Clone ID: PAT_MRT3847_49074C.1
ggattactccagttctttactcagtgtaggtgtaatgtacgaaaaatcgatcttcgtttgcctctagacctcaacaaccaccatctctcagagatggcgaggaatttcgaggggctaacgagcgttaggcttcagagctgttgcctcgttagcggcgagggcttgaaggccctcgccgcagcgttgaaaggcctggaagaattggcgcttgttaactgtgacgtggttgaaacagaaccgggtctgcttgccacattggggcagcatttgaagaaattgacgatgctcgacttgtcctaccgcgaaatgatgaacgtcaaggagttcgtttcgatgatcgtttcgtgcgttcatttgattgacttgaaggtgagaggatgcaaggggctcaccagttttgccatggcttccattctcaggagctgcaagcagctccagaatgtggatgttgtcaactgctccgggattcactctgaggctgttgagttgtttgttaagaattgttgtcgtttgagaagaatggaggttgaggggagcaagctctctgatgctgcgaaaatgtgggcggcgagtaagtttattgaagttgttgttgtgtagttggaatggatggtgaatgaagcaagtgtatattttctctctagttttgaataaacacgtatacttcacagttcgcacacctgattgatgtgtttatccattcatttctgtattttatgcttggaaatcttattaaatatatgtaagaataaaatatgttttcctgatatgaaaatgttggtaatttgtttttgt

SEQ ID NO: 86449 - DNA, 763 bp, Glycine max
  unsure (1)..(763): unsure at all n locations
  Clone ID: PAT_MRT3847_49075C.1
aancggctcgagctggggatcatcatggttgcccctatcgacatttcagtgaagagaacctaagagctgctcttagcggaatgggggtaaacagtcaagcaatggaagatgtgatggacaaagtgagaaatagacattatcagttggcttgcaccttgacatttgaagctcttcatggcatgccgtgtgatgcagggattaaccatccaaatcaatacttcagtgacagtcaaaagatattaaagccaaagaaggattcttcagcctaagtattttagttattgcagaagactggtgctggggcctttctcagttgtgtcacacgttggtgcctctagccatggatttgcaaagagacaatgtggtaaaatcttaaatgtagcttctaaagcagtttggaggcaggagttggaatccgagtcatgtattatcctgaaagtctgtttgaaaatacagcacaattagatattctttgtagtctttgtagccaaacaattgcatgtaaccctgttaattcaggtaggcgtgaaatgggaagtattgtagcataattatgcgatgaaactgtacagtataaaaatgacactcatgaatcatggagtttcggaaactgaggcaatcatttaagccttcccaactcaaatttagtaggggaacctttcaagataggtgcaattaacttttgatatgggttatatgatgccacaaatattccaacttccggatgttaggtacttataatacgcagtaaatttaatcattt

SEQ ID NO: 86450 - DNA, 444 bp, Glycine max
  Clone ID: PAT_MRT3847_49076C.1
ggtttaattttttttttttttttttttttttttttttttttttaaaaaaatatttttttttttttttttataaaaaaaaaacccctacgggctgggaaaatcccgggaaaaaaaaagttgggatattgttaaataaaaaacaaaaactccctcccttaaagggggctgcgaccaaaaaaagcttttttaaagttcaaacgccaccccatgacaggggggagggaccccccgtccccattgaaaggacctgccggttcaggggcggggaccagggaaacctgaaatacccaatggttggaattaaggagggaaagcgggctgaaacaccgggatttgaaaccccaccaaagacgggggggggggatattttaggcgatagaacttaaaacccccgggaccaaaaagtgggagaaggggggaaacccggaatcccggcccgtttct

SEQ ID NO: 86451 - DNA, 348 bp, Glycine max
  unsure (1)..(348): unsure at all n locations
  Clone ID: PAT_MRT3847_49077C.1
acgagtgaatggatccttaaggctcttggatgtgtgcacagccgctaaagactctctattgcacacaaaagagtgcatgcgagaacttcaatcagttatgagaaggagaaagggaggtgaagtggagctcaaggcagaggttaagaagttcttgatttcaaggaaggtggtgaaaaaggccatctcaaaagccttggcaaatttgaagggtactagaaaaaattgcaacatctcatctgcaaacaaagacaatncaattggttagcttattagaaagcgtgggaaggtgnatcactctatcaacattttcagtcactacttcaatttgatctcagggactacacaatc

SEQ ID NO: 86452 - DNA, 383 bp, Glycine max
  Clone ID: PAT_MRT3847_49078C.1
ctctctagcttgcgtgcgtaacataatcgattaagaagctgctatagtgattcgaggtcagggggttgcgaagatggagcgcagcagtcactccaatctccaaatatggatcgtatagtcatttgaatttcgtgaacgacatctcgcgccaaacctacgcctgagtcgcagcccactccaacgtatagaggacaaacctcaccggcccgtggacaacctagatgacatgtatgggtctataccctgctcgttgtcctggccccaagactaacgcctcaaacttgaagaacctgatgatcaactcatcaagcgtataatgctcaaactcatgctggattatagtaagcatagcaagtcaattcgtgtggctaatgttgtgtacc

SEQ ID NO: 86453 - DNA, 526 bp, Glycine max
  unsure (1)..(526): unsure at all n locations
  Clone ID: PAT_MRT3847_49079C.1
agtangtttatacagagnncaatnggagaaataggatncgtcatttcaattctctctctctctctttcaattcgcagagaggttcagtttgtgtcatgtgcatacagcaatcggattgtttggatcagaagtcaattcgaggaggaacaaagaacaagtgaataaatgaagaggagacgacaatgaatgaaaaagtgaagagacagtgggcctccctgcgtcagattggtttgtcccagaatcgcacgattcatgtgcgggatgtgattcaagcaattcatgtgtgatccgtattgccaaggccatgaatcatatcatattgcatgtatcatatcgtgaatcgtatgatactgataacaatgcctaggatccatgaactccaagcaaccgagagaactattgtctgcatggtcctttcattgccccatgcaagaatctcttgttgatcataggccatggataagggatgtccgttttgtgatgaacttttgactgaatgtgtgacttcagtatttgcgaatatcat

SEQ ID NO: 86454 - DNA, 300 bp, Glycine max
  Clone ID: PAT_MRT3847_4907C.1
atatcacaccatatctacaagaattgaaacagtggactcacaacaagtagcacctacttagtggtgcttgctgcttttgtctcagcctcaacaagaaaaaaaaaggtagcatcaatgtacccagacaagtgtagtcttgtgtgttcaaatgccacatggccttgagcaaattgaagcaatgaactacaagttttcttgcaacagcattaagagccaaaggaggcttcaaccctaccatattacacactacattttcaagaaacatgtatggagcccaccaatgaatttccagattgatat

SEQ ID NO: 86455 - DNA, 508 bp, Glycine max
  Clone ID: PAT_MRT3847_49080C.1
caggatattgtgaatgctatttgtgacgatgatgacatcaaagccatatcttttgttggttcaaatgttgctggaatgcacatatatgctagagctgcagctaaagggaaacgtgttcaggctaatatgggggccaaaaatcatgcagttgtaatgcctgatgctagtgttgatgctactgtaaatgctttagttgctgcaggttttggtgctgctggacaaaggtgcatggctctcagcactgttgttttttgtggagactcaaaactgtggtatccttctctaccatattgttattcaatttgatttattattatttttgtggtatcatcttatgcttgaagcaattttatgctcttcctctggtgcttgttccaaaatgaactggatgtctttggtgtgtaccaaactgaatcaccactcttcctttactaagacaattcaacatctctaaaatataatcacaatttgtgagcattcttactgctgtgaaaaatagtagggatga

SEQ ID NO: 86456 - DNA, 352 bp, Glycine max
  Clone ID: PAT_MRT3847_49081C.1
ggattgaggtgagacgctatttacgatgtagggaggagtctcctacgcgcgcatgccttgggtggaaaattcgtctgctgaaggaccacttcgccatgtttgagcttcacgacaccgtcacgagcatcccactatgcgctgtgcgagagcgatgatccgcggactgtgccgacaggaatcatcgtccttgtgatgatccgtgccgactccgtagggcgcagtgacgatgcatatccacacagggtgggccgtcaagccctgattagatagtgcgcgatgcccatgctctaatcacgtgactgcgacacgctgcgaatgggtcagagagagctagttatgctccgtcaagttt

SEQ ID NO: 86457 - DNA, 228 bp, Glycine max
  Clone ID: PAT_MRT3847_49082C.1
gtgaatgcgtataatacgattctagagaaatttgcgccaacatgcagtgtgtgtacagcaccgtcatattgtcgacgacggacgagctcctagtcgtcggctgccgaactacgtcctcgaagacgacggcagaggagctgtagacgcgcttcgaggagaagaacctctgcgacgtgtcctgagaagtctgagagcacgtccggctggattatacccaccacatcgagt

SEQ ID NO: 86458 - DNA, 281 bp, Glycine max
  unsure (1)..(281): unsure at all n locations
  Clone ID: PAT_MRT3847_49083C.1
ttggttntgnagtaagtgaggtgaggtcccanaatggtgaagataactctgggtacttcgatgactcttttggtgttgcctctnttaaggnttatttggcagagttccatgcaactctgatttncgtggtcgctggtgttngttcagccatcgcttacaacgagcttacnanagatgcagccttggatccaacggggctggtggcagtagctgtggcccatgcatttgcactgtttgtatgtgtctccggcgcagccaacatctcggggtggccatttgaa

SEQ ID NO: 86459 - DNA, 618 bp, Glycine max
  Clone ID: PAT_MRT3847_49084C.1
gtcaggacactagcagcagttcagcttttatgatagtttagttcaaaacaagaatagaactatcatggcattcttgtcatttttcatgtacaacaacactaatggaaataatgtgttgcatgtgatgtatagtatatgtggccgcatgattttttttttaattcttaaatgctcttacaggggaaaaaaaaaaaaaaaaaaaaaaaaaaaaaaaaaaaaaaaaaaaaaaaaaaaaaaaaaaaaaaaaaaaaaaaaaaaaaaaaaaaaaggggcggcccccccctagggacctcgccaccccggaattaaattccggcccggaccctgggggcgacccatttttccttatagggagccgtttaaaacctgggggaaacaagggccaaagctgttccctggggaaaattgttacccgttaacatttccccacaaaaaacaacccgaaaccaaaaagggaaaacccggggggccctaaggagggacctacctccctttattggggtggccctcactgcccgttttccagtgggaaaacctgccggcccacctgctttaagaaatcggccaccccccgggaaaaggcggttggctattggggccccagggtgggtttttttt

SEQ ID NO: 86460 - DNA, 263 bp, Glycine max
  Clone ID: PAT_MRT3847_49085C.1
aaccttaatcctgagggggggcgcttttttttttttttttttttatttttttttagaagcatacgaatgaagcgtaacattaatgggtgttgacctgatatgcgggagcaattaaacaaatcaccggacaaatttcacatccaaaggatatttttttcaccatcaagtttttgtgttttgtgaaattgctacccttaccacttgttggagctccacattacaagttcattaaagtgtgttgttcatacaaccccaagtaatca

SEQ ID NO: 86461 - DNA, 265 bp, Glycine max
  unsure (1)..(265): unsure at all n locations
  Clone ID: PAT_MRT3847_49086C.1
cagtcgatggtgattgnaaatgttgcgggaaaaagataaaggatcatcgaaaaactgatgcaggtcatcggaataagtgcgatgactagaagggagacggttttcgggattccctcaacctagctctcntacaatgtaaaatgagagannatatagagggatatttgagtgtaaactgtgtgttagagtacacaacggatgcntgtttatataggataattacttaattatncctaaatcggggaattttnccccccncnaaaag

SEQ ID NO: 86462 - DNA, 422 bp, Glycine max
  Clone ID: PAT_MRT3847_49087C.1
ggctcgaggatttgagcacattgacattcattagcgaaccaagctcatgatcgtcgcagcttatcagggtgcggggataactacccatttttactttactcaatatcgcattggttgcaactcatgctggtttaccccctgaagcatactggaagtcggtgctttctactacgctaatgccacaggccatcactgatatcctttactctgattgtgaggtagagcaaagcagcctatagcatgttggaggtggatgcgtgaacttgcatacatgaaaaggaggcggtacaggctgcacttgtaactgttggtcgaaaaggatgcggaggcgtaaacgcgcttgctggccacacgggaaagccagagcatgtatcacttggctcaaagtccctatttgattacgtctacgccgccacggatac

SEQ ID NO: 86463 - DNA, 237 bp, Glycine max
  Clone ID: PAT_MRT3847_49088C.1
aaaaaaaaacccaaaattggtttcgctttctctcaggggcccctagccccatccagatttttaaacaaaaaatcgtttatttatctaaaggggaggggggggcccgaaaaggaagaatcaccccgcgaggcgggtagtttgtttttttgtacccctgaggaaacactattgcccccctggctctcccagtaataatttttaaaaaacaggggagaaaccctgggtgggtttgtaccc

SEQ ID NO: 86464 - DNA, 494 bp, Glycine max
  Clone ID: PAT_MRT3847_49089C.1
atccgcctcatccaagtgaatatgtgttccttcaaaacggggttcaatctgcacatcactctccttgcctcggatgcaacacccatcatctcatataacagattgcccaaatcaactgtccacaaactttctagaaattgccaagaaacctgaagtatttgattggatggcgaaaatcagaaggaagattcatgagaatccagaattgggttatgaggaatttgagaccagtaaactcattttgagaggaattggataaactgggtgtaccctataaacacccagttgctgtcacttggtattattggcttcattgggacaggaaagtcaccttttgttgcaataagaactgatctgggtgcaccttccatccacgaaatggtggagtgggagcacaagaataaagtaccttgaaagatgcacgcatggggtcatgaagctcaagtccctatgccttttgggggcacaaaagattctcaaaccacatgaaaaac

SEQ ID NO: 86465 - DNA, 1469 bp, Glycine max
  Clone ID: PAT_MRT3847_4908C.1
tttcttgtaaaagtgcttttaaggagcctttggatctcattaggttcagcctcgacgagcgtatctatgtcaaactccgttccgacagagagcttcgtggcaaacttcacgcttatgatcagcatcttaatatgattcttggcgatgttgaagaaatcattactacagtggaaatcgatgatgagacatacgaagaaattgtgaggactacaaagcggacagttcctttcctgtttgtcaggggagatggggtgatattggtttccccgccattgaggaccgcatgactggactgatgaactatgtgatcatttcaataacaagtgtcactgtttatgaaattgtataactttaagtagtgatctcatttcatatgattaggttagttactcaattggcctcgtgtgctagagatttctgttagacagtcaattttcaattatctttgtaacatgagagaatcatggcatgcacataaacaaggatttttgctgcaatgtggagctgacattatatattagtggctccataaaaagtgttggtcatgattcctgatttaaaaaaaaaaaaaaaaaaaaaaaaaaaaaaaaaaaaaaaaaaaaaaaaaaaaaaaaaaaaaaaaaaaaaaaaaaaaaaaaaaaaaaaaaaaaaaaaggggcggccgttttaaaaaatccggctcgagcggctcgtgcatgtaattgaaatctgggtttgttgcaatagttcgcaagtttgtgcctttcggacttccctaatgatatgccctatgcttatgatcagcatcttaatatgattcttggtgatgttgaataaattgttactacagtggaaatcgatgatgagacatacgaagaaattgtgaggactacaaagcggacagttcctttcctgtttgtcaggggagatggggtgatattggtttccccgccattgaggactgcatgactggactgatgaactatgtgatcattttaataacaagtgtcactgttatgaaattgtataacttaagtagtgatctcatttcatatgattaggttagttactcaattggcctgtgtgctagagatttctgttaaacagtcagttttcaattatctttgtagcatgagagaatcatggtatgcacataaacgattagctgctgtgtggagctgacattatatattagtggctccataaaaagtgtttcatgattcctgattttatgtcttcttcatgttttacttttagttccaatagaagatatgtgaactgagatgatatttaagtcggtttattcattggaagcttgccgtctaccaagggcacgtttgagtacaatttaatgctattatctttacgacaatctctatatctactatgcttgattgtttagcataggggagtgcgtttaatcagtgaaagagtcacgtatcgtaaaattagtccctacaagcccatatctcaaagtcctctcaaaccgc

SEQ ID NO: 86466 - DNA, 687 bp, Glycine max
  Clone ID: PAT_MRT3847_49090C.1
cccacgcgtccgcaaaaacactcatcactctatctctctcaaaagtgaaaatgtgtgggggtgctataatttctgatttcatagacgtgaatttgaacagtggtcggaaattgaccacccacaacacccatcatcagcttcacactttctctgatttccacgccacctcttcttccaaacatcaaccatcctaccaggatccaaacctccctaggcctcctccgcttccaaacaaccaaggagtgaagttgaaggctttgactttgaacactggtcgagtacggaagaacgtgtacagaggaataaggcaaaggccatgggggaagtgggctgcagaaataagggacccacgtaagggtgtgcgtgtgtggctgggtactttcaacactgctgaagaagctgctcgtgcttacgacaatgccgccaagcgcatccgcggagacaaggccaagctcaactttcccgacagcaagaacccatgtcttaatccctttcaactcaaacacctcttttccaacctcgaatccttccttggtttggactcgctctaatcactcccattcttgtctgcttcttttccttaactctttcaaattatcctactgtaatatttataactatgtctacatctttcctcctttttcttgcctcttctttttcactaataatgagtattgtttatataaa

SEQ ID NO: 86467 - DNA, 273 bp, Glycine max
  Clone ID: PAT_MRT3847_49091C.1
catgtgtgcctcaaggaatttcttacatgtggtttttgagaaatattagcaaagtactccctaaaacacttattaacacacttttttagtacaatattctctattattagtagaaatttattgaaaactacataaacttagagtcctacttcatatttaactagtcttaattattcatgattttataatttttaataaattttaactaataataaaaaatgtgttaaaagatatattattaatactcctttgatttatcgattaaggttttaa

SEQ ID NO: 86468 - DNA, 571 bp, Glycine max
  Clone ID: PAT_MRT3847_49092C.1
ctggggtttttggggtttttttttttttttttttttggggttttttttttttttttttttttttttttttttttttttttcttacccaaacccggcccccagccaaacaggagcccaggaaacaaaaaacgccccgcccaaaagcaacaaagaaacgggggggggggggcacccctgcaaaataccaaacaaaaaaaataataaaaaaaaacactcaactgggcccccccaaccatattattcttggggccccggcccacccgggccccgaaaatgatggtcagcccgggggccaaaccaacaaaagccctcattaagggtgcccccattggcccccgcttagccaatgcctccgccactggggaaccccgcggaaccagaggagcccgggggaggcacctggggaggggagcaaccggggggaaagaggggaactttcccacaatgaccacgttaaacccaattcgaggggggcccacggcaagaaggcccgagcccaaaaaaagaagggcgcccaagagggaaaccaaacatgggggggcgaaaacaaagggggcttttccacccagga

SEQ ID NO: 86469 - DNA, 444 bp, Glycine max
  Clone ID: PAT_MRT3847_49093C.1
cttcatgtgttgattatggtgacataaacttgagcataagtaaagcttctttctgacccattgccatgggtaaagaattcaaacttatgcagttgttagcagtcttgtttgtgagatttggaaattgaatttacagtattaggtgcattatttctacgtgatgttaagtgtctttccggactgtggcattacagtgaatccatgcatttaactttactaatgaggctttgattagacaatcaaggatgcagaaacatcaatacaattccatggaacctaacaatgaggaattccattctgcaccacagttggtcccacaagaccttcgcgatggcatgcatataaatgcacgacctccagcatttaatatggcagaaaataaacctgtacttaattactccatacagactggtgaggaatttgctcttgagtttatgagagata

SEQ ID NO: 86470 - DNA, 2957 bp, Glycine max
  Clone ID: PAT_MRT3847_49094C.1
ggagagagcacaatcacttgcttaaacttcactccgagagttacgattatggcattgaatatgtttccattgctctgcgttttgtttttatgttacctcgtccattatcaccatcactcattccaagactgttccacccattcttgacgttactaatttcaaccgaaccagtttcccgcaaggctttgttttcgggacagcgtcagctgcataccagtatgaaggtgctgcaagggaaggtggaaaaggaccgagtatatgggatactttcactcataaatacccaagtatatggatatctcccctccactagtgcttattaatattggtatttatttttgttttcaaatacacagagtgtttttttaaggttcatttggaaagtaaaaaagatttaatataccttgaatataatatggatctcgtagtggatatggaagaggaactcttttaattactttatgtgagataatgcaatttacattcacataattgcaacctgctagctcttcttgatggatataatataatatacttaatgaaaaagtatgttaaagtgtcactctcagaataaagtatatgattttaggtttagagggtgcaactttggaccctgttacaccaagccaatagccaagttattgcttgctatcagaactcagaagaggttgaatcatggagatgaaagtaaaggagaggattggtacagtattctgtaaactgtagttgattgaataatatgatagtacctatttataaaacaagagtgatagtcttctaattgctcacctaactaacatctaagttctaactaactctttctaaaagaatgacagctgcatgagttgagtatgttctctgttactatatataactataaattgcctaattacatgtataattaccacttatttatcaatgaaacggcatgcagaaaaaataaaagaccacagtaatgcagatgtaacggtcgacgaatatcatcggtataaggaggatattggaatcatgaagtacgtgaatttggatccttatagattctccattgcttggtctagggtactaccaaaaggaaagcttagtgcaggtgtaaacaaagaaggaataaactactacaacaacctcatcaatgagctactggctaatggtctgcaaccatatgtgacccttttttattgggacgttccccaagccttagaggatgagtatggtggtcttttaagccctcacattgtagatgattttagggactatgctgaactttgcttcaaggaatttggtgatagggtgaaacattggattactttgaacgaaccgagcactgtaagcatgaatggctatgcagtgggaagccatgcaccaggtcggtgttctgattggttaaaaatgaattgcacaggtggtgattcaggaactgagccttatttgagttcacactatcaacttctttctcatgctgctgctgccaatctgtataagaccacgtatcagacatctcaaaaaggtataatagggattaccttgaatactgactggtttttgtcggcctcagaaaagataacagatcgagacgctgcgcgtcgagcccttgacttcaggtttggatggtatatggatccaatcacctttggtgactatccaaaaagcatgcgatctttggtgggaaaccggctaccaaagttctccaaagaagaaaccaggcaacttaaggggtcatttgattttctgggcctaaaccattacgcaaccgtttatgctggccatgcgcctcacctacgtggtcccagaccaaccctactaactgatcctctaatttatgttacaaatcagcgtgacggcagggtcctttgtccatacgctgcttctaactggttatgcgtttatccacgaggactccgacaactgctgctttacatcaagaagcaatacaacagccccgtaatttacattactgaaagtggttatgatgagctcaacgatccaacactatcacttgaagaaagcatgatagatacttacagagttgattacttttatcgttatctttattatcttcaaatggcaatcagggatggtgtaaatgtcaagggatactttgtatggtcattgctggataacatggagtggagtgctggctatactgtgcgatttggattggtctttgtggattacaaagatggcttgaaaagatacctcaaactctcggcacaatggttcaagaattttctcaacaaatcttagtagttacacatatatgttcagcatggttccaagtaaaataagatatgaagttgatgttttaaaataaagtgattgtttgaacatatccagtggattcaagttcaaatcttgagtaagtgggcgccttaaatattcaaaagagttttatcatctaaaatgattctatctaactcagtaaaattatgtctagagaagtaaaggaaattttggattttttttttggttgatgttgttgttctaagttttggtgagagaaggtttttgagccaatgaatagtagcaattaaggattctatctgtcaaaaatcattctggattgacctccacttttaatggcgatgcaaaggcgaacaagttggttgcacctggaaacaataatgattatggatcttatggagtttctgtcctggacacactggaattggatactcctccagactttgatctttctaatttacaatttggttctcaagacagcccccttcagtggattgacaccccataaggtgcttgtttgctttatagcaacttttagttggtactgatgcttaatccctaagtgttgcaataattttgtttattcctacatgcgaagatagtataaagctcgatcaggttgtaatcatgtggtgcttacaagcacaaactttatggctgtgtcaggtttttggattattataacttgtatgtatatgttgtcataaactattaaggtg

SEQ ID NO: 86471 - DNA, 1398 bp, Glycine max
  Clone ID: PAT_MRT3847_49095C.1
tccacgcgtccgcccacgcgtccgcccacgcgtccgcggacgcgtgggtttctgaattatggtaatggcattgaagatgtttccgctgctctgcgttctgtctctttttgctacctcgtctattatcaccatcactcattccaagactgttccacccattcttgacgttactaatttcaaccgaaccagtttcccgcaaggctttgttttcgggacagcgtcagctgcataccagtatgaaggtgctgcaagggaaggtggaaaaggaccgagtatatgggatactttcactcataaatacccagaaaaaataaaatattaatcacaactagttgatcttgctaccacttatattgatttgttggaactcctctgtggggtgatttgtgctgcttacacaaatgatgtcttctcagaaacctgtataaaattgaaggtaaatgacatatatatgaattcaattgaattcaatcgaatttaaaaagaaacatacttaagtttaaccagctggatccaaatgtagtgatgtgtcatttgtactgtaaggaaattataaaagtgtttcagtactcgttgattgcatctgcattttgcatttcttgttaggtatatggatccaatcacctttggtgactatccaaaaagcatgcgatctttggtgggaaaccggctaccaaagttctccaaagaagaaaccaggcaacttaaggggtcatttgatttaagcagcttaaaccaccacgcaacaccttatgctggccaagccgctcacctaacgggacccatgtgaaccctacttactgataaactaacttatgtcattcatccaggatgccaagcctatacctggagaatcacatgcaccaccatacgatgttcaagatgaggacaataaggacgaccctgcatggttggctggtgaatcacaagctgactttgatggcttggaagacatattattatgtaaggatatgttagattcatcttctctcttaaaccattttggattgagctccacttataatgccaatgcaaacaagttggttgcacctggaaccgataatgattatgcatcttatggagtttctgtcctggacacccttgaatttgatactcctcctgattttgatctttctaatttgcaatttggttctcaagacagcacccttcagtggattgacacaccataaggtgctgctttgaagcaacttctagttggtactgatgcttaatccttaagtgttctaaaagacagcttaactagttgcaataatttttattattcctacatgcaagttagtgtaaacctcaggttgtaatcatgtggtgcttactgtcaggtttcaggactgttgtaacttgtatatgtattgttgtcataaactatgctgaatgtgg

SEQ ID NO: 86472 - DNA, 1100 bp, Glycine max
  Clone ID: PAT_MRT3847_49096C.1
tttttcacaggactctcaattaaaatcagggggccggcaggattcttttgaagatgaaccctctcaaaatggcagttcagcatatactcctcaaaatgggggactaaatatacctcatacagtggtcaatcaaaccatgtctatcatacctatctctgcaggtggtgctcctggagctgttcctggtcccacgacaaacttaaatataggaatggattattggggtacaccaggttcatccaacattcctggacttggcagaaaggttccatctactgcagttgctggagggatggttactgttggatcacgggatagtgctcagtcacaactctggctacaggatgaaagagagcttaaaaggcaaaggcggaagcagtctaacagggaatctgctcgcaggtccaggttgcgcaagcaggccgagtgtgatgagttagctcagcgtgctgaggctttgaaggaagaaaatgcttctctccgttcagaagtaaatcgaatcaggagtgattatgagcagctactctccgagaatgcagctctcaaggagagacttggggaactacctccgaatgatgatcatcatcataggtctggcaggaatgatcagcatgtgggtaatgacactcaacagagtgggcagacagaggccgtgcagggtggtcattagcaccaaccaaccacttcatgctgcctttcagggagataatctaacttaaatagcaagagcaagatcttgtttcggatagcttgtagttcaaattgtattaatgctgaccatttatcgtcttaagatctgtttaatgttatgtgatccttcattcctaatttacctttttttttactcattcaaaacgacctggattgtatgtagtgtgtgaattctgtgtcataccttatcttcagcttcaaagttagtgttctcattaagtaagcaatatagttaacggtgttgtccattatatcatttcatgtacaaatgatttatcaggaaaataaagaagagaaaatctctgatgctttgaaaaaaaaaaaaaaaaaaaaaaaaaaaaaaaaaaaaaaaaaaaaaaaaaaaaaaaaaaaaaaaaaaaaaaaaaaaa

SEQ ID NO: 86473 - DNA, 602 bp, Glycine max
  Clone ID: PAT_MRT3847_49097C.1
cccacgcgtccgtgaaatctgggggctggcaggattcttttgaagatgaaccatctcaaaatggcagtttggcatatactgctcaaaatgggggactaaatacacctcatacagtagtcaatcaaactatgtctatcatacctatctctgcaggtggtcccacgcgtccgtacggctgcgagaagacgacagaagggataggaatggattattggggtacaccagcttcatccaacattcctgcacttggcagaaaggttccatctactgcagttgctggagggatggttaccgttggatctcgggatagtgctcagtcacaactttggctacaggatgaaagagagcctaaaaggcaaaggcggaagcagtctaacagggaatctgctcgtaggtccaggttgcgaaagcaggctgagtgtgatgagttagctcagcgtgctgaggctttgaatgaagaaaatgcttctctccggtctgaagtaaatcgaatcaggagtgattatgagcagctagtctccgagaattcacctctcaaggagagactgggggaactacctgcgaatgatgatcatcacaggtcttgcaggaatgatcagcat

SEQ ID NO: 86474 - DNA, 268 bp, Glycine max
  Clone ID: PAT_MRT3847_49098C.1
acggataattgaattcttcatatgcaaatcattggtcactgtatttttaggggaaggtttaacaattttgcattagggggtgggttccattgagacattataccaagttgttgtggccgggcgaaaataaccttccctttgtggaaggagaaaatagcctgttctttaaaaactgtggtggttcctcaggcccattcacagctgcttgatttttaaataaagcctattgtttttgaaacctaatacccgcgccaaagggttgggagcc

SEQ ID NO: 86475 - DNA, 383 bp, Glycine max
  Clone ID: PAT_MRT3847_49099C.1
acgtaaactccaaaatttaaacctggagaaacaaggttgaaattattagataacgaatctggcttaacctgacatccgaatcaaagtcacagcctggtatagcaagacatcatcgctctttaaacttcaaaggataaaccttaaaaaacaaggtgggaattaaagagaaaagaagctcactgtaaaccataaccttcggactggtgctgaacaacatggcttaggacgaccattgtctaacccgcctttggttagagggtttctggcgacgtatgcctttggggaactataggctggtccctccttgaaggctgcctgtccctttggcggcttcattaggatctggccgaaccccaagggggaagagaaagtgacccaccctt

SEQ ID NO: 86476 - DNA, 1132 bp, Glycine max
  Clone ID: PAT_MRT3847_4909C.1
gtgagcagactgcccttggagaaagatcggcgttgtgctgttgctgttgctgttttgctacattctgaatggagctttctgcaccttcttcaccctctcttctaagatgtccttcatccctgcttctgaattctagggttagggttttccatacaatacccaaccccacacgcccacctttccaagcttcaatcttttcactcaaccaacgcaatctcactccaatggatcttcccagaaacgtctcctccgctgccttggtgggagacaacgcttcggccacgaccactttgccaattgactcagatgctagaatcggagaggttaaaagggtcaccaaggagaccaatgtatcagtcaaaataaacttggatggttctggggtggctgatagtagtactggaattcccttcctcgatcatatgcttgatcaacttgcttcacatgggctgttagatgtacatgtaaaggctacaggtgacatacatattgatgatcatcacacaaatgaagacgttgcccttgctattggaacagctttgctgcatgcccttggtgataggaagggtattaaccggtttggtaacttctctgctcctcttgatgaagcattgatacatgtttcactggatttgtctggccgaccacatctaagttataatttggacatacccactcagagggttgggacatatgatactcagttggtggagcatttcttccaatccctggtgaacacgtctggtatgacacttcacattcagcagcttgctgggaaaaattctcatcatattattgaggcaaccttcaaagcttttgctcgggctcttcgacaagcaacagagtatgatccacgtcgccgtggaactataccaagttcgaaaggggttctgtcccgtagctaatatttttctggcggtggaccttcatggctccacaatcacagtccttagatgctgtgtgatggataaatgcttgtgcgggggcagtatttgtgatagaacactgacctctgtaaacaatattgttgtacgtatacttatttctagaaataaaaataaattttctagtgttttttggtgtacattttttaaatataataagtggaattacatttttggtttttttgtcg

SEQ ID NO: 86477 - DNA, 1556 bp, Glycine max
  unsure (1)..(1556): unsure at all n locations
  Clone ID: PAT_MRT3847_490C.1
caaacacaaagtctcattcactttgatctccaatttttttcagaaaccgaagaatcaagtcaaatttgggtttcatttctctctctctctctcccaatcacactgatagaacctgctagctaggtttggttactccaatctccctctgcttttcttcaccttttctgttttgtccacgcattccaacattaaaaaaattggtccccgttcatttatatatgcaatatctggttcaacagtaaaagggtctttaaattttatttatatatagtatcagagtagcctctgaggaagtctgaaccaagagaaagataacacaggccaacttggaataccaaaaccaaaaaaagccgagtgagtgactttttccttctttctctgttctttcctgcttttgcggcttctccgcctttgcggttctgccttttttctgcgccaatttggcgcgcattaaagcggaacgtcttttattatatataaaactctccccttttttcaagttccactactcagaaaaaaatgagcaacaagaacaattacaagtgtgtactgcgtagtaacttaacttcattcactatctcattgcatttaaagcttcctttgccatttccatgaatagaatacagaattcttaggcatatgaacctcagactcttctttatctgaaccaaaaacaaaaaccaccaactttgtttaaccctgcagagttttttctgttcctttccctgctgctgcttttgcagtctctgggggattttgctttgcatttttttatgtgtcaattggtggtggctttcaagcggtggcggctattattattgtgttgagttttcatttttccaagaatcatatatagggtatcctcagattctgaagctctaaaattttcttgcatttaaagttttctctgccacaatccatcaacaagggattcatatacatcactactactccatcactggcagtgttgtactaagttcgactaaaacaaagaaaagtagaagaaaaaaaataggaaaaaaggtaccaagagcaaagacattcagaaggaggatctgtcatctgaattttcttccttcaagctttaggagaaagagacatatcaaccaagatccacatttagacactgctttttgtggataagggagagacaatgttgtctcanaagcaagcagaggaagctatagtcacaaacgagacagaacatgaagttagcagcacaagggaagaggagaaggagcaagaccaatcaatgttcagccttaagagcatcctttggcatggtggttctgtttgggatgcatggttcagctgtgcctcaaatcaagtggctcaagtgcttttgacactgccatactcattctctcaacttggcatgctatcaggaatcatttttcaggtgttctatggaattgttggaagctggactgcttatctaatcagtgtcctctacatagagtaccgcaccagaaaggaaaaggaaaacgtcagcttcaaaaaccatgtcattcagtggttcgaagtccttgatgggttacttggtccatattggaaag

SEQ ID NO: 86478 - DNA, 215 bp, Glycine max
  Clone ID: PAT_MRT3847_49100C.1
tttcccttactactatatacttaataaattgaaacagttaattctatctatatataattgtatttatgtatagatatacataagtcatttaataatatcatgtatttgatgttcggtcgacgagctcaataagctcactaatcagcggccagccctttttttttttttttttttttttttttttttttttttttttttttatttactgtgattta

SEQ ID NO: 86479 - DNA, 1042 bp, Glycine max
  Clone ID: PAT_MRT3847_49101C.1
gatccaagcaccttctacgtccctcgtggcctctcttctacgacgcacgcagcagcatcagcttctactcgtgtaatctctgcgtgggctacaatggattccggtgtccaaggttgcatcttagccactttaattctccacgacgaggaaatcccagtcaccgctgagaagatcaacgctctgttgaaggcttctaatgtctccgccgagtcttactggcccagcctcttcgccaagctcgcccagaataagaacatcgaagacctcattttgaacgccggcggtggtggggccgccgttgcagttgccgctcccgccggcggtggtggtggtgccgctgctgcagccgcacccgccgccgaggaaaagaaggaagaagtgaaggaagaaagtgacgatgacatgggtttcggcttgtttgattagatctttttatatagttgtagccagattttgagtctttgaattgaaatcttgttttgttctatataatttttattgaagggattcttagccaatctactatcataattgttgaattttggtggttttttaatatatttgtggcaactaagccaatttattattacaaatgttgaattttgttggtttttaaatatagaaatgttatctaaatacaaaaataaatctttaacagatcaccctaggggagccccccgtttacggatgttctgttttccgtttgatgtttgcgaatgattaattttttgtggtgtcttggtgaacctaataatgatgaaaatgtttcaagactttattgacgtgtgaatgtgatgtaaaatgtatggatataatcataagaatcaaccacacggacatagtcagcttctttaagagaatacctcgatcctcccattgtttaggagaaaaatagttgcatcttaaaaattatatattcaagcttgaaactaatcgacgtgcatgcaattgggctcaaataattggtttctgcattatcattatatattaaaacctaaaaaggcatcgtgtattgttgggtcatagtcagcttggtgatttt

SEQ ID NO: 86480 - DNA, 486 bp, Glycine max
  Clone ID: PAT_MRT3847_49102C.1
aaactcgccactgtatttgtaagtggcacattttgagagaaggtcaagaaagattggctcatatttaccttgctcatccttcattctatggggagctatacagctgtatcaatttttctgagactaccgaggattttgaatcaacatggaagtctcttctggataaatatgatcttcagaaaaatgattggcttcaagcagtgtataatgctcgcaaacaatgggcccctgtttactttcatgatactttctttgctgcaattacttcaaaccatggggttagctccttttttgatggctatgtaaatcaacagacaaccatatctttattttttaggcagtatgaaagatctcttgaacattcattggaaaaagaaatagaagcagattatgagactgtttgtaacacacctgtactgaagactccatcaccaatggaacaacaggcagcatatatgtacactaagaagatttttgcaaaatttc

SEQ ID NO: 86481 - DNA, 276 bp, Glycine max
  Clone ID: PAT_MRT3847_49103C.1
ttcttttcttttcgggacactgcatgccgcgagggtttattgtgatacctgtagctgcactgctagcgggataggatatggttatatcctgaactactgagctatagagccttagatcatggtgtgcgcaacacaacctataatttcttgctcgatcatgacacggcatgtgtctgacagacaagcatttatgacttattttaccttgctgattgctaccttcattattgcatgctaaaattggaccatcctagaagaccgcacgtggaaagcccc

SEQ ID NO: 86482 - DNA, 519 bp, Glycine max
  Clone ID: PAT_MRT3847_49104C.1
ctcaagcataaaaattgttttccaaatataaccaaaaatgaaatgtcagcaacatgttgagagacattatgctcactacaattcatccttctccgtgaaccccgaccatctcttccgagtatgctccatcctgaactagcagctcgcccgagtcacaactcacctccaaacttgactcgtgcgaattccaactcaccagatgataaggaaaagttgcagcgactcaaacataggcgagcggtcgttgcatcccctgaatgtatggtttgttctcagctcagccttccctcacttggcgaccatcgcatcctctgaacgcgtgccaccactgttggcgcaggagtagcatcgccgtcgtgacgttgccgaaatctgtgcagaacgccgtcggattctagcgagagtgagagtgctcacggtggtcatgtctcccacacagacactcacgaatttagagatcggcgatgagtggcggcagtctgcggcggcgagccgagtagtgattcttagcttgcttca

SEQ ID NO: 86483 - DNA, 364 bp, Glycine max
  Clone ID: PAT_MRT3847_49105C.1
cgttaacccaacagtgtttctctatgctaaagaacgccaaagtcatcaccacgacataatatatataagcctatataacaccggaccttctaaaacccaatactatgaagactatgatattgggcggacgaaattaatgatacctgacgtgaggaaatggggaaacaagggccacgctcccgcatcgccagagactctaaaaattacaacaagctggtgtttcctgggctcaagagtgtattcttggcaagaagatatcttggacaaaatggccggaaccaaagcaaacctaaaagaagctggcttccacccatggggagccagtaaatctttaaggatccacatgttaatgactccacatggc

SEQ ID NO: 86484 - DNA, 182 bp, Glycine max
  Clone ID: PAT_MRT3847_49106C.1
gcgtacagtaagactaggatgcggctcgcttttctttatgggtttccccattagccctcttttgtcaacaataatgctgccatatgagcatataataataatgatgctctcactcgggctaaggcttattgcactacacaaaccctccattgggggctagctattcaccatgaacaataccc

SEQ ID NO: 86485 - DNA, 247 bp, Glycine max
  unsure (1)..(247): unsure at all n locations
  Clone ID: PAT_MRT3847_49107C.1
ttcgagcgaatcggtcgacggctcgagtacggctgcgagaagatgacagaagggggagatttnaaaaaaaaaaaaaaaactaaaaaaaaggggggcccccaattattgcgctcttgacccggggatttattcccggccgggacccttgggggttcaaattttcccctaaggggggggttttaacctttggggcaaatcggggaaaaacttttccccggggaaaatttttccccgcccaaaaacccaa

SEQ ID NO: 86486 - DNA, 519 bp, Glycine max
  Clone ID: PAT_MRT3847_49108C.1
cacaaggaaactcaaacatcttaattgggggcatgattatcacatggcacgaaggtatacacacatgataaccctaacagagctgcgccaaatggggttacaagaccgcggattgagttattagaaagcacacttacaacattgagaaaaggactatgagtcgaactgggcataccagatgccttgaatgttagacatcctaaggagctttaacccccaaacaattatcagaacgctgaacactataaaacaccccaaaaaccacaccaaaatgacgctaggactcggagacactaaaggtgattatacctaaggaagaagaagcactgaaattgttggccctggcaagtgcctcaaaatttgcatgtccaccagcaggcaaagcaaaagcgttgttgtaactcagggaagcacaccttgcctgggggtccaaaaaagaggcaacaccgtaagacggcactaggaacttcccactgaaactgtatgattatccaaatgccaacaacttgcttaatggtg

SEQ ID NO: 86487 - DNA, 279 bp, Glycine max
  Clone ID: PAT_MRT3847_49109C.1
agatttaacaaatggattttgcacagtactttgggagaggtttgaaaaaaatttaaacacactcattggacattgtaatgggctttatttaagggaataaaattttgcattctaattgacaaatggaaaaggaccctcattaaccaaatttttgagacttttacagttctcaaaaagacgcgtcaaaatagggttaggggggttagaactcaaaatttcatttttaacgccaaaaaaaacaccctttaaagctactggaaaagggtccactctagtgag

SEQ ID NO: 86488 - DNA, 151 bp, Glycine max
  Clone ID: PAT_MRT3847_4910C.1
aggccttaccgttatcagtcacaagtggcaagtacaagaagacgaagacgaatatgaagacgaagaatatgaacaatctccctcttatccttcacgacgaccaagtcatggaatgcatgaatatgactaggtcgaggactaagaagaagat

SEQ ID NO: 86489 - DNA, 222 bp, Glycine max
  Clone ID: PAT_MRT3847_49110C.1
accacgcttccggtaattatgcatccatttcgctgcatgactgggtctagagcgaggaggataaaatgtcgggcttgcttcgaagcgcttgcaacactgatcaggtcacagctacaacatcctactttctaaaccttgcgcctgcacactataactgctgctacagactatgatgaactattcctaggactagatatccttaactatatcttttcgaatatg

SEQ ID NO: 86490 - DNA, 361 bp, Glycine max
  Clone ID: PAT_MRT3847_49111C.1
ggagcactccatcttttcagttcatttgtgcatggaaggagattgccaaatacaacaagtccttcaattgatgattaatattaataattaagctaaactgcacatttggttttcctatttttgtaaaaatgagattttggttcccttggtttctaattcaaacatttggtcccctagtttgaattagaaatcaggggcacaaaattctatttctaccgaaatagaggaaccaaatgtgcagtttaggctaataattaggaaaatagatatctgcctgccatataacgagtggaaattaatagcaggttctacactcaagctagttgattaatcttagatctcaagactttaggctaaaaga

SEQ ID NO: 86491 - DNA, 562 bp, Glycine max
  Clone ID: PAT_MRT3847_49112C.1
aatgaaattaaaatacaagaaattgaattgcctcatgcaaacaaaatatttacaaaatgaaaagaatttaaatcaagacaatcaaaatgctgtcaatttgaatttcctaaaaatctttaaattcctcatccaaacacatagttaaacattttccatgctccagatatacggttttgtgaaacatgaccttcaaccatagttgttattgccataatatctggcttaattccttttcccagcatctcatcatacaacatgcaagtttcttcatacctattcaacctgaagagatgttgtatcaagtctgtatatgtggaaatagtaggcacacaaccagattctttcatgcattgaaacacctcaagcgctctgtcagcatcatttcttcccaaatacccatttatgacaatcccatgaacccttccatcatccatatcccttctcttcataatatcaacaatctctaaagcatatgtaatcctgcctgccttacacagccttttaccaagttcttataattttcaggtccagatctaaatctttatttttgaggtcacgaatc

SEQ ID NO: 86492 - DNA, 342 bp, Glycine max
  unsure (1)..(342): unsure at all n locations
  Clone ID: PAT_MRT3847_49113C.1
gctcnnatcacncgtacgtngagctcgngnattcgnccncnngnangtgctccngcacatgctctcntattcanatnctnttgtcccgnggnttcntgctngtgagatagacnttncgacngcttananagnnctnngtcggtccgnngatctgtcantngcacggnnatcagcgcnggcgagctatncanacngcgnacacaggnattcncgctactggtntgnngtagnagcgcanagntngtcnngacggncntcnagctttcacggcgnatatnncngtcgncagaggngcaggggnnacntcgnntgttnctcatttcactncganccanctaagng

SEQ ID NO: 86493 - DNA, 517 bp, Glycine max
  Clone ID: PAT_MRT3847_49114C.1
ttgccactattcttgttatcttggttgtgtggattttcaacccaaatcatgtacttttatgactcttgcaagagagataaaagagaagaatacttaaaaccacacaaacacacacatgagaaggaattgatttacatcagtgtaagtcaaactcaatcttatgccttttcataactttactagataattttatttcaaaatctactatcagattgctaagttttatcatatcatatattgttcatatcatctgtaattattggagtgcatattattcctttatttcttgattatcactgattaggcttagtatatataagagcattagcgtttatatttaaatatgtttaaaaatttgaaaataacaagtttttcttgtattttaactcatatggaggatccccttcaagtaggaatgaatagtgaattttatcacccctacacagccagtctagcatcaagcttagaatataaatgcagtcaaccatcaatcttctctccttctgcatcaagcata

SEQ ID NO: 86494 - DNA, 220 bp, Glycine max
  unsure (1)..(220): unsure at all n locations
  Clone ID: PAT_MRT3847_49115C.1
aaanatgacccagggcaaatgatcaataaacccaaatttaaaaaacggtttaacaaacgaatatccactgaatcacattttaaagttacgtggataaactagttcacctgttatggcataacgcattttctcctctgggggtgaggagaaagaaagcaccccgggggaagacttggacgcaaaaagagagccccccaggggggccccaaagcgggcaaaa

SEQ ID NO: 86495 - DNA, 307 bp, Glycine max
  Clone ID: PAT_MRT3847_49116C.1
gtccaagccctatacaaccaatccctaacacacactcatttgattcaatttctatggctagcctcatcgttgcatttttggctgcagtgctctgcatggttgtggtgagtgcacccatggcacatgcaactatcacgtgcgggcaagtgaccaatagcctgatcaattgcatctgttacctccagaacggaggaacgccgcacgtcaggatgctgcaacggactgaacagcctcaatgccgcagccactgacatcgcagatcgacaaacggcgtgcaaatgcctcaagtcggccgccattcaaatct

SEQ ID NO: 86496 - DNA, 532 bp, Glycine max
  unsure (1)..(532): unsure at all n locations
  Clone ID: PAT_MRT3847_49117C.1
aatttattctttaatttctaggactcgtcagtgcaatagtataatggacaacttcgaagatgctacagagccagtgagttctagtggacgattgttcaacaccactgtgctatgtgcgtatgattttggcttcttatgaatcagaagttgcagttgaattctctcatgcctagtatattggtcgaagatgtctgtgtacccgtcaatacacacttttcttccatagtgggtgtcactctcattagctgctattagatctcttaaatcatatttgcttgcgatctgcatgcataatgtgctgtcttattgaacttgcacatatatatgctaggtgagagatgaggaatgagaaatgaaatggaaaagggtagacgtgatgttcgaacatcacgtgaagaattcgacgtgtcccgaatactagtcacttcagttgtntgaccaatattgtgatgactatgtcgactagagtttaatggataggactgcccatgataaaccagtttgggaaattcatgatgatctaataccctac

SEQ ID NO: 86497 - DNA, 456 bp, Glycine max
  unsure (1)..(456): unsure at all n locations
  Clone ID: PAT_MRT3847_49118C.1
cacgcgtccggagaaatcttcttaccctgatcatggaatctctagcattgtcatttctcctcattacattgtttcttttcaccataatctcccttaacagtttttcatcttatgcttctcaactcacttacacagatcactgtgcttccatggttccaaactcaaaccccaatgagtccaagttcaaagacttcccacatggtagattccaagttggttactaccttggtggtgacaaaattgttggtgctgacaccttccagaaactgagacagaaacaagttacccttcgaatcaagagtgtgtatgaaactgatgtctttggcatacacaaagttggagctaccttgttagtaacaactgccagttcctattaccgtgtgggaaacttcacacgtggcaaaagattaaagaaccgcaagcgttntccaagttcaataatgtttagtcttgatg

SEQ ID NO: 86498 - DNA, 368 bp, Glycine max
  Clone ID: PAT_MRT3847_49119C.1
tgacgctttccccccctccttaaacccgaatttcgcctcgagaaaaaaaaattttgtgagcataatataaaaaaaccttaaagaaggggcgatcacagttaaatacaaaaaaaaaaaacaaaaaaaaacaaaaaaaaatataaactataaaaaaataactaaaccaaacttggggccgcccccctctttttaccctccttcccccgtttttttttttctgcccggtccctgggggcttcccacttttccttttagggagcctttttaaacctggcctaaaccatggcaatagcttttccctgggaaaaattgttaccccccccattttccccccaatttccaacccgaaggcatatttgcaaaaccca

SEQ ID NO: 86499 - DNA, 374 bp, Glycine max
  Clone ID: PAT_MRT3847_4911C.1
ccacgcgttcgtccacgcgtacgtccacgcgttcgtacagctcagagaggacgacgggtgggggaaaacatgagagtgggagttggaataactacagcttccttatccatttatgtgcgaacccttattgtttgtgagagacccgttatcatagaatccagatggtgatgaagaagaaacgacagagcatgaaggaaatggcgaccaacattgggatcatggatgcggcttacttggacggcagattctgatattcttttttggatcaactcaactctgtaacttaatctcttcaaagtcgtaaaggcatgttacgacacggtttactgcctagcttctcaatgccgctcattcagggatcgtgccttttcaca

SEQ ID NO: 86500 - DNA, 202 bp, Glycine max
  Clone ID: PAT_MRT3847_49120C.1
taggataatttattttattttgcaagaaccgaaacacggacacaagcggtgcgataatcaaaaaaaaacaagctcggcttttcagtacggtaaaaacaatatctccatgggaagagggaaaattaaaatctgaagacagcaaagaaagaaagctctgaagtcatttgggcttatgcacacagctataacataggggggaatg

SEQ ID NO: 86501 - DNA, 468 bp, Glycine max
  unsure (1)..(468): unsure at all n locations
  Clone ID: PAT_MRT3847_49121C.1
gttgtgatgaaaaattgatgcgtgaaaggacacacctgctgatggcttgctgttcaaggatggcaatttgtaaaaaagaatgccaggagatgctgaatgcagagaagtcccttcatggacttatacgcttcacagtntatttagcattaggcatatctagatgcgatgcatcattagatatcggtgtgaaaaacaactggaccaggctaaagctccatgcattgcatgtacaatttctacaacaacaccgcaaatgtgtgtactatagctgatgatgactgactccgacgctatgagcatctattgcgttacttttgggaggccaacatggccaacccagtaggagaaaatgccactacctcactctgcactgatggcaacctcttgtgggcatatgctgatggcaaagattgatggcagactaacactgacaacaagggtgtagcggacttcatgcttctttcaaat

SEQ ID NO: 86502 - DNA, 419 bp, Glycine max
  unsure (1)..(419): unsure at all n locations
  Clone ID: PAT_MRT3847_49122C.1
acccacncgtccgtacggctgcgagaagccaccaaaagggaacggatgataacacacaagggggggtaccattctgtggagacnaanccaggtgcttgttatgatcataaatgaagctttttgtaatatcactactagcagctatgctcataatctattctatcgatccaaatagaactaaattggtgccataatctgataataaatcagaactgtgtaataaatccattaatcataatacatcaccaaatccctataaataagttttgaaaacctaaaactttcgaacttactaggaaatatggatataattaccattacatccttaacaaggactatcatacacttggccactgtcgaaataaaatattaaatggttattgagtactaactgataaaagatatatatatacatcata

SEQ ID NO: 86503 - DNA, 333 bp, Glycine max
  Clone ID: PAT_MRT3847_49123C.1
caagacacgacaggggtgaattgtatagtgtctctgacctatcatggtataaagatgatgtttggatccactaagaaagttatccatgtggggagtgccgttagacatggacatgattcggatggccaatcgccaatactccttttgtctcaggaccatccataggttggcgccatgcaagccgactgtgaatggggactatcctgctgatccctccactgcttgttactcagccattgccaccgctgatcatacatgcatctgccgcttcacggattcaggccttctctctatgtatgatgttgatcccaacaagtgcatgaaactccctgt

SEQ ID NO: 86504 - DNA, 545 bp, Glycine max
  Clone ID: PAT_MRT3847_49124C.1
gctttcctttcttcacactccacaattcattcattcattcttcttctgtctctaacggcgtggaaatgatgggaatagtaaaaggtttgagcaggaacaacgcacattggtatggcggcggcggcggcgacagtgggtggagtctagggcaaaaaaagcgaagaaggcccctgtcccttgcggagcaactgcacggcgacactcccaacttcttctacaacaaagagaaaggggttgtatgaaaaggcgtgggttgcattctagtatggaatcacaacctagacttctccccacattctgttctgcttcaatccacactgtctgttccgccgccaccaatgttgttcctgctttgattacatccttcacactgatccacgccccctattatttccactttacttgatattcactaacctatcatacatatttatattcactttggttttattgttgatagttcttgtgtgtttgatgtttagacgttggtgccttggtgggcattaattagggtagtaataagatacttatctatctattttgat

SEQ ID NO: 86505 - DNA, 251 bp, Glycine max
  Clone ID: PAT_MRT3847_49125C.1
gagagtagtagagtaacgcaacccattccatttccctctaaaatggcgtcaagtaaaatgagggtcgaggagctgcgaacggagctcctccaccgtggactctccaccaccggaaccaaacccactctggtccgtaggcttgaagccgctcttcgtaaacaaacgacgagtgacggtggtgcttgttctcctcgtaggactagaaagagaacaacggattcgaaccactccgaagaaatcgaggttgcaga

SEQ ID NO: 86506 - DNA, 561 bp, Glycine max
  Clone ID: PAT_MRT3847_49126C.1
ccacgcgtccgcaccattccaggtgtagccatcaaaacaacgtttgtttaacaaaacccattatcagatcagatccgatcagatcctcttcagattcggatcaccgccgagtccatgagcacgccagcgctttcagggggcacgggcctcttctctggattcacgcgtttatgcaagggccttgcggtggtgcttgtttgcggtcacattgcggttcagtttatcccttcagctgttaactatcttgctcttattcccgccaggtaccctgccctaacatagtgaattgcatgttacactatgcataattaaaatgtgtatatatggttttaaattgcaccgcaacatcaaggtattttgactctccgcaaccgcattgatgcattttcccgcaattgcccataatataaaggtttgttttttggctcatcgcaatctaaacccatcatatgatttattatttatttactttactaatcatctctgattccaatagtccatagcttctagttgtatggctggaggatcgagaggggagacacttaaaactgcgtgattgta

SEQ ID NO: 86507 - DNA, 280 bp, Glycine max
  Clone ID: PAT_MRT3847_49127C.1
cgtacttaatctcagaattactctcgagatcatatctaaaataatttgctccaaaaccacatactcttatcaattcttcttacctcaaccataccatgaggtaatctactatcactcctatgagaagccccgtactatcaaacacattataacgatcacctatcacctaaatattatagcaccattccatctgtaccaggataatcagtactaaattagacttttgcatataacttaaacttttcttttctataataacaagataaatgttattctcaac

SEQ ID NO: 86508 - DNA, 293 bp, Glycine max
  unsure (1)..(293): unsure at all n locations
  Clone ID: PAT_MRT3847_49128C.1
gaggaaagtgagtgagagaaagagatcgcagacacagagcagaatggcttctacccaatgttttcttgcaacaacatgnttttancaaccctngcaanngcnanntcccaataattaggnntcttggttagcaccnangcctaaccagnttgtttgcaaggcanngaaacancaaacaccacangaggntattgatgtnagcccantccttctggcnggtnagcctancngtgctcattggtgtngntgcngttggctccaaagtccaacctgntgatgnagctatggtgaac

SEQ ID NO: 86509 - DNA, 259 bp, Glycine max
  unsure (1)..(259): unsure at all n locations
  Clone ID: PAT_MRT3847_49129C.1
nngcaggcncgggtacgnnnagctcggnantcggcncgagngctntctgntccatcagggtaaagcggngagnttngcgaatggnacgannggcgganacannncnnaanaaaanaaanananacngcggaannggcggnanngacnancncaacaaggggaggccnncgatcnncgagnaggnngcnannacgtgnacgnnggccagcanaannnncaggaggngancanctcncgnnnananaagangngatngccc

SEQ ID NO: 86510 - DNA, 226 bp, Glycine max
  Clone ID: PAT_MRT3847_4912C.1
tcgaccagacttacgaacactctatcaaagacgcatgaagagagattatagaacgggaaagatagaatgttcaagttcaaggttctcaagttcaacatctaatcctctattatgcgtgttccgaggaagaacatgaaaaaaccctacgagtcaactctgacgagttgcctgatcgtactgttacatgctccgactctgtgctcttctttgcctttcgaaatcaccg

SEQ ID NO: 86511 - DNA, 469 bp, Glycine max
  Clone ID: PAT_MRT3847_49130C.1
ttttttttttttttttttttttttttttttttttttttttttttttttttttttttttttttttttttttttctttagtttatttttaatattgtctttatttatcaatagggttccttaaatttccttgcggatgacatgtttttacttgttcagggcccaaacccgacaagaccacaggagatccttaaccaagggcccccggaacccatagtgggggagacagaggaaaacaaaagggggggggaaaacaccccccggggggaaaggcaagaagagggggctcctgtgggggaacaaaaaaggaccggcgccttcccaaggctgaaaaagaaagaaaaaaaaaaagaccaggcgagaagggccccaacagtcctctttctcaaaagagagaaggagaaaggggccacacacaaggggggcgcacccgcggaggcccaagcaaagcaaaaggcgctgggggggcccg

SEQ ID NO: 86512 - DNA, 572 bp, Glycine max
  unsure (1)..(572): unsure at all n locations
  Clone ID: PAT_MRT3847_49131C.1
ccaaaannactttttttttttttttggggtgacataaaaggaaaaaagaggagatctttcaaaagaccattttttaagtttttttttttaaaacccccaggttaaagggtaaaaagttgcacccntagccccccaatatagggctatcaaggggaggggaaaaaacccccgctaaattttcacctggggaaaggcaaaatatgaaacccattttccccatataaaaaccccacttttttgagacagttctcacccggggagaagggggggcccggggggggggggtttccacacaagaatgtgaaagccccaaaaaagagtttttaaaaaacaccccttagggggacaaaaaaaaaaaaatggggtataaaaaaaagccccatattaacaaaactgtggccccaaaagagaaaaacttaaaggcctttccccccaaaggggggggaaatgtaaaaaaaaaggggggaaaaaagaatgannttggtgttgcactgagggaaaaatacttaaataacggttttttttttgagaataaagggaaaaatttcttaaaaaaaaaaaaaactcttaaa

SEQ ID NO: 86513 - DNA, 844 bp, Glycine max
  Clone ID: PAT_MRT3847_49132C.1
cccccgggttttttttctttccccggggttttaaaaacccgcccaagtatttaattttttggcccccaaattaaagaaaagatttggccccccgcggaaggaagctttggttttttagggggcccccccctttttccacaaggggtcccccctttttttttaaaaatatttatctggctttctccccccctttttttttttttttttccaatgattttgttttaaaaaagtttttttttattaaatcaactcgaaactattaatgtataactcaaccaaataagtttagatcttgatctgattacaaagatattaacaaacttgagatgagaggacacaatcacactatctgcgtattacaaatatcaactgcaaaaaggagaaagcggggatataaagctgctacctatacaaccacacagccactcaaagaaaagctgaaggttagctccaagttaattttcttcctttgcctggcttcttagccgatctctctctaagcaggaaatacaagagtctatgtcagacgcataccgattccttaaactctcttctcaccatcaatccacggccaataacataaacaatggacatcggaatgccagttacaatcttataatcaattggggtgggggggaagacaagagaaaaaaaattaagtaaacaaagaagggcagaagaacgatgctatgaaagttcactccttagtgcctcttcaagagacatattgtcattgtgtgctgcgtgttaatcctccccgtgccacatttcttccagaaacaagctgatgctgaacactgttcacagtgccctttacattgctgaaacgctttgctctgctctc

SEQ ID NO: 86514 - DNA, 448 bp, Glycine max
  Clone ID: PAT_MRT3847_49133C.1
gatgtccttacaaaagacggaactcaccattttgggtggttaccacaacaatttcaagatacttgttcgatcacctgttgatttatgaccgactatacctgtcatagaatactttccagttaatttaataaaagccatctttgccctcaagaacatataacactaccattgacgttacaaaattgaagtcccaaattgaccgcaaaaacatatatggtaatttcctcccaccaatcgcccagatacccctgcaaactctagagctccaaccccaataatgacagctttacccaaactgtttggctttacagtgagaaaatatcttcaacctacctaagagattgccacctgaaaagtacgttcagatttacacaaattattaatactccaggcacccatgaaaccaactggaaaccctcttgtgaggataacttcacattaagtaagt

SEQ ID NO: 86515 - DNA, 247 bp, Glycine max
  Clone ID: PAT_MRT3847_49134C.1
caattttctgacttagtgatgatagtttaagcaagttgtgctgattttactggtttttccatgtttaattatggtcttgtgcctttatgtgcatattctgtggttaactgttgtaggaaatagtagcacttggaaaactaagtaacagtttttgcagcttatggctttaatggtaggcggtagctctagggaatgttaaaatgttgagtgattctttttagtgttaaggatttttgtttccatgagt

SEQ ID NO: 86516 - DNA, 789 bp, Glycine max
  Clone ID: PAT_MRT3847_49135C.1
cgaggcagtcatgtttgtagttggttgtctatgcctctttacctggtattgataacctgaattttgtatgctttgctaggttaaatgaatccatgattacatacatggtaacaaatcatatggtattgtttgttaagcttataaatatgaaacatgaacagtgtatgacatcagagcttcttttttattttgtttgccatccttgtggactgcaatgtgttttcttgctttaatgttctcctagtgagagtatccacaatttcttaatgtttcttaaatccttctgataagtctcaatgcaaaacgttagtttatatgttccaacttaccggcttgtcatacaaaggcagaatatgaggagtatggagctagcatttgccgtacaaatccggtattcaaggggatgtattaaagcaacgacgagttagttgatagtggatacagttacttgataaacagttgaatgaatatccggttattttgatcctcaattcccctcctggtcttttttctcacccgtattcgtggtgccaggagtgagtgtaaaatatgtatatttagtgaaaatatgcatttgtttttattccaccagttgccagcaggtgcagatagtgcttaatggttagggcgaaattgatctttgacttgcaatttttggtgttgagcttagagattgatgaagttctgtattttttgtcattcagtgttgggactgacaattccattaaggacagtttcggagcatgagaagggaaataagatgagatatactatcatatccaatcttaa

SEQ ID NO: 86517 - DNA, 356 bp, Glycine max
  Clone ID: PAT_MRT3847_49136C.1
agccacacaaaatggtggatttaaaagaagctttttcatcatatattacagagttgcttccatctcgaattcttcgagaacagaacacttacgatttcgaagtcttacccttctgactggagttaactaaagaaagcttgactcaaaactttcagaactagaacttcatatacggcgaaatctctggatcaattacttgggcgaaacttaattgcactgggtatgtacaaacaaggaacttcaatttacccgcgcaccattagggagcgactgtgatattactgaacttaattaagcactgcttgtacctaagattctgagaaagaccatgaacggttacccataactttgctttg

SEQ ID NO: 86518 - DNA, 1303 bp, Glycine max
  Clone ID: PAT_MRT3847_49137C.1
aatagaaactctcattttataatccttgatataagactttgtaattacaataattaggatttcctactacaactttgccacttgaatgctagactagagagtgccatagtagatgaaccatgttcactaatcgcattagcagcagcaacactaaagccttcgattcttttgcgcatttgcaagctctcatcatcccctttcatcaccaccttgatcactcttgcaacttcttctcttttcactatgccactttcacaatcaaccttaggcctgacagccactttgagcaaatcacttatggttgtggcgttcatcctttgctcggcatataaaggccacgcaatcattggcacaccatgtaccacaccctccaaaaccgaactccaaccacaatgtgtcaaaaacccccccgtggattcgtgtctaagcacttcaacttgtggggcccaagaaggaaccaccaacccttgtcctttggctttaaccctctctaagaaaccgcatggcatgtaccctaatgggtcatctttttgtctcacaaaataagcggagcaaacgtcatttggaaccctcacaacccacaaaaacttgtggccacttagctccaagccaaaggctatctcgttgagttggtcaagtgaaagggtcccaccacttccgaaagagacaaacaagaccgcctttggaggctgattttctagccacgcaaaacactttgattcattttgcttactccttgactcgctttgaattattggtccaacggggtaatagtaaacacaaggggtatttgcttttgcttgtgctttctccctttcttcaatatctatcactttttcatgatcattttgtttgatggacggtggagtattaaatatagacatttcttttgacagagattcggactgtaaaccattatgtatatgttgtgaaaaactaatctcttctgttagatccaattctcgtccattctcttccatagctcttagggcatcttcttccaaatccgcgaaggtgttgatgatgacaccatcgaccaaagagagtctttgacacacgcgaagaaatgccttgtatgtttcacttgatcttccacaaaggacaactgggtcaggaagatctttgacatggaagggcacgccacaccctgggaaactaaccctttttgtggcgtctatgatgaactcggaggtgacactcttgtcaagttggggcaaagtgagacaaaacgagagtgaagtggcacccgaggcagagaagaagtaggtcatgaggttgaaatccttggctatttggagtgcgt

SEQ ID NO: 86519 - DNA, 632 bp, Glycine max
  unsure (1)..(632): unsure at all n locations
  Clone ID: PAT_MRT3847_49138C.1
gtctatcctttccctggcgtccgccgtgaactcgtgagttgtgtgctactactactgtgcttgccttgtgactggcctttccactataaatacgaatccaagtcggcggcatcaacttccgtcatttttcttctttgcttcgtttctgcattctgtagattttttctgctccgcatttatctctcgcagcgcgctttggagctttgccttaggaattccgtgctcgtgagtgagttctagcgctgtggatcgctgagagtttcgtcttcgaagagtttccgtgttcgcgatggcggatgacaaggacgaggaaggaggtttcgcggcgcagaagataacgattggagtatgcgtcatggaaaagaagcttttttcggcgcctatggagcagattcttcagaggttgcaagcgtttggtgaatttgaggtcgtacattttggggacaaggtcatccttgaagaaccaattgagagctggccagtgtgcgattgtttgattgcttttcattcctccggatatcccatggaaaaggctgaagcatatgctgctntaagaaagccctttctagtaaatgaactggagccancacaccttcttcatgatcgaagaanagtgtatgagtgtcttgaaa

SEQ ID NO: 86520 - DNA, 217 bp, Glycine max
  Clone ID: PAT_MRT3847_49139C.1
gtcccagtgggatcgtcggcaactcgcattcagccgtgtcggccgctggatctatgcgccgaggcaggtgcgatgaccaagcctctgcctcgatctcggccacgctctcgacccgctggcgctcgggcaactccggccgcgcgatcatgatcacgggcaggccgagcgtgcgggccgcgtcgatcttggcccgcgcgccatcgccgccgcaattgtg

SEQ ID NO: 86521 - DNA, 287 bp, Glycine max
  Clone ID: PAT_MRT3847_4913C.1
gtttaggacagatcaataacttgatcagttgatattatttaaaactcctcttatatgacactgctgctactgagagcggagaggccacaatcataacctaagctttctacttattttgcgcgtactctacaacggagcttgaagtaaaccaacaacttttatgtaacttcgtgagtaaaattctttaatgtatatttaatttcataccaaaaaattttcatcctgcctatcttcattgaaaaatataacatataaaatttattggggctgccccgcctattgtcctt

SEQ ID NO: 86522 - DNA, 354 bp, Glycine max
  Clone ID: PAT_MRT3847_49140C.1
ggcatcttaacagctccacatttcgggttactgtctgttcatgctaccatttctaagtctgattcttaccgggtacttgacaggtgctgccactcgctccatcactatgatgaaccgactgtaccgtagctagatgagtgctgctatctgctcgtgaagtgttatcattctgaacccgtgtgacatatctgcaaagttgaagttcctaacattgcgctactggccactcatgcggcccaataaagttcagcgtgcttatccggaccagtgaacgaggggctcctcatcaagtactgtgaccagatctgacctgctatactcgacgtattcgtggaccatgaccacgccagctag

SEQ ID NO: 86523 - DNA, 461 bp, Glycine max
  Clone ID: PAT_MRT3847_49141C.1
ggacgattggccctacacaattcacctcctctctcacatttatgttcacgacatgtatctctcttcactttttcccgctttacatgtcaatcaaatgaataatactattactttactcacattttttattgaaataaataaattctgttttacaattgattgatcttttatgtatttatgtcaatttggaagtgctgctgtgattttgtgtgcagcaatagtgcgcgctttctttggaagtcaataccttcctcaatcaaagagagccagcctgaagtcaccgcggtttggaaaattggtcagaagctctggttacgtgactatgccggagtgcacgaggcaatccgtggctttgattggactcaggaactccaaaccctagttgctgcattttcaggcaagactttaacagttttctagtgtgtgtttttagctgacataagtgagttttgtaaaaactc

SEQ ID NO: 86524 - DNA, 566 bp, Glycine max
  Clone ID: PAT_MRT3847_49142C.1
acgaggttccttgcagttgggcttcaacagaatgatgtaacttgtaagtgaagataaaccaaaagtaaacaatatttcaaaagcagcgtcaacagaagcacatgcacaacaaactaaaaacttaaaagactgctcaacatttgggagcattatggtctatgaacattgcagctcatcttaataccaaaaattttcttttaaccactgaaaacctggtcaaacgatgacagcatgaaaaatatgtaggattgcgacatctaataggcctaatgtgaaattggggattattgatatattagcaaaagtaaaaaaaaatggagaaaaaatatttatcagataatgttcatatatttttattaaaattaaccagaataaagttttagtttaaacataattttttctagtatctacataaataaattcctcatctaatggaatccctccttctatcttcttgtggaagagtgagagcaatgtacaataccttttttccaacaaatactattatagcacttaaaaacatgatattttaacttcattatatattatatataaaatttaaaata

SEQ ID NO: 86525 - DNA, 285 bp, Glycine max
  unsure (1)..(285): unsure at all n locations
  Clone ID: PAT_MRT3847_49143C.1
cacgaccacactcgcggagagtcacaaccatgccgtccaaaatggcttcagaactgctggatttcgacatggaccgctatgtaaatccatggctacctcataatcgtgtgggctacctacctgcgcccatatcacgatttctcggatacagaaaaggcacatacaaagagccaccagcattagtccaatggttttcagcattcgtcggcgcttttcgtggcattctactgatcggcgcaatattcaaatacgcccctggagtngtcgacaaacaccctccgatca

SEQ ID NO: 86526 - DNA, 584 bp, Glycine max
  Clone ID: PAT_MRT3847_49144C.1
gcacgagagaatattctgggattctcagttggttctttgccttttatctacctcagtgttccattattccaggagaagcctcgaccagtgcatcttaggccaattgctgatagaataaaagcggaacttcagtcttggaaggggaatttactttcttttatgggttgtgtgcagctgattatatctattatcgatggaatgcttctttaatctttccacttatactcttggccaaaagccctgctaatagaaatgcagacttggactagaaacttcatctggacaaggggatattttaaagagaaaactggttactgttggctgaaaaactgtgttcctcctgggatgaagagggcattgatctctctccgctctctctcgcataaatgaagctgcttctttgaaacttgcatggcaatttgtttactcctctgatacttgggccactttttttaagggcttggcttcttaattataactaccgtgtgaatgacgaagccgactacacataattgctaacttgtgtaaccagtaacctatagacataatcttgtatatcaactgtctggccagcttgcaaatca

SEQ ID NO: 86527 - DNA, 378 bp, Glycine max
  unsure (1)..(378): unsure at all n locations
  Clone ID: PAT_MRT3847_49145C.1
cggctcccgcagtttcctccaatggctcccgcaaggaagaaaccatctaagccaagcagatcgccgaagaacacgatgaaagctccgaatccgaagaagacacgccgccgcagcaactgcgaccggagcaactcgaactaaccggcaactccgattccgcgcgacagctctcttctgtccgtgacggagctttcctcgacgagctactacccgttagcgatgacgacgaagagagagaccgatgacgacggacaaacatgcagaggttcggagacagggttggagatgacgatgacattgaaaagaagtcgagagctattgatgaagagaaggcgagagaggaaaagatgcngatgccgaatgcagctcaacatcaac

SEQ ID NO: 86528 - DNA, 484 bp, Glycine max
  Clone ID: PAT_MRT3847_49146C.1
gatctgtaaaagacatgaattatagatcgacattttcttacaaacgactcacactctcctaatgtgacttaataagccgcacgtggtttacatgactcacttaaaactagaactagacgttaaccaatcgctcctaaccgtctaatcacacaacgagaacatactgctttttgcgcacccaactgacgtacacaccttatacgaggacaacacaccttaagaaccctaactatcacctaagacgtggcattgaccaacaatgaaatgatgctaactggaaccataataagaattaactcctaactgctagaacaccactatggactaacaaagtaagccttggccggcccagaaatgtttactgcgggtctgaatacagcgcatactccaatggctccatgcactgggactgacaggaactcgctgattaacacccggttaagaggggatccattgctcaccgtcaacatggtctgttgggcta

SEQ ID NO: 86529 - DNA, 245 bp, Glycine max
  unsure (1)..(245): unsure at all n locations
  Clone ID: PAT_MRT3847_49147C.1
ggagattgcttcttcttcccttttgttttcaaatttcaatttntcatcgggttctctgaaatgganagagatttcatgggnctcaanctcaaaagnanctcntgacnacngttgaaggaggaggangnncgtntttggcttcaaanannctggtttcacaaagggtcggattgcnanagtggccattctcgaacnaaggnttntgtcctncnacanntgatgnctttcaagggtttcnantgant

SEQ ID NO: 86530 - DNA, 652 bp, Glycine max
  Clone ID: PAT_MRT3847_49148C.1
caaagtaaagaattgcaattgtctatggggtataaaactatctaaatggtctatagcataaaaccagactccgagcaaatgcatgtgcatgtgcgctccatgcttcggcaacgtccacattgccctcttgacgactgatcgtcgggtatatttccttcaaatggactcagcgtcaactgcgtgacgctgtaaatcgcgcaacgcgctcgttcgcaaattttgggacctgcgcctcaatgatatggagatcatggggtaaatttaagcctgcgccccttgctggggcaggaagtcctcctccaaacgctttttctccttgaaggatccatcggaagatccggcctcctcatcacccatgttcaaaccaatctgctgggcgtatgtagcgagctcaaattcatccagcaggggaagctccttatccgccctgacgtaactcttcttttcgatgtaacccttggcgaaaataaggtcaatctcctcgagggatcgaccggcagtctcagggtagaggaagtagatgacggggaataaacacgcgttcaaaaccgcgaaaagaagataggtaccccagccaatctgagtgatcaatacaggcgtgatcatgacgatgaagaatttccacagccagttgttgatcgtggaaaaagcg

SEQ ID NO: 86531 - DNA, 240 bp, Glycine max
  Clone ID: PAT_MRT3847_49149C.1
gcaggcgtacgaatacaagcgatttgtaggggatctaccgttaccgggatggagattctttacaagaatcacaaactttattgcaactgaataaacgaccgttcctttctagaatgatatgttctttacctcacaccactataaaaaaattacttgactggcacggtgtgtaatgaccggttgctttacttaaatcaaccgctcagattatccatcccactgcaaggtgggtctatacta

SEQ ID NO: 86532 - DNA, 265 bp, Glycine max
  unsure (1)..(265): unsure at all n locations
  Clone ID: PAT_MRT3847_4914C.1
tcccccttcgaccctgccatctattcgatccacagtaactcgcacaatgaaagatgcaacgggagatactgtgcgctagcctctcgagaactgttacctcctctgcaacatcaactacaacgacttcactttgaatcanttccaatagcttctaaagacactcccataaacaaccaaactgatcatgacaaaaaacacactcagttacaaggccatgcaacgcacaccctagaagacgctaaaaccctacataaaggacataaac

SEQ ID NO: 86533 - DNA, 293 bp, Glycine max
  Clone ID: PAT_MRT3847_49150C.1
cttccgttcttttttttttttttttttatatttttttgtttttattttttcggctaaagaaatagggagtacttcctttaaaaaaaatgattctgccactattgggaattttctaaacatctgattcgtcctctcaaagggttgattactttataacccatatcaaatccctatacttccactcggggtccccacctaataccaaggggcctgaaaccgcttgaaaatgggaaccaaaggaacaatctgaggctaaacatttgaaccagtagagaaaaagggcacgggttttt

SEQ ID NO: 86534 - DNA, 851 bp, Glycine max
  Clone ID: PAT_MRT3847_49151C.1
attgagatgtcaattccctccatactggacaaaactatttctccacctggtaagcatgtgacccacgcgtccgtgtttgtgcagtatacaccctacaaaccattggatggtgattggcaagatcatgactacagagaatcgtttgcacaaaaatgcttcaagttgattgatgaatatgcccctggcttcagcacatcaatcattggttacgatatgctgactccaccggaccttgaaagggaaatcggtttgacaggagggaatatattccatggagctatggggttggattcccttttcctcatgcgacctgcaaagggatggtcaaactacaagactccgcttcgagggttatacttatgcggaagtggggcacatcctggtggtggtgttatgggagcacctgggcgtaatgctgctcgtttagttcttcaagaagttggagaaagaacttaaagtggtgatactgagttatgattctcacccaaatggttactgcctgcaaactggctcggaaagatggctatggctctttcattggaattatatgcagtaactattgcaaaatttgcaacgcgtcagatagaagaatcatcgtgacaatgatttatcaatttggatgagctgcataacaaagatgcagaaacctgtaatgtggatttccgaacactacaacttgtaatcctttttgataatttgactgctgttcaatgcattgattccagtaattactgtttgacacaggacatccatggttgatcatgaatatgaattataatgtgtaggaaagtatttatacgcggtcaacatttcaagtaaattgaatcaatagattaactgaaattgggatc

SEQ ID NO: 86535 - DNA, 257 bp, Glycine max
  unsure (1)..(257): unsure at all n locations
  Clone ID: PAT_MRT3847_49152C.1
gaattcagctcgnagtcacaactagctgctgttgagacccaactctttcctgatcatttattaatgcagccctcacttgatactaccgggaccgtactatatattcagggggtaaaccaaacactaaataaagtcttctgctatatcttatttctattccactctatattcacattcgaagcacattctgatacataaaccttttcacaaaaataaactccttctatcaacatatttagcatttaaccccttgcgcc

SEQ ID NO: 86536 - DNA, 330 bp, Glycine max
  Clone ID: PAT_MRT3847_49153C.1
aaaaattatttctgcaactttttttttacttgaaacagaactcaaacagatttttttttgacacaaagtctgaaagacacatgaaacaagaacaagaacaaaaacgtaacaagaacaagaataagaacgaaacatttttcaaacaggaacgcaacaggacacaaacaagaaaacaaataacagaacagggacaaaccacgagcctggacaaattacaaagaaagatattaggataggatagaacctgtatcaagagctgaatctctgataccaaatgatgtgaaccttacggggcgaaacatttgatacaggctacggagatttggatga

SEQ ID NO: 86537 - DNA, 388 bp, Glycine max
  Clone ID: PAT_MRT3847_49154C.1
gattcccttcgtttaaagatacaattaagatgatgcacacaacacaaacggacaggttacatttggagggtggtcggtcacaacaatgtcctattctacactaacaatgctctaaaattattaacaaattcaacaaatccgtagtgctttaaaaataattgctgaattgtgtcaccgtttaaatcacataatattgtgctgtgcttgaaccttaatgtcctgtattgtatgtattcgcttttatctgcctttatgactctttcatctgaaagtactatgtaataactgctcacctgagtactgttgatcatgtttatcagtatgatgtatcataatgctttacttgactcttagaaataataaattcatttatctgtttatccttttt

SEQ ID NO: 86538 - DNA, 422 bp, Glycine max
  Clone ID: PAT_MRT3847_49155C.1
tttcaagctttgtttttgtcaatattctattgaccttctcggtggaggaattgtagtggacacaactggagattggatcacactgattcaaaattattcaattagtaacttgctgagagttgctgcttggataaaaggctgtttaatggttaagattgtgatgtctgtgaatgcagcagtaaaaaggagtgcttggctctcattggtacaagtgtttttaacaaacatcaacagtgcaaagcattttgatgcatgtaagtggacaaaatctgaaccacattcctgggaattgatcttaccaatagaagtatgtagaactaataatggttccgaaatgtggcgatgtgagtgggcaaatcaaacctgatggcatttgtgtgttcttattgacaatgccaaacagtgtacagcttttgagattc

SEQ ID NO: 86539 - DNA, 271 bp, Glycine max
  Clone ID: PAT_MRT3847_49156C.1
aattcggctcgagaccggatagagcaacacttagacttactgatacatcatgtcttttctatacccaaaacaagtattacagcggggaggctcaaatccaggatcggggcgtcttttactttctccatataacaaagtataaacaataccagcctcatcctcagtatttattcatttccacctattctcataaattctctgtctcacaccaattatagaacatactcattctcttataaaacctttacccatcttactataactctatctc

SEQ ID NO: 86540 - DNA, 350 bp, Glycine max
  Clone ID: PAT_MRT3847_49157C.1
cacaaatatatcataattttattgaaagtatggataacaaatatattaggacgaccgtttaatattgacattcaacggttcatttgttttgaccagccaccacgactttgtaaactattactaaaagaattccagttcaatttatcgggggaaaaaagtgaaacatccaattgctgattataattattccatcactgctataatggagctcagagagaaagccccatcagcacttaatggttgggaacctaacaaagccatctaatgattaacagagtaaagtcgcgcatatatatgccagagcaacattatagccaccaacctataacttttatgtgtagatggatcac

SEQ ID NO: 86541 - DNA, 526 bp, Glycine max
  Clone ID: PAT_MRT3847_49158C.1
acccacccccccccccccccccccccccccccccccccccccccccccccccccggcgcgcccgccccccccccccccccccccccccttggggagccacccctttttattttttttttttattttttttaaaatgtaattgtgtaacaaaaaaaaaaaaaaaaaaaccaaaagaaaaagtgttttcaaaaaaattaaaagaattgggagaaaaaaaaaaaaaaaaaaaaataaaattttccaaaaaagagggtttacaaaaaaaaaaattggaaggtggaagggggccaaaaagaattgggttctccccacgggaaggggttccccagtatgcctggggctccgggaaatgagaacacctgatattttgggagccaccttttttgcagaatatttttttttttcgggaagcggaattttccttcgccccaaaaattagtagcctccccatcatgggggatgttgttctttttggggcccaaaaaaatgaactggggaagagaaaatttattagaaaaaacaaggg

SEQ ID NO: 86542 - DNA, 205 bp, Glycine max
  Clone ID: PAT_MRT3847_49159C.1
tctgaaaagctccttgcggatcaaatgctcccaaacagatgggaatggaagccctgccaagaggacagcgcttcatgatcttgttgagaaagaagggcccattcgatggtatcataatctctgccgacctgtgccagacgttcttcctcttatagcaagcggtggacaaggcgtccctagccaccccgccatttttccgaaagca

SEQ ID NO: 86543 - DNA, 540 bp, Glycine max
  unsure (1)..(540): unsure at all n locations
  Clone ID: PAT_MRT3847_4915C.1
ctagctatctcgatcgaactgtccaaggtcctgtcactacaacaacacccatagaatgggggcacggcaccaaccggtaacaacgtataagccnaaccgaatgcccaacaaaagaccggcagcgcctacgagtacgagaacgggcaatgaggaggggagagggaggggcggtagtaatagcggctgacgcgggaacgagtaaagcaagggagtggaaacgtgagattaattacggcacgaattgtatatagtgtattaatgacgccgtggcgcgtgatgggggggggatgctgttgagcgggggtattatggtgttgtaagcgcaacacacgtgccagaaaaagagacagaaaaaagcggaagccaagatgagtaagcatatgagtgcgtagggggcaaggtcggtaggtaaagagagatgggggcctgtagcgtgaatgtacgtgaattgccggcgttaaggccgttggcgtagtgctagattggttgcctcaatgcatcgttaagcggctagtctgcntaaaccggggaaagttgcag

SEQ ID NO: 86544 - DNA, 1129 bp, Glycine max
  Clone ID: PAT_MRT3847_49160C.1
cggctcgagagaagcaactacccaagctggttgttgggttattgttaattggagcagggcttgtgctctacacaaatagaacagagaggagtgcccagctgcttcagcagccagaagtcattgcaaccactgttgaagaagtttcttcaactgcaaagccattggttagagagcttcaggagcttcccaggagaattaagaatattattgcatcattacctgatcaagaggtggatgaggaggaagcctccctctttgacatgctctggttactacttgcaagtgttgtatttgtgccaatatttcaaaagattcctggaggcagtcctgttcttggctacttggctgctggtatcttgattgggccttatggtctctccatcattcgtcatgttcatggaacaaaagcaatagccgagtttggagttgttttcctgttattcaatattggcctggagctctctgttgaaaggcttagttcaatgaagaaatatgtctttggattaggctctgctcactgttgtgggacttggattgaatttagaaaaggctggagctactgctgttgtcccagagaccttggaaccaagtcttcaactagcagctgccgtgcttgctcaggctaaacttcctacatcagagattgcagcgactataaatgaattcagatcccgccatctttctgagctcactgaactatccgaaacaaatggaacttcttttggatatggatataatagaactacgagcaaagccaaatctcattccccagattcatcagatgatactcaagtctctgaaggtaaactggcgacatgaagattgccccatatatacaaagtggaaggtaaaagaaaacagaaaagtgaaaaattgtatagcagcagagtaaatgttccatcatgatgtacagaaatatatatatctgcataaaaaaatttgattaatcatccttaaatttcagctgaggatggtgtccttgttttatgtaacattgattttgtttcatattctttggatttcgaaaagcgtgtataatatgaagtcatatttccattttttttatcaagagtatgacatccctgaacaaaaaaaaaaaaaaaagggcggccggctcgcgatctagaac

SEQ ID NO: 86545 - DNA, 206 bp, Glycine max
  Clone ID: PAT_MRT3847_49161C.1
tttcttgaatctcacatagctattgactccattactaaaccaagtaataccctgaaatcatcaccgaattccattgttactctttccctctctagagactactattgcatacaactcaaccttcgtatagttaattcctaactaggacacttgaaaagtccacttccttatttataaaataattcattaattattctaacccttct

SEQ ID NO: 86546 - DNA, 732 bp, Glycine max
  Clone ID: PAT_MRT3847_49162C.1
ggcaatgacaagaacgagatagagatttgcctcgagagtggtgagtaactcttggccatgcaaaaatggtttggaattggtggtcaaggctacatgaaagtcttccattatatcataatttagtgccttgtctgctgttaattcagttccttcccttcagctggactttgaaggtcttacttaccacctgaaattatggggtggagctgtcattaatggaattgaattgagctggataaacctctccatgactatcaatgaaattgaatcaaacaaatggagtttatagctttggtcctttggagtaaatatatatatagggtggcgtcccaaagaaccgaaacgacccttttccttttggtatgtggtttggttttgcaggggataatgcagttgagactgaccaaggccttcacatggtttacatgcatgctgggaccaatccctttgaagtcatcaatcaagctgtcaagtaaggcatcctcccttgtctgtgttatccttctaagttgataaaaattatgttacctggccttattgaaaaagtaatttttcatttggtgaacattagattctgtatattgacaattttagttttactgattcctttttcttcttttctttcaagggctgtggaaaaacacatgcaaacttttcttcatcgtgagaagaaaaggttgccatcttgacttgactggattggatggtgcacatgggatgctatctatactg

SEQ ID NO: 86547 - DNA, 1339 bp, Glycine max
  Clone ID: PAT_MRT3847_49163C.1
catgacaaagacattttacaaaatactttaaaataaaaaataaaataaacatcttttcgaaggctaaaataaagataaaataaagatttaagttccactaataaaaatatatttaggtaaagacttgatataaaaaggaactttcgtgctaagaaattttatgcaggattattggttggtgtcaacaaacttatgtagttgaaagtccctgaaaagacacagatatcatcattaagcttggttgtaagatgttacaatagtcacatgttgtttgagctgtcaaccttcagtattgaactgagatgttttaagaattggattaatcccagctcttttggttttacaattgctaatggccagcctaatcaagcaaatagaactgccccttctcaaggaatatctaggtattttattgttaaaagttgcaatcgtgaaaatttggagttatctgtacaacaaggagtttgggcaactcaaaggagcaatgaatccaaactaaatgaagcatttgactctgtggaaaatgtgatattagttttctcagtcaaccgtactagacatttccagggttgtgcaaagatgacatccaaaattggtggttctgttgctggggggaattggaaatatgctcatggaactgcacattatggacggaatttctctgttaaatggttgaagttatgtgaactgtcattccacaaaactcgccatttaaggaatccatacaatgagaacttaccagtgaagataagtagagattgtcaggagctggaaccctctattggagagcagctggcatccttgctttatcttgagccggatagtgaacttatggctatctcggttgcagcagagtcgaaacgtgaagaagagaaagcaaagggagtgaatccagataatggaggagaaaatccagatattgtaccatttgaagacaatgaagaagaggaagaggaagagagcgatgaagaggaggagagctttggtcatggtgttgggccagctggccaaggcagaggtaggggacgaggtatgatgtggccgcctcatatgcctctcgggcgtggagcccggcccatgcctggaatgcagggctttaaccctgtaatgatgggtgatgggttatcgtatgggcctgttggccctgatggctttggtatgccagatcttttacggtgtgggaccccgtggttttgctccatatggtcctaggttctctggtgattttggaggtcccccagcagccatgatgtttcgtgggcgaccctctctacccgggatgtttccaggtggtgggtttggaatgatgttgatccctggacccgggcctttcctgtta

SEQ ID NO: 86548 - DNA, 493 bp, Glycine max
  Clone ID: PAT_MRT3847_49164C.1
gagagagaactagtctcgagttttttttttttttttttgataaaaagcaaggtatgcaaaggtatcattagaatacctgagttcccaactaggtcgacacatgaggtattaaccaccatgattttatccttttaacttaaactattttcaaattccctattcaagttagtcacattaaactcacctactactactagtaataacaattccggggtagatgtagctccacaacagtaattaaaagattggtatgagaggaaaatatttttaactcttagcctcgtgagagagattaggtaggagcactgaccctagttaaagaaggcagggctgaaaattcttcttcttcgcctttcaaattttgggttcttgttgcaggaatagcagagacagagagaacatatgagaaacacagaaagaacatcagcagcagtagcagcctcatgagttttctcagcatcttagatgatgatgatgaatagcatacaccaca

SEQ ID NO: 86549 - DNA, 1036 bp, Glycine max
  Clone ID: PAT_MRT3847_49165C.1
tgtcattccacaaaactcgccatttaaggaatccatacaatgagaacttaccagtgaagagaagtagagattgtcaggagctggagccctctattggagagcagctggtatccttgctttatcttgagccagatagtgaacttatggtatattctcctttgagtcatcatcttgctttgtgaataaaaactgataagcaataatcatgatgtacaaatgggaaaaaaccaaattgttctgttatgttactgtgagaaattgagtgactctggaatctggattgatatggtaattgttttacttgatataaaatggaactttcttgctaagaaattttatacatgattattggttggtctcaacaaacttatgtagttgaaagtccctgaaaagacacagatatcatcattaagcttggttctaagatgttacaatagtcacatgttgtctgagctgtcaaccttcagtattgaactgagatgttttaagaattggattaatcccagcctcgaggtttttacaggctatctcggttgcagccgaatctaaacgggaagaagagaaagccaagggagtgaatccagataatggaggagaaaatccagatattgtaccatttgaagacaatgaagaagaggaagaagaagagagtgatgaagaggaggagagcttcagtcatggtgtagggccagctggccaaggcagaggtaggggaagaggtatgatgtggccgcctcatatgcctcttgggcgtggagcccgacccatgcctggaatgcagggctttaaccctgtaatgatgggtgatgggttatcgtatgggcctgttggtcctgttggacctgatggctttggtatgccagatcttttcggtgtgggaccccgtggttttgctccatatggtcctaggttctctggtgattttggaggtcccccagcagccatgatgtttcgtgggcgaccatctcaacctgggatgtttccaagtggtgggtttgggatgatgatgaatcctggacgtggtcctttcatgggt

SEQ ID NO: 86550 - DNA, 729 bp, Glycine max
  Clone ID: PAT_MRT3847_49166C.1
cggctgcgagaagaaacagaagggtacggctgcgagaagacgacagaagggtacggctgcgagaagaacgacagaaagggtacggctgcgagaaagacgacaagaagggtaccggcctgcgagaaagacgacacgaactcagactcgcctcttgccctcaccggcgcggccaccaaacggtgcaacgccaccagcgtttattcacagatcacacggcggcgacgacctcccttaccagcgctttgtctcgaaaacgcgcatctttgactcacttcctcacaggcacggatcgcgctgcgccctccctcaccgacgtcaacgtgaccggcttctggtggcacatagcgcactgcactcgcacaaagccaacacttcctttgaactcacgcgttcctggtggagacccaaaagttcgaaactgaacattttcacaagctttcggagggcgttgatgagttcggtagctattttgctttcagagttctcaggtgcaaattagggttcttaaccatgagtattgattatttcaagcaggacattgatgaacttatcggtgaattcacccaggatgagtcaacaactttggctgagataaaaagagtatggctttctaggaagttctcctacatttatgaagctcgtccttctgccaacctggccttctttatgcaatcactgtatgctcattgtatagggtacatggttggtaccgcaactttatctcacaga

SEQ ID NO: 86551 - DNA, 385 bp, Glycine max
  Clone ID: PAT_MRT3847_49167C.1
gggtggcaaaagaacaacgaaggggggacgaagttaatggtaccagagtagagtacagccgtagaatggaaaaacgaactccctcgcgttgagaaatgggtgtagtactcttccggtgggttctgccactgactctgttgctcacttgcgcgttacgtttccagtctgacgatcgtctcctctactaccaagagttcggcatcgagggaggactagcctccttcgattcagattcggacccatctcgcacctccaacatggggaaggacttttctgactcgtccaccgactctatttatctacttccctctcgaagacgctttcggcgacgccgaattctccgaacgcttgcaacttctccgcgcgccttaacacgtggagccac

SEQ ID NO: 86552 - DNA, 612 bp, Glycine max
  unsure (1)..(612): unsure at all n locations
  Clone ID: PAT_MRT3847_49168C.1
ggctcgattcggctcgaatgcatttccctctctaaccatatttacaacatccaaacagggacttaattaaattactagaactggagtttttaagctatcccatgatgttcgccaagaaacgttcccggcgaggcgtcgtttcatcgttgccgagctcgaacgcgaagaagctattgagactgccgcacgtgttcgcgaaaatactagagcttccttttccttcagaagacgacgtttccgtggaggaaacgccgcagttttttcggttcgtggcgtcgtgcaatgccgatggtggcgtgagagctctggcgatcgacatttttccggggataacgaaaatcgtgataaagagaatggacggtggtgacgtggcggttccgggtcagcagcagcagcaggttccttctggctttggactgtggcggttccggcttccgccgtggacgcagccggagatggttaccgccgtgtgcagcggcgggaagctgatggtgacggtgccgaagatcctgagctgagcaaactgattcgattcctcaaccgtacgtggaatatatgaaagaggcgtgtgctttgaaaagtagcgtntggatataaactatgtgagatgtg

SEQ ID NO: 86553 - DNA, 135 bp, Glycine max
  Clone ID: PAT_MRT3847_49169C.1
aggatctgattgagtcaccagaagttggtggaccttcttttagctgaaagaattctaacatttttctcccatgatagataatttgttattgtttaccctttccaagctattatgatagtattttccctttgtaac

SEQ ID NO: 86554 - DNA, 819 bp, Glycine max
  Clone ID: PAT_MRT3847_4916C.1
ttgttgtcccatcgtgccagtcacttgcacacacaattgcgccgcaccactttctgtcgtgtcttctcactgtcaatttgtgtctcgttctttttaatctttatgctattttgtgtctcaccgtcgtcgtggtgggcgcttcgctgtttcataacgatgagaactaagacgtgaaacaatggtggagggtagcgactaggtgctttcgcagtaaaaaattgtgttgtaaatcacaattcgttaatcgtgacctctcttgctcagctggaatctcgaaattgaactatgaaccttcatccgtcaatcgccgcaagcttctctgtggcattcgactattgttgatctctctttccattatgcagctgcctccaatgatttttggatgcaatcatcgtaatgtttttaggaaaatcagtgggactaattccttaccatgaaagataagctcaagtttcggagggtatgtagctaattttatttttattttttattgcacttattattacagcaaaattaagattgaagcagctgagagagagaaggtatacgtgacttggtctttgatcttcttattaattcccttgaacctgagcataaaataagaatgtctatgattttatggtgtatttggaaaaggagaaaccagaaactttgggagtcagcagagattctattgcagatctctatatgttccgcgcttcagtattatgaagaatggagtcgtgctaggaatgcgcatcatcaacaacgaagtcatcaacctctcgcgcaggtttcaacatcattgggctgtgcatatatacgccatgaattcaagca

SEQ ID NO: 86555 - DNA, 347 bp, Glycine max
  Clone ID: PAT_MRT3847_49170C.1
ggtgaacaccgaaaggccatgttttatttttggggacactaaggggcagttgtgttttattgcctagaaggttcctggacgacaccaaaaacatgtggccccaggttgggataacccacatccctagggcccttaccccctgttatttttggtttgaaaaacaacctcaacttttttaagggagatggggaggggcccacttggaaccaaccgggggatttccccggtgggaccccttggggatggggaccacaatttggggggttaccccagcctttttgggtttgtttggaaaacaaaaactcgcccaaaggcctatttggggttctctccccaatttttttttc

SEQ ID NO: 86556 - DNA, 353 bp, Glycine max
  Clone ID: PAT_MRT3847_49171C.1
agcgatcgccagacactatagatatctattcgattcggcttcttgagctgcagcgaaatcctgtgctgaccagatatcgtgccttttcttttgcgcctgagaagccactcctatactcgcgctgagtgagggacaggatgtacggtggcccacataagagtgtgagctcaggacttggagcccttgacgacaccacagcagtctgcttggctaaggtcgacagtgattacaaggaatcggacattgctatagctagagccacatatcatgctgaacgtgcggctaccgaacaacatataagagctatatttctagctatctcagctacgagacccagcgctgatgaatcctat

SEQ ID NO: 86557 - DNA, 285 bp, Glycine max
  Clone ID: PAT_MRT3847_49172C.1
atagaaacaggctctatgtgagcactctgggactctcaattctcagggttaccttctctatcagcttctgccgattagctggcagtcataaagagagaagaacataacagaagttgttcataggccctggatgttggacatttcttgttaggaatctttgggaatgcttccgctctggtactgttcttcgctccagtgtatgcattacatagctgcttcactgccctctgtgatcacaatcaagaggattatagagtacagctccacagagaagttctcgggcat

SEQ ID NO: 86558 - DNA, 480 bp, Glycine max
  Clone ID: PAT_MRT3847_49173C.1
ctcgagccgcagatttcctaaccctccccataggcagtatagcaacagaggttttcaggggatattagtctagctcttatacaaaacaagttaattgactattgagactttaaatgttgtccatgcaaatgctaattgttaaattgttatataaatagtgttcattatactgaattttacaccttttttttgtggccatgccaagtagcaaggaccctatattcgtttctatgaaaaagatgctatattcccttttcctgttctgaactccttttacgccgacctctgtaaatacttgttgcagtgttataatgctggatgaggctcatgaaaggtcaatatcaactgacattttgcttggactattgaaaaagattcaacggcgtcggccagagttgcggttgattatctcatctgctactattgaagcaaagtcgatgtctgacttctttcgaatgagaaaaaagcgccgagaacctg

SEQ ID NO: 86559 - DNA, 393 bp, Glycine max
  Clone ID: PAT_MRT3847_49174C.1
tacggctgcgagaagacgacagaagggtaccttctgtaatatatttgtgtcatatttttggtaatacaggaagatctgataaatcttgaaaattacacgggcaaggatcttaaagtacgaatcaaagtagcagcaaaggagtaattcaaaattcattccttactactaatatttattataaggattaaacaagaggcaattacttagtaaattcgagaacatgtccaaatacttgaacgcttgaatatataacatacgcttatgttcaaaagcttttgttctctacgactacaagcttgggttaaaaagagccaacaagaattacaacaagctagcggcaacaagtaagtaattcttaacaacttttctgtgatttgaggaactttcccgtct

SEQ ID NO: 86560 - DNA, 103 bp, Glycine max
  Clone ID: PAT_MRT3847_49175C.1
ctcaatccgagatccttcgatggataaaggggaaaagcatgactcaagccagattctcattgtaagtcactactggtgaaacctgtatatttgctgatccata

SEQ ID NO: 86561 - DNA, 334 bp, Glycine max
  unsure (1)..(334): unsure at all n locations
  Clone ID: PAT_MRT3847_49176C.1
ggaagcgacttggtaatttgaaanagcggaaaaagggggttgtttagagcttatagtgcccctccgagggctcgttgcgcggcagccgtacaccgtcgcgaatatgacaggggggctgcggaagtggtcaggagaaaacccctccaagcggggagtcggagagctgtcagctcgttatccaccataacggtcgctgttagtccaatctttgctggaaggatgaggatttgcttgttggggagccctgcaattgggcacttggacacaataggttggccattaaccatggagattgtggtattgagcttacaagcatgggtgacaatacccacct

SEQ ID NO: 86562 - DNA, 355 bp, Glycine max
  Clone ID: PAT_MRT3847_49177C.1
acggctgcggaagacgacagaagggcctcccagcttgtactacaacaatcgtgcaaccctatgcaagagttttaggtatgcatgacaaccacaaacaggaaacagaagctggtgtctcgtgtgtgtatgtataactgtaattcactggagtggcgggacaatagggacggatagaatatggatgtgagccatggctaagttaaaggtaatgatggtgataggttccagctattgtgccaatggctcaaacacaggcaaaggtcgtctgatttaataattgccaccacaactaacaacaacacttttgaagaacaatttcatatgccacttaaaaataataaaatcaaggaaaact

SEQ ID NO: 86563 - DNA, 490 bp, Glycine max
  Clone ID: PAT_MRT3847_49178C.1
ggcgaaactggtcattattttgccatgaaggcaatggagaagggtgttatgctcaatcgtaacaaggtgcatagagcttgcacagagagagagatactcgacatgttggaccacccttttcttcctgcattatatgcttcctttcagacgaagacacatgtttgcttgataactgattattgttctggtggagaactattccttcttcttgaccgacagccagctaaggttctcagggaagatgcagtgagattttatgccgctgaagtagttgttgcgttggagtatcttcattgtcaagggataatatatcgggatttgaagccagaaaatgtgttactacaaagcagtggacatgtgtctctaacagattttgatttgtcatgtttaacatcttgcaaaccacagcttctagttccagttataaatgaaaagaagaaagctcagaaaggcccacacgctccaatatttatggctgaacctatgagag

SEQ ID NO: 86564 - DNA, 425 bp, Glycine max
  Clone ID: PAT_MRT3847_49179C.1
tcgtggcgacagaactacacgtgtggatctaacagcatgaagacgcctggataagaactaaaaaggtgaacctcatgtcttcataaatgttatgtaacggactgatacactgtcatcgtgccggtgaaaacatgggggctccattcactaggagtgaagtccatagctggcttccccacgaggaaaaccaccaaagacattacctccattgctaccaacagaggaagagtgcgatgcatgacaagtataaccacccacttggacaagatttattttaaaactatttcctacctgccacaccttgatgatgcacatttgggcccttgaattttaataccttcttaccaaattatagattggttgcttggaattcgacttggagcacggtttcttgtaccttttgcacaacacggcaacaggatact

SEQ ID NO: 86565 - DNA, 858 bp, Glycine max
  Clone ID: PAT_MRT3847_4917C.1
ggctcgagcaatgatcaagttcaagttatatttaaggataagctataatggcttatgcgatcacatggaaaaggatatatttcttgatgtatgttgtttctttattggtaaagatagagcctatgttacagagatactaaatggctgtggactacatgctgatataggaataacagttctcatggagcgtagcctcgtaaaagttgcaaagaacaacaaacttggaatgcatccattactacgagacatgggaagagagataattcgtgaaagttcaacaaagaaacctcggaagcgcagtcgattgtggtttcatgaggattcacttaatgtattgacaaagaatactgggacaaaagctattgagggattggctctgaaattgcattcaagcagcagagattgcttcaaagcttatgcttttaagacaatgaagcaattgagactattgcaacttgagcatgtacaactcactggagattatgggtatcttcctaagcatctgagatggatctattggaaaggatttcctttaaaatacatgcctaaaaacttttatctgggaggcgtaattgcgattgatttaaaagacagcaatcttagactagtctggaaagaccctcaggttttgccgtggctgaaaatcctcaatcttagtcattctaagtacttgacagaaacccctgacttttcaaaactaccaagtcttgaaaagcttattctaaagattgtccgagtttgtgcaaggtacaccagtccattggagatctccaaaatcttctctggataaatttgaaggactgtacaagcctaagcaatctcccaagagagatatataaagttgaaatctttgaaaac

SEQ ID NO: 86566 - DNA, 775 bp, Glycine max
  Clone ID: PAT_MRT3847_49180C.1
ttgtgcgaggaggttgggtcaggagtttcatgcttatgttgtgaaaactaaatcgtactctaagctggtgcccgttcagtcttctttgattgatatgtattgcaagtgtggggatatgatttcggcgagacgggttttttatggttcaaaggagaggaatgtggtttgttggactgctctgatgtcggggtatgctgcgaatgggaaactagagcaggcgctgaggtccacgatttggatgcagcaagaagggttcaggcctgatgtggtgacacttgccactgttcttccggtttgtgcacagttgagggctttggaacaagggaagcagattcatgcgtatgctttgaaacattggtttctgcctaatgtgtctgtagcttcttcattgatgacgatgtactccaagtgtggtgttgttgagtattctagaaggttatttgataatatggaacaaaggaatgtgatttcatggaccgccatgattgattcgtatattgaaaatgggtatctgtgtgaagcacttggtgtgattaggtcaatgcaattgtcaaagcacaggccagactctgttgctattggaaggatgttgagtgtttgtggtgaacgaaaacttgtgaagcttgggaaggagattcatgggcagatattgaaaagggactttacatcagtccattttgtttctgcagaacttatcaatatgtatggtttctttggagatattaataaagctaatttggtgtttaatgcagaatcagttaatgttctatgacac

SEQ ID NO: 86567 - DNA, 409 bp, Glycine max
  Clone ID: PAT_MRT3847_49181C.1
ccccagtatcgaacaccttcctttgacaccatgtgtcttcttacaaaggctaaaaaaaggttaggctctcactttgggatgaaacatgaaggacacttttgctacagacaaagatgcctccaaccaggctttaattcaaaggaatctcatgccccttaattcttaggggaaattaataataagatcgggcgttctactctggtctcgtgaaaagatgaaagaatacctcttttgtccaccatatactacgcagctgcactgacacttgtggaatccttctgggactttatttacgtgatgaaggaagccttctttatgctacaggccttcctacgggaacggatagcttacataccggattctgtgcttacactgcatatatcagctcccatggaatttgggcaaagcc

SEQ ID NO: 86568 - DNA, 685 bp, Glycine max
  unsure (1)..(685): unsure at all n locations
  Clone ID: PAT_MRT3847_49182C.1
gtgacacccagtcccctcgctctctctctcctcagcgcgcgctcttttctcttctctctctctctatatcacagatctcgctctccccaacgattcacctccgaaatttctcgcttttgttccgttcaaggttcaatttttcagaactccctttaacccctttccccctctttcttccttcttttaattatttttttaaaaatattttgtttatgggtttttaatttgtaaaatcggacacgatcgctgttcgataatttcgattctctccacaccatggcattcttctttccttagccacctactagatcatgtgacactcccccctgaaggaaaaaaaaagtaacgatcggttcggtttggttcgttttttttaagtgggtcaccgtacggcaatgccggcggccgggatgcggcgtacgacgagggtgttcgggatgaaggggnnnnnnnnnnnnnnnnnnnnnnnnnnnnnnnnnnnnnnnnnnnnnnnnnnnnnnnnnnnnnnnnnnnnnnnnnnnnnnnnnnnnnnnnnnnnnnnnnnnnnnnnnnnnnnnnnnnnnnnnnnnnnnnnnnnnnnnnnnnnnnnnnnnnnnnnnnnnnnnnnnnnnnnnnnnnnnnnnnnnnnnnnnnnnnnnnnnnnnnnnnnnnnnnnnnnnnnnnnnnnnnnnnnnnnnnnnnnnnn

SEQ ID NO: 86569 - DNA, 212 bp, Glycine max
  Clone ID: PAT_MRT3847_49183C.1
ggcgactatggttgccggaaacaaatccggatgggaaagggtgtatgtagctgttcctaggatgactattgtcataacagaacggcgtttgaagcagtgacgtgttacatcagtacatcacatcacatcacgtaaatataggtaataagctcggaaaaagttttgtcgtttcacacccatctgtatcccgctaccatttccacacaacatac

SEQ ID NO: 86570 - DNA, 457 bp, Glycine max
  Clone ID: PAT_MRT3847_49184C.1
aggagtcgctgaggcagtacaaggagatgatgaatcgaggagctcactgactcacacaagtcacaaaacatttgctccaataatcaaattggggggaaagaaagaaaacgtgattaaacaaggttttcttgtgttgcattgcattggttttttgttcaggcaaatgatgaaccaaacccagtttgggatatagggaaagttttagtttagagtctatggagaaaatgtgtaggggatattttaatttccatgaattggtttttttttttccccttcttttggttgtttatttattttgttaatagtgttaatgccaacgctttttaatgcaatcttccgattgccggaggaaatgtttttttgctggtattttcaatcttcttttggttctttatagcatagtatgttagtacttgcctatgctttttaatgcaatcttctgatttccggaggggcc

SEQ ID NO: 86571 - DNA, 207 bp, Glycine max
  Clone ID: PAT_MRT3847_49185C.1
gttcaaaattggtaggaagtagggttaatttatctatgcattgtttatctaaacttaatgtgaaaactttaaagaaaaataaaggtttcacattaagtttagataaacaatgcatagataaattaaccctagttcaaaattggtaggaagtagaaaatcttggagttatttcgtgtccttttcgctcgaaagcaacattctatattt

SEQ ID NO: 86572 - DNA, 237 bp, Glycine max
  Clone ID: PAT_MRT3847_49186C.1
gaggcaaaaaatgaccattacttaaattcgagggcgatgcccacctcatgtgacttcgggctacaatcgaagccatggggcgcgataaacacccgcactctggattccataaggtgtatgacaccataaccatagccttattgatcggctcgtattgcttgactttactttccgtgtgctaggcacggaacaagccgtgtttatgcattacgaaaggctcggtgcccttagagtaac

SEQ ID NO: 86573 - DNA, 1597 bp, Glycine max
  Clone ID: PAT_MRT3847_49187C.1
gcggaactgcccctcaggtggtcgtttccgccgctgttgagcctgccgattgtgcgccatcctggacaaatgctcacttccgcaaacatcaagttacaactttttccaattaatgaaggaactcggataggacttgaaaaggatgggcataatccttatttagaactcacacttagaggtcgaaagaaaatatgttcaatactaaaacaccttggaaagaagtggggaagttcaagtatagccaaaggggagcttatgctttttccatataatataatggaaaatctatctggctgcagaaggtggacaattaatgatagtgacacaacagcctctgctgtttatactgctgttggaagccctgcactcttccggttgaagtatggctggttctacatgcttgaacccgggtcttttggtataccttccacaccaactcccgataagcctgatgtagctggaagcggcaatgctaatttagaggagactttatgtggtgagcgggacaaggttaggataagcaaagaatacaaagcaactgaagtgggcaatgcagcaagtgaaactgtgtctcagaaagtagaaaacgctgctgttgatcctacggataatgagccaagaacaagaataagtagcagccttcaacagtcatcatctccatgggttgatagtctaagcaatataagcatagggggcctcctgtccgaagcatcattatttggtgggcttgatccaaaatcatttgctggcatacagccatgtgatataacttctgattcattggatgcttttattgctgctgctcaaattaataattgcccagttccaagactacctgctgatgacttgcacacatctattttggatgctgaagaaacatgccatgcatttcctcttcgaaagttatcttccccaacagatgtgcaggcagcttgtggcaaggattattctgcagtgtgcagtcaggatgtttcttcaaacttattaaagttttcaaatgcagacaaggtcaatgatcaagatggagcttcacaaaatcctccatccgggaagactcagacagacttgttactttcttcacgcccatatgatgatgatagaagtcttgggttaacaggcatcaattggaatgattctatgggaccttttgatcttggcatgcccgctcagaagcttaatggtggagacagtcttagtattggtggatttgttaaataacagctcttagatgcataatttgttgaccgaatgactccatttcgaagattcgttcttaggaaaaagaagaaaaagaaaattgtacataatagaaatacttgccgaagatacgagccagtcagaatactgattacttagctgtgtccggcttaaactttaaaccatagcctgtgaggggactaatatttagctcttttgcattgttttcgctttggtcccgatttggtttggctttatgtcaactattctagagtgtcggctgaaatgtaattataatgatcatgctatacttttgaacctttcatcttactctggaatagactaatcttatttggtgcgaatgggaagacatataagtgaaagaaaatgattgctattc

SEQ ID NO: 86574 - DNA, 373 bp, Glycine max
  Clone ID: PAT_MRT3847_49188C.1
aagaagaagaaagctctagcctctcacgttgaaactctcatgccattctctcttcacttacccaccaatcacccatcatggaaccttccaaaccccaagcaaccaacacccactaagcaaaacctcatttttcggcgattcccggtcttttcctcgctcagaacctccctcgactgcgtctccgatggaggcgtcgagaagggctcttcttcgaagccaattcggctcccattcgtggtgaggagccccgccagtgtctcgagattcttctggaccggtaactgcttgcaggtcgtgagcgtcgacggcggcggcagtgcggcttctgacgtgagttttgatgataggtggctgagggcgtttggctctgttg

SEQ ID NO: 86575 - DNA, 3374 bp, Glycine max
  Clone ID: PAT_MRT3847_49189C.1
gtacgacctcgcagtcctgggccgaactaccgggtcgacacgcgcgtccgaaactaaacccttgccttccaaagattccctctctctctctctctcttaacacttcatcagcaaattcagaaacactgcagtgtataaacctttgcagagagacatatatcccttctcagaccagttagttaagtaacggttttctcgtttacatattttctcattttcttcccaatttacccttgtttatgctcttcattttctctcttatgccatccaactaggaaagttagcaaagctttttccatattttttttttgagaaattaagagaaaggggaaaaatgataacctggggagatttctatcacggtgatgtcggcggtgattccgctgtacgtggcgatgatcttagcgtacggctcggtgcggtggtggaagatattctcgccggaccaatgctccggcataaaccgcttcgtcgcgatcttcgccgttccgctcctttcgtttcacttcatctccttgaacaatccctacgcgatgaacttccggttcatcgctgcggacacgctccagaagatcatcatgctcttcgccctcgcaatctggacgaacttctccgccaacgggagcctggagtggatgattaccattttctccctctccacattgccgaacacgctcgtgatgggaatcccgctgctcatcgccatgtacggcgaatactccggcttattgatggtgcaggtggtggtgctgcagtgcatcatctggtacacgctcctcctcttcctcttcgagtaccgcggcgcgaagcttcttataatggaacagtttcctgaaaccgctgcttctatagtttctttcaaggttgattccgacgtcgtttcgctcgatggaagggattttctggaaacggatgccgaagtcggcgatgatgggaagcttcacgtgacggttaggaagtcgaatgcatctagaaggtcctttatgatgactccgcggccctctaacctcaccggcgcggagatttacagcctcagctcgtcgcgtaaccccacgccacgtggctccaacttcaaccacgcggatttttactccatgatggggtacgcgccgaggcattctaattttggtgccgcggatttgtactccgtgcagtccacgtcacgcggggtcacaccgcgcccctcgaacttcgaggagaacggtgcgcctgctgctgcaaccacgcagcagcagcagcaggccatcagctccccgaggtttcgggttctatcccgccgtgcagacagtgccggcggcatatccggctcccaatccggaattctcttcttccgggttaacgaagagtgtgagcaagaattcgcagactcagcctcagcctcagcctcagccacagattcaagctcaagttgctcctcctcctcaacctcaagtagctcaacctaccaacagtgggaacaaagccaaccacgatgctaaggagcttcacatgtttgtgtggagctccagcacgtcgccggtctccgaagccggcggcctccacgtgtttagtggggctgatttcggagcgtctgatcaatccggtcgctcagaacaaggggccaaggagattaggatgttggttgctgatgaccaccctcaaaatggagaaaccaacaaagctgcagcagaaggagagtttggtggtgaagaattgaaatttccaggtaaagaaggagaacaagcagatgaagagggagaaaaagcaggacccggtggtctaaacaagcttggatctagttcaacggcggagctacacccgaaatccgccgttgccgttgctggaaaacacatgcctccggcgagtgtgatgactcgtctcatactgattatggtgtggaggaagcttatccgcaaccccaacacttactctagcctcattggtgtcatttggtccctcgtggcgtttaggtggcatgtgcaaatgcccaaaataatagagaaatcaatctccatactgtctgatgctggtcttggaatggctatgttcagcttgggtctgttcatggctcttcaacctaagataattgcatgtgggaactctgttgcaacatttgccatggctgttcgattcctcacaggtcccgccgtcatggcagcagcttccatcgctgttggcctacgtggcaccctcttacgtgtagctattgttcaggctgcactaccacaagggattgttccatttgtgtttgctaaggagtacaacgtccacccagccattcttagtacagcggttatatttgggatgttgatagcactaccaattactctactctactacatattacttggtttgtaaaatatctatgcagtagtatagccaacataccaggacccaaatcaatgaatgaatgaatgaatgaccctttgaacctttttatactttgggagttaacatgcatgcctggtggtgaccacagtggattgattatgctgttattaataacaagggatttggattttttctgagggggagaagaacaaaaactagtatatccttaaaagagaggagagatccttgcttgctagagtttccaaaaattttggaatttcagaaaaaaaaatgacccaattggcccaaatccccataattctaatccccctatcaaaagtccaaaatacacgcagttttcaacagctgagagattcgaacaagtacctgaaatgggagacatagcagaggaaaacaggggaaaggctcacaatgaaatctagaaatggttccctccgtatctgcattgtaaatttttattaattagaaaaagtcatgtttgtgtcatcaaataacaaagatagcttagcaattgggtaggggtggaatataagcgaaaatttttttttttttttttttagttttgtttagtcatttgtttacttcaattattattattattatatgggtgtttttgtctttatgggtgtttttgtctttgaccatccgcggatcccgcaattatttgcgtttgtcgtctttccttagtcacgttatttgtttagtattttttttaatctgatgaagtgaaaagagcaaaaagtcatcttcgttatttttctggcgtaaagaggggcagaccctgggataaagatgggaccatgagactgagagttgaactttcagaacatcgtcgtctactgagtggggattatgtacttttcctctgaagttgagtgatggttgttggaaagaaaaaatacatacaatttttctataaagaaaaaaaaaattgaagtagaattaagagcacaaaaatttattcagttggtgagaatcagacttatattttaaatgtatctgatccgcatatcaacatagctataagtgaaaattggtttatt

SEQ ID NO: 86576 - DNA, 821 bp, Glycine max
  Clone ID: PAT_MRT3847_4918C.1
ctgttctatagttatgtttcttttgtctacatgatatatataaatcattgtattcatataggtctgtctaaatagtaatcatatactattaaatataataaggggttttgttcttcttcacttccacgttccatgaaatgaatatgctcttcttatagtcctaggatggatctgcagtttgtgttgttcaagatctgggtggtttatttcattgttgtttgcttaagatatatttatttactttactaaagtaaaatttctctttgtgcgtaggattaataattagcacatagttttttggaagagttgtgaaaatgggacttgtggagctttttggagtggcatctatgcccgtgatcaaagtactaataatcactgcagttggcttgcttcttgcactggataacgtaaatttgttgggaaaagatgcaaggatacaagtgaatcatcttgtgcattatgtgttcaatcctgcactggtgggtggcaatttggcggacacgattacttttgagaatgttgttttattgtggttcatgcccgtcaatatcctccttacgtttataataggttctgccttaggatggatccttatcaaattaacaagggctcccaaacacttggaagggctaatattgggtgtctgttctgcaggtagtattttctcttcaaaattaatgaatcctggaagcctaacatgttatctgtgttatgttttcactgtttatttcccctgaattttattattgaatatttaatatcaaagactgtatagaccttctttgctacatgggttactggcaatgacagtttatctgagc

SEQ ID NO: 86577 - DNA, 1022 bp, Glycine max
  unsure (1)..(1022): unsure at all n locations
  Clone ID: PAT_MRT3847_49190C.1
cgacttgattannttattgatattgatatgctattctctaccagagaacacaaccatctctaacaacatctgtacagatgttacaatgcaaaatgattttgtagtgaagttgttaaattctctaccaaaatgtacagaccgaacaaataagtggaaaaaatcaagtctcctagttgcacactaacaaaaaaaaaaaaaaatagttcacaagttcatgacttctgaacaaaggttaaccaaggcctccagtgcacttgcatcaaacttgccagcaaagaggtagcacatggaccctcatctctgaattatatggacaaagggaaccattgttcctaatagactgtacaaaaccagcagttatattagctctcccaaaggttgcaggatgagggcccagcattgaccagtcaacccaagtgacagttctgttagaattaagcgaaccatggaacatgtggaggaaggttgggatgtaatgttcatcagggtagcaagcaggcttacagtatttgcggaacagggagtaatatttggtgtcggagacaatataaacagcgagagcacggttgagttcaaaccactgagagcccttccgccagtgtcgaagttgaatatgaggaagcatgtggcgactgtagcgaccgcggccatagcgagtaggttcatcataggattcaacaaagctgagggaggaatgagtgagatatcggtaaacagtagggaagtcgtagacagggatgcaactctcggaaaggagaacaaagcgttcgttggagaagtcgaggagggcattggctaaaaggcgcctctcagcatcagcgagggtaaaggtaccccaagagacgtcctggctagggatgtggcggagatagaaaggggaagagtgggagacgttgagagggcagcggggaggggcatggatgtagatgctgaagagagaggagtggccgtggaagaaacgctcccagaggggcaacatgggaagggggccacgggtgaggaacatgaaggcgaccttgggg

SEQ ID NO: 86578 - DNA, 1549 bp, Glycine max
  Clone ID: PAT_MRT3847_49191C.1
ggctcgagcattaacatacaccttccaacattattttttttctcctctagcttccacactatgtctaaaacgaatgtgagaagacatgctcttgagaagtgcaggagtgtgaaagagacacagaaaatattgaaccacagttttttcaccagaaacctcaagaaagtgtaccctatagggcttcagaaaagcacttcatctttgtctctgtcttcaatttcattgtctttgtcacaaaactcaaatgactcttcccaggctgattctttgactccactggatgaaaagatttcgctggcattgcgtttgatttcgccacgggaaagaagagaacctacaatagctgcttctaataagcctcttcagcagcaacaccaacaaccaccacacactactgagcctggggaattgaaaagatgtaactggatcacaaagagctgtgataaggcgtacatagaatttcatgatgaatgctggggagttcctgcttatgatgacaacaaattgtttgagttgcttgcaatgtctggattgctcatggactacaactggacagaaattctaaaaagaaaggagactctaagagaagttttcgctggatttgatgctaatactgttgccaaaatgaaggaaaagggcatcagggagattgcatcaaacaaagcactttctttagccgatagcagagttatgtgcatagtagacaatgccaaatgcgtaatgaagattgtaaaagaatgtggatcattcagtagttacatatggggttatgtgaatcataagccaataataagcagatacagatacccaagaaatgtgccattgaggagtccaaaggcagaggcacttagcaaggacttggtgaagcgtggatttcggttcgtgggtccagtgatagtacactcttttatgcaagctgcagggttgaccattgaccatcttgtggattgttataggcatagtgaatgtgtgagcctagcagaaagaccttggaggcatatctaacatacactctttcactggcagaattttcagttggggtttataagcacaccctctcacaaagttttttagagaaattattattacatgaatgaagatcatcatggtttcaaccaaacttcagagtcttatgaattccttttcgtatattaaaatttctgatttcacttaaaaattatttagaaccataaacacatgcggttttccgtacatattccgtacatattggacaaataaagacatgaatgttgtatagttcctttcttctttttttttccttatatttttagggggaatttggacacttttttcttcctatttttttaagtgtgctgtccctttaattaaatgaggaaaataaaaagtgtgctttacaaatagagtgataccagagagtgaaaccctttgttgctagaatgctatttgtttggtatggcaagtaaatacaaataatgacaagacgaaagaggttatgctcaaagatatttgtcagcttttgtagtttgcttattatttattatttctcatgttttttaaatttaaaaaa

SEQ ID NO: 86579 - DNA, 252 bp, Glycine max
  Clone ID: PAT_MRT3847_49192C.1
ctcgagccgcgcctcacgagggtcaccaacggcacgtgcctttcgggggccgaggctccatactgatggttggcaaacggacggcgggcgcacgcgtcgcttgtagcccggattctgactgagacgcgttcagtcataatccaacggacggtagcttcgcgccactggcttatcaagcaagcgcgatgacgaattgtgcgaatcaacggttcctctcgtactaggttgaattagtattgcgacactgtcatc

SEQ ID NO: 86580 - DNA, 357 bp, Glycine max
  Clone ID: PAT_MRT3847_49193C.1
aaaaccctaataaattccttttttgaccacaaaaacctttatttaaaaaactatttcttttacacaaacaacaaatacacatacctaagaacaaaaaacccaaaccgccaacctttgccacaaacctggaacaccatttccccaccggaaaacccggaaaaaaaaaaggtatccccccatggcccaaacccttgaaaaccccccttttttttaaaaacccacaaacccgtgcccccacacttggccagaaaaaagtcattccctggacccttgtaataaaaaactgaatttaacccccggcccccttaggggaaccgtttaaaacctcggggaaaactagaaaaaccttaactcctg

SEQ ID NO: 86581 - DNA, 646 bp, Glycine max
  Clone ID: PAT_MRT3847_49194C.1
ccaagaaatgtgccattgaggagtccaaaggcagaggcacttagcaaggacttggtgaagcgtggatttcggttcgtgggtccagtgatagtgcactcttttatgcaagctgcagggttgaccattgaccatcttgtggattgttacaggcatagtgaatgtgtgagcctagcagaaagaccttggaggcatatctaacatatactgtttcgctaccagaattttcagttggggtttataagagcaccctctcactcactaagttgttttcgagaaattattacatgattgaagatcattatggttctaaccaatcttcacgtatctgaatcttatgaattccttttcataaattgaaaattctgactgtatgtcatgcgaaaattggttgggaccataaatgcctacagttcctcatacatgtcaatcaaatgaagacatgaatgttgtattgttcctttctttcctttgttttgttttttcttatatttttagcgggaatttggacacttttttcttcctatttttttaagtgacctgtccctgtaattatataaggaaaagaaaagtatgcgctacaaatagagtgatacccgagagtgaaacccttcgttattagaatgctatttgtttggtaaggcaagtt

SEQ ID NO: 86582 - DNA, 280 bp, Glycine max
  Clone ID: PAT_MRT3847_49195C.1
ggctgcagagctctgcatggtagtcgtgagtgcacccatggaacatgcacctatcacgtacggccaagtgacgaatagcctgatcaattgcatcagataccgccagaacggaggaaccccgccgtggggatgctgcaacggagtgatgagcctcaatgccgtcggcaggaccaccgaccgaccgacagacatgcgtgcaagctgcctcatgtcggccgccatcctaatctcctgcttcaaagcacaacaacagccggcctcgactccaccgcgcaaatgc

SEQ ID NO: 86583 - DNA, 395 bp, Glycine max
  Clone ID: PAT_MRT3847_49196C.1
gcgggatcacggtgttcgctccggcggacgacatggtgatgaaccgcatcggcgatttcggcgagtatccttcgttctttcgccgccacgtcgtgccgtgcaggctcctgtggaacgatctggtggatttcggcgacggatcggagctgcctacgttcttggagggattcgcaatcaacatcaccagatctgacggcgttttgattctcaacggagttcgggttttcttccccgacgtgttcttcaacgacagggtggttgttcacggcgttagtgatgttctggctgcacaggacaacgcgcttcgcattgatgttgatgatgaagaaatcctgtttgacccttctgaattttgaggctatgtaaatttttagttcttgtagattcggatttcg

SEQ ID NO: 86584 - DNA, 541 bp, Glycine max
  unsure (1)..(541): unsure at all n locations
  Clone ID: PAT_MRT3847_49197C.1
atccaatgatcgcattccgnatncnnaannncnnnnnttnnnnnnnnnnnnnccnnnnnnnnnnnnnnnnnnnnnnnnnnnnnnnnnnnnnnnnnnnnnnnnnnnnnntttttntnttttttnnnnnntnnnnntnntnttnttttgggggntttgggtgtttttttttttttttttttttttttttttttttttttttttttttttttttgttgtgtaaatttatccaaccccagacgcttttaattcaccacttctaaaactaaaaaaatttaactctcaaaatacattaccaatgacaattttttcccaaaacaaaacaccaccagatcttcccacaagacccattcaaaataatcccatagcactaataaaaatctccaaatcatttaaagggcttcaagggaaaaattgcccgctaatggcctatctactgcctcccccttttaccctgtgttgaaaattttgcggcaactttctcttcaaacaaaggtgttatagctaaacccacgagtcccctgggttttgcccaaaaaatcat

SEQ ID NO: 86585 - DNA, 385 bp, Glycine max
  Clone ID: PAT_MRT3847_49198C.1
ttttttttttttttttttttttttttttttatttttaggtttatttttttttttttttttttttttttaaaaaaaaaaaaaaaaaaaatataaaaaaaaaaaaaaaaaaaaaaaatttaaaaaaaaaaaaaataaaatttatacactaaaaaaaaaaaatttatttgattaaaaaaaaaaaaaaaaagatagtgcccatttaatctttgttaaattaaagcgtgaatgaaaaatctaacaatcggggatttagttttgggcggtgaggaaacttaaaaagttcaagacaaaaacgccctttaaatgatttgaaaaatgcatcattttttaattggaaaaataaaaagaaaattaaataggttggaaaaaaaaaaaatctttttcc

SEQ ID NO: 86586 - DNA, 565 bp, Glycine max
  Clone ID: PAT_MRT3847_49199C.1
ggctcgagcatcactagaagacaagatcatcttttgttttcccctgccctgggcgtgctatatactgcaagggtagactttacaatcaaccacagctcctttcctcgatcactttctttcatgctttttatgctttcaacgagctccctttaccccacttaattttactctctactcaccattctttgtgtcaggcctaacacaattcaatctaatcgaccagtggactctcatctaccacctatactataggccccggtataaccctgtttcactcaccctcattgtattgttccctctgcatcaaccatcgacgtgcgacatgagaccacgcatgttgactacaggatgtcagccaagaccgactaaagatagtcctcatcaaagacgaaagtgggctgttatggctacaaagtaatctgcactgcagcatatgaaggctatgaacctgatgtgtccaatcactggagcctatgatgttctcatggtgatgaagatggatggagcaagaaacaccgcgaaacatatatcagctgagagatctcgcttgacaactttcatggag

SEQ ID NO: 86587 - DNA, 426 bp, Glycine max
  Clone ID: PAT_MRT3847_4919C.1
acggctgggaagacaacacagaggggagagggagacgtggttacaaccctctcctagccgtcatattcacaacattggccagcattagtttctgcggctgcgcgacgcagatgggagacaaatcatgcagcttattctgtagaagatgcgactgtcccatgtggagccggacttctgccaccatagccacagcgagagcctttgaagcctcatgagacgtctgatggtcaggtccagctccaaaaggagaatgttccacctcaatcgtatacacctctcaagagagcttggatggacatctatactctcatatctgaacagagcaaatttgatgatcgtatgaacgcgcaagctcgcagagtggagctgacgacagagcctgattcacccgatcttagtaaccgtgcaaatcgtgctgattttgtt

SEQ ID NO: 86588 - DNA, 502 bp, Glycine max
  Clone ID: PAT_MRT3847_491C.1
aattccatgtgcatgacagcttccctagaggcagtaatgcttctttcatagctctaattcccaaaactaaacatccccagtcatttgatgactacagaccaatctccttgattggatgtatgtacaaggtgatagctaagttattagcaaatagattgagacaagtgatatctggtcttattgatgagaggcagacaactttcataaaaaacagacacatcctgcatgacatactagttcttaatgaggtgattgaggaagcttgtagaagcaaaaggccagctatggttttcaaggtggattttgaaaaggcctatgactcagtctcatgggcttttttggattatatgctgcaaagaatgggtttttgtcccaaatggagacactggatttctgcctgtcttaattcagcaagcatttcaattcttgtgaatggcagtcctacaaaggaatttgctcctactagaggcttgaggcaaggggaccctttagctcccttact

SEQ ID NO: 86589 - DNA, 599 bp, Glycine max
  Clone ID: PAT_MRT3847_49200C.1
ggctcgagaaggcctcaccgggttgatgaggacaacaatctctaagaacatgttccacagttatcaagtggggagtcaaaaggaggagattaatattctgcaatatgcagatgatacactgttttttggatctgcaactacggataatattagagtcctgaaatctatcctcagaatctttgagatggtgtccggtctcaagattaattatgccaaaagtcaatttgggtgcatggggaaatcagaggcttggtgtagggaggcagccctttttctcaactgtggtcagctggatatccccttttcctaccttggaatcccagtggggacaacatctaaaagctggaatactatctgccttcccaagaacaaatgggagcttgggattaaagacttgtccaagtttaatgaggccttgcttggtaaatggggttgggacttggcaaataaccaggatcagctttgggctagaatattaatgtccaaatatggaggatggaatgcattatgctatggcagaaacagagctgacttttccccttggtggaaggatttaagatatgttttccaacagcatcatagaaatggcatcttcaata

SEQ ID NO: 86590 - DNA, 277 bp, Glycine max
  Clone ID: PAT_MRT3847_49201C.1
tcagttctccgctagctgtcaagacgctctatacgtgtagtgctattctgcgtcttgccgcttcactctcagatggctcgtgctgataactagacagttggagattctggcgcgtagagctgaaacactgttgcctggcccagaggaaagcactttcgggctggcgatgcacgtgcttgcaattatagccctgggactcacaacctggtggccgtgaacaaggcttgatctgatagctggaagagtccaagaggaaccacagtgtacaagtcaagga

SEQ ID NO: 86591 - DNA, 196 bp, Glycine max
  unsure (1)..(196): unsure at all n locations
  Clone ID: PAT_MRT3847_49202C.1
ggaccggtggggttacctgggagttccgggccgcngccggttggcttgccttgttttgctttttgggcagggattaaggttggggggtnngcccgggctttggtggtncctgggtcaaattgntgtccgntnaggtttctcaatagggtccttgccagtgaccattaggtctgaacacctgggcgcagtcttgggg

SEQ ID NO: 86592 - DNA, 408 bp, Glycine max
  unsure (1)..(408): unsure at all n locations
  Clone ID: PAT_MRT3847_49203C.1
gggaaattgaattctttcactgcatttgtgtgctggagaggttgggtctcggagttatgaaacttagatgtcaattcttgcttaactttggcaaaggtacccagggccgtagtgttttcttggtgacaataatgccatactgggagagcacgagaagagagggggcaagcttcccctatacatttcatgtttttttatgtcacaaacgtagtcggatcaccatcctttattgacgaattttcagcattgttcaatgttacatgcctctcattttttcttcattaaaatgtggattgtgtaagatttgttgaggaagnttggtcggggcatgtcctaggttggcctatagntggtttgcacaaaagctgaaaatgtaaaagtggttattaaaaacctggattaaaaatg

SEQ ID NO: 86593 - DNA, 319 bp, Glycine max
  Clone ID: PAT_MRT3847_49204C.1
ctctctctctgagatagattctataatatcgcaggttcttaataagctaactgaagatcacacccccgtagcctctatttcacgttactgagcgacacataaaacacacaccatggactctctttcttcataaccgtcaaacagcaccaacaacaactgcctctctttctctctattgcaagcactttatcaaccctcatttctctaccatttctctcttgcactccttcacctatccatatatatctctcacaggcagcaacactgcggacgcaccggctgagcccaccggtagagcaggaccgaccaacctgtccat

SEQ ID NO: 86594 - DNA, 750 bp, Glycine max
  Clone ID: PAT_MRT3847_49205C.1
aattcggctcgaggggaggttgaggttttccaagaagaaaactatgaagcaaagatatggactcagaagaagagtgtcttctcagtgttccaatggatcattggacgaggttgataatatgcctgagcctgccttgtctgatcgatcctttgccaaccccacttttcaagcaggaactattgaggaggcatggtttgattcagctgcagtatttgactcagattgtgatgatgactaccagagtgttaatgatgatgtgatatctctgaatggaactgaaaccaattgtggagtttcaactgatcagatgcataaacccggggagctatcaaaacgacattctgcacatatctccgagagtgtcagaaattcagatgctgagttttttgatatagatgccacaaattctcaatgtaaacgcagtggaagagtaaatgaagcaaatgaacctgtttttcttgatgaattttcctcagtggatgcaggctcgaaatgggatgatggagatttgcacaactgtgggattcttccatgcaattgcttgtcatgtctttcatctactgatcagagatcattgctttagtcctcctaatagtacaaggaagaaggatcttatgaaacattcctttaaagggagtgggaatgctacactattttcctcaaagacaattctacaaagaccactcgctggttctcaggtaccctttttgtccaattgagaagaaaatgcttgattgttggtcacgcata

SEQ ID NO: 86595 - DNA, 605 bp, Glycine max
  Clone ID: PAT_MRT3847_49206C.1
ggatgggtatttggagattaaggataggtcaaaggatgtgataataagtggtggtgagaatttgagtagcgtggaggtggaggcggtgttgtacgatcacccggcggtgaacgaggtggcggtggtggcgcggccggacgagttctggggggagacgccgtgcgcgtttgtgatgctgaaggaggggctggtggcgccaccgtcggagaaggaggtggtggagttttgcagagagaggttaccgcactttatggtgcccaaaacggtggtgtttaaggaggcgctgccgaagacgtcgacggggaagattcagaagcacgtgctgaggatggacgcacaggctatggggtccttggcggctccacaaccaacaatacctagtcgcatgtagaatggaattgttgtcactttgtctaaaaaagagttcaattgtccggttttggtttggttgtttgaatgagttaaggtggatgagtcaagattttgattacatttacatgcaggtgttacgaaatgtggaattaatttgtctatgaattcagcagatttggttttgttggtgtacgtgtgtgtgtgtttttaataaatgaatttcaattgttatg

SEQ ID NO: 86596 - DNA, 313 bp, Glycine max
  Clone ID: PAT_MRT3847_49207C.1
atcaaggcggtgagtgccaacaagtgagcctgttgccgagcctgtcatcatggccacaaatgtcgaggtccatgtaatcaccaatgctctgcagactacagccaacatacctgacgaaagacacgatgaacttgcagactctgcgcttgagatcttcatacaagcatcaacagtattccagatgcattcccacaagtctgtgcgactagcccctgtctatcaaaagttattacagaccatgaagcattaccttgaagcactacacgatgaatgcaccaccctagctctcctacaatttctctcacatttcctc

SEQ ID NO: 86597 - DNA, 132 bp, Glycine max
  Clone ID: PAT_MRT3847_49208C.1
tacagctgcgagaagacgacagaagggtacagcatgaatctttggatcactgatctgcatggggtcttatcataaactgagtgggagaccataattcgcgaggttatagccgtgttaggccactaggaccct

SEQ ID NO: 86598 - DNA, 364 bp, Glycine max
  Clone ID: PAT_MRT3847_49209C.1
ttgacggatggggtgtgaggacttctttctataagcagagcgtactggggtggcggggtgggactatttggaaggtatgaatacgggcacatctgccgtgttgattcacgtgctggaacgcaatactggggcataaggatcgaagacattccttactggtgcggtcgcatagatgttaccaaatcccaccacactaagaacaagcggctcacatcacgctactagcagggcggggcataaggggtcctacacgggttgtccttgaatgtccaccggtagataaacatcttggccgcagaagccaacataaacctcatacgcgctgacttaatactcctcctacggcaccctatccctgctgcct

SEQ ID NO: 86599 - DNA, 336 bp, Glycine max
  Clone ID: PAT_MRT3847_4920C.1
aggggggattgaggggtcggtctgcgtcgagtcatgcgtctctccatttgcacgacgactaggaggagtgtaggcgttggcgtccatggttaaccatgtcattgtcttgtggcctccgcactcaggattaccattctccttctcctctctcgcctcggtcatcgtcgcatgcttcaatcgcttactcgagacgctgatgaatgacttcttactatgggtcgatcactatcgtggtctctgtggcccacttgttctggctgttgcttatattccattgactgtcatggctgttccatcgtcagtgcttactcagggtggaggttatcctttttgggc

SEQ ID NO: 86600 - DNA, 516 bp, Glycine max
  Clone ID: PAT_MRT3847_49210C.1
ccacgcgtccgtccacgcgtccgcccacgcgtccgcccacgcgtgcgatggttttgcctggtgtggttggattcaagttgagtgggaagttacaggatggtgtcactactactgacattgttcttactatgacccaaatgctaaggaagcacggtgctattggcaaattcgttgaattctatggtgttggtgtgggcgagctatctttgcctgctagggccacaattgccaacatgtctccagaatatggagctaccatgggcttcttccctgtagaccaagtagcattggactatctcaaattgacaggccgaagcgatgaaactgtacatttcactatgtgcagactactcttttaccatacccgttccatcattctgatatgtatatatttttattaataaagcaaagttgtatatattgcattaaatgtgattcaggtgtcgatgattgaagcatacctgcgagctaacaaaatgtttgtggacaagcatgagcctgagacggaacgagttt

SEQ ID NO: 86601 - DNA, 724 bp, Glycine max
  Clone ID: PAT_MRT3847_49211C.1
ctcgagccgattcggctcgagcaaaattcctgggacgcagagcctctctattttgtgttgcaaattgcaatgtggatgaaggtgttcctcccggaaaggtagcagtgatgcaaatatgtggtgacactagacattgtcatgttctacatctaattcattctggaatccctcaaaatttacagcttttgcttgaagatcccacagtcttgaaggttggagctgggattgatggtgatgctgtgaaagtttttagagattataacatcggcccagtgctgttctcctccggctccggctccggctcgcgcgggaaaggcggcgggatcaacccgaatctctgcacggaatggctcaacacgaaaccctcgaaatcggtgctgttcgtgtgcttcggatcgatgaacacgatctccgctttgcagatgatggaattggggaaggcgttggagcggtgcgggaagaatttcgtttgggttgtgaggcctccgatcggttttgacataaattcggagttcagagagggagaatggttacctgaagggtttgttgaaagggttaaagaatcggggaagggtttggttgttcatgattgggcgcctcaggtggagattctgtcgcattttgctgtgtctgcgtttctgagtcactgcgggtggaactcggtgctggaatcgctgagtcaggtggtgccgtttctggggtgggcaatggcggcggagcagtt

SEQ ID NO: 86602 - DNA, 527 bp, Glycine max
  Clone ID: PAT_MRT3847_49212C.1
ggctcgaggacgagagcagagcagtgctcaggagcacaagagcatgagggggctttgtggacttggagtggaattgactgcctgcgtcctcttcgctcttcatcctttcgatccatacctcattcctaatcctacaatccaaccacctcagtctcaccctcacatatacgcatatatgaacgcgtatcgcacctcctatgggttcaaagcgcatcctaaaggagctcagggacttgcagaaagacccaccaacttctcgcagcgctggtccaaaactgaggacaggtcccattggcaggcaacaatactgggtcctgctgctaggcctcatgctgaaggtgtattcctagtcactattcacttgcctccggagtatcctttcaagcctactccagttgggcttaggactacaggtgattcacccgcacatcaatagccatggtcgcattggccctgatatcctgaatgagcatgggagccctgcactcaccatatctaaggtgctgatccctatctgctcattgctg

SEQ ID NO: 86603 - DNA, 301 bp, Glycine max
  Clone ID: PAT_MRT3847_49213C.1
cacaaaagtgtctactaaagcaagagaggaagtagatagtgtagaattctccgcagtgaacaatgagaatacatctgagcgtacagatagcgaatgaggaactggcattccatgtaacaaaattgagatgccctgacactgaaatggctggtatcatgtggcacctgagagtacaccatatggatgtgatgaaaactagctaagtcgaaggcaattggcctatgagcaaatcagtggcagaaaatatgaggtcataaatataaattgctatctacacatacataatgctacaaaaaataac

SEQ ID NO: 86604 - DNA, 408 bp, Glycine max
  Clone ID: PAT_MRT3847_49214C.1
cttccaggaaaaggttttaaaattaaaagcggggattcaaaattcaaattagccgaactttatacaaaagcgacccccctcccatcttttaaaaaaaaaaaaaaaaaaggaggcccccgggggggtaacaccccccccacaaggccaaaaaacttgaacttggggaaagggaaaaaatgaccccttttttttaaggggggtgggtaaacaaaaaaccccgggggggccgaaaaccctcccagacataaaacaaagggttttagccacccaaaaaaaggtaaacattattccaaaaaaaggggtatctttggtggaaggtgggtttcccaacacctaacttgaaaaggcaggggttgcaagaacaatttggcccacatttgcagccattggtctcagggggcaccccca

SEQ ID NO: 86605 - DNA, 418 bp, Glycine max
  Clone ID: PAT_MRT3847_49215C.1
tgaaactgaatcagatgttgaccaaattttgatttattacttcagtgtggttttaaacaagaaatcatgaaaaggtaaaaaagaaaaaatggcaagatagataaaaataaaagtatttttcttttgatgctaagacctccaacgaatcttgaatatgtatgattcgaagtatataggcaatggatggatattgttcttgcagtttgttgccccgggcatgtggaaaatattcatgcatcttcctctgctaagtagctttccatttagttatatagagtgaaaccataggaccctttgaacttgtcctctgagaatgatggctggttttaataaatggatgctctaatttcttcggtcgcccgggcaacttcctccattgaaggtctcacgtccggcatcactgccacgcatgccattg

SEQ ID NO: 86606 - DNA, 1232 bp, Glycine max
  Clone ID: PAT_MRT3847_49216C.1
ccacgcgtccgctttgaccctcctccttctcttcttccatggcttctctacctcatttcctaaaccctagaaaatctccttcgccgctcaatttctgattcgtttgttgggtagttactctctcaccgtttccgttgccacgccatgaacgtgaccgttgattccgcgctcttcgcgtttctcttcccctcggcgtgggaaatcaaagtcgccgtcgccgcgtccgtcttcgtcatcctcgcctaccgcttcttcgccgtccggaccggatacgccgatccgtcgctcaccgacaattccgccggtgatgttgccgacgaaaaggacaagatgggtcagtctaaagtggattctcaagccagtttggcgtatctgatcaagttagaactgttggctgccaagaatcttgtcggtgcaaacttaaatggaacatcggatccttatgctataatcacatgtggcaatgaaaagcgattcagttccatggtccctggttcaagaaatctgttatgtaggttttcattcaattttcttctttctgaactgatgtagcagatcaatgtcacaatttatgattgggatataatttggaaaagtgctgttcttggttcagtgactgttccagttgaaagtgaaggtcaaactggtgcagtgtggcatactttggatagcccatcagggcaggtaatccctgctgtcagaagaaattttgtttggtttcaaagtttttgtttgtcttttttagttctaatacttttttatgtctcaaaaatatcatttttaatatgtaattgaatgtcaggtttgtcttcttataaaaacaaataaaactatctgaaaatgcttccaggtaagccttttgggtttatatttgtttttaaaaatgtgtattatgttggtcctagataatacttgggtgctgttattattatcatatgttggtgtatttcttatagtcatcaattgactggtctgataggataaatggttatgggggagccaaccctcgaagaaggatgcctcccttggaaagacagtggcccactgtagtccatcaaaagccaggccctcttcaaactatatttgatcttcatccagacgaggttactgactgaaattaaacttgtttgtttctggttaacgattactaatatgtagtttttttaaggtctaatatgcacagaaataaaagatgaatttgtacaccccttctgtcgtcttctcgcagccgt

SEQ ID NO: 86607 - DNA, 278 bp, Glycine max
  unsure (1)..(278): unsure at all n locations
  Clone ID: PAT_MRT3847_49217C.1
ctgagggtctcttggaccgatccgaaatcccagagtacttgaccggagaagtccctggagactatggttatgacccatttggtcttaaccataagccagaagactatgcgcaatatcacgccattgagttgattcatgccagatgggccatgctaggtgcttctaaattcatcattcctgacggcctcagcaaatatggagcatactgtggtccaaaaagctttnggttcaagactggagctctggttcttgatggtggtacnctgagctactttggc

SEQ ID NO: 86608 - DNA, 1424 bp, Glycine max
  Clone ID: PAT_MRT3847_49218C.1
caacggagaggatcagaagagagtgaatagcgtgttgaaacaacagcaacggagaggatgagaagagagtgaagtttgtgaaagagatggcactcgtaacaacaaacccaaccatcaatgaggggcctctgttcgccgaagttgacatgggttccgacttcaacgccccaacggttcgagctaccgttgttcaagcctccaccatcttctacgacacaccagccaccttagataaggctgagaggttgttggctgaagctactagctatgggtcccagcttgtggtgtttccagaagcctttgtgggtggctacccgcgtggttcagcttttggtctttcgatcggaaatcgcactgttaagggtagagaggagtttcgcaagtatcattctgcagccattgatgtgcctggtcctgaagttgatagattggcagcaatggcagggaagtataaagtacatttagtgatgggtgtgatagagagggacggctacacactttattgcaggaaactcatgccaactgcattggagcgggttatctggggattcggggatggatctaccattccagtgtttgaaactcccgttggaaaaataggtgctgccatttgttgggagaacagaatgccactgttaaggacagcaatgtatgccaaaggtgtggagatatattgtgctccaacagctgattccagggatgtttggcaagcatcaatgacccatattgcacttgaaggtggatgttttgttttgtcagcaaaccagttctgtaggagaaaggattatcctccccctccagagtatgtttttgctggcacagaagaggacctgacaccggattccgttgtatgcgctgggggtagtgtcattatatcaccatctggggctgttctggctggaccaaattatgatggggaagccctaatctcagcagaccttgatcttggagaaattgcaagagctaagtttgattttgatgtggttggacactattcaaggcctgaagtgcttagcttaattgtaaaggaccatccaacgaaccccgttacttttacatcaacatcgacaaaaattgaagacaagaccaagtagtttcttcctttcatggtcaacaacttccaaacctctagttctggaccttgtccatatacccttatttgaccccttgtatgttaactcctatctccatatatgaaaggttatttgggcttaccttatacaataagcggttgcattttggtttggtttatatgaggccacattaaaattacattggaattcataagctaaaaattaagcttatgaaagtaaccttgcacgaaagcttaagcaaatcaactggttgttttaattatcgagtttttactaataaatggcacttataacaaaaaactaaaaaaaaaactcgagactagttctctc

SEQ ID NO: 86609 - DNA, 2266 bp, Glycine max
  Clone ID: PAT_MRT3847_49219C.1
caggtgtggggggtcgggggttttgtttagatttgtttctcgtttgttcagatatcatcgatgttcgttccggatttgttaggttctgagatctgaaccgtttccgcgtgtttttgtctagacagatgttaacgactgatatcacattgtcgcatcccgaattgcaagagcccagttgtaaacgacacctcccgtgtagttgttgctaaccaaaacgaccccacgccccatccccagtacaaatcaggtctcaacccctcgcccccaacttcctgtcgcctcccccttcttcgctcccacccttcgttgacctcctattctcccctcatcggagctcaaatctccgatcccttcatccatatcgcttcaccgcaactttctcttcatccatcgcaagatctagttgaatctcaaccgcgctcctccgattcgaagctccactcactcaaatcctcttcagatctggggggtttgattgcgattctcactctgctgctcggatttgttcgtctgagatgtcgattttaccgaaaggcgattcggttcaaatcagggaggtttggaacgataacctcgaggaggagttcgcgttgatccgtgaaatcgtggacgagtataactacgtggcgatggataccgagttccccggcgtggttctccgtccggtggggaatttcaagaacatcaacgactacaactaccaaaccttgaaggacaacgtggacatgttgaagctgatccaattaggtctcactttctccgacgagaatggtaacctccctacctgcggcacggagagcacctgcatctggcaattcaacttccgcgagttcaacatcagcgaagacatcttcgcgagcgactcgatcgagttgctgcgccagtgcgggatcgacttcaagaagaacagcgagaaagggatcgacgtgaaccggttcggggagctcctcatgtcctccgggatcgtgttgaacgacgccgtgcactgggttaccttccacagcgggtacgatttcgggtacctcctgaagctgttgacatgccggagcttgccggagacgcaggccgggttcttcgatctgatcaagatgtattttccgatggtgtatgacatcaagcacctgatgaagttctgcaacagcctccacggagggttgaacaagcttgcggagttgttggaggttgagagggttggcgtgtgccatcaggctgggtctgatagtttactcacttcttgtacatttagaaagttgagggatgcgttcttcagtggctccacggagaaatatgctggtgtcttgtatggtttaggtgttgagagtggacagactaattgaaatgaaaagaaaaagaaaagaaacgaaagaagaaggatataattggttgtagagtacgtcttaagtgtgagtctctctttttactttgtgtacacttctgccaaaagaatggttgttgtttacttgtaacattttcatcatcatcatcatccttgcttgaactgtaacttgaaaccgtagctggttttgttagcttgagttctttgtaaatcatcaccttcagtttagtgtcttcaaatttcaaataataatttatatgatgattcccttagttaaataagatcctatagcttgattcccttagtgtaatcggcgccaaacatttgtcccttgctaccttcgctgtttctctgaaccctgaccatcttcagtccagttcttagttcgaataagaagtcttgtttctgtgtctgtgaattatggtttgttctgattgactgggtgcaatgcataaaggtccttctttcagaataggccaaggttttattggctttgttgggtaaattgagttcttctctaaacgtgggcgaagcattgcacgcgattcataaattgaattttcgaagacagcatcaagatgtgatggatggccttggtgcttccattatttgatttctctcgcttttcgaagacatggctactgtgcatctgatgatttcacattttccacttatgagaggtattgattactattctgctttggcaatttagcagtctcaccgcaatgaagagatgacacgggcaggtttggatcgaagttgacgtttcttgcttgttttcaaattgaatataataatgtggtaatgaaattattcattcaatatatgaaattattatttcttttgggaaaattagttatttggttccaataatcttacgatcttattatctcttttaattattcgtagtctttatcaataatattttaa

SEQ ID NO: 86610 - DNA, 363 bp, Glycine max
  Clone ID: PAT_MRT3847_4921C.1
ggttagggagcccgtggagcaattacctatggaagaggatgaaatattatccccacgggaggaggaagaatcaattgatgaggttggtagttggtacttaacagttatcggtcttgtttggtttcattttatctcttcttcgtgtcatgccaatttccttcattttctttattatgctcgctttgatttctgattttgcacatcttgaattgggttcatacatgtatacttgtcaacatttgtattcattgttaaccatgtggaataacattgtgtgatccatgtagccggtcttacctagtgggataaggttttgttgtatagaagtgtgaaagttctaaatacacaagatagagaatttga

SEQ ID NO: 86611 - DNA, 437 bp, Glycine max
  Clone ID: PAT_MRT3847_49220C.1
ggctacccgcgtggttcagcttttggtctttcgatcggaaatcgcactgttaagggtagagaggagtttcgcaagtatcattctgcagccattgatgtgcctggtcctgaagttgatagattggcagcaatggcagggaagtataaagtacatttagtgatgggtgtgatagagagggacggctacacactttattgcaccgttctgttctttgattctcagggtcattacctaggaaagcacaggaaaatcatgccaactgcattggagcgggttatctggggatttggggatggatcaaccattccagtgtttgaaactcccgttggaaaaataggtgctgccatttgttgggagaacagaatgccactattaaggacagcaatgtatgccaaaggtgtggaaatatattgtgctccaacagctgatgccaggga

SEQ ID NO: 86612 - DNA, 221 bp, Glycine max
  Clone ID: PAT_MRT3847_49221C.1
cggagggatgcaccttccgttggttgggtatactccgggtctcataattttagtgctgctgcctgggggcgacaaatttcaaatccatttaggacaaaggctgatagacctaaaaaagaggatccttctgtgaattatgggcttcatatttgcaattatgagcttgggattatatttacttttcctcctacagaaaataatggttgtcttgaagtaaagag

SEQ ID NO: 86613 - DNA, 607 bp, Glycine max
  Clone ID: PAT_MRT3847_49222C.1
caggtatcgcggctcgttgattttgtttagatttgtttctcgtttgttcagatatcatcgatgttcgttccggatttgttaggttctgagatctgaaccgtttccgcgtgtttttgttacagatctggggggtttgattgcaattctcactctgctgctcggatttgttcgtttgaaatgtcgattttaccgaaaggcgattcggttcaaatcagggaggtttggaacgataacctcgaggaggagttcgcgttgatccgcgaaatcgtcgacgagtataactacgtggcgatggataccgagttccctggcgtggttctccgtccggtggggaatttcaagaacatcaacgactacaactaccaaaccttgaaggacaacgtggacatgttgaagctgatccaattaggtctcaccttctccgacgaaaacgggaaccttcccacctgcggcacggagagcccctgcatctggcaattcaacttccgcgagttcaacgtcagcgaagacatcttcgcgagcgactcgatcgagctgttgcgccagtgcggaatcgacttcaagaagacagcgagaatggaatcgacgtgaaccggtttcgggagct

SEQ ID NO: 86614 - DNA, 503 bp, Glycine max
  Clone ID: PAT_MRT3847_49223C.1
aaaacaaccagttgatttgcttaagctttcgtgcaaggttactttcataagcttaatttttagcttatgaaattatgtgaaaaatagcaaatatgagttccaatgtcattttaatgtggtgatataaaccacgacaaaatgcccaaataacctttcatatatggacacaagagttaacatacaaggggtcaaataaggctatgtggacaggtccagaactggaggtttggaagttgcaagccatgaaaggaagaaactacttggtcttgtcttcaatttttgtcgatgttgatgtaaaagtaacggggttcgttggatggtcctttacagttaagctaagcacttcaggccttgaatagtgtccaaccacatcaaaatcaaacttagctcttgcaatttctccaagatcaaggtctgctgagattagcgcctccccgtcataatttggtccagccagaacagcccctaatggtgatataatgacactacctccggcgcacaca

SEQ ID NO: 86615 - DNA, 305 bp, Glycine max
  Clone ID: PAT_MRT3847_49224C.1
atttcatctcttaccaagtaagatcgcttaaacaccaatccgccggtgggtacaaccaattttgcatggacaaacatatctattttcagatatatgcctcttgtaacataataataaaatagctgtcaccaacgggctgatttaagcttaattcacattagtgtgtgactatgacagaaactttataaatggtgaataaaagaaagtgccaaagactccaactgagtttttatgaaagatggtggggtacatcccttgaacaatttttgatttctaaaaacacaaaagaaggttttattcataaa

SEQ ID NO: 86616 - DNA, 574 bp, Glycine max
  Clone ID: PAT_MRT3847_49225C.1
gaggctcgagccctcgcccccaatagaagggggcctcccccttcttcgctcccacccttcgttgacctcctattctcccctcatcggagctcaaatctccgatcccttcatccatatcgcttcaccgcaactttctcttcatccatcgcaaggttagattcctcactcctctactacttccatttctagggttcctacttcaaccctagttcactcctaatttctcagaatcactccttcttcttcgatggatctaatacgcctgtgtttgtttcagatctagttgaatctcaaccgcgctcctccgattcgaagctccacccactcaaatcctcttcagatctggggggtttgattgcgattctcactctgctgctcggatttgttcgtctgagacgtccattttaccgaaaggcgattcggctcagatcagggaagtttggaacgataacctcgaggaggagttcgcgttgatccgtgaaatcgtggacgagtataactacgaggcgatggataccgagttccccggcgtggttctccgtccgtggtgaatgtcagacataacgactacact

SEQ ID NO: 86617 - DNA, 606 bp, Glycine max
  Clone ID: PAT_MRT3847_49226C.1
ggaaaaaaaaggtcccttttttttattttttttttttggggggaaaaaaacccccggtttaaaaaaaaaaccggttataaccctggaccccccatggttggtccccttttttaaacaaaccaaaaaaggggttggtttttttcccaaacccccaaaaaatggccaaaagtttggggttttgggtttttcccgaaaaaggttaaaatggggatcctgggggggtgggattttagggcccacttttgcgcctttaaaccttaaaaccatggccgacctgggtgggccaacaaaaggggcaggggcttggccaaaccaccccactttttccccccggaaaaacccttccccctttggagattttggggcccacccaaggaaacccgggtttaaaaacccccgtttttgaccccctttaaagtggttttttaccccctttacttttgtttccgcccgggggaaccacacaagggggtttccttgccggtgttcccgccaccccatggccaaggtggagaccacccctttctttggtggttcccccggtaaaaacggttttggggaaaccttaccccatgggcccaccgaaatttaaatgggaggtttccc

SEQ ID NO: 86618 - DNA, 234 bp, Glycine max
  Clone ID: PAT_MRT3847_49227C.1
ctctctacaaggtctatacattatgcacaggttattaatgatctactcatcaaattagacaagttcccgtcaaatctttcaccaatgttcatgattaaacccattcaatttgagaaagattatttcacatactaccatatggatgtgattgttcggctttccaacatgagggcccgcaatttcagcattacctaagtttacaagcttaaaaccaattttattgcttgactgatc

SEQ ID NO: 86619 - DNA, 236 bp, Glycine max
  Clone ID: PAT_MRT3847_49228C.1
tgctaatcagtacgaagagtaaattcagccttttatgcagttactttactaaattatgcttttttatctcatccctgatttctgtttttaccttttttacacgtgtcaagttgattcttattgtttcgtctcgtaccaaatagtcatcctcgttaattattgtgtgtgaaattcgcaggaaggatgctggctttcgttcatgcacacggcgcgtctaacagtaatggcttcggcat

SEQ ID NO: 86620 - DNA, 438 bp, Glycine max
  Clone ID: PAT_MRT3847_49229C.1
accggtgcgagaagaccacagaagggggcactacaaatcagttatttacttgaagtttcttcatccttctctgttctgctagaacttgagtactagaacattccctatgacagatgaggtggttcttctggatttctggccaagtccatttgggatgacggtcacgattgcacttgctggagagggtatcgaatatgaggactatgaacatgacttgatgaacatgagtcgtcttatcttacggtgaacccggttcacaagagacatgcgggactgatccacaatggcaaactcattctcgaattcctgattgctgttctctacatcgcggaggtttggaatgacagaaatcccttgttgccttcatactcttaccacagggctcacgctacattctgtgctgattatgttgacattaagatacgtgatcttggaaag

SEQ ID NO: 86621 - DNA, 2997 bp, Glycine max
  Clone ID: PAT_MRT3847_4922C.1
ctgttctatagttatgtttcttttgtctacatgatatatataatcattgtattcatatagttctgtctcaatagttatcatatactattaaatataataagtggttttgttcttcttcacttccacgttccatgaaatgaatatgctcttcttatagtactaggatggatctgcagtttgtgttgttcaagatctgtgtggtttattttttcattgttgtttgcttaagatatatttgctttactaaagtaatttttctctttgcgtgtaggattaataattagctcatagtttttttggaagagttgtgaaaatgggacttgtggagctttttggggtggcatctatgcccgtgatcaaagtactactaatcactgctgttggcttgcttcttgcactggacaacgtaaatttgttgggaaaagatgcaaggatacaagtgaatcatcttgtgcattatgtgttcaatcctgcactggtgggtggcaatttggcggacacgattacttttgagtaacttgttttattttggttcatgcacgtcaatatcctcattacgtttataataagctctggcttaggatggatccttatcaaattaacaagggctcccaaacacttggaagggctaataatgggtgtctgttctgcaggaaatttaggaaacttgcctataatcattatcccggctatatgtaaagacaaaggtagtccttttggagactccaatgtctgctatcaatatggaatggcttatgcttcactttctatggcggttggagctgtttatatatggacttatgtctataacataatgagagtttccgcaagtgtagtaccaaaagatgcttatagaactagctccttcagactggaggcttcaggagagttcctagaattcttaccagaggaagaatcctcagaacctgaaaatccatcaaaggacaacatggatgattacacacttctgctttcttcaattgaatctgaggagaatgtgaagttaccagtctcagctaaaatcaaacaccaaattggaaagcttttagtcaactccaatttcagagccatattttcaccagcaactcttggagcgattgttggctttattgttggagtagttccccagatacgtaaattgatgattggcggcgatgcttcacttcatgtgattcaggactcagttaccatggttggtgaagcagccgtcccagttataacccttataatgggagcaaacctccttaaaggtttgaagggagcaaatacttcgttttggacaattcttggaattatagtagttcgatatattttcctgccaattttgggtattctagttattaaaggagcaacacagttgggtttggtgcaaccagatcccttatatcagtttgtgcttctccttcaatatgcacttccaccagcaatggctataggcacaatcgcgcaattgtttggagctggtgaaggtgaatgttctgttatcatgctatggacatatgctttggcctcagttgcagtcactttttggacaacttacttcatgtggcttgtggcttaattttgtattcattgctatctatggttattatttatttatttttaaattttgccttataagtatctcttttcagccaggggtaggaactgcctacactatctgtagttttatacaaacttcctcaaatggatgaaatagaatatatgtggttactcaaacattaattactttttcaataaatgatataaatggtttactatgtgtatgaatcccggctatatgtaaagacaaaggtagtccttttggagactccaatgtctgctatcaatatggaatggcttatgcttcactttctatggcggtttgtaacttcatcagcttcttttagattaattcttaacttacaataatgggtataaatgtgaagttttccaaccaaaaactgaaaataatgaaaacgtttatttggctatatatttttgttttctgaagtggtattcatttgtaaactgtaggtggctcgagtttatatatggacttatgtctacaacataatgagagtttccgcaagtgtagtcccaaaagatgattatagaactagctccttcagactggaggcttcaggagagttcctagaattcataccagaggaagaatcctcagaacctgaaaatccaccaaaggacaacatggatgattacactcttctgctttcttcaattgaatctgaggagaatgtgaagttaccaatctcagctaaaatcaaacaacaatttggaaaccttttagtcaactccaatttcagagccatattttcaccagcaactcttggagcggagtggttccccagatacgtaaattgatgattggcggcgatgcttcacttcatgtgattcaagactctgttaccatggttggtgaagccgccgttccaattataacccttataatgggagcaaacctccttaaaggcttgaagggagcaaatacttctatttggacagttataggaattatagtagttcgatatattttcctgccaattttgggtattctagttattaaaggagcaacacaattgggtttggtgcaaccagatcccttgtatcagtttgtgcttctccttcaatatgcacttccacctgcaatggctataggcaccatcgcgcagttgtttggagctggtgaaggtgaatgttctgttatcatgctatggacatatgttttggcctcagttgcagtcactttttggacaacctacttcatgtggcttgtggcttaattttgtatccattgctatggttattatttatttatttatttttagtttttgccttataagttatctcttttcagccaggagtataggaactgcatacactatctttggttttatacaagcttcctcaaaaggatgaattatagaatatatgtggtttggtaaacattaattactttttctgtggatgatataaacgtacggttccatgtgtatg

SEQ ID NO: 86622 - DNA, 289 bp, Glycine max
  Clone ID: PAT_MRT3847_49230C.1
gagacacggaagatatgttaggcatcctcagacctgggtatcaaactacaatcgaagtatcatcaagcttgtcccgcttcatgaatcatgagcagcagtggaaaggtgcttgtttgatggtctttatgcgcctaattgcatgttacgtccgtttagtttagacagtgtgtaaacacattagtgtggctattgtttgtggttgctctggaccggacctgattaagcaagcatgggttgaaccaaatccggaacatatcgttattatacaggttgtcaaacaatgcatcaa

SEQ ID NO: 86623 - DNA, 202 bp, Glycine max
  Clone ID: PAT_MRT3847_49231C.1
ataaatatttgggctctttatccacaacgaaggctagccatcaaatgttttgatttatccagtgacggagacaatcttgaataaccgagaaaaaatttgataaaacctacatctggtacatagtagagggacacatgaagtttttctggtacatgaactgcccatcccccaccccccaggaacttgtaatagaggggggggg

SEQ ID NO: 86624 - DNA, 504 bp, Glycine max
  Clone ID: PAT_MRT3847_49232C.1
aaaaaaaaggccaccccccaaaaatcaaaacccttttaagggaaaaaaaaggggaaaaagggggccccccccccgcaattaccttaagggaaaccctcccgttaaaggggcccctttttaagggaaggcccaaccccaacccggggttaaaaaacggccaaccccttgggaaaaaaacagctctcaaactttaattataaaacccggggggaccccccccctaaaaaaaacaacaaaaccccccccccccgggcgaaaaaaaaaaataaaggggttggaaaaagcaaaatttgatttggttcttaaaggaaaatcccggacccccccaaaccggggggggaaaaccgggtcaattccgggggggcaaaatggacccccctcccaatggaggaatgggggccaggcttaaggctttcgaggccctggggcccaaaatcggggaggggccccaagcccaaaattttctctccaccaaccggcccaagccttactttggaagcaaaa

SEQ ID NO: 86625 - DNA, 161 bp, Glycine max
  Clone ID: PAT_MRT3847_49233C.1
tacggctgcgagaagacgacagaagggggggggagcatctaaatcgggagagttacgtacatagtgattaaagtttagattacttgatcgtttagcacttctattcagtcctcagaagaacacctctcttaagtctggtggaatttagatgtgtggtttgt

SEQ ID NO: 86626 - DNA, 277 bp, Glycine max
  Clone ID: PAT_MRT3847_49234C.1
cacaaggcacctaaataggatgcaactgttgatcaaaattctggacattccaagctgaagattactattgctagagagcctgaccttaaaacaggtgacagagcacaaaggattagacctaaacctgctgcacaggcagaagttgtgacagtggctgtcgccagattcaaagcacgcgcgttaaacagaaaaattataaatgctccttcgttaccaacttccaagaggagcactcgacgatggccaaaatgtataagatttcatattaggacacacg

SEQ ID NO: 86627 - DNA, 556 bp, Glycine max
  Clone ID: PAT_MRT3847_49235C.1
ttttaactttataatcctttaccccatttacttcaactttcttttttttttttttgagatcaccccagagaaaaacccccaacttcgggacttggatatcttcctcagaataggggatatgaacaagggagctctactgctaccacacttcaattcaaaggcgatagtgatactggcaatcaatgaaggagatgcaaacatagaactcggtggcctaaaagaacaacaacaggagcagcaacaggaagagcaacctgcggaagagcggaaatatagagccgaaacgtctgaacaagatatatgtgtaagcccagcacgtgatccaggtgtggacaacgcgaccgcaaatctgaagtgcgtggctatgggtatgaatgccgagaacaaccagaggaacttccgcgcaggagcacaagacactgtgataagccagagaccgaggcaagggcaggagctagcattcacatgggctgcacaagctgttgagaaactaatgaagaaccaaagagaatcctagctagcggatgctcagcccaagaagaaagaggaaggagac

SEQ ID NO: 86628 - DNA, 285 bp, Glycine max
  Clone ID: PAT_MRT3847_49236C.1
tcgttgaaggtggccagactggacccatgtaatttgactcaggcttgcatactgcatacctattgtgtcgtgccacctaaattcaattgactgtccgacgtggtacatcgtcgctactgggaaatccctggcggaacccaacttagatcgattcgcagcgctatattaattattacatgctgtcggaatacgaagatgttacgactgatcgacttgtaaaacacattcacatactacctgtcgaatggaacgcgcccagtatcagcgcattaagcgcagagcatg

SEQ ID NO: 86629 - DNA, 297 bp, Glycine max
  unsure (1)..(297): unsure at all n locations
  Clone ID: PAT_MRT3847_49237C.1
tgggggctgctccttatggantccagaggcacgttcttcgatgctcgcgttcttggttttgcattttgttagtgttccactttaataataatattttcactcgtctcttcaactccgaacacaagacgtgatcatgcatgggtgtctacatctccactgtcggagctgttaacagagctcttttgatacccgaaggggagggacctgggttttaagatcgcagaatgtgcatcattgggcgccgctcctggaaggacattggctcaggggtgggctgcacagagattttctcaggaa

SEQ ID NO: 86630 - DNA, 789 bp, Glycine max
  unsure (1)..(789): unsure at all n locations
  Clone ID: PAT_MRT3847_49238C.1
ggtccggaattcccgggtacgacccacgcgtccgggccaccaccttggcatatgatttctgtgggttcctgtactgtgttgctccatgtcgcgcaggtatggtttctgtgctttgccctttcttcagaaagctaggtttgatgatacgctcctccgtactagtctttcctctcccgtattttgggacgtttacgtacagcttgagtccgtctaggatgatgttatcgagctgtttttaagtttatgtttgtcacctacccctttaaaccttacgaagccatatcttctttctcctttgtttctatttttggggataaaaacctcccttacatccccccatctcttgaactgcgcccagagatccgcttctgttatgtgttcctggaaccgcgtaaaataaaacgttgtgatagcatccttatccctccaattgtgatgatgatgcctgtggaactgcccaagattgttgttgccttagtgcgtttttgggatcctctctcaatctctccccttccctcttttttcctttccctctaatcactgtggtccatccgttctcactctctctctcaccctctcccactctctcaggctctctctctctctctctcgctcattctgctcaggacatatagcctaaatcatatnttgagtttctggaattgagagcatactgtacatggattgtatttctacactcctgaatacaagtacatgtaacttgctgctcgtcngcattatgcctctctagtgcaactgtatctatttttgatcaatggcagccctact

SEQ ID NO: 86631 - DNA, 490 bp, Glycine max
  Clone ID: PAT_MRT3847_49239C.1
ctccgcaaatagttcagcgatggatcatagaagactaggttatcattaaacgggtaagacacagactctcagctgaatgttttatgggagcgactagatggcttccacatcaagcaatgatgttcattagatcggttactgggttttgagatgtaaatgctgattctgtcgaatggtatggtttagtgatagagtgaagttgtgattttgtcttcttgaaagttctgtcatctagttcttttgtccataatttaaaatattcaatatgttgggcacttgtcatattaagtgagggtaatttgtaaattttattgggttgcagccttatgcttaatgcttcatattcttgctttaatgtaaagctaaaaatggtttgcatgtgccaaggagcagtatccttgaccatgacactggtttagcatttgaatggactgccttatatattgattcttagtgaacagtacaagatgtgagaggtaatgatttttgt

SEQ ID NO: 86632 - DNA, 342 bp, Glycine max
  Clone ID: PAT_MRT3847_4923C.1
taaaaaaaataatttaaattaaaacataaatttaaaaataaaagtgaaatacaaattaaaaaaaattaaaaccaacattcagggtgacaaatcctaacttctcaaagaagctcaaaactgaggcattttgggatataaaatgtaaagtaatatattttgagaattttatggagagagaaggtgtaaatggataaaaaatcacttcgggtctctatttctattccctcgacatttcatctacgtgtcccatttttttctctcagcaaattcatatttttcatgggtcctcaaccacctttggagaacaatatgcacagcctgtgcaacagtgaggaagatctt

SEQ ID NO: 86633 - DNA, 967 bp, Glycine max
  Clone ID: PAT_MRT3847_49240C.1
aagacctcaatatcaacgaggaatcccctccacaaaattgaggaagctaaaaagtgggtccagaatcgacatgaatgagatttcttacctaaaaagaacaggtagaaagaatcagatgaataaccaaagcccaattattgagcctgaaccagctaaactaactgttgaacaaatcaggaagggagaaaagaagaaaatttgcactgagattagtccacaagatgatgaactcctgatggtgtgtgaagcagatgcccacataaataagattggagaaaaatacaagcagaggaagagtttttcaggcgatgacattattatgctgctcaagtctgaacatgaaaataatgctatcactgcttatagcattaatgctgataaagaggggactgagctgaaacattttcttttaacctgtccatcattcattggacatgcaaagaagctcttcaatcttgaagttgattgtcccaacaccctacaaaaggatgaaactatttacagcatggcaaatctcaggctttatttggattgcacgtatgaactcactgagagtaaaagccttcaagagtcacaagtagttcgttctttcttgcttgcttgtggagggaactcaagattacgcttctccttaggcaggttggctgaagaaatctgtgatggcattgagaatctgaaattttacaaagaagattccggggaggaagtttttgcaggcaatgatgtctttgcaatgatggagaaagacatgaagtgcaatggagagataaatagtatgtgggagaagggttggaggagaggattttctgcagatgaggctgaactagttgtcaataaaatagagctcctgcttatgagtggattaatttagcaggtctttatacctcttatgattaaatcacatttcagtatcttcaccagttccacttgtggataattaggcctgacaattctagagttgaatgat

SEQ ID NO: 86634 - DNA, 1310 bp, Glycine max
  unsure (1)..(1310): unsure at all n locations
  Clone ID: PAT_MRT3847_49241C.1
cccatgcgtccgcccacgcgtccgggacgttgcaactgggaattctatcctatttgctcccaggttaccttctgagtatgctgtttggttgggggtgattaagccactctcttactttaaggaacactacatggttagcacgtgttgcttctcagattaaattgcaagtgtattgcagcattgccagggttctgggaaacccttactgtttctcttgcatggtcttaaatacggatagcgataattactctaaaccagcagactttcagggcattgataagtttgacaaggatttcacagctttgcatcctatattgactgaatgcctgtcatcaagtcagagctggaaattgctcttattcagtatgccaatgatataagctctgaagctcatgttgaggttatgagaaacaccaaggcgggcaagaaggagtatcagcttgaaagcatttttcttcaccacacctgcatgtatggtggatgctggcattgctcctatacatgtatttgngctactggtgataatagatataaaaattgaaggtgtaacaagcaaaaaggccagaaaaattaaagaaaagaagaaaatctgaagcaacaccagtccaatacgcgcgctgagcgcgcgtcacgcgctaagcctgcaacacgcgcgctaagcccgcgatctatccaacacgtgcgctaagcctgcaacatgcgcgctaagcgcgcgaggtacacgcgctgagcgcgcctacgaaggcccaaagcccacttcagcagttataaatagagagccagtccaagggacagaacacaccacgacagaaccccctctcctaggagtttcattattctgttaggggttagatgctcgggagagggtaacttctaaataagatttaaagaagatatgcatgcagtagttttaggggttagacgctcgggagaggataacttctcatagaacaagaagaaaagatatcataataaaatcattgctaggcatagagtgattgcattatgcccatgcgtcaaagcaaacatctagaattagaacttcatgcattttatctattgagtctttgcaaaggcatttgggggatagataggtaaaataggcttgtcatcgtgaggcatcaggggcagtaaatgaatagatgtgggtgggataaaatcacctgaattggtaaagaaaaaatcataaactcatacatcctaggcagacaaggcaagtcagttcctaacactattttatttgactttatctttttcttttattttaaattttaaatttctttcatcttatctactaacgcggatcacac

SEQ ID NO: 86635 - DNA, 282 bp, Glycine max
  unsure (1)..(282): unsure at all n locations
  Clone ID: PAT_MRT3847_49242C.1
caananctatcactnnaanatnaaaacatctnacttcattttcactcaaataacccaaaattttcccatcatncccttctctacaanttcttttaaaaataaaatacctcnttttcctttattctaatcttttaatcatnatctccttcaaccttatccttttctacattaaaatcctttttattatattncacatatcaaattcactgtcttnctaattcccaatcaatcaaatctttttacttctcactcactccattaattncaacccaccaaaacaat

SEQ ID NO: 86636 - DNA, 309 bp, Glycine max
  Clone ID: PAT_MRT3847_49243C.1
aaaaaaaaaaaaacagccccccaatagccctttttataacttaaaaaagaccgggggggtttgtcccccaaaaaggaaaaacctggggggtaggagcccaatttgtcccccaaaaataaaaagggggggtttaccaaaaaaaattctatttttttttttttttggggggggggagggtttccaaattcccccgggccttttaattttccaaaaccagagcccaattttattcttttttttaaccggcctggtcctttgggatataataatgggaacccacatgggggccttttggaccaaaaccttttc

SEQ ID NO: 86637 - DNA, 280 bp, Glycine max
  Clone ID: PAT_MRT3847_49244C.1
tgagaggggtcaacaatgtggcccaagcttctgagaactttcccttgaggctgactaataaaccggccctactgcgtgactaccccacatattccacctagatcacatattagacatagaagtggtcctctttgcagagacaagacttccaacacatccatgcgacaacttaactgtgctgtgaggcaacaatgattctatttaatgtcacactgtgttataagtgtcttatctgactaaagctaatcacgtctcccaatctttatggcccatgaaatca

SEQ ID NO: 86638 - DNA, 154 bp, Glycine max
  Clone ID: PAT_MRT3847_49245C.1
ttcaattcagaggagacggcaggacatcttccattccatcgacctgggatctgggatgacactctcgtggtcgcgtaggggcttatcgtacgcctgtaatgggagaggaacaatgtacttttgtgtccaaagcaagaacccactttgattccga

SEQ ID NO: 86639 - DNA, 562 bp, Glycine max
  Clone ID: PAT_MRT3847_49246C.1
ggttgacaatgatttcttcttggtcgttgtcaaaatcgctgatcatcaggtatgtatggtaccctgtaattccttctttgacttcatgtcaatgtgattgtgattttctcttagcaattaccatgtgcccctaagctgttgtatgattctttaattcctatcgctaagataccaaaacaatttatttttttatgataagcatcaaaagagtttgtcttcatgaggggtataaagttttaacatggagtagggtcaaactggtaataattatatatatttaaaatatataatatcaaataattaactaattatggtaggtaatattttaaataagctgggaaggatcatattatgccttataagttaaaaatactaacttctaagcttactgatacattggtcaattgaagactattagtacaatgtgctgatgatctagttattgatatggtaatctgatgtggttgatcaatactttaattaatcataatgaggtattacttgaagccttttttgcttgccatgttatgcaagcctgagctacaaatttcatctgttatag

SEQ ID NO: 86640 - DNA, 885 bp, Glycine max
  unsure (1)..(885): unsure at all n locations
  Clone ID: PAT_MRT3847_49247C.1
aacgcccaactctgttccgcgnatttaccatgaggaactcaatgccgagtcatcagggaatcctactactcntcaagatcacaacctcgatttgagcttgggaaattcggctaattcgaagcataaaagtcaagatatgcggctcaggatgaaccaacaacaacaagattctctccactctaatgaagttcttggattaggtcaaaccggaatgcttaaccatactcccaattcaaaccaccaatttccgggcagcagcaacattggtagcggaggcggattctcactgtttccggcggctgagaaccaccggtttgatggtcgggcctcgacgaaccaagtgttgacaaatgctgcagcatcatcaggattccctcctcatcatcacaatcagatttttaattctacttctactcctcatcaaaattggctgcagacaaatggcttccaacctcctctcatgagaccttcttgagcggccgccaccgcggtggagctttggacttcttcgccagaggtttggtcaagtctccaatcaaggttgtcggcttgtctaccttgccagaaatttacgaaaagatggaaaagggtcaaatcgttggtagatacgttgttgacacttctaaataagcgaatttcttatgatttatgatttttattattaaataagttataaaaaaaataagtgtatacaaaattttaaagtgactcttaggtttttaaaacgaaaattcttattcttgagtaactctttcctgnaaggtcaaggttggttttctcaggtataggcatgangtcgctcttaatggnccacaccttttacccgggcatgcccgaggcaaatgccctggcaaaatcggttccccaattttaaccccanttgga

SEQ ID NO: 86641 - DNA, 412 bp, Glycine max
  Clone ID: PAT_MRT3847_49248C.1
acctacagcgttgcatgacataaatggggatagtgacaaggatgattatcaacatcggtactattaatgggttgcctaacctcacaattactgtcggggacaaacctatgacccttacatattggaagacattgaatgaggactagggatcgcatgagcgagatgatgactgatgtgtattatgagcgatgaacatgcctacttcgcggtgtcctctttgcggttgggagaagaccatgataaggggtttttatacacaaattccatctggttagctttcgaggagggtatgacaacgctgacgcactggacattcaacaggttatattgcgtatgcatcaactaccgctgatgaggattgtgaaaaagccatttgggacgacgatattgcaggtgaacattatgaattctg

SEQ ID NO: 86642 - DNA, 238 bp, Glycine max
  Clone ID: PAT_MRT3847_49249C.1
cccctaaggatagggaaggaaagtagccagctcccaatgagctgtcatttcaggcactctcttggcaataagagtaatgttagtttgaatttattgaatcttgctgtgcactcagctggcccattgtatgtatactcatcttaatgattacataacttcacaattcaaacatcagctaagtaaggcctttcctggctgcccatcttacgaaactggaggtacattttctaaagtggaa

SEQ ID NO: 86643 - DNA, 312 bp, Glycine max
  Clone ID: PAT_MRT3847_4924C.1
ctctaactttcacgacactgtcagcaagttagagtgatccaatgtgggcacaaactcatcatggctgggggccttaacaaaactagggcaactttgcaatatagaaagttcgcagattgtgattcactcacgagaaactgtaagcatatgactaatgtttagtgggaggatcctgaggtcaaggcgagtttatggtcacaacttcgttatgtttcccgtaataatccggaaaagcaagaagcttatattgtcaatttcctaaatgtgttacaagaaatgtttttgcacagtccattagaagctcgtcaattg

SEQ ID NO: 86644 - DNA, 1202 bp, Glycine max
  Clone ID: PAT_MRT3847_49250C.1
gaaaacggtccaaattctgtatctcgtaggcactcactcactctcttcccaaacacagcgtgttgttttcccggttcccgcccatagttccattttcgctctctcggtcgctctcactccatcacccatgggaaattcatccaaggacaacgactccgccacctccgccgacgcctccgccggcgacgttcagccctccaattccgccgtctactccgagggcgagaaagtcctcgcctaccacggccctcgcatctacgaagcaaaggtgcaaaaagccgagatcagaaagagtgaatggaaatatttgttcacgaggatgtcaagaataatgtgtcaaaagggaagaaacgaaagcatgatgcgggagttgagaagggcagcgggactgttgaaaagcttgtcaagattcaaattcctgcaacattaaagaaacaacttgttgatgattgggactctgttactcagcaagataagcttgtaaaacttccccgttcaccaactgttgatgaaattctgacaaagtaccttgaatacaaatcaaagaaggatggcattgctcctgattcaataggagaaattttgaaaggaataaggtgttattttgataaagcattgcctatgatgctcttgtacaaaaaagaacgcaagcaatataatgatgcaattgtggataatgtgtctccatcaaccatatatggtgctgaacatttattacgcctctttgttaagttacctgagcttttggcatatgttactattgaggaagaaacattgaatcgcttgcagcagaaattacttgactttctcaagtttttgcagaaaaatcaaagtaccttctttctttcagcatatgatggcaccaaagtctctgaaggaaaaggtaaggggaaggatgaatgagaagacacagagtccctgatcttcatcctgttgtatttttaattgttgttataaacagtatcatctttctcttgaaaaactagggaagaaactcaattgttgttgtgagaatattgactaattcattctttaatttttaaagcttacacagtactattatacacaatggaaacgtttggtggctcaggtacatgttattatatgacctcttcaggtctgggatgtgctaaaaaaggcgtgtttgtggcctgaaagaaaagttggttgagctggcatgacccattttaaccatgttgcac

SEQ ID NO: 86645 - DNA, 514 bp, Glycine max
  Clone ID: PAT_MRT3847_49251C.1
ctctgctgtccgtacaccactttctcccctctcaaaggagggaaaagatcggttgcttgagtggtgtcagaacttcattttgtggtcaagttgtgtgcaattcaagtttctgtgggagacaaataactagaagccatggaaaccgtcttgttgttcactcactgcttggaaggaaggtgaagtctgtgaagagcagagagactgtaattcctgaaccagattacaggattccaattgtgctactcggtatagctggtggattggtttacacagataatttggtacctgcagtacctgttggtctccttggattgcttctgttgtttcaggaggtaaagataggtgaacagctccaggaatcaggtgagaatgttttcgtgggaggaaaaaaccgctggaagtactcgacatttgttaattgggaattctggtggccaaacttccctatcttggtttacttcaaggagtcacaaacgaagcctgagggacaaattcatttctttcccataatatt

SEQ ID NO: 86646 - DNA, 2489 bp, Glycine max
  Clone ID: PAT_MRT3847_49252C.1
tgcaacattattaaacggaaatcgcttaacccaaaaaaaaggggagcaatgatcaactgttaatagtggatgccaacctcaatataaacccctgttgtgaatcatttagtatcatttctgatttaaacagatttgctacataagatagttatccaatttccaatttcctagacttctcttgccacttgtattactaccaatgaacatgctacagatgaacgctctcttgcttttctctggaggcaaggaaagaagacacttctattcaaatggagtgccaaaacctggtccagtcacaccgggactagcaagtattcacatatgccctctgctaagcaggtgcctacccaatgtggataaaggatatcggtaaacaagctaggaaacatgccatccagagactataccgttggagaatcccaaaacatcaaaaacctggaaaaatatttcagtatcttcatttgcccttcttgccatcttgtggcaactgcacccccatgaggccaagcaaattggaagccggaccaggaagcccttgctgggaagaaaaggaatcgagtaagctttttactaaatttacatccacgtctacaggagaaaaatcctcgtccataatatgttcagatgcatttgacgttccctgatccttctttggaatttgttcattagcacgaacaaaacttttctgaagggttgttgcctttagctcttcattcatagcatcagaataggaccgcatgaaaatatcctctctgtcctcattatcctcatccaattcaacaatatcactgtcatcagaattatcaaagtccagatcagacgacgatccttcttcaatattactgttggcaacttcaccgtctgaatgcatcattattgattccatgtctttaataaattggtccacatcaaggttcacttccttattcctatcttcaggagcttcagcacccttgtaacttgacaacttatggacaaatgcctgcatggtttttgccggacgcgtgggatgaaactcgtcggaattagaagcagatgatacaccagcatcttgacccgcttttgctttttttttttttttgtgttttaagtcatatagttccatctccttttgtctttccataagaacagagttcaactcttcctctccaccgtaaagccaggaatcatcatcagatggaggaacctcctgatccttaaaatcatccaccgaatgaggcaaagcaagaatttcatctatgcgtctaacaggagcattcagcaagtcactggccttggagtgcagagaagtgctcctataatactcctgagcactctgcatcaatctctggtactcagaggaacccggaagctgtccttggaagtacccactgttctccaaactcttcctaaacgcctcccaagagctccctttcccttcctccccgtctcgcttccgctgctgatacatcatctccaacccacacgctatcttcatccccagctccgcctccgcaaacccttccctctcgctccgagccggcatctcagggtagcacttcggagcctgaaacctctgctgcgccaactgcgcgtacatcgccctcgacatcttcaccgaaacacacaccaactcctctgttttccctctctccacaaacctctccatcctcgccgcgaacttcatcgtgtctatatctctatcatagaacccctccactgccagcgaaattaaccttggctcgtgctttaaaatagacgccgccgacaccggaaccctaaccctaaccctatgcattttgcccttcgtgccatcttgtggtaactgcacccccatgaggccaaggcaaattaggaagctggaccagggaagcccttgctgggaagaaaaggaatcgagtaagctttttactaaatttacatccacatctacaggaggaaaaatcctcgtccataatatgttctgatgcatttgacgttccctgatccttctttggaatttgttcattagcacgaacaaaacttttctgaagggtggttgtcttcagttcttcattcatagcatcagaataggaccgcatgaaaatttcctctccatcctcagtatcctcatccaattcagcaatatcactctcatcagaatcatcaaagtgcacgtgaggggacgggcggagttgaaaaggagggggggcaggggcagggagggtatggatgattttggatgaagggagttaaggtttcgaggattcataggtggagggagtggaacgtcactgtggtggtggcggtgggtgagtgaaggtagatggcgtaggaaacggtgtctgctgaggggcggggggagaagatggcggagaatggggagcagtcggaggaggggggggactagattgcggaggcagtatgggcttccattgcgtatgctcagttgctcactgtggtcgggacaccacctgcctctccataagcccagagttcaactcttcctctccaccataaagccaggaatc

SEQ ID NO: 86647 - DNA, 1156 bp, Glycine max
  Clone ID: PAT_MRT3847_49253C.1
gaatggtgggcattttggtaaaatcattcttcttgtgcataaaagaaagacatggattttgtgaagcacaaacaaatggcgagcagtcttctgtccgtacaccactttcttccctcccaaaggagggaaaagattggttcttgagtggtttcaggacttctatttgtggacaagttgtgtgcaatccaagtttttgtgggagacaaataactagaagccatggaaaccgtcttgttgttcactcactgcttggaaggaaggtgaggtccgtgaagagcagagagactgtgattcctgaaccagattacaggattccaattgtgctacttggtggtttctgattctctctttatctgtatagctggtggattggcttacacagataatttggtacctgcagtacctgttgtctccttggattgcttctgttgttccagaccactagagtgacatttgtctttgatgatgaggctctggaggtaaagataggtgaacagctccaggaatcgggtgagaatgcttttgtgggaggaaaaaaatgctggaagtactcaacatttgttaattgggaattctggtggccaaacttccctatcttggtttacttcaaggagacacaaacaaagcctgagggacaaattcattgctttcccataatatttaatgggaagcagctttatgacgttatggtggaaagagctggcccttcaaaaactagtggaccaaaagaatcctgaggactgagctgtgtggttagaacctcagttggggtatctcggaaaccatagaagtccactgccgacaaagaggcttcttaagttgggactgatatttgttttcgtcagtgtaagaacagcatcaaaatttcttgtttctcttccacgtactgctctcgaggtttcaagaagccagcaagttcaagctaaacaaaaaattctattattttgaagtcttgttagcatataacactaattcatcttgttccttttgagattgaccagtgattgattttacttcattttggaagatgtataatttcacagtacccatatatttgacttatgttggcttccacagatgatgtagtttctctgtatacttcaggacttcgtattcgttatgacatatcaaacatgaaaagttgatataaaaaaaa

SEQ ID NO: 86648 - DNA, 1480 bp, Glycine max
  Clone ID: PAT_MRT3847_49254C.1
acggctgcgaaagacgacagaaggggaaacaaatggcgagcactctgctgtccgtacaccactttctcccctctcaaaggagggaaaagatcggttgcttgagtggtgtcagaacttcattttgtggtcaagttgtgtgcaattcaagtttctgtgggagacaaataactagaagccatggaaaccgtcttgttgttcactcactgcttggaaggaaggtgaagtctgtgaagagcagagagactgtaattcctgaaccagattacaggattccaattgtgctactcggtggttactgattctctctttatttgtatagctggtggattggtttacacagataatttggtacctgcagtacctgttggtctccttggattgcttctgttgtttcagaccactagagtgagatttgtctttgatgatgaggctctggaggtaaagataggtgaacagctccaggaatcaggtgagaatgttttcgtgggaggaaaaaaccgctggaagtactcgacatttgttaattgggaattctggtggccaaacttccctatcttggtttacttcaaggagtcacaaacgaagcctgagggacaaattcatttctttcccataatatttaatgggaagcagctttatgatgttatggtggaaagagctggcccttcaaaaactagtggaccaaaagaatcctgaggactgagatgtgtggttagagcctcagttggggtaactcggaaaccattgaagtccactgccggtaaagaggcttcttaagttgggattgatatttgtttgcgtatgagaagagcatgaaaatttcctgtttctcttccacatattgatctctcagtttcaagtagccagcaagttcaaattaaacaaacaacttaattatttgaagtcttgttagcatataacacaagtatagttcgtcttattcctttcgagattgaccagtgattgattttacttcattttggaagatgtataatatcacagtacccatatatttgacttatattaattccacagatgatgtagttctctgtaaaaaaaaaaaaaaaaaaaaaaaaaaaaaaaaaaaaaaaaaaaaaaaaaaaaaaaaaaaaaaaaaaaaaaaaaaaaaaaaaaaaaaaaaaaaaaaaaaaaaaaaaaaaaaaaaaaaaaaaaagggggggccgtttaaggggttcaagcttaactaccccgggttggcgggccattgcctttttataggggcccctaaaataaattccctggcccggtgtttaaaaaggtggggatgggaaaacccgggggttccccaaattaaaccttttgggagaaaatccccttttccccgggggggttaaaaccaaaaggccccatccggttgccctttccaaaaatgggcccaccctaatgggaaaagggccccccccttttaccggccaaataaaccgggggggggggggggttcccccccccaggggacccc

SEQ ID NO: 86649 - DNA, 1398 bp, Glycine max
  unsure (1)..(1398): unsure at all n locations
  Clone ID: PAT_MRT3847_49255C.1
caaagggggagaagtgaacttcacactttctgatgagtgatgagttcttatatttatatacaaaaaaaaatctggtgttgtgagtcgcggccgtgttccaagcaacaatcatcataaccgattaatcactgtgataagataagattgaaaagatgtttagggacgtgtcaagctgcaacacgtacaactacggcgaggctgtgtattgggacgcgcgctacatccaagaggatggttcctgcgattggtaccagcgttattctgctctcaggccttttgttcgcaatttcatccctctttcttccaggattctcatggttggttgctgcaattctgttatgtcagaggatatggtcaaagatggttacgaggacatcgtcaatattgatatttcttcaattgcaattgacatgatgagtagaaaatatgagcacatcccacagctaaaatatgaatgtcagagatatgagcttgtttccagatgaatcttttgatggtgttattgataaagatactgatgctacttttgcacccatgctttgttgatgcttgatctaggaactcttgattcattgatgtgtggtactgatgctccaattagtgctgctcagatgcttgctgaagtttgtaggttgtatagactttaatgagaataaatttcttcagttttgaacagaagtttttaatagtcacacacttcatttcaaaattctcactaattatgcctattttcttactttgcagactactaaaacctggagggacctatattttgattacatatggggatccaacagtaaggatgcctcatataagcagaccggtgttcaattggaaaattacgctgtataatatcccaagaccaggatttcaaaagcccgagagtagtacaccatcaagaaaatcatacttggagcccatcgctcttactgaaaagggcttactttcagcagatttcgttctggaagatccagattctcactatatatatgtttgtaaaaagataaatgacacagagatagacaataatacctgcataccaattaacagctgatgttttatagatctgacttacattgaagcactgatgaaggtagtatttatcctcttcacaaactttgatgtgcatcatagttatttaagtggttgcttttgtcatctgtaccactgggacaagttaccaccgtcaatgtgttgtttgcaatagcattttattctcataaattagagtaatgaagttagcatgtagagattattggtattattagaatcttaaagaaatcagacaaattgactgattaatgtattgttttgcccgtgattttgtctggatgaatggattatggttgtaacatgtaacnnaccaaaaagcaaaannnnggggcngccgncgactcc

SEQ ID NO: 86650 - DNA, 290 bp, Glycine max
  unsure (1)..(290): unsure at all n locations
  Clone ID: PAT_MRT3847_49256C.1
ggggaatgctacantaaattacttgaggtgtccaaggcatttgtagagggganaatgcttctagaagattatgttttaactttgaaggcctcagttgggctcaaagctcttgttgagggagtaggagttggtaaggggaaagaagatctacaggactcgctatagattctatgaaatccacacaagtacttcctncgtcgccaagaaatacctgttggcaaagcatgttcatgcttantncttctgaaataataagctttctaacaggtgatttcagattaagtaaagct

SEQ ID NO: 86651 - DNA, 489 bp, Glycine max
  Clone ID: PAT_MRT3847_49257C.1
ctcggctgcgagaagacgacataacggggagataaactagcgactgactgcccgagaaaagaaaaaaaaagagtttacggcatgattacatcatgatcgctgctaccattcttctcttcttcctctgggttgcagcattactccactgcgaagaatactggcgatgtgacggagctgcatatgggcgtgaagcataaaccagccccatgtgaagttctggctcacatatgcgacagagtctaacttcactatcgctgaaaactcactgctgaaacaggattcgattctaccttggaaagaaatgatccaattgaatttgagctagctactggtcaagagatcaaaggttgggaccagagatcatcgagaatgcgtcttcatgatgaacgaaagctgataataccagcgatgcctggctatgagaatcagggttccccacccactatcacaagtggtgcaacacccatctttgacactgagcttgtggga

SEQ ID NO: 86652 - DNA, 178 bp, Glycine max
  Clone ID: PAT_MRT3847_49258C.1
gacagcagtaaaaatttggaaagattagtttgcacaccaacactagcggtccaaaaagtgtatttgcagcatctattcccacttgaagctggagcttcacgctctacaatacagcttaatacacgggttatcagtcatcaaattatgattatcatgactttctctgatcatgctgtga

SEQ ID NO: 86653 - DNA, 273 bp, Glycine max
  Clone ID: PAT_MRT3847_49259C.1
gcctggagaggaggcagcccatgttacgcatgttggccttgacgtcagaagggcatgcgatggggacacttcgggccgtgttcaaacttgggaatgcactcaacctcaagagcgcatttaagacatcaatagtatctaaagctgctgctgaagcaagttcaggttgactgaacgctaaaaaataacgctcggtaacaaaagaactatgatcccacatacaagggtgatatagaatccttgattgactgtctattgatacaacaaatgttcctt

SEQ ID NO: 86654 - DNA, 115 bp, Glycine max
  Clone ID: PAT_MRT3847_4925C.1
taacttctggcagtccatcacgctgacactttctttttctccatgtcgcttagaacaggatgagcctgagagttttcaatttctactttatcagcagtatccgttttaaactcgc

SEQ ID NO: 86655 - DNA, 275 bp, Glycine max
  Clone ID: PAT_MRT3847_49260C.1
cacgcgtccgctctcaaccacaatggctgtcttgggcggggccgcctccgctcgcatcattccctccgtctcactctccacctgttgtcgctccttcttctgcttatgatcctgttgcaaactcgggcgtgggagctagaggggtggggcaaatgcttgcagctcctctgctgggattaggcacctgtttgtgaatcaggaaagagcggaggttcgcgttgggagtggaggaaacagaacggggtcgaggccggaggccgatgcgggtgatcctg

SEQ ID NO: 86656 - DNA, 447 bp, Glycine max
  unsure (1)..(447): unsure at all n locations
  Clone ID: PAT_MRT3847_49261C.1
ggcacgaggctaaacgcgccgaatcaaccgccggaggacagacaacaacnggggagaaagcagaaacggcagaccactaccacccctagaacgatgaagaaaaacaaccaaaaggagggtatccggaccaggaccaaatgaacacggaaggaacaccttgaggccagactacacccggccggagccagacaccgcgaccggaccgcagcaacgcgaacaaaatacccgcggcgccagcgagacaaccgcaacccgcacggcaaatagaagtcaaaccatggtttcattaaaatatgtacacaacacaaaaaagcgacgagatcgacacggggaacctggaaccaagtaaaaacccaccctaaagcaaagagcgacccatattcaccccaaaaaaaaaaaaaaaaaaaaggggggccgccgaccagagagcccgacgacccgggaaaa

SEQ ID NO: 86657 - DNA, 229 bp, Glycine max
  Clone ID: PAT_MRT3847_49262C.1
cttttttggtggacgcagtactaggacaatctaccataactaccacaagatgttgatagagcttgtcaaagttgggggagtgatctggtacgacaactttctatggaacggatctgatgtggcacccccatatgctttatttaggaagtacgtatgatactacatggactatgtgcttgagctcaacaaggctctcgctgtggaccccaggatcgagatttgcatgcta

SEQ ID NO: 86658 - DNA, 259 bp, Glycine max
  Clone ID: PAT_MRT3847_49263C.1
aagttcattcatcatgtcacacccaaagggataaaagagaaaacttaatagtacatgggagttgatgatgaacaagagatggaggaggaggaggaggaggagagagaagaagagaaaaagaagacataagcaggatacctaccatactatacatacctattagtgtgagataggggtttagtggtgaaagagtgaagagagatgagtggagtgaaggggcagtgtacaacctacttgaggactatgaagccaaatgggt

SEQ ID NO: 86659 - DNA, 391 bp, Glycine max
  Clone ID: PAT_MRT3847_49264C.1
tttttccttagaaaatcttttatatacatcataaatctatccaatgacagctcgctgaagagtctaatttatctaccaattgtgatggactttcttgatatttatgctctaattcaacatcaactttacttacaggaaggcatatcattttttttacgcatcaacaaaatatacattaatagtctttttattctatcttgcctccaaaattgacagggatttttcattctttgataaaaatttacaagttttagattaacattctgattcagtactacactttcctgtattaatccagtagcccttgtctgaggcaataatttcctaccattcaacattagtattacagaaaacatatacggcctatctctctgttttttgttgtacacac

SEQ ID NO: 86660 - DNA, 524 bp, Glycine max
  Clone ID: PAT_MRT3847_49265C.1
atattgattatattatggaagatttaaaatcaccttgtacagaagaaatagcatttttcaaagcctttagtgacattatggagaatcaagaagacatggattacgtaattgtagatacagctcctacaggccataccttgctattacttgattctagtgaaaatcatcatagagaattaaagaaaaaatccactcaaactaccagtaatgttgaaacattattacccaaaattcaaaataaaaatttaacacagatgataatcgtaacattagcagaaaaaacaccttatttagaatctaaacgtttagtagaagatttaaatagagctaatataggccataattggtgggttgttaatcaatcgttagttacgctaaatcaacgtgatgacctttttagtaacaaaaaagaagatgaatcattttggataaacaagattaaaaatgaaagtcttgataattactttgtcataccttatcgagtattagaatattgatattattgattataatgagaactatat

SEQ ID NO: 86661 - DNA, 244 bp, Glycine max
  Clone ID: PAT_MRT3847_49266C.1
cccacgcgtacgcccacacgtacgttcaaaatttactctacaaaaaatacataaatacatacagaacgtaaaaaaaaaaattctcagctaacaaaattaatattaaccatacattaaacaaaaataaaacataaatgaaacctaatacaagccccttttatcataaaatgcttactttcaatgctatcaatgtatcaaatagactaactatgttaatactattacactatctattacacttcaa

SEQ ID NO: 86662 - DNA, 399 bp, Glycine max
  Clone ID: PAT_MRT3847_49267C.1
cacgctttctcccacactttacttccaagtatcatttaatgcttcaccctatatttctagaatccgatttaacgaaaacatcactagctcactctctgacccaattatcatactacacttttaatcccatgttaatcatcaatgaccacctttcaatgctaaatactttctgtattacctatatttaattatacctttaggaaacctttattatacaacattttaagcatataaattcttttatgtatatataatataatttttatactttgcttttcttactgctttttacatctgctttccccccttattgatcattgtccttccttcattgccaatattatattataatcatttacttgtatatcaatcttattaaactttttataaaattttttt

SEQ ID NO: 86663 - DNA, 315 bp, Glycine max
  Clone ID: PAT_MRT3847_49268C.1
ataagtttaaattatttttttgattttttttataaaaatgtcaaattagagcaattttttcttttatttttaggctaaaatataagattttttaattaacaaaaaatacattaaaaatgagaatagaaataatcttaacataaatttcaaagataatgtaaaatagtcataatcagtaacagctttttccaatatttctcttggaagagatgattattgtagcctatctactatatagtgtcaaaattcagatgtcaattagtgcacatcatctctctctctctctcgcacagtcagtgagcaatagactatgct

SEQ ID NO: 86664 - DNA, 529 bp, Glycine max
  Clone ID: PAT_MRT3847_49269C.1
gcaattacttctctatgctttaatcacaatggaaagattttggcagcttctgctgttgatggaatgattcacatgtttggtatccttaattttattcatttgattattccttggtttgatatacttagtgattaatctgtgaagtaaaatattttgtaattttgttgctgttaacatatttccattataatttgctttgattgtcatatttccatatttccattgttatttgattttcttccaatttctcttaattctttactttcttatttacttatcaataatatctatcacacttaaatttctgcaatttcaacaattggttgcatttattaagttatatcttctcttgctggagttgccaatttgctgggatttcttgtgctttctatactctatagaggttccttatttttggattcagttattctctgattattggggtcagttattcagtgaaataaaatggtgcaatttttaagataaatgtatttagaatgttctagcagtggccacatggtttggcaat

SEQ ID NO: 86665 - DNA, 323 bp, Glycine max
  unsure (1)..(323): unsure at all n locations
  Clone ID: PAT_MRT3847_4926C.1
cgcatncacgcgtacgtaanctcgnncctactantnanntcgtcnacccntgaattaattccntaccnatanctncanncntaccaactttccctatantnantcntattanaacttnncntaatcatggtcatanctntttcctgtatcaaattnttatccnctcacaattncacanaacanaaaactnnaaaaannantntcctcntctaantattncttatnctcttnctnacacnnttcacattnacttttanaannanccaatnnnaagaaannnnnnnnnnaanatatctactttnnnnatatctnnccatctactt

SEQ ID NO: 86666 - DNA, 377 bp, Glycine max
  Clone ID: PAT_MRT3847_49270C.1
accacgcgtccggccagctttctcacttggaaggaaagcctgctgatacatgatcgagcttcggcacagcatctgtccacctatgaccaattaaggcttgctcgctgtacctggatctagagacagaggctgaccatctcaataggcttctcgatgatagtgacgtgcacacttgccgatcatgcgctgcctgataagagccttccctattgagggcagacgcctgagagacgtactaactgaaaggtatatgccctctgctattaaaacatagctatgcgtgttttacggatcaccggctcaaggactcaggttgttggacccctgctcagtgatcatgtatcctatgccaacatactagatcacttctttgaacc

SEQ ID NO: 86667 - DNA, 151 bp, Glycine max
  Clone ID: PAT_MRT3847_49271C.1
ggccaagaaccacctgggagatggtgttgtttaacataatatagttgaatctaacacaaggctgaaacatttatatgcacaaataacaagaccagaccacatatagaaaaaccttggtgtcttagcaaagcgcgcctaaccctacattctt

SEQ ID NO: 86668 - DNA, 395 bp, Glycine max
  Clone ID: PAT_MRT3847_49272C.1
ggctaaccaacgctgacacttctgcttatgcgtttgctacgacatcatcgacgtcacaatgccgcaccatgcagaccactgccagatcgactacatcgacttacgcctcaccacaaatgaagactgatcgtcaaagcttcgtcgattaaacatcggaccattgtgtctgtggcggacgaagatctgactagatatcacctacgaaacctgcatggactggaaggacctgcgcgtcaccgtcaagctcaacgagcaaaaccacgcggcctacgtcacggtagtccgatcctgcgacgcgctcgtcatcaatgcccttaaggagccacagcgtgaccgcaagaaaacgaataacatcacgcacaactgctacatatcactagacgacgtcatcgaag

SEQ ID NO: 86669 - DNA, 557 bp, Glycine max
  Clone ID: PAT_MRT3847_49273C.1
aattcggcaccaggttttgtgaaaaatgaagctgtgaatttgtatgctcatcaggtactagatgcatggttctcatgcatcaagcttttggaagacgaagatgactcagttagattgaggctttcctctgatgttcagaagtgttttacaacagagaaaactggaagcaatctttctactgggtcggttccaatccaagtagatagagtgataagattctgttttgatcatctctcttccatttttggtcactggattgattactttgattacctttgtcagtgggtattacgggctgaaagctgtgtagcaccccaaggagatcttgtgagacgggtttttgacaaggagattgacaatcattatgaagagaagctgttgatcagccaaatttgttgctccaacatggaaaagttacctattttgaagtcctgggcggacaaagatgaattcagaagctatttagatggacggagagctagattttcccatcaattggtgtcatatgctgaagaccatattgggaagcaggaaggaaatgattggataggaagcgt

SEQ ID NO: 86670 - DNA, 488 bp, Glycine max
  unsure (1)..(488): unsure at all n locations
  Clone ID: PAT_MRT3847_49274C.1
acnangcgttttttcacatatattcaaacacccgcaaccccaccggggggaactgtggggaagctgaggcgacccacaggccacccggcgaaaacgaaaaccgaaaaaggggacccggggtggcagccaaacccaaaaaccccaaaaggaaggacccaacaaagcgagcaaccaggcaaaacccacaggccgacacacggcacaaccccacgagaaacccccgcgcaagggagaaagaaaccacactcaggaaacacaaaaaaaaaaccaaaacacatgggcaagaaaaaacaccgaaaaccgaacggccaaccccaaaaccccccccccaaaagcaaagaaaaccaaccggggcccccgggaggccccagaggaaaaggaacaaccggcacccaccaccgaggagggggaaagaaaaccagagcgggacaacccggcaaaaaacacacgaaggaagaaaaaccccccccacctgcaaaaaacccagg

SEQ ID NO: 86671 - DNA, 362 bp, Glycine max
  Clone ID: PAT_MRT3847_49275C.1
aacatgaaaaggagtacactcttttgggaaataaaaactaaatgtacaatcatgcactcctttaacagaaaaaagagaaggggggtaaacacaagccccaatatttgtccccagagccctacgaggagatattacacgttcacaaattaaatagatggggagcactacgcagaattggccttataacactacaagccaatttctcatctaacggtacaagggctggaagaaccgataatgactttatacctagccctgagcatccgccagtagtacgcctcctcttcaagaccctccagcatataaacaaagggcatgaccgcctctacataggttttgatgaccttgtaatcttttccttt

SEQ ID NO: 86672 - DNA, 1401 bp, Glycine max
  Clone ID: PAT_MRT3847_49276C.1
accattccctgaaccaccgacggagcgagaaaaactaaccgagacagaaagtgatcgcaatgttgcgacacttgggcgttcacgcgccgcgtttggccttcaacttcaagtcgagtttaattcacggtggcagaggcaaaacattaaccacacgcgcattctcgtcctccgccgccgtatcgccgccgtcgaaggcgatcgtgtacgaggcgcacggggaaccggacacggtgacgaagttggtggaggttccagcggtggaagtgaaagaaaaagacgtgtgtgtgaagatgctagctgctcctatcaacccctccgatataaatagaatacagggcgtttatccggtgcggccagaaccaccggcagtgggtgggtacgaaggcgttggagaggttcactctgtgggctcctcagttacttctctctctcccggtgactgggttattccctctccaccatctttcgggacgtggcagacttatattgtgaatgatgagaaagtttggcacaagatagagaagggtgtgcctatggaatatgctgctacaattacagttaatcccttgactgcacttctcatgcttgaacactgcgttactttgaactcaggagatgctattgtgcaaaatggggctaccagcatggttggccagtgtgtcattcagattgcaaaatcacgtggcattcacaatatcaatattataagggacaggcctggggtcgacgaagtaaaagaaaggcttaagaatttgggtgctgatgaagtttccactgagagcgaattggaagtgaagaatgtcaagagtctcctgggtggtatacctgaacctgttttgggatttaactgtgttggtggcaatgctgcttctctggtactcaaatttttgagacagggaggaactatggtgacttatggtggaatgtctaaaaaacctgtctctgtgtcaacatcatccttcatatttaaggatatttccttgaggggattttggctgcagaagtggttgagcacagataaagctgaagagagcagaggaatgatagacagacttttgagtcttgtacaagaaggaaagttaaaatacaagatggatttggctccatttgaggatttcaacacagcattggataaagctctgggaaaacttgggagccaacctaagcaagtgatcaaattctagacgtgttggtgttgtttatacaattttctgttagataaaaaattgttctggaatttccaagaaaaagcaatctgggaaggaaaatgacttttcagagggatctatagatttgtagtgcaagatataagaattagatttaattttgttatgctgtcaacgtaaagatttttacgctgttaattaataaaaactcgtgtgcccctattactgagcattt

SEQ ID NO: 86673 - DNA, 303 bp, Glycine max
  Clone ID: PAT_MRT3847_49277C.1
agagagagagagagagagagagagagagagagagagagtgcgatatagctacatggcctgccatattcggacgtgcaccttcggcctctgatggcaacctgatctttatctttactgtattatcttcatccttaatgtatcagtgtcattatctgtgtgttgtttacgctctctttgctatggttactttctttcagatcacattctggttgatcagtaccattctgatgtattgcttttcttgtatgttcatgcatgcttcttatcttcaaaaaaaaaaaaaaaaaaaaaaaaaaaaaaaaa

SEQ ID NO: 86674 - DNA, 245 bp, Glycine max
  Clone ID: PAT_MRT3847_49278C.1
gttttcgagatctctctttgtcctcaactataccagggattgagatttgaagttctgtgtcaatatccgagtttctcactaccgagcttaaggtaatactattcaccttcactcctttgatggttcaaattttgaaaccctttcttctatttgaattttcaaccgaaaaagcttagtcgctttcttgaagcatcaccatgttcaataaacttctctatctgaaagatgtcactttcaagcaacat

SEQ ID NO: 86675 - DNA, 816 bp, Glycine max
  unsure (1)..(816): unsure at all n locations
  Clone ID: PAT_MRT3847_49279C.1
atattgggacgctatatattatcagaacatacaagatatttcaattctgatgcataacacagaaaaagcagaaaaaagaagtgttttggttttcttgtgttggggagagggggggataagaacacctaaattcacaagtactactagtaattgggttaacatacatgtacaaaactacacccgcatttgtagcatacccaaggcctataatcatggaaatgaccaacaagcatagtgagtttctttgctcagtgccctcctggattcctattccatgacaaatatgagggatctccaagttgccttggcttgacaaaatatacaacggtaaaagccaatgccaaaaagaaacacaaccctccaacagtgagataggcaatgcccaggaagtcattcttcccaccaagccagctagtagttgatagaacaagctttttcttgccattaaagctgtatgtgttgtagttattttgcagtgttacatttatttgatcacctgcattgagatccacctctatctttccatacaacttcctaaaagttggcaaagcagcagtacgcatccagacaataagatcctcctgcttactcaacggcgatgattctggtagaagttgtcaagctgatagtagacataaataggcgacttcatatgcttgtccaccggtagtgatattttgcacgtnnnatctgcaggactctgaatgtatgctaccttgtcagtaacttcatgtgnnatgcatgttgattcatacctnnnnacaatttcaacaacctnnnttnnngcaannnntganncaacnnnnntnnnnnacg

SEQ ID NO: 86676 - DNA, 381 bp, Glycine max
  Clone ID: PAT_MRT3847_4927C.1
gggaccccggaacttacttcgtatatataaaaacggggggaagggaaaaaaactttggaaaaaaaattttagttcagggaagtttacaattggccacaactaaaagggcccatacatttgggggtttttaaaaaaatataagggtaaccacttttactttgaaacgaagcgggaaagcaaagcaaaacatgccccttaattggggggtcaaaaaaggcccccaaaacaaattttgttttcttaaaaaggacccccgcccagcctatgattgggcaacgccttaataaccttagctaaggggccaaccttttaagaggctctgcccttgaattatttatcacccccccacataatttaaaaaagtcccccggacccctgggg

SEQ ID NO: 86677 - DNA, 341 bp, Glycine max
  Clone ID: PAT_MRT3847_49280C.1
acttgaaagccaccggtgccctttataatttacgccccaaaaaacataaataaggctgattggcatgaaacaggacccccaaaacgataatattcaccggcaactgaaattggcacggggtttatatataatagagtcccagaccctaagttacattaaacactagctacttttacattgggaggctaaaggaacagagaattccttcccccatgctacgctaaaacaggggctttttttagacgaaggaaaagctcctccttttttcctttgggggaaagacctttaaatttcaaaagagcgcgaaacctttctacaggcgggggggggaagcccctagg

SEQ ID NO: 86678 - DNA, 1595 bp, Glycine max
  Clone ID: PAT_MRT3847_49281C.1
attgcattggtaattttgtttgactctggcaccttccaattcttctaatcttctgcgtttctctctcctttattcttcaatccacagcaaagttagagacgagagagagagagagaaagggaaagaaacctaatacaataccctttttctcagaaatcacactctcacacccacttcccccaattcccattctctctgaattacgagggttttcgaaatcgaagagtctctgatcgatttcgattcggaaaaatggcgtcttcgagcgcaaccggtgctggatccaccgatcccacagctgccagaagaaacaccaagcgacccaagtattcaaagtttactcagcaagaacttccagcgtgtaagccgattctcacaccacgagcggttatttcagcattcttgcttgttagcattgtattcgttcctattggagttgcttcactaattgcttcaaggaaggttgttgaaattgtttttaggtatgaatcaacatgcataccacatgaagttactgacaaggtagcatacattcagagtcctgcagataaaacgtgcaaaatatcactaccggtggacaagcatatgaagtcgcctatttatgtctactatcagcttgacaacttctaccagaatcatcgccgatatgttaaaagccgaagtgatgagcaatcgcgggatcgtagggaagagaactcaacaagtgcttgtaatcctgaagatatagccaatggaaaggcaattgtaccttgtggtcttatagcctggagtttattcaatgacacatacagcttctcccgtgacaataagaatttgactgtgaacaagaatggcatctcctggaaaagtgatagagagcacaaatttggaaaacatcttttccccaaaaacttccagagtagtgctattagaggtggtgcaagtctcaatgaatccataccattgagtaagcaggaggatcttattgtctggatgcgtactgctgctttgccaacttttaggaagttgtatggaaagatagaggtggatctcaatgcaggtgatcaaataaatgtaacactgcaaaataactacaacacatacagctttaatggcaagaaaaagcttgttctatcaactactagctggcttggtgggaagaatgacttcctgggcattgcctatctcactgttggagggttgtgtttctttttggcattggcttttaccgttgtatattttgtcaagccaaggcaacttggagatccctcatatttgtcatggaataggaatccaggagggcactgagcaaagaaactcactatgcttgttggtcatttccatgattataggccttgggtatgctacaaatgcgggtgtagttttgtacatgtatgttaacccaattactagtagtacttgtgaatttaggtgttcttatccccccctctccccaacacaagaaaaccaaaacacttcttttttctgctttttctgtgttatgcatcagaattgaaatatcttgtatgttctgataatatatagcgtcccaatatatgttgttctagttgcagttcatacacaatctggtgaaaatagttgttcttgtttggttt

SEQ ID NO: 86679 - DNA, 1103 bp, Glycine max
  Clone ID: PAT_MRT3847_49282C.1
gtgaggccctcctcgggtcaagctcagtcagcactgcaccgcaaatttttctttgcccctttcgatgagtaacgccacagactccgccggcgagatcccaccggagacgaggtccgccgagagtgacgattaagatcaatgttacgcacggttcctctcaccacgatttacacctcccggcccaatcaacttttggggatgttaagaaactccttgtcaataaaactggtttagagcctgcagagcaacgacttttcttcagagggatagaaaagggtgataaccagcgtttgcaggctgaaggtgtaaaggataagtcaaaactttttcttttggagggcattggtagcaaagagaggaaacttgaggaaaccagaaaagaaaatgagatgtctaaagcttttgaggctattgccagtgttagagctgaggtggacaagctctcaaatagggtgacttccatagaagtatctattaatggggggaacaaagcttccgagaaagagtttcttgtgctgacagagttgcttatgagtcaattgctgaaactggatggtattgaggcagaaggtgaagcaaagttgcagagaaaagctgaggtgaatcgtgtgcaaaaccttgtggataaattagattctctaaaggcaagaaacgccaacccttttagcaacagtagcaatgatgtcaaagtaacaacccaatgggaaacctttgattctggaatggaaagctcggatgccccatccgataactcgtcttcaacgaaagtaactcaagattgggagcagtttgattaaatcttgtacatcatactactgtcccttcatcctttgttcgagattcatatatatattgagaggtcttggtacaacgatgttgccttgtgatttggtaggcagaaattttaattgcagaaatgttctctccgcttaggtaaagttgcatatgttaatctatctcgtgcacttagttttaggcaaaacatgtaaaaccaaattgtattcttgttacttgaatatattattgcatcttccgatcttttggtttgtcttctgtttgcaaagttgttcataatttatgtttttattggaggcgttcatttt

SEQ ID NO: 86680 - DNA, 510 bp, Glycine max
  Clone ID: PAT_MRT3847_49283C.1
gatgtattgactgaaatggttaatgcccttggatcctaaaaatctgcaggttgagaaccaggaggtgattgctgaacttgttgaccagtgtcgctcataccaaaagcgtgttatgcttcttgtaaatgagacttcggatgagcagcttttaggtcagggattggcactgaatgacagtcttcagcgagtgctttgtcaacatgacaatattgtaaaaggaactccagatacaggcacaagaggaacagaaacgtcaactctgccacttgtatatgtaaccaatgaagaggatgagtcagacgttgattttgcccaactagcccataggtgacctaaaaattgctgcattttatttaactggtggctagtttctttctcttagtggattcacagttatatcggatcatgttggttacctgtctaaggcatgattcatttgatagttgatacactggttgatatatattccttactgtcttcatttgccattttattttttcaaaaaagtct

SEQ ID NO: 86681 - DNA, 2353 bp, Glycine max
  Clone ID: PAT_MRT3847_49284C.1
ctctcgtgtcttctttaaccctcaatcagcaacgtgcgccctcctcgggtcaagctcaggcagcactgcaaattccgcgcgaggttcagtccagtgcccgcactacatcgcaaatttttctttttcttctcccctttagatgagtaacgccacagactccgccggcaaaatcccaccggagacgaggcccgccgagagcgacagtggtggtgatagtgggccccggcccacgatcaagatcaatgttatgcacggatcctctcaacacgagttccacctcccggcccaatcaacttttggggatgttaagaaactccttgtcaataaaactggtttagagcctgtagagcaacgacttttcttcagagggatagaaaagggtgataacctacatttgcaccttgaaggtgtaaaggataagtcaaagcttttgcttttggagggcactgctagcaaagagaggaaacttgaggaaaccagaaaacaaaacgtaatgtctaaagcttttgaggctattgctggtgttagagctgaggtggacaagctctcaaatagggtgacttccatagaagtagctattaatggggggaacaaagcatccgagaaagagtttcttgtgctgacagagctgcttatgagtcaattgctgaaactggatggtattgaggctgaaggtgaagcaaagttgcagaggaaagctgaggtgaatcgtgtgcagaaacttgtggaaaaattagattctataaaggcaaggaacgccaacccttttagcaacagtagcaatgctgtctaaaggcatcaattgaataacaaagtaccaacccaatgggaaacctttgactctggaatggaaagcttggatgctccatccgataacccgtcttccacaaaagtaactcaagaatgggagcggtttgattagctcggaaaccgtttttggaacatctaagttataaatgttgtacaacatcatattactggcccttcatcatattagaggtcttggcacaacgatgttgccttgtgatatggtaggctgaaattttaattgcagaaatgttctctccgctgaggtaaagttgcatatgtttgatctatctcgtgcacttatttttaggcaaaatatgtaaaccagaattgtattcttgttacttgaatatattattgcatcttccgatccttacagggggagaaacaagtttgataggccacccccaccggactgggataatagagatcgtggaagagatggcttctctgatgaagggaaaggatttgaaaggaggccactgtcaccccctccacctcttttgccatcacttcctcaccatcgtggtggtcgatgggctcgagatgttagacagagaagccgctctccaataagaggtggcccaggcccaaaagaatatagccgggatacgttcatgcatcgtgcaagagatgataggcgatgctggaatgggacgagatagaattggaggaatgtattagctgcggatgtttaatgtactttgtgatgtaactatattagcttcattagacgttgggatgaagaatttgagagattagcccctgaatcttcagaataggtcacaatgcattggaaaactttttgactttgtgcgcactcaaattgcgtggtttatgattttatcggtttgtttcattccacttaatcttcacttcagatttgtcaatatgtttagtacgtggttttttactccaaatctttgagggggaatattactaggcttttattcttttgtccctctgactgcgagatgaaattaggacacccacctataggctatagcctagaatattaaacaacacagcaattattcttttcggctctgcatctacttggaagtaggaaatatggtttatctatgccctcaggaccaaccagtaaatatagcaaagggggttttgcccgttactgtactcttgcaaaattcagttggttgtaaacatactataccttcaacacaagcaagtttgataattgagggctattcgagatgaatgataacaggagcaattagtatgtagaactggctcacaacaaatgctactgtcaatttaacacaagcaaggaggctttcatggagttatcaaataatttggttccactcctgtctatatctgtacatactctgttgacagcttcaagtcaagtttaactttgcttgcctacgctgtgtctcgctttgtcgcttcacatgggcattgtaatttgtatgtcattatttgcttaatttcatagaccacaggaaagaaagcactgagtgaagaaaaaaaaaaaacagcccagttgattcgactagaaaactagtaaacttataacgcgttt

SEQ ID NO: 86682 - DNA, 628 bp, Glycine max
  Clone ID: PAT_MRT3847_49285C.1
aatgcaattatatggattactgctgtgacggcctgccacaagcttttccaccattaaataggggggaacaaagcagagaaagagttcgtgctgacagagctgcttatgagtcaattgctgaaactggatggtattgaggctgaaggtgaagcaaagttgcagagaaaagctgaggtgaatcgtgtgcagaaccttgtggataaattagattctctaaaggcaaggaacgccaacccttttagcaacagtagcaatgctgtcaaagtaacaacccaatgggaaacctttgactctggaatggaaagcttggatgctccatccgataacccgtcttccacaaaagtaactcaagaatgggagcggtttgattagctcggaaaccgtttttggaacatctaagttataaatgttgtacaacatcatattactggcccttcatcatattagaggtcttggcacaacgatgttgccttgtgatatggtaggctgaaattttaattgcagaaatgttctctccgctgaggtaaagttgcatatgtttgatctatctcgtgcacttatttttaggcaaaatatgtaaaccaaattgtattcttgttacttgaatatattattgcatcttccgatc

SEQ ID NO: 86683 - DNA, 433 bp, Glycine max
  Clone ID: PAT_MRT3847_49286C.1
atgaagccagcgttagaactctcgtgtcttctttaaccctcaatcagcaacgtgcgccctcctcgggtcaagctcagtcagcactgcaccgcaaatttttctttgcccctttcgatgagtaacgccacagactccgccggcgagatcccaccggagacgaggtccgccgagagtgacggtggtgggccccggcccacgattaagatcaatgttacgcacggttcctctcaccacgatttacacctcccggcccaatcaacttttggggatgttaagaaactccttgtcaataaaactggtttagagcctgcagagcaacgacttttcttcagagggatagaaaagggtgataaccagcgtttgcaggctgaaggtgtaaaggataagtcaaaactttatcttttggaaggcattggtagcacagagaggaaac

SEQ ID NO: 86684 - DNA, 511 bp, Glycine max
  Clone ID: PAT_MRT3847_49287C.1
gctgggcccatcagcccccgacgtcgggatggtcagcatgaggaagaccgtcaccaagcaggcctactccggaagcccatggtacggcccagaccgcgtgaagtacttgggcccattctctggacagcccccgtgctacctcactggcgagttcccaggtgactacggctggcacactgacgggctttcgaccgatccagaaaccttgaccagaaaccctgagctcgcagtgatccactccaggtgggccatgctcggggacttgggctgcaggctttcccgaactgctgtaccgcctcggggtcaagtgtggagaagccgcgcggctcacggccgactcccagatcttcagcgagggtgggctggactacttgggcaacccaagccttgtccacgcccatagcatcctcgccatctgggccacccaagttatactaatgggtgctgctgacggtcatcgtattgctggtgcgaccctctgtgaggtcactgacccaatctaccctggagg

SEQ ID NO: 86685 - DNA, 329 bp, Glycine max
  Clone ID: PAT_MRT3847_49288C.1
taaaaaaaaatgagaagggatcaaaaggatctcaaaaaccggtgcatgctatcaaaccataacatgcatggtctcttaaccttgagaaaagcagacaccacctaacttatactatacccaataccacaacatgatatggacaatgtgtaacacacactaagaccaatcgattgacatcgggactccaaagttatatgatccttgggtgactgacctgtttcaaccaaaatatgaagttgagtaacccccgagttgcctgatccatatacttcaaaagggtgaactggttcatccgatggatagaagaccggaaatgtatgcactttaat

SEQ ID NO: 86686 - DNA, 314 bp, Glycine max
  unsure (1)..(314): unsure at all n locations
  Clone ID: PAT_MRT3847_49289C.1
tagatcctagactgtttaaggtgtacacaagtgctcatcaggcagaattattgagaagtgaatacacccatttccttgttacaggagatgtttaccgtagggattcaattgattcaactcattatcctgtcttccataaaatggaaggctttcgggtttttgttccagaagaatgggagggatctggaatggatgccacattatttgcagcaacagacttaaagcantgccttgagggtctagcacgccatttatttggtgctgtggaaatgcgctgggtggatacttatttccatttactaatccatcatttg

SEQ ID NO: 86687 - DNA, 477 bp, Glycine max
  Clone ID: PAT_MRT3847_4928C.1
gcggcttcggcgggtacccaacgctgcgctgcgcaggggtgggctaccaagtcttttaggcagactcaacaccgaatgcacctaccactcgccacggaccaatcttctgaaagcgaagaacacccacagagcttctgcagtaaaataagaagacgctaggcacatcactcagagaactttaacgccagcggcgagggttggaaacgcacaacacaaatgggatcgctgcaatacaccaaaagtgccagacaaggccagatgggccagagactgagtgtgaattgcggatgaatggactgcagataataagggattaagtggggaacaagacttactgagaggatgaaagtctacctgattttcaacacaagtgccaagcacccaacctcagatgactggcagagcattgtatcgaaagctcatcgcttctttaataggaacgaagagatgctgaatgtacccaccgttgataggacc

SEQ ID NO: 86688 - DNA, 601 bp, Glycine max
  Clone ID: PAT_MRT3847_49290C.1
agttttaatgattcatttacccctccaaaaatgggtatgccctcgtcaagatttatgcctgatgaatctttaatgcgtacacatgtgaaaagtagcagctatgcagaagatcttcaagaggttgaactttgagcacatgctcaagctgtaaatatcaaactttgtttttgatcttcagaatagctgggacgtccctgcttttgcagcatttctctggatgtaccgaatggtacacatcagatggggttcacacaaacagatttgagaataacaacagatatctattaccccttctcccttcccatcctcttttcagtatttttttaagtcctcgactcccaaccttgtgatgtatggctgtgttttttttcttcttaaatgccaagggagatgacagtggacaccatctccggattatggaactggtgtgacacacaacaaaggataggaccacctgcttaggtgagtagtacgactcatttgttcattttattaaacaaggatacgccccacgaggaaaaatgacctcaacagatcacggacaaaagaatagtgtatgcaattgtgaaatataattttgttccttctgtatttatcgatt

SEQ ID NO: 86689 - DNA, 474 bp, Glycine max
  Clone ID: PAT_MRT3847_49291C.1
gaccattacaagtatatattacaaggttatctcttggttattttattgaatgttaaactttattatactactacctgcaatattattcagcttattcttatgaaattttattaaatattgtctatgtacattggttttttggtcttgtttcatgaatcatggttgaggttttacctgtttattgttgattgtttgtatttcctgcacataatacatacatgcatctgaaatatgaaaaaaattctaactgctgatgttggaccagtggttgtgatcaattattacttatgatcataagaataatgcaatactgtgtgtttgttaaatagcttgtcttatgcccatgataatctttcttttctgtcttttgtattaagtttggacacatttccatatgctggaacaaccacgacttgtgaatctttatacatgggagttccatgtgttacaatggctggttcagtgcatgcacac

SEQ ID NO: 86690 - DNA, 426 bp, Glycine max
  Clone ID: PAT_MRT3847_49292C.1
tggtgtgacacacaacaaaggataggaccacctgcttaggtgagtagtacgactcatttgttcattttattaaacaaggatacgccccacgaggaaagatgacctcaacagatcacggacaaaagaatagtgtatgcaacccacgcgtccgattttgttccttctgtatttatcgattaaatggtattaaattttctgaatcatgctctttggcctcaattggaagtgtattcgttagttcacattgtatatgatgagatgatggggcaaaagggatgaggtgaggtgaatttggtcgccggcgattattttgcaatgtattttgagtagtattaagcctacaacggtacataatcgataaaatttagatacagtttcttatttaaaaaaaaaaaaaaaaaaaaaaaaaaaaaaaaaaaaaaaaaa

SEQ ID NO: 86691 - DNA, 170 bp, Glycine max
  Clone ID: PAT_MRT3847_49293C.1
gctgtttttctacatgctacttggtgttgctgtggttatgtgcagttcgctgggcgacattggctgcggtgatcaagggatggatttcgttgttggagctgcttgtttcttccctggtatcgctttttgattcaaatgactttattgtggagcaagagagcatcattcat

SEQ ID NO: 86692 - DNA, 295 bp, Glycine max
  Clone ID: PAT_MRT3847_49294C.1
gggtggacaaagttaacagcaaaggtatgtacttttattttgtagggcgttccctccctcttttcaccgattgctttagccttagtcatcattatatgtactgtattccatcaccatccatgaactagttgtcctaaccaaataagaatgcagcgaaagcagaattcttcttctacacagcaaaagaacacacttcattgcaaaccaacccatatcaaagagaaaggtattcctggttcttgatttggggtcctaattttcaattcctggttaagtttggctttaaaaaatggaa

SEQ ID NO: 86693 - DNA, 296 bp, Glycine max
  Clone ID: PAT_MRT3847_49295C.1
ttcctcctctttcaaaccttttacttaaattaacataaatcctcatatcgacggtaaaagggaaaaatagaacattttttagtcatattttcacactttattaaagacattatttccttgttacagatgcatggtgagctaatacattccctgttcttatatacaattccccatccattcacacttaaagttcttagaccacaccttaataattttcccgacgcttttcttaaataaaatattatggctaattctttcattttccttttatgtaagacgcactttagattccctta

SEQ ID NO: 86694 - DNA, 2222 bp, Glycine max
  Clone ID: PAT_MRT3847_49296C.1
agctcgaattagtgatgatatgaaaaggagcctggtcccacacatgctggaggaagaagcaggcgagtagagcctgaaagaacactgactgatgcacagagggatgaatttgaggatatgctgcgtgctttaacattagagaggagccagataaaagaggctatgggattttctttagataatgccgatgctgctggcgaggtagttgaagttttgactgaatccttgacacttaaagaaacccctattccaactaaaattgcaaggcttatgcttgtctctgatattcttcataatagtaagtgctccagtaagaaatgcatcagcatatcgcaccaagtttgaggaaagcattgccagacataacggaaagtcttaatgacttccgtagtccaagtagtagaccggagccaacattgtctggctaaaggaacgagtgctgaaagttttacaagtttgggccgactggtattctcttttcagatgcttatgtgaatggattaagagccactttccttcgacctgggaactccggtgtagtgccagtcctgtccatgtgtggggctgcgcctgagattgagcagaataccacttccgaagatatggttgttggtggcaagaccaaccaagatgctgcattggcaatgggtcgaggggctgcaatgaaggagctaatgagtcttcctcttgctgagctggaaagacggtgccgacacaatggattgtcacttgttggtggaagagaaatgatggttgcacggttgctaagtcttgaagaggcagaaaagcagaaaggttttgaactagatgatgaattgaaatatgcccacaatcaattgggttctgggaaatattcaagtaatcaacgagaaacaagtgaagagcctgacccagtatggaaccactatggggatgaagatttgcagtcacagggcagaagttctgtacctttatccccaacacttcctattgcacaacctgaacttaaagctttcacaaaaaaggagaagaatgatccagttctgccagcctctaaatgggcttgggagggtgatgagagtgatgatgaacaaaggagaagtggaaaaaatatcggcttaagctactcatcttctggtagtgagaacgtgggtgatggtcttgttaaagctgatgaatcagagtctgcagctgatacacgtttttcagctcatgctgacagtggaatgaatgaagagcagaggcaaaagctgagacgcttagaggttgctttaattgaatacggtgagtctcttgaagagaggggaattaaaaatttggaggaaattgagaagaaagttcagttgcataggaaacggctgcaagtggagtatgggttatcagattctggtgaagatggtcaaggcaatagaagaacttcagagaggagggataggcatgatgtttcaaggaaacggcaccgaagccgtagtccaagtagtagtccacagccaacattatctggcaaagacagagatagagaacacgatttagaaagggatcgagacagacaaagagatagaagtcatgatttcgatagtgaaagaggaagggaccggcacagggagaagagtggaagcagagagagagatgatcatgataaggacagaagcagggatagggacaggagaagacgagccaaataagaacatttcagatgtttcagctcagatttgataccttgatgatttccaaatttgcttgtaagagtctagaggacagttgacttttcgtcatcacggggatattggcaatgtgatacctgttgggagataggaatgaaacatctgccaggaaagtgtcactgtagacaatccttggaagtgctgagtagtaactggctcttgatacccccacaatttcaacttaatgtaatattaagattttaaatcgttaattttgcctgtgaattagtgcatgctgctgcacactgcatatttgatcaagagggttctgtcaataccaattattgagatagtttacagggagattcggctgactatatgtgtttgtttgtgcgtgctgggtaaggtgtattttaaaatatttagggatgtgatcgtttattgcgtaatgatgcataatagtagtattgtggacgaattttgaattcctaacgctagttattttgataagatcaacattttcgtttacctattggacgtatttcaatacagtatagatattctttttcttgctgatat

SEQ ID NO: 86695 - DNA, 828 bp, Glycine max
  Clone ID: PAT_MRT3847_49297C.1
gagaagacgacagaaggggggaccggcaccgggaaaagagtggaagcagagagagggatgatcatgataaggatagaagcagggatagagacagggacaggagaagacgagccaaataagaacatttcagatgtttcagcagagatttgataccttaatgatttgcaaattggcttgtaagagtcaggaggacagttggcttttcgtcatcacagggatattggcaatgtgaaacctcctgttgggagataggaatgaaacatctgccaggatagtgttactgtggacagtctttggaattgctgagtagtaactggctcttgataccctccataatttcaacttcatgtaatattaagattttaaatcgataattttgcctgtgaattagtgcttgctgctgcacactgcatacctgatcaagagggttctgtcaataccaattgttgagatagtttacagggagattcgtgcgtgcgtgcttgctgggtacacaactgagtgacatgcggttggatctattgaaactgactcttctagtagttgttttttagtttatgaagttctttatggttttagaaactcgtggatgagtttgattgaatagaacttcaactgtaggataacaaacctgtcttaagatgtgaaaattattgatactaaaagcatttatttacatgacatgttaatggagagggaaagttatgttttagtgattatcaaagtaacacgtggaaatagtggggggaccatgtctgatgtgttgactaagtttgcttattctcttgatggttaaataagaatgagtttctaccatctttgttttcc

SEQ ID NO: 86696 - DNA, 1042 bp, Glycine max
  Clone ID: PAT_MRT3847_49298C.1
acgagatttgattgtgggacctcattggcataattgttcttggagtaggaattcttttgctatatctgatcaatgcctagttgataaaaaaattctaaagctttagagaataatttggtgttgggaaatttcataactaagagctctttatagactttggagcattgcaatttattctctgttctttatttaattttattgtgcaatcatatacctttgagatgctttgctctccttgctcattgttttacttaattttattaataaataatatatgcactacactatcatccaatcacaaactgtcatgtatgataaataagtttgttgacttttttagtaactatcttaaaagtcatcaacgatgagttttgattaacacttaacagtataaacttttacactgacatggcatgtctattaaactcttattatattggtagaatatagataagtttgttagacttttataataactatgttgaaagtcatcctaacgatattttttaattagttgatagtataaattgtttaactttgtccatgcatacttattaaactcttgttttattttgcagcaaatagaggaattaacccctacacttgggtcagtagacctatcatctgtgaagaacatggaggatcctaaggtggttgagagagtgaatgactgaatagcatgtggggctgatgctattcctggggacccgccatgccagcatgccgatcacgatggtgtggcgatgtgccacgtgggccccaaagtaagaaaaaaaaaagctaatgaattcaaattttaagttctaaaccaaaaattcttgctgctgctgatgctttagaaagggagaaaagaaaaagaaaaagaaaaaataataataatttttatccgggcaaatggtgactgcattcctaattgtacaaaactacaaaggaagaaagtctttggaagtggaatggacccggtgagatagctgttacagggtgctatgaaaagcacgtgtcatttactttttttttttaatctttctttgcacataaaaaa

SEQ ID NO: 86697 - DNA, 571 bp, Glycine max
  Clone ID: PAT_MRT3847_49299C.1
aagataacaacaacaatgcaagatccacaaaaaattgattatcccaaagaacttattccccactgggaaaagcctgttgataaccacacttgccaattaatctactggaatcttatcgaattattagagaaacgcaatgatgttacagcaaatcatttcataaaggaatttggacaaacagctcgatgtgatcatattaaagacatgtctgccctccgaaaaaattatttatcttacttaggtacaaatgcaattcaaattttatctggtaaagaaagagatatcggaaaatcatctgatgcaatcaaccactatcacgaacaaacaaaacaacaattagtttcaggtcttaactattgcaacaccttctattattatgctatgcacaagtacagaaacttcttcacataccttggttatggtactgtgttatattttggaggccgagctttgatgggcagaggaatgcctcgaatgttccaaagtagtatgaacaacatggctaaaaagactactcccacccctcctcctaccaatcctcctcctcgctctacctcaagtatctaaagta

SEQ ID NO: 86698 - DNA, 345 bp, Glycine max
  Clone ID: PAT_MRT3847_4929C.1
ggggttgcgcgttgatgaccgcgggataaataaacaccaatcttaccgaggactaccacgtccggtactggttactcaaataaacgaaagcaagttgttctgaactgaagtgttaagttactcactgctaaaaacacaccaattactcttctctcagaggagcggattgcctagcccaagctgcaatgaagggacggcgatgcccagctagagtcttaaagccttgattctgtcggacgcacaaaactttggatgagataagagagcgaaccttgctggcttgtatgaaggacgggaagcccacacgcaacgttatggagccgaattacccctaaccatgccttt

SEQ ID NO: 86699 - DNA, 969 bp, Glycine max
  Clone ID: PAT_MRT3847_492C.1
ctcgagccgaatcggctcgaggcttcctttgccatttccatggatagagaattcttaggcatattaacatttaagtgatttaacacatctctgccactgactctgctgaatagcattgaataacaaaggccatttctttagtttttgaagatagatagagtcaaagagagatcaaggggtagcttaaatttttcagcttttggagaaagagacatcactcacgcaccaccgagatccattttttcaagacagttgaagagaaaaaatggaaacaatgttgcctcagaaccaagcagaggaagcaatagtcacaacaagccttaacgagacagagagtgaagttggtatgagggaagaagagaaggagttgcaacaacaagaccactccatgttcaacatcaagagcttcctctggcatggaggctctgtttgggacgcatggttcagctgtgcttcaaatcaagtggctcaagtgctgttgacactgccctattctttctctcaactgggcatgctatcaggaatcttgcttcagattttctatggaatcttgggaagttggacagcgtatctaatcagtgtcctctacatggagtaccgtaccagaaaggaaaaagaaaatgtcagtttcaagaaccatgtcattcagtggttttgaagtgcttgatgggttgcttggtccgtattggaaagccctggggctagccttcaactgtactttccttctctttggatctgtgatacagcttatagcatgtgcaaggtacatctactacataaatgacaaattggataaacggacttggacttatatttttggagcttgctgtgccaccactgtgttcataccttccttccacaattaccgaatctggtcttttttgggtcttggaatgaccacttacacggcttgggaccttgctattgcagccatccttcatggccaggtggaaaatgtcacgcacacgg

SEQ ID NO: 86700 - DNA, 354 bp, Glycine max
  Clone ID: PAT_MRT3847_49300C.1
ctattaatgtatggaaaacatgactaatgcgtcaacaaagttggaaaatgatatttcatatatctttcatataataaagaaagagggtttcaacggtatatatactttcatatatatatatatagactcacttactttaaaagtaaattcttcaagctttttattttatttttttatataatgtagaaagaaattaatgttaattattatatcttaagaaaataaatgataaaaacataacttacaagaactattcttaaaagtaagtgaattagcaaatctctcatgccagccttatatatatatatatgtatatatatatatatatatatatatatatatatatattatacc

SEQ ID NO: 86701 - DNA, 1224 bp, Glycine max
  Clone ID: PAT_MRT3847_49301C.1
ccgcgggccgggttcctaccagggcactctcactctcctttatacacacacataacacagtttggttttgatttgaggggggaggggtgagaaaacaatctttgttgttgagtgaatagttaataatggggaggaagtgctcacattttggaaccatagaccataattcaaggacatgtacatctttgagagggactcctttcgtaggttcgttggacttcggctcttaagcggacacttagtcagtactaatcgtgttaacattcaagaaaagctttagcatggacatccttaccctcatcatcatcttcctcattctcttcaatcaagactaaccattgatgaaaatttttggggtatcccttagatggtctctcacagatggcccaagagaggaagaaaggagtgccatggacagaagagcaacacagaatattccttgttggacttgagaagctgggaaagggtgactggagggggatcactagagacgaagttcttaaaactatcccaccacaagaggccagccacacgtggaagtccatgctcaaaattacttccttagattggaaaaaatagataagaaaaatcgacgtctaagtctctttgacttggatggaagcaacaaagtatattctaattctattacggatcatcatgataatttctcactgaatgaatgataaatgtttctctttaaactgaaaagtaatttacgtttcttttttacttttcctttgtcgttgaattattgtggcaggttggtagcaacaaagcaggttctaattcattttcggctcatcaaaaggatgagtctaaatgtgaagttaagaataatgatgctgccactttgtctttgctagggcgtataacttactttcaacaagaaaacaaatcatcagagtataagcaagaaacatttgataattgctcatatcaaagtcaaccaggtgaagagcatcaagtcgcagttcttaatctggatctcactcttgcagcccccaaggcaaagaccctgcaggaacaaaataagtcatctccttctgctccatttctgcttgggccaattagcgtgacttaaactgtgtcaagtgttatatatattaattgtattaggaatgtacccttttatctgttgtcaagtgtcaactcgtgtagaagatcttcaggtcaaagaaacacattgttcattgcagtaatagtagtgactagtcgttattaatt

SEQ ID NO: 86702 - DNA, 803 bp, Glycine max
  Clone ID: PAT_MRT3847_49302C.1
gaagtatctaaactaacagcttgtatgatagattcatggcgggaacattgatccttctattgatttcattacaaatattgatatttctgaggggtttttttaaagagttatcgctcctgcgtcgtgtcccctcttctttgacccattgagttccttacttatttcactcataaaatttttgaaatattactcaaatgtacctgcaactgtgtctgcatgtgcgtgtgtcactaccattctctcgggagaacaaaccaccttttcttgttttttccagcattccaatttcccacgaattgtgtagatttctctgcagatatcttcttgtgaagcctctgctactagaagtgcaaacagtaactgtaccatgtattgcagagatcttcctgagcttatctgtacaggaaatacaaggtctcaggtctgcaaaaggccaagtccaagtgaatgttttgtaggttcttattcatcttgaggtagctttctcatatttgactgaatgaagttccttattgatatgataaattatgcttcagcttgtgaaataaccatgtattttccgttggttttattttgttgtattatgaaatgggattcatttcatttaaaaaaataacagtttctcttttggtttatccaactaacaaaataactacattaatgaaagcaagtaatttgtatatgagaactgaataaaagggaagtttatatgtttgagtgctttagatttggttaatttgtaattgaagtggtattaatttcaattttttgggagagattgcttttattctcttctcataata

SEQ ID NO: 86703 - DNA, 615 bp, Glycine max
  Clone ID: PAT_MRT3847_49303C.1
gttcatcagacggctcgaggtcatgatcatgagactaatctattcaacaagggaaggcaacaacaacaacagcatcattggtctcaaacagtgacacctatggactacttcagcacaggcctcttggtaggaccttcttcatcatctgcaagaactcaacaacaccaacaccaatcttcttcagcacatttccaactgggacatgcacatgcccttccaatctctccattcagtggagaaaaccactcagagcagctgcagcatttttccttcatgccagaccacctcaacaacataccagctcatcatgtggttacatcttcttctgcttctcatcaacccaacgggggtgacaacaactacaacctcaacttcagtatctctacatcgacgggccttgctggttacaacaatagggggacccttcagtccaattctccgtcttcctcgtttttgcctcatcacctccagaggtttcaacctttagacggatcgtccaacctacctttctttataggagctgctgctccttcttctgctcctccaaccatggacaacaacaacaataataacagcaacaaccatcaccacctttagttctcacctgtctttgat

SEQ ID NO: 86704 - DNA, 398 bp, Glycine max
  Clone ID: PAT_MRT3847_49304C.1
cggacgcgtggggccgctgagctacaggtttattctcacgtttctcggaatgtggaaagagatgcaagaatgttacaaatgccaatatcagcaaattgttgaagccaaaactttagatgccttatcgttaaacacaaagcctggcaatgctcatattgatgcaacaataaaactcaaatctgaggtacagaaatggaatttgagcttcttagattggattcacgcccagaggtcccatgtgaaagccttgaatggttggctggtaagatgtctattatacgaacccgaagaagtacccgatgattcaactcccttctcacctagcaagattggggcaccacctgtgtttgtgatctgtcacaaatggtcaagggcagtggataatctctcagagaaga

SEQ ID NO: 86705 - DNA, 289 bp, Glycine max
  unsure (1)..(289): unsure at all n locations
  Clone ID: PAT_MRT3847_49305C.1
gcagaaagcaagctcatcctagagttttaaaaatggcagcagcctcctccaagggtctctcttccccantcntnggtngcaaagncgttaaattgggccantnagcccccnaattcggaagggtcnancntnaggaanaccntcaccaagcaggcctcctccggaagcccatggtacggcccanaccgcgtcaagtattgggcccattctctggcgagcccccgtcctacctcatggcgagttccangtgaatacggctggggacctgctgggtttcggccgacccana

SEQ ID NO: 86706 - DNA, 491 bp, Glycine max
  Clone ID: PAT_MRT3847_49306C.1
cagccgactactctgagacaatgaaggctctggcgtggtacggcaagaacgacgtccgaatgattgacacaccgaagcccaagattctagaggatcgtgacgttatcgttaaggtcactggttccacagtctgcggttctgacctgcacttgcttcacggcgctgtcgtggagatgcaaaagggcgacattctcggacacgagttctgtggtgtcgtagacgagtgcggccccggtgtcacaaagttcaagaagggtcaacgagtcgttgcctccttccagatcgcctgcggtgactgctactactgcaaacagaagctgtcttcacagtgcgagaagaccaactcaaacacaattgagaacgcaatgtacggcggccggacagcaggcatgttcggttactctcatttcactggtggatatgctggtggtcaagcagagtacactcgcgtggcatacggcgacgtcaacctactaccgcttcccgatgat

SEQ ID NO: 86707 - DNA, 464 bp, Glycine max
  Clone ID: PAT_MRT3847_49307C.1
agaaacttgtgatattagggaaggagatagtaaagaaatgtgggggagtgcctcttgcagcaaaagcactaggaggtcttctacgcttcaaaagagaggaaagagagtggctcaaaattaaggaaagcaacctttggagtttgccacacaatataatgcctgccttgagattaagctacttgaacttaccaataaaatttagacaatgttttgcttactgtgcaatatttcccaaagatgaaaaaatagaaaagcaatatttaattgaactttggatagctaatggtttcttttcatctaatgataagttagatgctgaagattgttgactcgttggcaagtgtaccaaatcgtcacaagtagtaaagttctcggaagtccgagtgtcgaatccacagggactttggttgtacttacactaatacaaacccaatttacaagcaagagataataaattttttttt

SEQ ID NO: 86708 - DNA, 311 bp, Glycine max
  Clone ID: PAT_MRT3847_49308C.1
ctcagaccttcgaagcagaagaggctctagtctatttcagagtgcatttccctctagctcagaatctccttaactaaagtagaacctgggtgaatattttacacattgataatgttggtgtatacaattcggatggccagcggcaccaccccctgctgtgatgcgtgcatacagccaggtgtgcttgaagggagagaagctcgatgcctcttattgtgatgcagcattggtccaagaactagaagagctggaaggagttgcaccacaccataccttctgctgcataatcaggagagttacatcagacgcct

SEQ ID NO: 86709 - DNA, 559 bp, Glycine max
  unsure (1)..(559): unsure at all n locations
  Clone ID: PAT_MRT3847_49309C.1
tgtcccttntcgttcggactccctgtgcgtgctgcgtggtaccgacgttgttccattcatgccattgtatcctcactggtctgtttcaggccctcgccaaatggcgcaggatctcgaccgtcctttgaccggagcattcagagacacgcccgaacattcagctcatatgcggttaaggtcgactgctcacacccagagccataaaagattgtccgtcttcagtggccgttctcgaagcaataccacaacatccactccctctgttacatcttctcgtcgctcacaggcctgatcaatgacttccaacgagaacggcccattgcccttggcacccgaggaccggacgccctctacaactggagtgcgtcacgaccggcatgaaagtgcaaccaagtcacttcttttacgtggaagccgcattctgcgccgtcaagggagcaaggtcaacatggttggatctttaatgaagaagatgatgcggagcgcgataagtcccgctttgacttttgtcgccgaaatcccggtcgaacgcaaccgtaatgtgtttccccaaccccag

SEQ ID NO: 86710 - DNA, 281 bp, Glycine max
  Clone ID: PAT_MRT3847_4930C.1
ggaaaacaccaaccgaggctgtggtgataaaccaattacaacaacttgctcacacaaactggagcccaactgggctcataaacttgaattccacttttttataagggacaatatggacgttccttaagggcgaacttcttgacacttaatcatgaagggggacttatacaacgggttttttccattttgaacacggacgcatgcacatgaatcatgaggtagaagctcccgttccgccttcttccaacttgaacccaaggcctttgactaaaaggccccat

SEQ ID NO: 86711 - DNA, 459 bp, Glycine max
  Clone ID: PAT_MRT3847_49310C.1
gttcggagactgtcgtatgcatcaactcttgccaccagcgcataagagtggtcctatctacattatactgcccctacccaaaccttatgtcttatactcggatcatgactttacgattcacaccggcgcatcgtagaccaaatataccattctttcaatcacttgtgctaacaggtgaactgacagacgcttttccaaacctgatgaaagctaataccatgatgacatcttcatagtcttacatgcccactttaactctgtgggctgcacatctggcgcactctatgcactggcgtatgtccctttcaagatgaaccgattgagctgactgctttactcgcttgtatcagggcagttgaaaacgaactggtgcagcttgttacttgactggcattttgaacatgatgttgccactgctgatgcccctgacgtatggccctataggactgtgggtgactt

SEQ ID NO: 86712 - DNA, 433 bp, Glycine max
  unsure (1)..(433): unsure at all n locations
  Clone ID: PAT_MRT3847_49311C.1
tggctatgaccgtagcacttatnnnnntttaagnnangacgaagnngnaanntnntagagcagtacagatcgcgagcggtccctcctttaanaaaaacagacatgaagaaagcgtttttaataataagataacagacccccatgaaatttgtgaattaaaaaaagatatgatactaaatttcaattaggatttgaaaaataatatagtttatataagaagactgtatttttattgtgagtagattaaaggctaaagtaatttttagtttgtaaaaaaaaaaatacatataaaatggattaatatgaagtggaaatcataggttatatctagttaaatattattatttttgttgaaggaaacttaaagttttttatatagaagttaaaaaaaactattttagatatgaggatttgagtaaaagtaaaaatatat

SEQ ID NO: 86713 - DNA, 366 bp, Glycine max
  Clone ID: PAT_MRT3847_49312C.1
ctttgggctgatttatgtgcttgtttatgtgcttgcataggcgcgtgaatatccctgagagatgttggcgtgaggagatgatagagagtactgtttgtccgatcgggtccatcatcgcgtcaataacaccctcctctccttattctcctcctccaggtttccataacgggcttaatccatccctgtgcatccatcgtgggacagactacgaacaatgatcttgaagaataggcctatcggttcgcgtggtcacatcgagtacatcgtcagagtactctcccgttatcgcgaagtagtccgcgctataggtcacaccggttaaacgtctcactactgacgtatctaccatcgactgctacactgaat

SEQ ID NO: 86714 - DNA, 347 bp, Glycine max
  Clone ID: PAT_MRT3847_49313C.1
aaaactacctttcaaccgggtttaaaaaaagtcaaaaaaaaacaacaggggtaaaaaaaggcaacgcaacgaacgaaaagaaaaaaagggaccgaaaagtacgaaaccgaccaacaacccccaaagggacacaaacccctaaaaaacagccccccccccggaagcaaaaagcccccttggccccaacggggcccgaacggcctgaaaaaaaaaacggcccccggttaaaccccagggaacccccgattaccaaggacccccaaagaatcccggagaaaccacgacaatcgggggctccccgcgtaacacacttaaaaaccaccctcccagcaacaaccctggaaaaa

SEQ ID NO: 86715 - DNA, 2352 bp, Glycine max
  unsure (1)..(2352): unsure at all n locations
  Clone ID: PAT_MRT3847_49314C.1
gctaacaactacatttggccgttggggcagataaaaagcagagtgggatcagcaaatccatgtttcattcactcttctaaccaaacccgaaaacagagtacaagatttaaacacgcgaacaccgtgtttgaaaatcgaacataagagaagagggcgcaatcgttagggtttccaagatggaaggcatggttgatcacctggctttcgagcggaacaattcgcagttcgatgtcgacgagatgaagatcgtttgggccggttctcgtcacgcttttgaagtatctgacaaaatggctcgcctcgttgccagcgatccggcattcagaaaggatgatagagttgtgcttgataggaaggctttatttaagaacactttgaggaaagcagcttatgcatggaaaaggattattgagctccgtctcagtgaagaggaagctgctatgctcagatcctttgtggaccaacctgcttttacggatctacattggggaatgtttgttcctgctatcaaaggacaaggaactgaggaacagcagaagaagtggttgcctttggctcataagatgcaaataattggttgttatgcccaaactgaacttggccatggatctaatgttcaagggcttgaaacaactgcaacctttgatcccagaacagacgagtttgtaattcatagccccacattgacttcaagcaaatggtggcctggtggattgggtaaagtgtcaacacatgccgtggtttatgcccgactaattactgatggccaagatcatggagtgcatggtttcattgtccagctgcggagcctggatgatcacttacctcttccaggcataactgttggtgatattggaatgaaatttggaaatggagcatataactccatggataatgggatgctaaggtttgaccatgtacggattccaagaaatcaaatgttaatgagggtttcacaggtaacaagggaaggaaaatatgtacaatccagtgttccacgacaattagtctatggtactatggtatatgtaagacaaacaattgtatctgatgcgtcagttgctttgtcgcgagcagtttgcattgctacaagatatagtgctgttcgaagacagtttgggtcaaaagagggaggtcttgagacacaggtgattgattataaaacgcagcaagctaggctcttccctttgttagcttctgcctatgccttcagatttgttggtgaatggttgaaatggctttatatggatgtgatgaaaagattgcaagccagtgatttttcaaccttacctgaggctcatgcgtgcactgcagggttgaagtccttgactacttcagcaactgctgatggaattgaggaatgccgcaaactatgtggtggccatggttacctttgcagcagtggtctccctgagttatttgcagtctacattcctacctgcacatatgaaggagacaacactgtgctgcttttacaggtggctaggcatctcatcaagactatttctcagttgggctccagaaacaagcctgttggtacaacatcttacattggacgagtggaacagcttatgcaatatcgttctgatgttcagaaagtggaggattggctgaagcctaatgcagtgttgggagcatttgaagctagggctgctaagaaggtggttgcttgtgctcaaaatctcagcaagtttaccaatcccgaagaaggtttccaagaactctcagtcgatctagttgaggcagctgttgctcattgccagttaattgttgtttccaaatttattgagaagttgcagcaagatatccctggaaagggagtgaaacagcaattagaacttctttgtagcatttacgctttgtttcttcttcacaagcatttgggtgattttcttgcaactggctgcatcactcccaaacagggttcccttgcaaatgagctgctgaggtccttgtattcacaggttcgtcctaatgcaattgcacttgttgatgcgtttaactacactgatcactaccttggttcggttcttggtcgctatgatggagatgtgtatccaaagctgtacgaggaggcatggaaggatccattgaatgattcagttgtgccagatggcttccaagaatatattcgaccaatgctaaagcaacaacttcgtaatgctagactctaaattacttttttataactgcactgttgatactggagaaagttatgtattgctttcaatttaaaagacagtaataaagttctacgaaagggaaacaaatttgacatcaactttgacaaaattgattatgaatagaattgattttggttaaagttgattttannaaaaaaaaaaaaaaaaa

SEQ ID NO: 86716 - DNA, 560 bp, Glycine max
  Clone ID: PAT_MRT3847_49315C.1
cattccttcctgcacatacgaaggagccaacactgtgctgctttaccaggtggctaggcatctcatcaagactatttctcagttgggctccaggaaaaagcctgttggtacaacatcttatattggacgagtggaacagctgatgcaatatcattctgattttcagaaagcggaggatgggttgaagcctaatgcagtgctgggagcatttgaagctagggctgctaagaaggtgattggttgtgctcaaaatcttagcaagtttaccaatcccgaagaaggtttccaagaattctctgtcgatctagttgaggcagctgttgctcattgccagttaattgtggtttccaagggagcccggtcccgcaacaacttcgtaatgcactctaaaataacttataactgcactgttgatcctggagaaagttatgaattgctttcaatttaaagacggtaataaagttctacgaaagtgaaacgaagttgacatcaataaaattatgtcatggaagttataaatttatttataattatctgtggataaaaaaatttttatgtcc

SEQ ID NO: 86717 - DNA, 239 bp, Glycine max
  Clone ID: PAT_MRT3847_49316C.1
ccacgcgtccgctgaggcaagatcacacaccgtttgacccacaatggcagtggcaggctccatgttcccagggctagcgacctggttctcaatgtagtgacatttgtgatggatctaggggtctctttgtcgattcagcccataaataaagtgtgaaataaaagccgcaggtggaggcaggaacctgctgattgagggaaaaaaaaaaaaaaaaaaaaaagggcggccgctctagagga

SEQ ID NO: 86718 - DNA, 747 bp, Glycine max
  Clone ID: PAT_MRT3847_49317C.1
ggctcgaggacgagttgttgccgcaagccaaagatctgatcaaaccacgtgatgtcggttacgcgacactgtttgcagtgctgcacgaacaactcgagtcacgtgacagcagtgacccctggcagagtgccgatgcattccgcgtgaatcacactgctgagcgcgtgttcaagtggcgtcccaacattgcgcaggatgagatctccgtgcacgtggcctatcacgccgatcactcgctcactctcaccgtgcagcacgacaagcacactgaactcgtcatgaagcacgtgcgcggcactgtgcagcgtggcaaagaaaagaattcctatcacgtgactgctgacttgggcaatactttgcagaaattcgacgtgatggtcggtactcacggcgagatcaccgtgcattcagtgaacggcttgatcaccctggagcccgtgctgcccaaattagaacccacatcacgtgacgccaagacgagtgccgcgtcactgcagtcaccgatgccgggcaaagtgatcaaggtgaatgtgaacaagggcgatcaagtgactgccaatcagagtctactcatcttagaggccatgaagatggagcacactattcgcagtccatttgctggtaccgtcactgcagtcaattacaaggtcggagatctggtcgaagagaacaaggtcttggttaccatcgaacccctgcgcagttaactctagtccgctagtgcacaataaacgagtattcatatgt

SEQ ID NO: 86719 - DNA, 412 bp, Glycine max
  unsure (1)..(412): unsure at all n locations
  Clone ID: PAT_MRT3847_49318C.1
gattctaggagtacatgcctaacaaagaatcagaacttgggcagagtatgcatcttgggcttgatgaaggagacatcatcatgacaatagctgttgctgtatgttttagtaaagatcgggtttcataggctaaaaacaagctttgattaagacacacacaaaaaatatacgcattttgggtaaatcatacatagacaacggtgatcatgatggtattgatggcaattatgatgctgcattacagagaggggtgtttttcaaaaagaatgtttgcaggctcaagttgctttatagaagctctattgtctcttaatgttttcatactgagcccaaatcctcgtcccaaaaaagggggaggtgtatttagctaaaaataaaataaaagaggagggtctcaactttatgggcccna

SEQ ID NO: 86720 - DNA, 403 bp, Glycine max
  Clone ID: PAT_MRT3847_49319C.1
gttctggcggatcgtgctggccacaattctgtggatttgggcactgcttgcacccacgacacccaccttcatgctccaagacgttgccgagtacgccttgcacgccaccgtggagaactttctcactcctgctcttggggttacgctcatctctggcaaccttgccgaccgcgagggcgtttactctgatcgtcttgaaaccttcgtgacctacgggagcccgcctagtacctaccgaaccgccttgcctgctccctatccaggtcatgggagagagcagcaggatggtcttcgcttgctcctggcaccaacttcccacggcgctccgttgaattcacttgggctcagccgggaccggatcgactgagacgtgctcggcaccatccaagacccaggtcagcta

SEQ ID NO: 86721 - DNA, 238 bp, Glycine max
  Clone ID: PAT_MRT3847_4931C.1
cggctcgaaccataatctgttggattatgagtctcgctcatgcgaccagtggtattgcgcggaagtcagatctagcggatgcactttggagaatgctagttctacaggatcgttgggttataccggttagtgttactaaaacaacggttgggtgatatcgagaaagaagagaaagaaaaagtgatgtcgaagagaccggtctttccttatagaaggtgcggtgacagttgcggtggac

SEQ ID NO: 86722 - DNA, 1836 bp, Glycine max
  unsure (1)..(1836): unsure at all n locations
  Clone ID: PAT_MRT3847_49320C.1
agaccttgttaatcctgcttatgaaatcatcaatgtaattggaactgggactcggagggttggttattggtcaaattacactggattatcaattgttcctccagaagcactttattcaaaaccacctaatcgatccagtgcaagccaaaagctactccctgtgctttggccaggagaaacaacccataagccccgtggttgggtttttccaaacaatggaaggatgttaaaaattggagttccaaaaaggtgaacttgttgccctatgctgtaccctataaatttgtttcatatggggatggtgacagcaatcctagtaacactgagcttgcccgtcttatcacagcgggtgtctttgatgctgcagtaggtgacattacaattactacagaaagaacaaagatggtggattttactcagccatacatcgagtctggtctagtggtagttgcatcagttaagaagacagattccaatgcttgggcattgtttacgccgtttacaccaatgatgtggactgtcacagctgtcttttttctactagtgggagctgttgtttggattttagagcataggctgaatgatgattttaggggacctcccaaacaacaaatggtcacaattttgtggtttagtttttcaaccatgttctttgctcacagggaaaacacagtgagcactctcggtcgctttgtgctgcttatatggttatttgtagttctaataattaactcaagttacacagcaagcttgacatcaatcctcacagtgcaacaactttcttcacctgttaaaggcattgaaagtttaataagtagcaaagagcctattggctacttgcagggttcatttacacgaacttatttaattgacgaaattggtattgatgaatccagactagttcctctgaaaacaccagaagaaactacagaagcacttaagaaaggtccccanaagggtggtgttgctgcatacgttgatgagcgtgcttacatagagctcttcctttcaagccggtgtgattatagcattgtangtcaagagtttaccagaaatggttggggatttgcctttcctcgagactcaccgttagcagttgacctttcgactgcaatattagagttggcagagaatggagacttgcaaaggatccatgacaaatggcttttgagcagtgcttgcctatcacaaggtgcaaagcttgaagtggacagactcaacctgagaagcttttggggcctctatctggtgtgtgggttggcatgtgtgcttgctctcctaatatattttattcagaccatgaggcagtactccaagcatggcccagaggagctcgaatcttctggccatggctcaggatcttcgcgtttgcgcacattccttacattcgtagatgaaaaggaagagatagttaagagccgctccaagagaaaaaaaatggaggggatatcttacagaagcacaagtgaggttggatcatccatcaccttcaacaaagcatattctcaggcatcattaaacagaattgattcagttaatgaaatctaactgttgcatatttatttgctcataattttgtagcctcttgtactaactacttgtgcatcacacttcattcttcattccctattgtaactgctggctttctactacattccctatttgtaagatatatcaacttgtgttggattgtggtgtaagtgtggggacaaggtggctttgcaatttttgtcgttacttatggtttgtgtaggatacataatattgaatgaaataatctttgtaatttctgaagtcctggataagcaaatttaatgcattttagttcctcttgat

SEQ ID NO: 86723 - DNA, 390 bp, Glycine max
  Clone ID: PAT_MRT3847_49321C.1
aaaaaaaaaaaaaattttctaaaacccaatacaaaaaaacctttgggggcaaaaaaaataactttttccggcgaagttcaagggcccattaacgggggcaaataaataaacaaacattttttggggttaaacactaaaaacacttttccattaaaactcaataaaaaggaaaaaaaactttaataaaacaggcccaatcccatataataatgggacttttcctccacctttttttcctttttttaaaaaggggggggagaataaggtgggggagcaccccctgggggggggggtggaaaagcccccccaccaccttaaaagaattctggaccacccatttttacctggaacacagggggggggggagacacgggaaaaaaagaggactga

SEQ ID NO: 86724 - DNA, 403 bp, Glycine max
  unsure (1)..(403): unsure at all n locations
  Clone ID: PAT_MRT3847_49322C.1
tctttagttttaacaccgattgacattatatcctaagtaacccccttttagaaaacatngaatgagattcacaggtctttggtaacgaactagcaagtgagatcaataatctcaagctcacattttattttacttcaaagtctatgtagtcctgaacataaattctgaaacaaaaggcttcattctcaactagaaagtagaaaccaagtaaagcctcaatctgaatagggaaaagctgatatattcatataattattaatccacgtataacaattagcaattacctatcaattgtggaccactggcagaaattgaattgaaagcaatttttggttcttgctaattagtgttataataacattggtaaaaggtaaagataaaggcaaaacatgtcacaaaaaag

SEQ ID NO: 86725 - DNA, 2625 bp, Glycine max
  Clone ID: PAT_MRT3847_49323C.1
aatggatggaaaacgggtatgtctggataacaactacttttctgtctacttggctggatataggtagtcccctatcttcagatgcaacggatgacatgcaaggagttattatacttcgaatgtatataccagattcagagcgcaaaagatggtttttttctaggtggaaaaacttgactactggaaagactgctaatggttcccagggtttgagtacttatggtatctttgcatatgatactgtttacgctcttgctcatgcacttgatgcatttttcaaacaagggaaccaaattacattttcacgtgatccaaagttatctcaactacgtggagacaacattcatcttgatgctgtgaaaatattcaatgaaggaaagctgttgcataaatatatttatgaggttaacatgactggtgtatcaggtctattcaagtatacatctgatggaaaccttgttaatcctgcttatgaaatcatcaatgttattggaacagggactcggagggttggttattggtctaattacactggattatcaattgttcctcctgaagcactttattcaaaaccacctaatcgatccagtgcaagccaaaagctactccctgtgctttggccaggagaaacaacccataggccccgtggttgggtttttccaaacaatggaaggatgttaaaaattggagtgccaaaaagggttagttatcgagaatttgtctctcaagtaaaaggtactgacatgtttgagggattctgcattgatgtatttcttgctgcagtgaacctgttgtcttatgctgtcccctataagtttgtcgcatacggggatggtaagagcaatcctagtatcactgagcttgtccgtatgatcacaacgggtgaatttgatggtgcagtaggtgacattgcaattactacagaaagaacaaggatggtggattttactcagccatatattgagtctggtctggtggtagtagcaccagttaggaagtccgaatccaatgctttggcctttttggccccttttaccccaaacatgtggtgtgtcacagctatctttttcatattagtgggagctgttgtttggattttggagcatagggtgaatgatgaatttaggggaccacccaaaaaaacaagtagttactgttttatggtttagtttttcaacaatgttcttttcccacagggaaaatacagtgagcacacttggccgctttgtgttgattatatggttatttgtagttcttataattaactcgagttacacggcaagtctaacctcaatcctcacagtgcaacaactttattcgcccattaaaggcattgaaagtttagtaattggcaaagagcctattgggtacacacagggttcttttgctagaaattatttagttcaggaattgaatattgatgagtccaggcttgttcctctaacaacaccagaagaagctgctaaagcactgagcaagggtccacaaaatgggggtgtagctgcttacattgatgagcgtgcctacactgacatcttccttttcagccggtgtcatataacttgctataggtcaagagttcaccagaaatggttggggatttgcctttccacgggactcgccattagcagttgacctgtcaactgcaatattgcaaatgatagataatggagatttgcaaaggatccatgacaaatggcttttgagtagcgcttgcttatcacaaggtgcaaagtttgaagtggaaagactccaacttaaaagcttttggggcctctatatgatctgtgggcttgcctgcttgcttgcactcttggtatatcttatacagatttggaggcaataccataagcactacgtctcagaggaacttcattctactgacggccaaaacataggatcaaaatcttcacatctcaagactttcctttcatttgtagatgaaaaagaagagacctttaagagccggtccaagagaaggaaaatggagaggatctcatacagaaacagtgaaggaagcttatccatcagctccaaccagggatatgcttcacgcagaagtgaatgtgctagcgaagtatgatcaatatttctacatcattttctagcctcttatgctagctacaacaccaacgctcttcattcatgctgcaactactgggctactagtacttccttcttttcaagtaaatatatatgttggatactttagaacttttgttagctatatgtaacacttatttttaacacggtctttatacaaaaaatgaaaagttttttattcagtttatgcgtgtaaaatcatttttcattttcaaaacagtgtcatttattatgtggccaatggattataacatagcatcaccttatgttaaatctaactgttgcatatttatttgctcataattttgtagcctcttgtactaactacttgtgcatcacacttcattcttcattccctattgtaactgctggctttctactacattccctatttgtaagatatatcaacttgtgttggattgtggtgtaagtgtggggacaaggtggctttgcaatttttgtcgttacttatggtttgtgtaggatacataatattgaatgaaataatctttgtaatttctg

SEQ ID NO: 86726 - DNA, 594 bp, Glycine max
  unsure (1)..(594): unsure at all n locations
  Clone ID: PAT_MRT3847_49324C.1
ctttttagtaccaaaagggataaaaaaaaaagaaaaagaaaaagtatatataatttccttgtgtatcatgatttaaagaaataaaaaactatttttatatctcgaaaaagaaagatctatggcaatttgaggtttatatgtcaaaataataaaaaagaagctatagaagcgaaaagcttccaattttttttatatctagtttttttagaaattaatttaattaaaataaacaaaaatataattgataaaaaataatttaagggattagctttaaatttttagttattattataaaaaacaaaaaaggaattaaattatccccaaaattaaaaatttttattttgtgaaaaaaattttataaaattcttttatatacaaaaaaacttttaaactataaagaaagagaaaaattttaaaattagtaaatataaaaatgttaatagtaaactaggcaaaaagattttcgaatgtttaacaaaaacattgtttcaagaatttataagaagtaagacctgctcagtgataattaaacagcttanaaagtagcataataatttgtcctttaattgagggctggaatgaaaggttaaacga

SEQ ID NO: 86727 - DNA, 353 bp, Glycine max
  Clone ID: PAT_MRT3847_49325C.1
ttcacagagagtgtctcactagaagtaactgcgtatacgtgtgtctgagcctatcagcattgagcaacagctcttttataaggatgggtcgaaggttttgctcctgtactctatacatttatgtcatattctatcattattatttatgatatgtcattttttatgcagttcttatcgcattaatgatcaattgtttggtccaagacatgacttgatctatataatcttctccggtccacaggctctatagaaggacttcactggggtctgtcgctgtgcccacgtgccagacctattctgctctcgtcgagatcaagatagcgaggacaagctgccgaacctgcaggctgaca

SEQ ID NO: 86728 - DNA, 2326 bp, Glycine max
  Clone ID: PAT_MRT3847_49326C.1
accgtccggaatcaaatgttccgaagattgcagaaccacagccaggaaactctaagctaatctgacgccaactttcatccaattggaatattattaaatctctttttaagatttcacattttgattcttctcaattttatctgcgattctcgcttggtacctttgttttgtttttaatattttagttttcctggatttttattttttttattttttattgtttttagtctttggtcaattttcactgtctcctgatgatcattttaccatgtggggtgagttaatttgagattgttgtgcgctgatttcttcttaaaggctcaaagggttttctgggtttgatcgaacaagcaaaaaaaaagagtcttctgttatcctttcaacgctaccagatgccggaaaacaggcaggttctgaggaatgctgattctagtgacaacattgaagcaattcggcgtttgaaaatcaatgataattgggatagagatgctgcagctcaatctacccaatatccagatcgacccggtgaacctgagtgcttgtattatttgaggactggagcgtgtggttatgggagtaactgtcgctaccatcaccctgctcatatttcaattggtactcattatggtgaagaactccctcagagggcagggcaacctgattgcgagtattttcttaagactgggatgtgcaagtatggatcaacatgtaaatatcatcatccaaaggacaggcgaggtgctgctcccgtgtcattcaatactttaggccttcccatgcgtcaggaagaaaaatcatgtccctattacatgagaactgggtcttgtaagtttggtgttgcatgcaagtttcatcatccacagcatgcttcccttggagcatacccattggctggatctcctactcctacctcaacaattattcctacatcaggtttaccatatgctggagggtttcctgcatggtcagcagtaccaagaatgtcgtatttatctggacaaggacttcaatcttatgtgcctccttttctgtcttcttcgcaaggtgttatacctgtgcagagctggaacaactacatgggaaatatgaaccctgcaatgccgaacggttttcttggatctaatcttgtttatgactacatgaatctgggcgagtcactctttggtgggcaggcaataaattctgctctcccaaataggcctgatcaaccagaatgcagatactttatgagcactgggacctgcaaatatggatctgattgcaagttccaccacccaaaggaaagaatgtctcaatcattgataaatccactcggccttcctgtgcgacctgggcaagctgtatgctcttattacagaatctacggaatgtgtaagtttggcccaacatgcaaatttgatcatccagttttgactatccctcagaactatggcttgacctcacctgctatgaatgtacttgatactcctctcaccagggggttatcaaatgtacaaccacctgagacatctccttctaaattaagtgacaagaagcttcagcattctgatgcaaaagctgctacagaagattcatccaaacaagatgatactacattgaattccttcccggcttccgcagagcctttacacaactaaactacttgaagtttgattcttttttcttttggatattttgttttcccccacattttcaggagaagtatatcatacataccatctattcccccccttttcacctgcaattctgtggagttggatagtttgttcagagatttttgtgacaaccactagcttgtggggaatggaaggcattttttgtgttgaataaaatgcaggtagaaactacttgaagtttgaattttttttctttcttttggacattttatttttccccacattttcaggagaagtatataatacataccatctattccccccttttcacctgcaattctgtggagttggatagtttgttcaaaggttgttgtgtcaaccactagcttgtggggaatggaaggcattttttgtggtgaataaagtgcaggtagaaagattttccaggtgcagatttttctggttattggttctccattgttgtttggcatgattcatggtttaaatggctccgatcatcgtttaatgatgatggctttgtgttgttttgctagggaatgtttgatattagatggtttttattcaacgatttttgtttcatttatgatatcatgcctttctttttatggtacgatgattctgatttggagaattctgatgattcacacaatgtattgtgagagacctatgacgattttttttggaaacat

SEQ ID NO: 86729 - DNA, 150 bp, Glycine max
  Clone ID: PAT_MRT3847_49327C.1
ggctcgagcgccaacgttctactacattctcacaagctcgagcttacggtcctggagatcagcagagacgggtgcatttgctccctttctctaaaccatgttcaaatggtactttttggcaaggttcggaacgccagatgactggctcct

SEQ ID NO: 86730 - DNA, 169 bp, Glycine max
  Clone ID: PAT_MRT3847_49328C.1
agcttcaaacctccaaacaacatccatttcataataattattagactcaattcactgcaaaagtactgattgaacaagttacaaacatgagagaataaggagatcctctattgtacgaacattaccctaattaaggacattataaatttgctaataattgataagtttt

SEQ ID NO: 86731 - DNA, 447 bp, Glycine max
  Clone ID: PAT_MRT3847_49329C.1
cggatgcacaattccatgtggagaggaggccgcagtacaatccctcaattgaagagatgagagttgattgatagtttggggtggagggagatcagatattaaagcgtcttgctgacgggaatgttcatgcgcaagactgacaaatctgcagcactgaagcaagcagatatctgatgcggacatgttatgggacatgggctagtagatattcgagttaccccttacgttctttattttctctgggtggagaaagaggaacttactctagagctttagcttttcaatcttcccgaccagtagatattcatgagaacgatgtgtcctgtggttcgggacaataatggagtattgcttttagtggatcttggatctgtgaggtgcatgatgaggtattgaggttaatcatatttccttttggcccaaataaaagggattgttacaggagct

SEQ ID NO: 86732 - DNA, 277 bp, Glycine max
  Clone ID: PAT_MRT3847_4932C.1
agggacttaagttagtaagatgtctcacgtgaggaacaaacttgtactaataaaagactatgataccggatttatcaaagaatcccacatgaatattcactaaagtaccataacatcgaagcttgcacaacgttccaactgatgtctggctcaaaaactcgtacttgtctttgagatccgaatataacgaatttcattaacaactcctaaggcgccttccaatatgatgagcttacactaatggctctccattaataggatatggagagactaaagt

SEQ ID NO: 86733 - DNA, 285 bp, Glycine max
  Clone ID: PAT_MRT3847_49330C.1
ctattcaaaagtaatgggatctggattgacggccatatatataaatttgttcaattctactactcatttatcataatgatcaagataatatccaacaaaaacataaatataaacccatttaaaaaacctcaaacaaaattcctgaagttaaaaaccaacgggttcttttttactgaaaacacctggaaaacacccttaaaggtttttgatacattgatcaaccactttacatactcaaattgagctttgtggccttgtattcgttcttcaccttagggggagggg

SEQ ID NO: 86734 - DNA, 432 bp, Glycine max
  Clone ID: PAT_MRT3847_49331C.1
tgtaaaccagagcacgatgccatacggtcaagagctaactatgactgatggtaaggacagccaacagcctcgagattctactggcgactgctcatgaatggattaacaagataacgactgtccctgtgtcctatgcactgaaaccacagctacaggaacgggctagccggattcagcggccgaaagaagaccctggcgatctggactctagaccaactttgggaaaagacttgagaggtgcaggataagcgaggagctgctaaacaggcgaaagagagagaccactactttcaacgtcattttacttattccgagaatcggaggcggggcactgcccctatttttggacccaaagtcggattaggccggtccatccgtgcggaagatttgccgggggcagcttggctggggcggctcattgtggtaaaagat

SEQ ID NO: 86735 - DNA, 251 bp, Glycine max
  Clone ID: PAT_MRT3847_49332C.1
catccgaaacaaaactacaagtaaactaaatttactttatcattaccgacttctcttgcaagcttagatgcaaatcaaacaccttcactcaatgtactaactactatttcactgtcaacaaataaactaaatacaaacccacatcaataccttgccttatccaaacacttttaaattattacaacagtacccactcactgtgacaagattaaatactgagaattacataatatttaaatctataacaatat

SEQ ID NO: 86736 - DNA, 393 bp, Glycine max
  Clone ID: PAT_MRT3847_49333C.1
tacggctgcgagaagacgacagaaggggaacccagttctcacagagtatgctgtgcaagacttaaatgtgaacacaaaactcccatttgcggataactcttttgacatcatcactaatgtggtgagtgttgattaccttacaaagcctcttgatgttttcaaggagatgtgcaggatacttaaaccaggtggactggccataatgagcttttcaaaccgatgcttctggacaaaagccatttctatatggacatcaactggggatgctgatcatgttatgattgttgggtcatatttccattatgctggaggatttgaacctcctcaggctgtggatatatctcctaatcctggacgctcagatcctatgtacattgtgtactctaggaagct

SEQ ID NO: 86737 - DNA, 432 bp, Glycine max
  Clone ID: PAT_MRT3847_49334C.1
gttctctgacttcaaccagcaaagagataatattacacctactccctcttaacagacacctggatcctggactgatacaatactatagatttcacacttcccggccggtcatacagactgcgtaactatagagaggcggtgactatctcttgttgcctgatatatggccgtatcgcccaaaaagcaaacaagcccctcctttttctggagatcccccttgcgcctctgtttgcgaaaaacatcctcttacagctgctcacgagcatgaagaagtctatctttgactatacgctgggggtatgcagcgtaaattacggcgaccaaccatatacctttttggtgtttccaaataagccatggccttttgctaactctcgcagatacttttccatttcctgctttcccggagatgcgcaaacgaaccaaactccc

SEQ ID NO: 86738 - DNA, 640 bp, Glycine max
  Clone ID: PAT_MRT3847_49335C.1
ctaaagcctatacaaacacaaagaacaatataacactttctaatatgttctagagtctagatctactcattctccttattcactctttcttgagatataaatggaagattcagaggaagaagagcttctgaatcttactctttcagttgatgccggtagggagaggagaattaagaaaggaaggacaagggataataataataacactaattctgttattattcctatgaagtccaatgacgggtatgaagggaagatcttcaggctcctccaaatgagggagctgatgctaagacaagaccacagaagaaaaggagtgctacttgaagatgtgaacaacaacaacaacgatggccttcctttgattcatttgcttctctcaacagccactgctgttgatgatgatcaaagaaactattgtgccgctcttgagaatctcattgacttataccaaacagtttccctaacaggtgactcggtccaacgtgttgtggcctatttcgctgatggtttggctgcaaggcttctcacaaaaaagtcacctttctatgacatgctcatgggagaaccaacaagtgaggaagagtttcttgcattcactgatctctatagaggctcaccctattaccaatttgctcac

SEQ ID NO: 86739 - DNA, 309 bp, Glycine max
  Clone ID: PAT_MRT3847_49336C.1
ggctcgaggtacaatgaataggcttggagcctttttagcactagacgacaacgaacgacaacgctgactctcctaccatacgatccatcctgagcccaccggcaggctcctatgacgacaggagaactcacgagcagagacccactggatagatgacgactgctacactatatcaaaggcataatgaccgagtgatcaaaggtagtgactattaaaccgttgatgcaaaatgcgaggtaggtatcgtgaacgatgtgattgtacaaccatttaggacgagctctgaaacatctgcagaacatgtcgatc

SEQ ID NO: 86740 - DNA, 861 bp, Glycine max
  Clone ID: PAT_MRT3847_49337C.1
aattcggctcgagtgagtattatagggaggttttaaacagatctcttcgctgtcaacattgcagtaggcccttcattgcatatgatgtgaatatgcaaggcacaacaccagcaactaattcaagtcagcaagcttttggtgcgcagaaccatagtcagaatcagggtgcttttgacgttgctgctggatctcaaggtaatttgcatactagccggtccaatacagaatcacataataaaaaaggtcctgctgctgatgtctctgtaaagccaaatggaaagagaaggagaaagcgagtagcagaatccagtgaaagtgccgaatctgttggtagcactgattctgaatctgaagaggatacactttatgacaaggatggtttttcgactcatagagatgagaatccccgtatctacgcggcaaaagcatcaggtttcctacaacgagaatgtgagtgatgatgatgaagggggtggatctccatctggtgctgctgagacacgcggccggccatctaaaatgaataatcagaatggtttggctgctgatctgaaaggcgataaacaaggggaaaagcggaagcagaacttttattctgaagagagcttacaaaatatagatgaagaaattaaggaggtgagagaaaaagaggcagttggcagctcaaagatagacaaagcttcagagcattcaccctcgaaatcaacaaatcgaccagataattttgtttaccctgacgcagagttcagtgactttgacaaagacaagaaagaggggtcttttgccgttgggcagatttgggctatttatgatactatagatggtatgcctagattctatgccataattagaaaagttttc

SEQ ID NO: 86741 - DNA, 911 bp, Glycine max
  Clone ID: PAT_MRT3847_49338C.1
ctcctaccccacaagatgagatgagggcaggaatgagctactttcatggagacaatttggaaaggtgtaccacagtttctgcgtcgggtagatacagctctgaagaacattggaattaatgaacgtgtcccatataatgctcctgttattcagttctcttcttggatgggaggagaccgtgatggtaatcctagagtaacccctgaagttacaagggatgtgtgtttgctggctagaatgatggctgctaatttgtacttctctcagattgaggatctcatgtttgagttgtctatgtggcgctgcaatgatgagctacgtgttcgttctgatgaactccttagcggctcaaagagagatgcaaaacattatattgagttttggaaacaggttcctccaaatgagccatatcgtgttattcttggtgatgtccgagacaaactgtataacacacgggaacgtgctcgccaattattagccaatgggacctctgatatccccgaggagacaactttcacttacgttgagcagttcctggagcctcttgaacaatgctatagatcactctgtgcctgtggtgacagacctatagcagatggaagcctccttgatttcctgcggcaagtttcgacatttggactctcacttgtgagacttgacatccgtcaagagtcagataggcacactgatgtcatggatgcaatcacaaaacacttagagatcggatcataccgagagtggcccgaggaaaagaggcaggagtggctcttatctgaactacgtggaaaacgccctctctttggccatgacctttccaaaacagaagaaatcaatgatgttttggaaaccttccatgtcatttcagaacttccctcagacaacttcggtgcctacatcatatcaatggcaac

SEQ ID NO: 86742 - DNA, 345 bp, Glycine max
  Clone ID: PAT_MRT3847_49339C.1
ggctcgagaaattacaatccaaatatatatatatatatatatatatatatatatatatatatatatagagagagagagagcgagagagagagcgcgcgcgcgcgcgcgcgcgcgcgcgcgaacagatccgagagagagagagagacagaaaatacagcagacaggggacaaactagacagcagacagatgtatatatatagcggctccagagcgtctacgtctctatggaaatctctagcagaccgatcacacacgcgacaatgatacagagagtccggcgagaaaaaagagatgcacacagagagtggatcgcgacaagagcgcgagggcgcagagacaataaa

SEQ ID NO: 86743 - DNA, 248 bp, Glycine max
  Clone ID: PAT_MRT3847_4933C.1
tcgggttcgagcggggtcgaaactatgcccaaggcaattcccatatcaatgttcaaggccattccaaaggcattttccactgcaattttccaggccatcccaaaagcaattcccaacgtgaaaaaggcttcaactaattcagtaaaaaaggctttttccgatgcagtttcagttgttaaggcaattccaaagcccactgccatgggggaaaaagctccaactattcccggaatcaaacctattccgaa

SEQ ID NO: 86744 - DNA, 521 bp, Glycine max
  Clone ID: PAT_MRT3847_49340C.1
atctaatgcaaatcggccgatcagcttttaaatcttatcgggcccaaaaatccgctggtccttttcgtttggattgccatggctttggtttgggccgttatggccatgccaattatgtgctccgcctttctaatggacgatttttgttcgtcacagaaaacaggagacaatggcactgactctgtttgttccccgaggccgggcacagtgacagccgactttaatttgggatccagtcggagttacttggcggacattgcaacttcggcatttgtgggtggaatggccatcggcagcattttcatgccatggtttgccgacagaaaagggcgtcgatcggccgttctctgttcgcttttcctctgtggctttttcggctgtgcctccgccttctctcccaatatttatgtgttcattgccttgccgctttgctcagggactttcattttcgggctgtgccatgctcaatagggtgctcgcatacgatagcattcccgttcatttgtgctcccaaagtgcga

SEQ ID NO: 86745 - DNA, 283 bp, Glycine max
  Clone ID: PAT_MRT3847_49341C.1
ctcgatataacatggtggtgggtttcctttgaatgttacacacatgtggaagactgttctcaattcgcccattccaagctgtgtttcagtgtgcttggagaggtggtggcatgatatcatcattatgcagagttggcttgccggtgcaccccaaagctactgttttttctatcggggaggttgactcagaccacttctttgctttacaatccaacttcttcattgagcttcacagtagcaaccttagctgacatcctgcttggggcacaaaagccctcccagg

SEQ ID NO: 86746 - DNA, 3314 bp, Glycine max
  Clone ID: PAT_MRT3847_49342C.1
gttagaagaaacttccactgtggcatgcatcttatatcttgtgacatgtcatatattgttggcctattagaattattatgttccagtttgagacttccatttttgcaggcaattcttagtctgttttagttggttgaataaaagtagtaaggagcatttcttgtggtatatgtaacttttggagttattgcatatattggcagaggggatgggtagagaaatttaagttgatatacttatggttcactactcaagtaagaaagaagggtagaggtctgaagagaaatttaaggtgataaacttatggttcactactcaagtaagaaaaaatggaagaggtctgggaaaagataagtacggtgtggacttattgtatatattggtaaaagggcagagaaaggaaaggggtttcttggtcaggtgaagagtttaggctgcacagtctttaaattacacattagatttcttcatgtttaatttattcttaatggaagatgctcattaagatctcatatgtatcatgttccatctatccatctcggaaccaaactttgcaatattatgatacccagttgctaataatgaacaatgtgctgccatggctggtacttaaaccgaaagttgttcaacattttgatttacaaatatcagatgaggttaaattattaaaaaggatctcatggtgaacaatatccttgagaatttggcttttaactgagcctaatagtgttatgtgatccatgtagcctaactcattggtataagactattattgctgttgtactatctggtaaggttgctaatgtagattaattaggagcaagagttatcaagataaggtctcaaacataatgagctgtgtagggcatgtagaaagatgatctgatggtaaaggatttcttctggcattttgttgacaggtgagaacattatagggattaatcggggaagaaaatatcagaaggaggattggcttctttttctgagtcttctaagttattagattttgtaatattcaaaattgctttcttgcttagcttgacattgtgggtggcatgtaatatgcttggtaattaatgcttttgttgctgtgttattgtgggttaatcttttttttttttgctaccctatattctgtattcttgttgtacctagacattgtagtgaatgttaaggacaaggatgggctgatgctgttatttgttcatttggttaggtaatgatatcagctaaagaggaacctggttcctctgttcctcctgctgtggatggcttattaagggttcataagcggattattgatggtttagagagtgattttacccatgctccttcaggtgtggcggggaaggtttctacaaaacttctagtgccagcctcacaagcaggaagtttgattgggaagcaaggagggactgtaaaatctatccaagaagcatccaattgtattgttagagttcttggagcagaagacctccctatttttgcccttcaagatgacagggtggttgaagtagtaggggatcccactggagtgcataaggcattagagttaattgcctcccacctaaggaagtttttagttgatcgcggtgtaattccaatttttgaaatgaatatgcaaacagctaatacccaccatgcggagcacatgccaccccaccaatcttggggtccacctcagggtcttcctccaaatgttggtggaggttctggttttggacctccttctcaatacatgccacctccacgacaacttgatagttattatccaccagctgaaatgcctcctccagtggacagacagccccatcaaggtatatctgcttatggaagagatgcttcaataggtgttcatgcatcttcaaatactcaatctgcaccttccattgtcacacagatcacgcagcaaatgcaaattcctctatcttatgctgatgctgttattggaacagctggagcaagtataagctacatcagacgagctagtggggctactgttaccatacaagaagcaagaggtgttcctggggagatgacagttgaaatcagtggaactgcttctcaagtccaaacagcacagcaactaatacagaattttatggctgaagctgcagctgcagctgcagcaccagcacagccgcaaacaactgtgcctgctgcagaccaaggatacaattcttaccctgcccatggttctctctatgcgtctcctccttccaatcctggacatgctggaggctatagctcagtttatggtgcaaactatgggtactaggctggactgtgcaactaatgcctgctattattgaaatgtaaaatgctgggaacggaattactgtaataatttaagaaatattagattattgtctgacccttgtgttttgttgtacacgtagtcatttggaaaggtaaaacatactattcgtggccttctgatgtatcatttacttgttctatgattctatctaattggtgcacctattcctcttctccacctcagggtcttcctccaaatgttggtggaggttctggttttggacctccttctcaatacatgccacctccacgacaacttgatagttattatccaccagctgaaatgcctcctccagtggacagacagccccatcaaggtatatctgcttatggaagagatgcttcaataggtgttcatgcatcttcaaatactcaatctgcaccttccattgtcacacagatcacgcagcaaatgcaaattcctctatcttatgctgatgctgttattggaacagctggagcaagtataagctacatcagacgagctagtggggctactgttaccatacaagaagcaagaggtgttcctggggagatgacagttgaaatcagtggaactgcttctcaagtccaaacagcacagcaactaatacagaattttatggctgaagctgcagctgcagctgcagcaccagcacagccgcaaacaactgtgcctgctgcagaccaaggatacaattcttaccctgcccatggttctctctatgcgtctcctccttccaatcctggacatgctggaggctatagctcagtttatggtgcaaactatgggtactaggctggactgtgcaactaatgcctgctattattgaaatgtaaaatgctgggaacggaattactgtaataatttaagaaatattagattattgtctgacccttgtgttttgttgtacacgtagtcatttggaaaggtaaaacatactattcgtggccttatgatgtatcatttacttgttctatgattctatctaattggtgcacctatgcctctaact

SEQ ID NO: 86747 - DNA, 415 bp, Glycine max
  Clone ID: PAT_MRT3847_49343C.1
aagagggggaaaagggttttttttgccaggggtgaaagttcccgcaaagtccattaagaggcatacatggggggcagttttttcaacttgaaagatttttaacttagggaaaaaaatatgactggtttttataaagaaaatgccccgatgagtagggagtttttggaaaaccccacttccgttaggaatccacagcctaccactaacaattaacactttctagggggggccaacacaataccaaaatgttactaccagccctagctccatttaaaaaaaaaaaaaaaaacattgggcttttaaaacacccatggccttttatttaaagccataataatgcattgggagggcacctggataaagttcccaaaagcccttaaaaatgccatgccctttttgcaatttaaaagctggg

SEQ ID NO: 86748 - DNA, 685 bp, Glycine max
  Clone ID: PAT_MRT3847_49344C.1
ccacgcgtccgcgcaaatcgcaatctctattcttctctcccccctcttaccttttctctttgtgttccccacgctatactctccctcacttgcttcttaattcctcaagcctctctctctctctctctctctctcttctattcgattcccttcctttttactgtccaaaaaagctcttagcttcttcaattcatccacttcaattcctcactatcctatctttctattatttattttccacaaaaactctccaaaaaaaattcttatatatgcttctgtcttatagtttaattttctttttaaggctcaaactccttttgttattagataatatatagatatatatatatatatatatatatatatatatatatatatatatatatataaattattcctctccttttgcctgctgaaatggtcgctgctgctattttctttgtttaaaaataaagaaaattccagagtgttccccagttcagattttgtttattatttaattccgatgaattcaactattgtctcttagtaatttccgtccaaacgaacttataaatttcgggaacattgccaattcaactgatatttcgtggagtgcagcaatggcgtcccaaactgggaaaaccaaaccgcacaaggccaaggggagagaagaagaaaaaagaagagaaagttttgccaatcg

SEQ ID NO: 86749 - DNA, 432 bp, Glycine max
  Clone ID: PAT_MRT3847_49345C.1
ttatggtcaaccaattagtagttttaattatgtgtatctatacttggccccaactgaacaatcctcgaaatcgtaaaaaggaacatctatctaatcctctaccaaccaaaaagtgctgtattggagatcatgcttcaaaatggaaaagtaattagggaagatgccgtgttaagcaatatttcaagacactaaattaccacattgaattcccttgcttaaccacaacaaactcctaaacacctaaataatttattttccatctcaacttcatagcaaagaaaagcctctcaaatatgcttaatatatcattagtcaacaaattaaaggcccaccccaaccaaattatgcactggatccattttcaaaaatccagagctagatatataagctaaagagaacttcctttctatattttttttaccatgtacaaaa

SEQ ID NO: 86750 - DNA, 281 bp, Glycine max
  Clone ID: PAT_MRT3847_49346C.1
aaaaaggggacaagcaaaaagtttatattttcatccatttctcaaactactacaagagggcgagaggaacacataatcaggggggattgcgacattttacagcaacaggggtctggagatcgaggcaagaacaaaacaggcagcagcagagctaccctcttcatttccactgaatttttacacatttggaatccatggaaaccgagccttccttcccgtcgtgggggggccaccggagccccataaaaaaaaagggcatggggtgctcataatccggatcc

SEQ ID NO: 86751 - DNA, 141 bp, Glycine max
  Clone ID: PAT_MRT3847_49347C.1
ggctcgagaaaggtagttttcttcactgctttaactcacggatactatctggggaattcgatggggaatacatagcatattacacatgagttaaaggtagtcaacaccactgctgtcaagctaacaattggagggcgatca

SEQ ID NO: 86752 - DNA, 504 bp, Glycine max
  unsure (1)..(504): unsure at all n locations
  Clone ID: PAT_MRT3847_49348C.1
taagnnctcggaannttcggcttcgagcctnntccataaacagggttggttgcctnctcttttccatctnnccccagcccaaaaccgtctcttcagagaagggccacnnattatcgccctnntccgtcttcgcaacccctatnacacctcctnntcttctccttcccctcttcaatcttccctnntcccctctctttcattcaagaacaggnncctgttttttgctggcccctgtcccccatcnnatcaccccaacctgtnngagagagganntatggcaaagggaattacgaggannaagctatttgaagaaccttcagacatattgtgtgagtgggagaagaagtgaacctcaacagcgaccagctnngctgaaaaagtggagccagataaccatgcttctcttagggacccatcatcatctgatggcattcccatcatcnnagaagcctcagacaaggatcaaaagctggtttcattcacttcaagaaggagaaatacgac

SEQ ID NO: 86753 - DNA, 1341 bp, Glycine max
  unsure (1)..(1341): unsure at all n locations
  Clone ID: PAT_MRT3847_49349C.1
cgaaattcccaggtcggcccccccacgcacaaacacagcagttacgccctctttctctctcccacccatatccccaaaacctgcctctgtcatctgtgagagtggctcataccatatcatatcacatcttatccagacaaaacaactgttatggataggtatcagagggtagagaagcccaaggcagagagccctataaacgagaacgagatacgcgttacttctcaaggaaggacgaggaattacatcacctacgccaccactctccttcaggagaaaggatctagtgaaattgttctcaaagcaatgggacgtgcaataaataagactgtaatgattgctgaactgatcaagagaaggattgttggtctgcatcaaaacacccaaattggatcaactgatataactgacacatgggaaccactagaagaaggccttcttcctttggagactactcgccatgtttcaatgatcacaattaccttgtcaaagaaagaattggatacgtcatccacaggataccaacctcctcttccagttgatcaagtaaaacctttaaatgaatatgatgaggaaggagaaggctcaccaaggatacgaggaagagggcgtggtcgtggaaggggcaggggtagaggattttacaatgggggtatggaatatggtgatggttgggatggtggacgtggctatggtggaagagggcgtggtcgtgcaagggggcatgcttttcggggacgaggacgaggacgaggctatggtgtgcagccagttgggtactatgactatggtgaatatgatgctccacctcccccacgtggccgtggccgtggaaggggaagaggccgaggccgtggccggggaagggaccaggtaccagctgcttgatcaagtgtttgttgcttatcatgtatatgttaagttagatgttgcctctctgtttagttctttgtgagatttacttgtatttttggtattatttgaagcgttcagtgttgcagccatgtttctgcagttttgatgtagtgtttaccccctgtaacctgtataattttgctacgttgggtaggttaagttagatatgttttctttgtttaaagactcgtaaaaatcacaattgtaaaattttttaataggaattgttgcagtaagctaagtttgatttactaaaagaaaggggggggggggaaaaaaaaactcgagggggggccccgtacccaattcgcctatagtgagtcgtattacgcgcgctcactggncgtcgttttacaacgtcgtgactgggaaaaccctggcgttacccaaacttaatcgccttgagcacatccccctttcgcagct

SEQ ID NO: 86754 - DNA, 408 bp, Glycine max
  Clone ID: PAT_MRT3847_4934C.1
gggaaagacagaacccccctctactgtggaagtgacaaaacgaccaaagggttttttaagtcatacaaaaacctacaattctattggatccttggagcgggtcattttgtaagtgaacatcattcatagcctttacatgacttaagcatatattaaactcggaataagaataaaataaataatattagtagttaataaaaaattaacagttgatattttaacaccttcatggcttattatatatttgtgcatataacacattgtatatgtaatatgtgcatataatattaactgtcagttttgtcatctacaaaagtatttaatattaataaatgtttttttcttaagaataaaactcaaacgagtggctcataataataatcttaacggaactatatataatatagt

SEQ ID NO: 86755 - DNA, 327 bp, Glycine max
  Clone ID: PAT_MRT3847_49350C.1
atggcactgagatgggccctttaccatttaattcaatcttggactttgtgagcgaaatttatcaggtcagtttgaccaaattttttttttttgatcagcaaagataaaatatattaataaaagtaccagaggtactaaggttacaaggaaacataagccaacagtcaactggttcccaaatcagactatagtcagtctctataggaaccagaaactggatacaatacagaatgtaatttctactagtgaatctatctgtactaccccctctactaaatgaaggctgatggtaggtttgacgaccaatgattgaaggggatcgtgaaa

SEQ ID NO: 86756 - DNA, 353 bp, Glycine max
  Clone ID: PAT_MRT3847_49351C.1
actacgcgtccgctctgatgagtttaataaccacgcatttgaaaacagtttcttgaacaatcctcatctgtgtgcttacaatccaaacgtcaaccttcctaactgtttgaccaaaaccatgccacactctagcaattcattttcaaaatcacttgccctgattttggctgtcatcatcgttgtgttgttgaccatagcctccttggtcttctatatgttgaaaacgcaatggggtaaacggcactgcaagcataataagattgaaacgtggagggtcacctttattccagaggcttgatctcacggaaataaatttcctttcacgtttgacagacaataaccctataggaagt

SEQ ID NO: 86757 - DNA, 798 bp, Glycine max
  Clone ID: PAT_MRT3847_49352C.1
ggcaaaatggaaagcagaccatactggacgctgccgtgctatgccacatataaagacttttgctcgttacaaaaatcagagtcttgcttggttcttgttaacctcggcaaatcttagcaaagctgcctggggagctctccagaagaataatactcagttgatgattcgttcatatgagctgggagtactatttttaccatcattattcaaacgacacgaatctgtattttcctgtaccagtaatgttacagtatctgaggataaatgcccagcccgagaatcttctgagatgaagaaaacaaaactagtaaccctgactgggattaaaaaggagagtatgcattcatcatctgaagttattatccctttacctttgccttacgagctccctcccctgccttattcttcccaagatatcccctggtcttgggaccggcaatataacaagaaagatgtctatggtcatgtttggccacggatgtgagcatatcaaatgacatgattgtttctgcaaccaagtttgcctgtgcatgtatatatgtgttttacatgggacaaaggtgtcttgttttcattccatacgttttgtcagaaaaatcaggcttaacttttgttttggagtaaaatataccaaaagattaaatgttatttcttttgattcaagaggattaagtttgtttcaaattatttttcattcaaagatattgaaacctactttggtagattcaaagccttgttccctaatttgtactgcatgaagctttcccgttgttccttttaaaaaaaaaaatattatat

SEQ ID NO: 86758 - DNA, 968 bp, Glycine max
  Clone ID: PAT_MRT3847_49353C.1
acgcgttccccacgtcgacccacgcgtcctgtgaaaatctctaatggccgaattatctcttcctcaggattcttactttctcggattcgacagttccacccagtcgttaaaggccactgtgttggactccaacctcaacatcgtagcctcagagcttgttcatttcgattccgacttgccccattacaaaaccaaagatggggtgcacagagacccttctggcaatggcagaatcgtttcacccactttgatgtgggtggaagctcttgacctaattcttcaaaagctttcaaaatcaaattttgattttgccaaggttgctgctgtttctggcagtggccaacagcatggtagtgtgtattggaagagtggcagttctcagatattgtcatcattggatcctaagaagccattgttggatcagcttgaaaatgctttttccattaaggaatccccaatttggatggacagtagcaccactgctgagtgtagggctatagagaaggcttttgggggagccttggagttggctcgtgtcacgggatcacgtgcatatgagaggtttactggtccccagatcaagaagatatttgatactcagccagaaatttatgacggcactgaaaggatatcgcttgttagctccttcatggcgtctctttgcgttggcgcttatgcttccattgatcattctgatggtggaggcatgaatttaatggatttaaagaaaaggcctggtctaaagtagcacttgaggcaactgcccctggtttggagtcaaaacttggagagttagcccctgcttatgctgtagctggaaatattgctccatattttgtagagagacctccgaagccatttgtatgctatctatatgcaataagtatcaacaattgttgcgttataaggatataaaatttctccacaaccctttgctggccaaaatggtctatgttgttttgtatcac

SEQ ID NO: 86759 - DNA, 1058 bp, Glycine max
  Clone ID: PAT_MRT3847_49354C.1
catacaaaaataattgcgcacagtccaaatattacacacagtagggaggagaaagtaaataaacatcgtttagccatttaggtacaaagttttctagctgccccaaattctctattccagacataagttgagaagaaaaatgtgctccatagcaaaaacaaattgcactcaaaattattaaaattccaaacttagaataataaaataaaacattaaccaaaacccgtttcttacacgcaggcaagggataggaattaaaacaagttccctgaccaagctgaagacttgagtttgaaagcatgcaaagaaagctttcaatctgtatttaatcttaatcaacgggaaagaagagagaaaaaaaaaacataaaaaatgaaaaaacatgaagaataacaaaatcaaaagacatagactgctgatactagtaacgctttccaagaattatgccaaagacaatggacacaagagctacacccaagatgaacttgaaatttatgacaggagaatcatggccagtttgaacatgagtctcggatgaagatgatgtctgaccacttgttacttctgactttttcttgctctttctttttgatggaatcgagaggcttgaaccaatgtccctggattttacttccaacccttctttctgatcaacactctcatcacccttaactgaggatttatcaccagcaactcgcaatttctgctctagatctgtcacttgtttctgtaaaagagagatatcatttttcttagtttcaagttcttcaagagaatttttcaaggctgcctcaagttccaacttctgagactctgctccttcctggttcacattaccatcccgtgcaagttgcaactctttctcaagtgctgcaaccttatcattcaacacatttctatcatttgaatttttgtggcatagtcttccaactttgaacttaattctgcctctctttgagaagcagcagcttgaacacttccaacctcttcgtttagtctagattcagcttttgtcagtgtcccttcaatttcctgcagctgacttcgcaatgcagatc

SEQ ID NO: 86760 - DNA, 1337 bp, Glycine max
  Clone ID: PAT_MRT3847_49355C.1
aaatacaaaaacaaagcaaaattattataagaaatagatttctacaccctaagcaaaaatattttccccccatatattatacacagcagggaggagaaagtaaataaatctttacaccatgtttagccatttaggtacaaagttttctagctgcccaaatggccaaatcctccactccagacataaaattgagaagaaaaatgtgctccatagcaaaaacagctcgcgctcaaattattaaaattccaaaaaaaaaaaaaacattaaccaaaccccatttcttttacacgcaggcaagggataggaattaaaacaagttccctgaccaagctgatgacttgagtttgaaagcctttcaatctggtatttaatcttaatcaacgggaaaggagagaaaaaaaaaacataaaaatgaaaaaacatgatgaaaataaacaaaatcaaaagccatagactgctgatactagtaacgcttcccaagaattatgccaaagacaatggacacaagagctactcccaagatgaacttgaaatttatgataggagaatcatggccagtttgaacatgagtctcggatgaagatgatgtttgagcacttgttacttctaactttttcttgctctttctttttgatggaattgaaaggcttgatccaatgtccctggattttacttccaacccttctttctgatcaacaccctcatcgcccttgactgaggatttatcaccagcgacttgcaatttctgctctagatctgtcacttgtttctgtaaaagagagatatcatttttcttagtttcaagttcttcaagagaattcttcaatgctgcctctagttccaacttctgggactctgctcctttctggttagcaatagcatcccgtgcaagttgcaactctttctcaagttctgcaaccttatcattcaatacatttctatcattgaatttttgtgcatagtcttccaactttgaacttaaatctgcttctcgttgagaagcagcagcttgaacactttcaacctcttcatttagtctagattcagcttgtgccagtttcccttcaatttcctccagctgactttgcaatgtagatttctcagcaacctcaactttgagagtttcaacctcagatctcagggaaccttcaattttctgttgttccttcagcttctcttcaaggtcaaatatcagagactgaagttccttctttaaattctgattagtttcattgagcatgttcttctcatcccccactgaagatatctgtgaatttaatgtctgcacttctgcactatgtgctgtccctaattctctcgagccgattcggctcgag

SEQ ID NO: 86761 - DNA, 1492 bp, Glycine max
  Clone ID: PAT_MRT3847_49356C.1
cacaagcgcaccaggaacatggaggtggatgttaggagtagcagcagtaccgtgtttctaatttaatttttcttctcaaaatctatgtattccttgtctttgtggccatcaatagggtaaacaagaagaagccaaagaaattttgaggaggatttaccctccccaggatgttgaagatgaaatcaatgctttgaaggaatcaattgaaacggaactcaatgaagaagcttcagcttcaaacaaagtcagcataatgaagctgctgaaaaccaaaactgtgagaagaggtttatatgctggaatgggccttcaaatcttccaacaatttgtggggattaacactgttatgtactacagccccacaattgtgcaattagctggttttgcatcaaatagggttgcactacttctatcacttgtcactgcagggcttaatgcatttggttccattttaagcatatatttcattgacaagactgggaggaggaagcttttgttgtttagtttgtgtggtgttgtggtctcacttgttgttttgaccgtggcttttcatgagactaccactcactcccctatggtcagcacaatcgaaacctctcacttcaacaacacatgccctgattacagcactgctttcaaccctggtgaatgggattgcatgaaatgcctcaaggcctctccagaatgtggcttttgtgcctctagagctaataagctcttacctggggcatgcttgattgccattgacacaacagaaaatcaatgtcaaaaagaggacaggctatggtacactaggggatgtcctagccaatatggttggcttgcattagttggcctagcactctacatcatattcttctcacctggcatgggaacagttccatgggttgttaactctgagatctatcctctaagatacagaggaatctgtggggggatggcatctacctcaaattgggtctctaatctcattgtggcccagtcctttctgtccttgacacaagccattgggacctcatctacattcatgatattcatattcatcactgttgcagccattgtgtttgtcattatttttgtgccagaaaccaaaggacttccgattgaggaagtggaaaacatgctggaaagaagatctttgaacttcaagttttggcagacaagtcctgactctaatgatataccaataaagcagaagaatcagtcagtttgagtgaataagttaaatatattgtgatgttaattaatgtggtggtacaagtagggaactatgggattggacaataaattaaaggagtaagatgacatatgttagattagcattatataaatgcactaggtcggtctcgtaatggaaggtttgagagtatgaaagaggtttgagtaggttttaaccttggtatgattattgcacacaaaaacaaaatagcattgtatatttattgctttatcttctgtataattttttaaaatttgggtcattgtgtatact

SEQ ID NO: 86762 - DNA, 451 bp, Glycine max
  Clone ID: PAT_MRT3847_49357C.1
gggaacccccagccgggaccattaattttaattttggaaaaaaaaaaaaaccccctttttttaaaaccccagggtggccaataaaaaaaaatggcttttaacaacctaaaaaaattcctttggttgggaaaagccccaaaaaaaagggggaaaccaaattatatttttttagggcccccgggaaaaacaaaaagaaaaagccccctttccccaaggggggtttttaaaacataaaaaaatttggcccaatggccaaaggacaacaataaaggcccttttcccaccccttgtaaatagctggcccatgcgggagcaacccccctgggttggttaataaaaaaccgttaagtttttttgccccccccaaagccgaaaattggggacatcaacaggggggcaaaagacaaaaaatagttgagggggaaaacccagtttttaataaacggccaag

SEQ ID NO: 86763 - DNA, 385 bp, Glycine max
  Clone ID: PAT_MRT3847_49358C.1
gtcactcttgattatcacacaggcttggagtcatttatacaaattatctccttacaaaatatggaatgacagtctgaacattatatgtacgcactataactgagatactagaagaggcatacatacctttattggccccttaatgcatcaatgatcctgtcagtaactgcccatagttaatgatgttacttgacactgcccgacattacactaggcgtgatccctgcataaaacagtctcttcaaaacgtattcgcggagcaatctgtagacaaatctgaatacatttgccctgtttcatgcgtgaggctcaatcaccacaaagatttttgcgcctggcagtgatgagtaagcggtgagcatcaaaagaggccgctggaaaaatt

SEQ ID NO: 86764 - DNA, 373 bp, Glycine max
  Clone ID: PAT_MRT3847_49359C.1
attccgagtccgaccaaggcttcgtaccgctgctaagatacggctgcaagagacgacggagtggggtagtactgtgtttctcttcatggcgttctctgcgactcgatcctagatctcattcacttgcacttccgcgtttcgcgccacactttggcactacgatgtggtcatttcactccgattcatggagtgtaatgtggtcacgccgtgacaggcaagagcgtgaagagtgccaggtcatctgctgcgcagtctacaagtgctgctgcacctagagtcaaaacgcccgtcgatgcgttgatggcccgtcagattgttagggtggccatggtgaggtatccgaatagcgtcaggtagcggtctgttgggcagg

SEQ ID NO: 86765 - DNA, 427 bp, Glycine max
  Clone ID: PAT_MRT3847_4935C.1
tacggctgcgagaagacgacagaagggagggttcttccttgtaagagtgaagtgggtgaaggtaatgattaacctgtatcactgggcttgggacattggtggtctcttcgtccccatcgttgttgttgtaagcggcgggcatggcctgtggttctaataaatctaaagccttgctctctgaaaccccatcgagcttaggatcagtgagggattgggtctttggtttcttcttgtcttgttggaaataggtttgggggtggtgtctgtttcagagagagagagagtgaaggcatggcgatggaggcatggagagaagaaagagaaaggaagtgatagattatcaaactccgtgtgtggtcggaaaatagtgcaaatgagtagaataaaaacttgaacaatttgaagttgtggttggttgagttttcag

SEQ ID NO: 86766 - DNA, 520 bp, Glycine max
  Clone ID: PAT_MRT3847_49360C.1
tctagctattacaagattttcctttttattaacatactactactatataatatacacaattagaatctttgaaagtacttataagaagcttatgaaagtaatttgttcttttgaactttattccaataattaaatttctgagtgaaacataataatagactgatttaatgtgaaaacttaatgaataaatagttagttaaattacttagttaattgcgcactctcgaaatcaatgtatcaatgaataaaattatatttttttatcctaaattttgataagttagtcttttaattctttaccatgataaattgatactttaatacgatttttagttgtcattaattaaattttaattttaaccgtttgaatttatattttaaaattatcataaaatattaaaaaattatatcaatgattaaaaaaatatttttaaattcaggaactaaaaacacacatctcaaaacacgggattaaaataataattaaatcattatttaatctaaaaatcgacgtaaaagc

SEQ ID NO: 86767 - DNA, 565 bp, Glycine max
  Clone ID: PAT_MRT3847_49361C.1
caaattggttatgttatgttattattgttacgatggcagaaggcacgaatgttgcatggtaaacattctctccttcacatctcctcgggatgtgcgtaggctctctttggtttcttccattttcagatccgatgctgtctgggacaagtttttgccttcggatttccacaccatgatggaatggcagatgggtccaccctttccttccactattttttctgttgtaatttttttgagaacttgttttctgtgttcaatccttatctctgtcatgtttattaacaaattcacgtccccgatacaaattggttgaactctggatagattctataaataggatggagtattctcaattttgtatcatccagtctacttttctatttaaaaaaatacatcatctatttagagtgtgtaactggatgaaaaaacaaaactatctttgaattcgatattgatataaacatgcaaatgtatttaaatgtcatttgcatgtttagatgagtatgtatatattaattacacaccatacttttcctccttttctcccccttctagaaagacctct

SEQ ID NO: 86768 - DNA, 283 bp, Glycine max
  Clone ID: PAT_MRT3847_49362C.1
agtacctttcaggtaaactaactctaacaccgttaattgtctaatagtaactcatgcggtcgaataccacgtcggataagttgaggcccgagcatccactggggttccaaaggacccagccccatcaaatagcggggacttttttgttggatgcagcaaacttgaccataagcccatcagaccggaagatgctgccttaataataaacggggaaactttaaggcttcgacaaacccaatcccgtggatctaattccgggatgcattctgccggctttaggaaa

SEQ ID NO: 86769 - DNA, 330 bp, Glycine max
  Clone ID: PAT_MRT3847_49363C.1
atacttgtgttttgtgtttcttgacatatgattgtactttgggccgataaagcactccacgtcagaaaaaaaggactagacaagtacactttgtctaaaaagatcggacacgaaaaagagggagagattcccccccccgaggaaaaaaacttggctctttttttacaggggggaacaaacagatatcttttaatgccggggagaccaattaaacgtgatccaacagttgttccatgggggacaagcattttaacaggggcgtcccctttaaaataagagctcccctattaatggctttcgagtatggcttccccagcccaaaatggacat

SEQ ID NO: 86770 - DNA, 306 bp, Glycine max
  Clone ID: PAT_MRT3847_49364C.1
actgattaattgtgttaagaaatttaagtgaggagtgagagagtgatgatgaagtctgctatgtgtgcagaggcggttgtagcacttcttcttctggcggaggtggggcccatggctgacgctgcgacatgcaccccaacagagtctagtgatcccttgagagaaatccatatgataaataaggcggagaatgcatcataatgtaacagcacatacccttcacttacattatgaccaccccatgatgatgatgatgatgatgatgaagtgaataatcaaccacccaagtcaaaactgagtcctatg

SEQ ID NO: 86771 - DNA, 409 bp, Glycine max
  Clone ID: PAT_MRT3847_49365C.1
tggagacgagtcggatgcgcaacagcgaagaggtgcgcctcctttcgaatgatccgcgttctcgtcatcgccaaagagggcggcgaagccgatcgcatcatccagagtctgcgggagctcccggggattgcgctcgaagctctgcacgtgacgtcgctctcggacgcaaggtcccacctgcgtgagacgctgttcgacgccatcgtgctcggtctcgagtcggccgatccttcgggcctcgacgacctgcaccggctgctcgagcgcgccagcgctcccgtcctcgtgctcaccgacagcgacaggcccgagctttactccgcggccatcgaggcgggcgctgcggagtgcatcggcaagggtgattcgccgctgaccatcttgtcgcgagcgctgttgcagcgtgtgc

SEQ ID NO: 86772 - DNA, 397 bp, Glycine max
  Clone ID: PAT_MRT3847_49366C.1
caggacaccaactccaaaacaaacccacttagatggcttcctgtggatccttgctagagctgctatttgcaagccttatcctcatgcctcaagggcttgctacttactacaaacccattagaagccaccgtgtcaagccttcgtgtcaagccaccgtgtacaaccaccggttataaaccaaaccaccgtttacagccgaaccaccggttacaagccaccatattagaagccaccattcaagaaaccaccttatggaaagtacccttcagtaggggacaacacccatgcctaaagcaagccatgagggctattatctacttaataaattagaggaactgctttgtggtttctaacattgtgatttacaacttcgtagcaatgcatattcttgactctt

SEQ ID NO: 86773 - DNA, 340 bp, Glycine max
  Clone ID: PAT_MRT3847_49367C.1
gagcgaacctaaaacaaacctatttgcattcgccgctcaccttcacttatggacagcgctgcataaatcgagagactgtgtgagcaacacagcggggaggaatcacaccagaggatccctacatgatgaatgtataatacatatggggttgttggactagctgcacacgccaaccatctttaaaagagacatgcatgccttaatataggctccccgaccaccatccgaagcgctacaccagccactctgaaccttcatcaacagatcgacttgatgagcttcgacaccagcttcacccacatacacaggtacttccacaacaacatcaacattaaccttc

SEQ ID NO: 86774 - DNA, 498 bp, Glycine max
  unsure (1)..(498): unsure at all n locations
  Clone ID: PAT_MRT3847_49368C.1
tttcacttagcagctcattcgaaacaacgcataaagctctccccccaaaaatttctaatcccatccgacgacactgctcatcgccctcatttcatctctctctgtctcgccggggacaggcacgaagaaaagcaatttacaggaaggttatacaacatggtcaatgccactaaaggagtctttatttcctgtgacatacctatggcacaatatatcatcaacatgaatgcttcattgcctgcatctgacaagttcattatacatatattggataatacacatatgtttgtccaacctcatgttgagcaaatgatacgaagtcgaattgcaaagttcagagaggacaatacatatgtcaagcctaattgattccgaatggctacagtgaatattctggaacattttatgttgattagtaattgatttttttctaagaccgtttcttgtatccaatgttttcgcagttcgcatggaaaaatgaaatgtgatttgctntta

SEQ ID NO: 86775 - DNA, 249 bp, Glycine max
  unsure (1)..(249): unsure at all n locations
  Clone ID: PAT_MRT3847_49369C.1
aacctccattgcctccgnttctaactcgntaccntgatcattcctgagaagaaacgcaaagagatcttgaaatacctcttcccagangggntttgctttgcgaagaangatttnatttngcgaagaacncgggattgacgtgccgaattnncaaggggttaancngatncagantttcaaatctcgcgagtatntgagggggactttgcttggatgcactattatggttcctcaccaacgatgggatcg

SEQ ID NO: 86776 - DNA, 428 bp, Glycine max
  Clone ID: PAT_MRT3847_4936C.1
atagaagagccttccatatatagcctctcaaaaaaatgaaaagtactacctatttggctctctgtggactttgtgccctgtcttgatcatatcagccttcagccaccgctgatattggattcggcaccgagagcaatcctagtcgaaacggcgtcacatactacgagacgacaggcataagaagaaagggccgtggaatagaatgtggcgaaacctatacagaaacatgccctctcactgttgtgcaatctacctttgatgtcgcaaagggtgtaccactgatcatatcatgcccagttatgatgcttgacatgatcgaaagacttatatcgagcctcagttgcacttatgtacccatgtgtgccctaactacgtctcggtggaccgggaatctaaagggtatgccagattaacaccatgtgagacta

SEQ ID NO: 86777 - DNA, 543 bp, Glycine max
  Clone ID: PAT_MRT3847_49370C.1
tcttagcataagagaagcatataaaacttttaaaaagatggtgtttttggaatattccatgacaatctcttctcccagtagccatcgaactcatcaaaaaaatagcctccagagttatttagaattctattgcattggctactacacttcatcagctcagttttcatattataaacttcaaaacttgcatgcacattgtttgcattcatcgtgcaccaaaaaagagttgtgccaataaccctatcattgaaggaccattcttggtgctctccaacggcaagaacatgctggccaagatcatcgtcctttgattggcaatggagatacacaagaatgttatcattcatcctattataaacacgcacagtattcttcgggctaaaaaagccatcatcactcagaacatcttgagcacaggccatcatcaagaatacaataattgttaccaaggccttcaacatgcttgtaagacaataatagtaagaagaagaagaaactaaactcataagctattttaattactgtgctgtccggacgcgtggg

SEQ ID NO: 86778 - DNA, 157 bp, Glycine max
  Clone ID: PAT_MRT3847_49371C.1
gcattttggagcttcataatcgaatggggtttgcacaagcattcgattttctgggtagagtctcgggctttcgcttcctctgactgtgtgcttattagagtggccaggataagagttctagaagtctagtacttacttactcttcacattcctaaac

SEQ ID NO: 86779 - DNA, 308 bp, Glycine max
  Clone ID: PAT_MRT3847_49372C.1
tttacctttcccttattattatcccccacccctcaacacagcctctctggggattttttgaattcttctacccggcctttcgcggacccaaaggcaaatttttgggggcattccactcataaaaacacactcgcccgaatacacaaactttattggttaaggtcgactccaaaacacaaattttgccctctgaggctgatcccaacaatgattttggtacaacacaaaccaaatttttaaaagtaagaaacacccaattttattccacctaaattgtcactattggcaccacaaatacagcagggttt

SEQ ID NO: 86780 - DNA, 514 bp, Glycine max
  Clone ID: PAT_MRT3847_49373C.1
catattcgttctttttaatgtgtcaaaaaatacagggggcacgcagatgccaatcaatctctatctgggtctggtaatggcgatgctatagtcacggcctccttggatcatacagctcaggatacgaggtcggaaggtggtagtgagcatcacctgcatatgaaatgaggttatcaatcactctaagcgaaggcaacctgcatgcgaaatgaggatatcgatcatctaagcgaagttgctttatagagatgaacatgctcctttgttaatgaactcggaggctagttgatactctacataagttaaatagctgtcatcttagggtatctaaacctttgataatgattgtgatgttcaacggctgagcggacatatttattgcagacaatcagatttatgagctagcacggaagcaaaaaaagatgtctataagacatgagttcctgcttgtggaaccgtacaacatctgtgataacattattgatgaggtccttggaacttgtgaaatttttga

SEQ ID NO: 86781 - DNA, 414 bp, Glycine max
  Clone ID: PAT_MRT3847_49374C.1
tggatcctctagagcggccgctttttttttttttttttttttttttttttgtttattagaaaaataatatcacttgggggggatgccacaagcaacaggggcagcactccactatagccattattgattgtgcagaattcattgataactttctttcattggcttacctatgtttatccttattcaccttgcacagcaagtgcccactttattcaggttcatatactcgcataaacaccaattgtcttttattaagtccaatgatgcattgacatataaggactactattttcctcttaaaaatgggcaaaaaaatttttttatttaataaaggtcatcatttttgaacttctaggcacataattagctggtggattttacaaaaaccttatccttttattgataatctttttt

SEQ ID NO: 86782 - DNA, 408 bp, Glycine max
  Clone ID: PAT_MRT3847_49375C.1
tcggcctacttccttttttttttataataaattttttttctttttaccaacaacccaaagctaacaggggggcgtgtctttttcaaaacacaatccctcaacataccccactggtgcccaactaaaacctaattggggctgatgcactttattcagctataaacatatcaaattgatggaaataagggttaattaacccccataatacattaatttttatttcttatataccatcaatttagtaaaacatcacctcaatttgataatttagttgtccccctgagtaaggtcaccatcaatttttttgctaaccacaacagccagttgcaacaaggtttgaacctcaggaatgtggccctcttgtttttcgttttccattgcccaaagcacctacgctcccctttcctt

SEQ ID NO: 86783 - DNA, 379 bp, Glycine max
  Clone ID: PAT_MRT3847_49376C.1
ttggtgtgttttttttatttttcctctgttttcctccccctgttttttttttttttttttccaaaaaaggggcggattaggttttttaacctaatccaaatttccaatggtttggggggggccaaccaaacaaatggcaaagcttttttaaaattttaaatgggggggccatcaggggttcatttttcagcagaaggatcttgacaaaaaagttaccagggctaatcggaattttccggggggacccccaccccccccaaggatgggggcctggccataatatccagaggggtggcttttatgccccaagggacttacatgggctcccccaataacattgggggggttttgctaaaaagttgaaaatccaagcccttaa

SEQ ID NO: 86784 - DNA, 290 bp, Glycine max
  unsure (1)..(290): unsure at all n locations
  Clone ID: PAT_MRT3847_49377C.1
gccgacccacgcgtccgcggactcatgttcggcttttataagacaattttaggggtttcatcttcaacttatattctggatatccggatgatactatgagcaatntagcaccttctactactttgtaatcaatcaagagctgtgaactgtgaagaacgagttcaacatgccgtgcttggacttggagcgtgatagcaagttgaagagtggttgaggccttgaaggaccatcgtttatgcagatggaacattgtgatgagatcatcacaacaacatgcttaacataatatg

SEQ ID NO: 86785 - DNA, 503 bp, Glycine max
  Clone ID: PAT_MRT3847_49378C.1
tctagatcgcgagcggctgcccttttttttttttttttttttgagtaaattactcatgccttcgcaacgtagttgctagctggccaacatcctcagggacgcggcatacagtagctactgcaacggtgatcaacgatcactaacgactgggtcggaacctggcctaggaacagtaaccaccagcccgccattggcggcagggttgctacgataacaactcacgttttacgtcgcagttgtcgaacgacggggatactccctgaagttaaaccaacccctttggggtcggtccgtcggtacttcattgaagcaccgtagatcggcttgatccaagccgaacttctgaaggtcccaatgggcatacttcagtaatcggagcgatgctctgacataagagtgcataagccctcttcaacggagaggagtcgcaccctttaaagatacgctaaaagcgtatctcaaggtcttgtgctgtaatttacagctaagaccagaacgaaatc

SEQ ID NO: 86786 - DNA, 380 bp, Glycine max
  Clone ID: PAT_MRT3847_49379C.1
gagaggagaacagatccaaacccctaaacaagaaagtgagtcactgacccaatgatggaatatgtacaaagttggtaggtaatgtattgacataggttggagagattttaaattagacaagaaagtaactaaataataaattattatttattttgaaaaaataatttaattgttacaaaaaatgattcaaatttgattaaggggaggagggtgtgggtgaaaaaataaaagaaagttgatactcctctcttccttccctttatcttatccgcagagagagtggtgtgttgcgaattgcaatggcagttaaccgtcctgtccttcctgttcaccaaaatccaaccattaccattaactgttgctcctcaccaattcctccc

SEQ ID NO: 86787 - DNA, 421 bp, Glycine max
  Clone ID: PAT_MRT3847_4937C.1
catccacttggttgttcaaagagaacaagggatggtacataccttgtggatctttgcttgtaaaggcttttataaggttgaaaagaaatctcaaggaccgcaggtcgcttggggactgtatgtatgcacgggttgttgccgaaccagtataaaattcttgtgtttgtcttcttcttccctacactctttaatttccgctgtgcactttaattatcgcttttacttttggttaagtttctatttctgttctttattttcttaacattatagtaaaagcctaattgaatctagtaacattaagaaggatatcttttaattagtaaaggttcattaataattaattcaatccccccttcttaattattccgaggccacttgatccaacaagatacaacagagtcagttctcaattattaaaatg

SEQ ID NO: 86788 - DNA, 285 bp, Glycine max
  Clone ID: PAT_MRT3847_49380C.1
atttagcataaagacataacctcaagacaaccaatctgctgatgattacaggaccgcggaaggataaagccgacacggctagtctaactgaaacaactataatatgttgatgtgagaaggtgacaaagcacaaagcatatctgggcaatcatattacggtgtcacgagaatcgtgtgcgcgcgcctacaggaagcgtcccgatgagaaaaggaacgctctctgtaccgttgaatggctgctaaacgctgatgttcataccatacttaagattgtagagctccatt

SEQ ID NO: 86789 - DNA, 1673 bp, Glycine max
  Clone ID: PAT_MRT3847_49381C.1
gcatacgtaaactcggaattcggctcgagaacagttactgctgaaatgtcccaaagaagaggccccaaatttttcaaaagctcatcacatcacgccattcaccaccaagtaccaaattattcttctcagccagacttaaaatgcatccttcaacacttcttaattcttatacctcctttccactcctcaactttctcagagcaaaacaaaattcctttccttttctcactaaccaaacatgaatatcaaacccatcatcatcctagctttcttaatttccctctctttaacaaacgtcgtcgtttcagctcgactctttcccaacgtctcctcctggctcaacgcccacgcccctactggaggcgcgtgggatgcctttctcaactttaccggttgtcaccgcggcgacaagtacgacggcctcgccaatttaaaatcatactttgaacgattcggttacttccctcacgcgccgccctcctcgaatttctccgatgaattcgacgacgcgctcgaatccgccatcaaaacttaccagaagaacttcaacctgaacgtcactggcgtcctcgacgacgccaccgtgcagcagatcgtgctgcctcggtgcggcgtcgccgatataatcaacggcacaaccacgatgaacgccgccaaggagaacgagacggcgtcgtttagcaagccgaagtttcacacggtggcgcacttcactctttttcctggcatgccgcggtggccggagggaacgcaggagctgacctacgcgttcttccccgggaacgggctgagcgacgccgtgaaaggcgtgttcgccgccgcgttcgcgcgctgggctgaggtgacgtcgctgaagttccgcgaaacggcgtcgtacttcggcgccgacatcaggatcgggttcttcagcggcgaccacggcgacggggagccgttcgacgggagcttggggacgttggcgcacgcgttctcgccgacgaacgggaggttccacctggacgccgccgaggactgggtggtttccggcgatgtgacgcggtcagcgctgccgacagcggtggatttagaatccgtggcggtgcacgagattgggcacttgctagggttaggtcactcatcggtagaagaagcggttatgtttccgacgatttcttctcggaagaagaaggtggtgttggcaagggacgacatcgaagggattcaattcctctatggttccaaccctaatttcaatggctccaccgccacgtcagcaccggagagggacgctagcgacggtggtcggtgcctcacttgtgtggggccctcgtccggcgttttcgctttgttgacatttgcgttcttattttaggtttttctattattatttatcgtaggggtatgatgctttgcacattttattaattcgtgcccaatattttttgttcttattgttgtttggttttccattcactttcgtatagaatttttcctggtgtatatgatataataataaaatttcattatataaatccaagaagtacttttaggacggcgtttctgatacgcacgcgggtatacggatacgtagtgtataggatttcgttttggtccgatacggtacgctttgtaccatcattccttagcattctttttgcgtgatggtctattaaagaataataatatacagttcc

SEQ ID NO: 86790 - DNA, 617 bp, Glycine max
  Clone ID: PAT_MRT3847_49382C.1
actcactacacctcaccaaataatgaaccatggaataccaataccacccatcatcttatggcgtctcttcctcttctcactccaaccaccatcaacaagggtcaacaacaccgaaatccctctcttcacaacgcagcctcgtctcagtcccctccctcaaccaccaccaccacctccacaccccgaattccaccgtctaccaccactgcctcacaaccctcaagggtcacacctcctcctacatctcctccttaaccctctccggcaaattcctctacaccggctcctccgaccgcgaaatccgctcctggaaccgcatcccagaaaactcatcaaacaacaataacaatagcaacaccgtactcacgggaaacggtgctgttaagtcgttagtaattcagtcaaacaaacttttcagcgcgcatcaagaccacaaaatctgtgtctgggaaataagcactaacaacaacaacgataacgatcatgaccagaaatatacacacgtggccacactccccaccctcggcgaccgcgcctcgaaaatcttgaatccccagaaccaggtacaaatccgaaaggacaagaaatgcacctgggttcaccacggggacaccgtc

SEQ ID NO: 86791 - DNA, 253 bp, Glycine max
  unsure (1)..(253): unsure at all n locations
  Clone ID: PAT_MRT3847_49383C.1
agatcgggaacgggagcgggagcgagaaaaagaganagacaagaaaagagacagagaagaggatgaagaagatgcatatgaacgaagaanacttganagaaaactgcgagagaaagaggctgcgtatcaagagcgccttaagaattgggaantcagagancgatagcannctagggantatgaganggaggcggaaagagaagaagagagcagaagagaaatggctanagangctacacgattaanagattcc

SEQ ID NO: 86792 - DNA, 428 bp, Glycine max
  unsure (1)..(428): unsure at all n locations
  Clone ID: PAT_MRT3847_49384C.1
tagctcggaaatcgctcgagcacaaagcctgtacctgacttctttgntggganatnaacaannatttgtgccaacatctatcaatgtanattgcaatatgatacaactggatttgatcatgatgcacatgatgatgctgttgttgaggcgataacatggtggggtgcatggatggtgacttgactgaggaggagattgaattttgccttatgtattacgtaggctcagctcaggctcggtagaaataacgaaggagagaaagaattcgactcaccctgattaccatcatatctatctgatttggaagagcaagaactgtttttaaaggacactgatgagagggcatgtgcctatatagcaggaccagctgccataccgttggggtgttaccggtgatggagctcagttggtaaaagcaagtaatgatg

SEQ ID NO: 86793 - DNA, 129 bp, Glycine max
  Clone ID: PAT_MRT3847_49385C.1
ggaatcggggaacggatcagggtgcaacagatgcagcctcgaatgctgtgaaacagcgcattcaatgaggtcctcgaggcaacgaagcttgaagaagggcgtcatacaagaaaactgtaaaggctggct

SEQ ID NO: 86794 - DNA, 547 bp, Glycine max
  Clone ID: PAT_MRT3847_49386C.1
cccacacttgcttggatgtgtatcactaggagatacgtaacattcctagctcatgaagagaccacgctcactatatggaataacttaaagaactctttcgaacacacacagtacatatctatgacttgcaaaggcctgtcagatagagtcttaatcacacgctctttcacgcatgaactgcgaactcaattcatgatgaatataccatcaccaatcttgcgattatacactggaaaagctgacagagctaatcatgatttcattgtgccagatacgaatgattataatacagactggatctaattgtaggggcgatacttttcacgatcacagaacgtcctgtgagaacagtttaatcagcagatcgcttggatattgaacctatggtctctagggagcactgaataagaagcggtcactagttattactacaaacgcagaatgcatggagagcgccaacataacatgtatggtgcatgatattctgagtgcaaccatttcagaaatgctacgtcaaatatcaataaatctgttctggatgaatgca

SEQ ID NO: 86795 - DNA, 182 bp, Glycine max
  Clone ID: PAT_MRT3847_49387C.1
gaaatgaaatgacaagcttattaataaaaagcggtgaaagcagactgggcaaaaaacaggaaaaaattcgggggagccaaaagaaaaggaaaaaaatccgggacaaaacccaaacaattgggttcaacaaaccagaaattgcggaatgccccaaaaaaaaaaaataaggaacgggccatttt

SEQ ID NO: 86796 - DNA, 513 bp, Glycine max
  Clone ID: PAT_MRT3847_49388C.1
tcggttcaagttgttccatctctcccacgagcaaaagaccgttactcaattaactgctacaagaagtacaatttttttcctatcttgaaccagtcatcagttttgtttggtccaggacgaggtcttagaaatatcatcgtgcttttttacgaggtccgcacacaccaccttcctctcttggtctctttccaccaaattccagtcaaagttggtggtgccaaacatccaagaaagggtgctattttgaaaccagggaagagacatgaggactcaatggggtaagttgatggctactctcagtgaaggtggagatgatgaaaccccactacaggtgaagttgaatggtgttgcaacaattattggcaagataggcctattctttgcagtggttacttttgcagttctggtgcaaggacttgtaagccaaaaactccaacaaggaagcttacggagctggaccggtgacgatgcgttggaaactgtggagttctttgcagttgcagttaccatagt

SEQ ID NO: 86797 - DNA, 968 bp, Glycine max
  Clone ID: PAT_MRT3847_49389C.1
gaaccaacaagtacacgacgtgcattgaaaaggaagaagcgcatctggtttggtcccatatgatggccaggttcatctccaacaagacgaagacccacttactccgtcactccgaatcggcgaagggggtgatagtgtgccatcgccaccaatcctcggaagcaacgaaggcgaagtgggtggagatcgatggagtgaagctgttggaggagcacgtccagcgtgttatggtgaagaaggccacacccgattggcttcccttcctccccggttcctccttctgggtcccacctcctccttccccctttcttcacaaattctccatcccctctcatcccttcttccttcaagatgacgaatctgggaattctattgccacccctcgagggacagaggttactgtgcaactcaaggttatgacacccgctgaacacgtgtctctctctgaagatgaggaaggatgatcatcatgggttgcaaactaagatcaatgagagggaactaagctatttgaagatcaagaagacagtgcatgaaaatgggaattcctgcacaggtgaactactgcttgctttcggattaacccgtctcacgttttttggtcttaatgttatttgtgtatactttggttggtgaccaagcacttgaaaaataaccaatgtgcgtagaatattgtcatgttgaaccttttacactgggtgatgtatgtatttgtgtaactaataaagcaagagcttctttgagcattcctcttaacgaccaaacacctgctcaattcaatgaatatctctctattcatgtacatataactgtagtagacttgataagggggaaacggccactgaagtttcttgaattttcaaatgatatttgtatataatttggttggtgaccaagcacttcaaaaataaacaatgtgtgtagaataatattgtccatgttggtatgttgaaccttttccattgggt

SEQ ID NO: 86798 - DNA, 581 bp, Glycine max
  unsure (1)..(581): unsure at all n locations
  Clone ID: PAT_MRT3847_4938C.1
ggctcgagctaccaccacctccaccacctcaacaacataacaacacaacaacaacaacaacaaaaacaaaaacaccaccaccaccaccaccaccatcaacaacaacaacaaaaacaaaagcaacaacaacatcaaaaccccataatttccctgaatccatcaaagaagtgttctcaatatccaaaattgcaatcccaatgatcctcactggcctcctcctctattgccgctccatgatctccatgctcttccttggccatcttggtgagctagctttagctggtggctctctagctgttggctttgcgaacatcactggctactcaatcctctcaggcctagctgtgggaatggaaccaatttgtggccaagcctttggtgccaaaagattcaccctccttggcctctgcttgcaaagaaccattctccttcttcttttcacttccctccccataacacttctttggctctatatgaagcanattctcctcctttgtggccaggatgaggccatagccacacaagctcaacaatatcgtgtttactccattcctgacctcatagctcaatcctttctacac

SEQ ID NO: 86799 - DNA, 390 bp, Glycine max
  Clone ID: PAT_MRT3847_49390C.1
ggacttgaatgtgacctgtatcttttaactgttgttgctgacccggatttcaacatgggagccatggaaaacaagagcttggatactttcaataaatagcttgtattggactgtatagaaactgatactgatgcggactatgctgaaatattgggagttatgggacaagagggttgcacacaactgggctgccaacagagggacatagtgcttgactggatacagcttaacctgaaggaaggtctcactgttctttgagaccaggagttttcatctgacacggcatgaagacctgtagggcggatagctgatggatcataacttaaacacatcctagcgtcacaggatgcaggacactatggcccatccagtgcgactcacactgttaca

SEQ ID NO: 86800 - DNA, 497 bp, Glycine max
  Clone ID: PAT_MRT3847_49391C.1
aaaagaagaggcagaagcaccattacgaacgttggaaccctcaaacagattcacgctttaatgatcgttaacggtttaacttccaacgttggtttcctccgaaaactcgtcctcaccaccgccatgtcaatggtggggcccaatgcaacctccgccgtgatacgatatgcactccaaatgttcgctcaaattccccaaccagacaccttcatgtggaacacatacatcagaggctcttctcagagccatgatccagtgcacgcggttgcactgtatgcccagatggatcagcgttctgtgaagcctgataatttcactttcccatttgttctcaaggcttgcaccaagctcttctgggtcaacactggttccgcggttcatggccgggttctgaggcttgggtttggttcaaatgtggttgtgaggaacacccttttggtttttcatgctaaatgtggagacttaaaggttgcaactgatatttttgatgattcgga

SEQ ID NO: 86801 - DNA, 455 bp, Glycine max
  Clone ID: PAT_MRT3847_49392C.1
cgctgctaggaatgcggcccctcccgggctgcgcgccctactttactcccaaacttgagagtataacaccatcacacgctttacctctcccttctactgtatataaacacactcacacaccactcttccacatatgactttccacttcccctcatggagcctaaaagacctccatgggtgttcttgctagggcggactatcacgaaaagcgcccatgccaacaaattcaacttcggcggaagcagagggtgggatcacacccctccccagagccacaacaattgggctggaagaaaccgattcccaatgaaggacccactagttttccagtgcacttcggggtcggatccggtgttggaagcgaagaaggaagattacgcacggagcctcaggcaccaaccgcatcagtaaggatgataacggagccactgactgcaggcatgatcgataaggac

SEQ ID NO: 86802 - DNA, 442 bp, Glycine max
  Clone ID: PAT_MRT3847_49393C.1
gaaaccaaaacaaacgggctggcatataaaaagataaccctaacgggaagttttacatataaaacccggaaaaatgaaaatggaaaaaaacggatttaaattttttactaaaactgggctaaccaacctacgttgccattactttttggccctaaataaccctcttaaataaaataatagaaaagcctggagcaacagcttggatcatacccctccaaaaaattcagcagggggctataaaaaaccccataaaaggtggaccccggttttaaaaagggggacactaaaaggtttttaaccttggccaaaaaagagggttaaaataaaaaaagagggggcctgctgtaagaataaaattggtgttgggggggggattgaggggccagggggacccagggcggggattcgactgccttattaaggggtgccaggggaatggggg

SEQ ID NO: 86803 - DNA, 224 bp, Glycine max
  Clone ID: PAT_MRT3847_49394C.1
ggccaacaatttatgtgtttcgaatatatcctcctactgcgttggaaataaatctggcatggctccaactaaagacgactaaaccctattgagaactactacaaacccatttacgtacaaacatcatattgcccttacgttgaagggagttaaatacacatatgtcgaacaaaattatatgaacaaaactgaacttcttttgaaatccaacccatttcacaaca

SEQ ID NO: 86804 - DNA, 529 bp, Glycine max
  unsure (1)..(529): unsure at all n locations
  Clone ID: PAT_MRT3847_49395C.1
ctgtacacccttccagggcaacaactccaacgtgcatggccatcggcatggtcacctgcagggtacccaggggaaacatcaggtgcagagtcatcatcatcatcatcagtattaacgtaactttgggctgggtcttcttgtggtgtcgtgcgtgatcctactcaaagtgcgcctaggttaaccgtccctgcacagagtgctaaagacaaacaccaacaagtacgagaccccaagttcgtaatctttggccccaaaagccctactgcccaggtccccagttaacaaacccccggtcgcgtgcctggccaattggtaatatgctgcaacaactgctaacactggagcagctgcaactatccaccaggtcgcctaacaaacttaaccgcaaggggttgcaactattagcgatggtggtgcgaaaatccgttaaccgaaagttataccaaaagtggaacatgcggtactttaagtgcccgtantacggtacgctgcctaataagtatagccagtgccgccaatacaaattttg

SEQ ID NO: 86805 - DNA, 288 bp, Glycine max
  Clone ID: PAT_MRT3847_49396C.1
ttttgttgcaccggacttcgcaggcggatctagtcgaccgtaccgacgcgaccggtagggacgagaggggtctcccatctgtaagcgcagatcccgcagcttgttgtgagacgagctccaggcgcttatcattggaagcgggatctcctaatgaaggtgaaaaacaccatgactatagggatggatggctcattagtatccagcgagatggctttgtgggccgaggcgttagacagttttacggaggaattgagttgcccctacgatgggaactatgctaatgccaat

SEQ ID NO: 86806 - DNA, 151 bp, Glycine max
  Clone ID: PAT_MRT3847_49397C.1
gctactcttactacatttgtacaaggtctactacttctgcaagctgcacatgcttctggaggagtgcaccattgaccaatgtggccccgggacctttatggccaaccacttgaaccggcactactgtggcaagtgccgattgacctatgtt

SEQ ID NO: 86807 - DNA, 302 bp, Glycine max
  Clone ID: PAT_MRT3847_49398C.1
ggccaaaaaaaaatttgatttcataatcataggtggggatataaattttacatactacgggggaacatgatagtaaaaacaaaggaggggggatcccttttttattaaaaacgaaaactagattacgtccacatacaacatttaagaatgcgttagacattttttatctgcatgcataagcttgcatttttacttctaaacgaaaaagggaacgttggtttggaaagaaaaccacccttaacccctctctgtcctttgaaagaaaaatccttggaaattccatttaaaaggggggtcctttt

SEQ ID NO: 86808 - DNA, 386 bp, Glycine max
  Clone ID: PAT_MRT3847_49399C.1
ggggcccaaaaccccccgaattgcaaatattaaattaaatccgtcggggggccaacccggcccaggaattaattttgggccacatatttttaattcaaaaagggaagggggggacaagggcttttgcaaaatgacccccccccacaaaaaaccccccccccccacataaaaactgcgggggggggggtttaaaaaaaaatccttaacttttggggggggagggaaaaaaatttttggtcctccaaaacccttttaatttaaaagggaaaaaatttttaattcccccaaaatgcttggggggcctccctatgaattaagccccccggtccaagggaaaattttgggagcccatttgggggggccccccctccccaaaaaggcctttt

SEQ ID NO: 86809 - DNA, 349 bp, Glycine max
  Clone ID: PAT_MRT3847_4939C.1
ggtttgtgatacgcaaacacactcattgcacatagtactgcgctttatttaagtgaataaaatactacatactagttcacaaatgcaaaaggacactcctcaaccagatatgttgagactcttacagttgtcaaaaagccgcgtccgctttttattagggggggaagaactcacattttcattcttaacgccaaaaagaacagccagtaaagctactggaaaaagatcaactctagccagaaaaacaattatcttaactttcccaagtggggggggaagccttttgtctatatctgacgagagattgttttctgccgaactaaaccaagcctgggggggggaaaaacca

SEQ ID NO: 86810 - DNA, 372 bp, Glycine max
  Clone ID: PAT_MRT3847_493C.1
acaaaattgaactttactataaggaaatcctctatccggagtatacagactccaatgtgctgtgcttcaatgcatgcgactgtctgcctactcttcacacaacaaaatctatcataacaaaacacgtgctacaagcccttcatgagagctaggtgcacagcaatcgaaagatgcaaggcaacaccataatttgtcctataattacatggttgccactatcgcgaataatcagatctcttcggtacaggatatctacatgtacctctacataaccttctgaaatcaacactcacatacactgcactacatctgttctttgctatgtgtgtgcatgattcatttttgacttgccttctacatcatatgaaatca

SEQ ID NO: 86811 - DNA, 350 bp, Glycine max
  unsure (1)..(350): unsure at all n locations
  Clone ID: PAT_MRT3847_49400C.1
ggaggacaaagttgcaatcttcacgccaccaccagcgttcccgagtctgcaacctcgccccgtgttcgcggaagcctaagaatgatctaatcgatcgtggaatcgtatggcccctccttattcgagttctcaatctttttattttctttctttttcttttgtcttttattttngttgcctaagttgacgttgtgatatttagaaagtgggtttttagggaaggggtatgaggataatgccggttgaaggggccaaatagatattttttatattctcttattagaattgaaacgagattttaactgaaccctttttttaaggatggcatatgtatattgctccatataatg

SEQ ID NO: 86812 - DNA, 759 bp, Glycine max
  Clone ID: PAT_MRT3847_49401C.1
caccggcgtcaatgtaagccggacgtcgattgcagacacgtggcattgtgtttctcttcatggcgttctctgctactctatcctacacctccttcccttgccttcctcgtttcccgcaaactttgagaacaaaaagtgttcatttccctctgattcgtgcagtgcaaggtggtcaagcagagacacccgagagcaagaagagtgaagggtcatctaatgctcagtcttcaagtgctgctgctcctaaacccaagaaacccgtctattccttgaagaaaggtcagattgtgagggtggacaaggagaaatatctcaatagcgtcaattatctttctgttgggcacccaccttattacaaaggattagattacatttatgaggaccgtggtgaggtcctggatatgcgtatatttgaaacgggagaatatgcacttattgcgtgggtaggggtccccactgctccagcatggcttcctacggacatgcttatcaagtcagagaaactcaattatgagaggttatgacctacagtttggtcacagaaatatgctaaatagataaatgatacttcgtttttctgatgatgtaagagagtataattcaagaagcgcggtttgagcttacatcatagcctaatcaagctgagtagtccagtgtacttcaaacctttttgtgatgggtatttgtgctcccctattcttaccatttaatacatataaatggtcttttgatttgggaaaacataatttgcttttaaaa

SEQ ID NO: 86813 - DNA, 709 bp, Glycine max
  unsure (1)..(709): unsure at all n locations
  Clone ID: PAT_MRT3847_49402C.1
gagcctgtagtttacactgtgatgaagcagagcagactgcttccactcctgtggcttactccacagaggaaatacaatctgatctggctgttgttgcaggatccccctcacaagttaccgaagatgataagcaccaggcaatgatccctgcacactctgaggaagcaatatccaatgttgtaaccccggttgtttgccgtagtgacagatatgatgcttgtcatgcaccaaatcaaattgtattaccaactgcggaggttagatggaataactgagttattattatcactggtttgtcgtggtaatatgtgcaatattttagtgtttttactcattcctatctaaacatagtccttcaaggagaaaataatgcgtatctttaaatcatgatggaaaatttaggctatttagaggatcattaaatgtgatttcaatctttattaggaagagtgagctcaatgtctatttgctaaaaaaagagaagctgattatgagaatagtaatttatgtttatgttaaataaccaatataccttataattatgagagagttggtgctacggaaaagatcactaatattatttattgaactcaagtcagttttactcatgtaggtaaacagataaacatataggntntgtttcttttattgtttttgttcaccctgatttgatttttcatacactggaaatattgatttagtttctatg

SEQ ID NO: 86814 - DNA, 637 bp, Glycine max
  unsure (1)..(637): unsure at all n locations
  Clone ID: PAT_MRT3847_49403C.1
acgaggcaggctaggtgggcttttgtaaacaaggctgagaacttactgacaagactccaaaatattaatctgtgcttccactttgaggttgagcagcaggttaatggggtcttcctcaatttctttggttttaatggaactgctggtgtttggagaataaaagcacttgaagaatccggtggctggctcgagcggacaactgtagaagacatggatatagcagtccgagcccatctgaatggatggaaatttatctttctcaatgatgtaaaggtgctttgtgagcttccggaatcatatgaagcttataggaaacaacaacatcgatggcattctggtcctatgcaactctttcgtttgtgccttccagcgattataacctctaagattgctttctggaagaaaaccaacctaatatttctattctttctgcttagaaagctaatcctcccattctattctttcacattattctgcattattcttcctttgacaatgtttgtcccagaagccgagcttcctatctgggttatttgttatattcctgtattcatgtcgntcttgaacattcttcctgccccgaaatcctttccctttattgttccttacctcctttttgagaacacaatgtcagtaa

SEQ ID NO: 86815 - DNA, 236 bp, Glycine max
  Clone ID: PAT_MRT3847_49404C.1
tacggctgcgagaagacgaccgcatggggggggaagttgagagccgagattaacaacggcaccaaaggcaacaggaacgttggaaggggatccagatcgaggttaaatctctatctctatatgcggtgacacgaaacatgtcttcgctgggttaactctcatcaacgctgtttttaccatccatagttccttatgaacagagggaccaacacaatctcatcaagatactgggaaaa

SEQ ID NO: 86816 - DNA, 307 bp, Glycine max
  Clone ID: PAT_MRT3847_49405C.1
acggctgcgagaagacgacagaaggggacccctctctcgagggcctctgttatcgaacccagcagaagtggggcgtggatgatcgttgggagcggtgggcggctgcagctcctgagaaggttcaatttcagaatgattcggtggtaaaatcccatctgcataagcattgttctgattcagagatgcatctgcagtggcggcagctattggcatacaacaatcccgctgcttacgttttctcctttgaatgaaggtaagtatctagaaatggggttttaaccaaaatcctctcttttttcatgttttg

SEQ ID NO: 86817 - DNA, 428 bp, Glycine max
  Clone ID: PAT_MRT3847_49406C.1
agcctttgcggttgctctgggtgtgtgaatagaatgttcattggctaattaaatggattagagctacgacgaagtctgggagggagagccagttgaaggttggttacgaccgaaggttgtacatgttcccaaactaaatctgtgtatggattctgaggcgaaccgatgcctctcgaagtcgttcgttgtgttcactagctcttgttcttcgtaattcggagttgttattagttactttgcgccgcctcgctcttggtgtttgacttgtctggtgctcaggctgtcggctgcttttatcgttatctttttcttgattttctattgcggtctctgggaacttgtcgtgagtcctcgctggtgttgggtttctgttcttggtgctgggttgggtcgtgtggcttgctcttcttgggcctggggttggtcct

SEQ ID NO: 86818 - DNA, 300 bp, Glycine max
  Clone ID: PAT_MRT3847_49407C.1
aagggtagtagtgtcctcagagaggtgcaggaagcaactgcctacaaaagcccgcaaaatggcatcaagaaacccaaaagcaccaccgcaacaaccaaaggaatggatcccaagtttctgaggaatcagaggtacgccaggaagattaccaagactatttttgtctttaatggtaaactttgttcgaaatcagtgtttagtagcataattaatttgctcacagagaatactctcttataacagttttcctggtttctgtcaagacccttgaattttttatcgatagaatgttaagctgta

SEQ ID NO: 86819 - DNA, 2270 bp, Glycine max
  Clone ID: PAT_MRT3847_49408C.1
agtgttactcattccggattcagttgcagttgcagtgacgttttctctgcttgagatattactaattatttaaaaattatggatggatgagatgaaaatcgacaagtatttgtctggcggagataacgacggtagatgaaaatcgacatgtttcaataaatcagatttaatccaagggtccagattcgttaatagtagtagatggaaatcgaatccattaccaaaatttagtaaagtacttatgattatcatattatgtaataacagtcacatgcattaatatgaatatatagtttgagtttgagcacaagccaggttgagagatggagggaagtatccggtgctctgccaactacgttcctctcactccaatcagcttcttggaccgcgccgccgtcgtttaccgcgacagactttctcttgtctccggtgacgttacctacacgtggacccagacacaccaacgctgcatcaaacttgcttcttccatttctcaacttggtgtcggtctttctcccctcgatgtggttgctgtattggcccctaatgttccagctatgtatgagctgcattttgctgttcccatgtcaggggctgttctctgcacgctaaatacacgtcatgattctgcaatggtttccttgttgctaaaacattctgaggccaaacttgtttttgttgattatcaattacttgatattgctaaaggagcacttcaaatcctgtcaaaaatcaccaccaagcttccccatttggtcttaattttggagtctggacatccatcacctccccatgctaaaggaaccttgacatacgaggatcttatagctaaagggagccttcaatttgaggtgaggaggccaaaggatgagtgggatccaatctcccttaattacacttctggaactacatcaaaccccaagggtgtgatctatagccacagaggtgcctatcttaattctctggctacggttcttcttaacgagatgaggtctatgccggtatatttatggtgtgttcccatgtttcactgcaatggttggtgcctcccttgggccattgctgctcagggtggcactaacgtctgccaaagaagtgtcaccgctgaagggatatttcacaatatttttaggcacaaggttactcacatggggggtgcaccgacagttttaaacatgataatcaattcaccacccaaagtccggaagccgcttccgggaaaggtccaagtgatgacaggtggtgcaccaccgcctccggatgtgattatcaggatggaagaactaggatttaatgtgactcattcatatggtttgacagaaacttttggtccggcatcaatttgcacttggaaaccagaatgggacaatctgcctcgagatgcacaagcaaaactcaaggcacgtcaaggagtggcccatgttgggatggaagacctagatgtgaaagatcctcacacaatgaagagtgtaccagctgatgctaaaaccatgggtgaggtgatgttcaggggcaacactgtgatgaatggatatctgaaggacttgaaagcaacacaagaggcatttaaaggtggatggttttggactggtgatttgggagtaaagcatcctgatggatacatagagcttaaggatcgctcgaaggacatcatcatctctgggggagaaaatattagcacaattgagttggaaggagtcatttttagtcatccagcagtttttgaggcagctgttgttgggagacctgatgattattggggagagacaccttgtgcatttgtcaagctcaaggagggatgcagtgccacatcagatgagataatccaattttgtcagaatcgtttgcctcgttttatggcccctcgaactgtggtgtttactgatctgccaaagacatcaactggtaagactcagaaatttgttcttagggagaaagcaaaggccatgggaagcttgactaagaagaacgctagccggttataaggcacatttattctgaaattttaatggaatgtttgttgatgttatgtgctttaaggtttttattttcgtttatttataaaataaaatctgtccatttgtatgaatagacaattatgcatagttgtaacaagaaaaaaaaaaaaaaaaagagacacttgtgcaaagtcaattgaaccccacttatctttttttctcatctagaagtcatagatttataagaaaaaaaactgggcgtcccccaactattgtgcttttctccctgtaattaatttctaacctttactt

SEQ ID NO: 86820 - DNA, 386 bp, Glycine max
  Clone ID: PAT_MRT3847_49409C.1
ttacttttatgtttaactttgcgaaaagtagaccagaattgggttcgaaactctttctagcatggactggatgggtatgcatgtggactgccatcttgttgttcctactggctatcttaggagcttgttccatcatcaacaggttcactcgcctagcgggggaactgtttggccttcttattgcaatgcttttcatgcaagaggctgttagaggactcatccatgagtttcacatacctgagagggcaaacctaacatcacccgagtttcaatcttcatggagatttggaaatggcatgttttctttggctctgtcctttggcctcctacatacagcattgagaagccgaaaagcaaggtcttggcgatatggatcaggatgttta

SEQ ID NO: 86821 - DNA, 1799 bp, Glycine max
  Clone ID: PAT_MRT3847_4940C.1
cggctcgaggacattgtgttgatccgagacagaaaaaggggttagggtttgttcttgtgatcgaagctaagcgaagcaaaatgggtggatcagtgagggacgtgaagtcgaagggcgaggtcgacgaggtggtggcgagtggctctccggttatcctccacttctgggcgtcgtggtgcgaagcttccaagcacatggaccaactcttctctcacctttccactgatttccccaacgcccgcttcttaagggtcgaggccgaagagcaacccgagatttctgaggcttactccgtctccgctgttcctttctttgccttctgcaaggatgggaagacctttgatacattggagggagctgatccgtcaagcttagccaataaggttgctaaagtagcaggctcaattaaccctggagaagctgcatctcctgccagtcttgggatggctgcaggggcttctgttcttgaaacggtgaaagaattagcaaaagacaatgattcttcaaaggagaaaaatcaagttcaaccagggcttagtggtcctctgaaaaagagaattcagcagctttgttgactctaatcctgtcatgcttttcatgaaaggaactcctgaagagccaaaatgtggatttagcaggaaagttgttgttgtgttgaacgaagagagagtcaagtttggaagttttgatgtcctatcagactcagaggttcgtgaaggcttgaagaagttttccaattggcccacatttcctcagctttactgtaaaggagaacttcttggtgggtgtgacatagcaattgctatgcatgagagtggggaactgaaggaagtttttaaagatcatggaattgatactactaatgaagcaaaagagaaagaatcaggaaacggcaaaggtggcatctcaaaatctactgatttgagtacaaccttatcctctcgtctggaaagcctggtaaattcaagtgcagttatgctgtttatgaaaggaaagccagatgaacctaagtgtggtttcagtaggaaggtagttgaaattctccagcaagaaaatgttccctttgagagttttgacattcttactgatgaagaagttcgtcaagggcttaaggtttattcaaactggtccagttatcctcaactgtatatcaagggtgagcttattggtggatcagatattgtgttggagatgcaaaaaagcggagaacttaggaagaatttacacgagaaagggattcttcctgcagagaccattcaagatcgactgaagaatttgattgcctcgtcccctgtgatgctgttcatgaagggtaccccagatgcaccaagatgtggttttagttccagagttgctgatgcccttcgacaagagggcttgaattttgggtcctttgatatattgactgatgaggaagtgagacagggattgaaggtatactcaaattggccaacctatcctcaactctactacaaaagtgagctgattggtggtcatgatattgtgatggagctgcgaaataatggggagctgaagtcgactttatctgagtaggattattattattccttcaaataacatgtgttatgtcctagaagccattttgggaggttgtgtttgatgtcattaatgaactacatggttattttatatgctaccgtcagtgattttgaaaatgttagtgtggagcctcaactaatggtatactgaacatgcatgaattccaatcagattagaaattgttatatattacataattatttggtggaaacctctcattggtactgcccaaccaattt

SEQ ID NO: 86822 - DNA, 343 bp, Glycine max
  Clone ID: PAT_MRT3847_49410C.1
gatgtagatgaaggagcatggccatgatcatggccgtgacatgcagcagccctgacagtgatttaactgctgcatcacctatatatttaaaaggtttatgggaccatagtatcgagggctgtgcctcaatttctctctctctctctctctctctctctctctctttttcctttttccctatcttgggatctatttatgagtgagaaaaacaaaagtgacaaattgtgcgtgtatctgggtgctaattccagtgctattaatcctgggtttggttggtttgtaaccccgcttctttggctatgtttgatagtatattatccctacgaaattaaaattttaaatt

SEQ ID NO: 86823 - DNA, 434 bp, Glycine max
  Clone ID: PAT_MRT3847_49411C.1
ggctcgagggcgaatgatgaatgcgcagagcttagaattcgttattggctgaatccttatgaggcaggtggccctgtcaagcgcctaacctggggctgaaattgccaccgcgctcacgtcgtacacgggctgttattgcactcggattcattctaccacattccgaatactgagcgctcatatgagtgtgagagaccatggcactaattgtgagggacagtcgacgttactgcacggctcgtacgagcttggccgtgtgctgtggcacggaacgttctccacggtgtaccacgcgcggtacctgatttcagggcagcacgtggccatgaacgtcgtgggatatgaacctgtgttctacgattgaatgatctaacacgtgaagatggcgatctgagtgatgaacatggctgagtaccacatcagcggctaactac

SEQ ID NO: 86824 - DNA, 1010 bp, Glycine max
  Clone ID: PAT_MRT3847_49412C.1
cttatcttataaaccctttcgcctcttaacttttcgcttcagccttggccgcattcattctcttccctctcttctttattttttaatataaactttactttcatagttttcatttttcttcaagggaagcaaaggccgcaaaacaaaacaacaaccaccaccacaaacaccgggggtgtacggaaaatcaaatcaaaccaattcaattcaattccccccacccctccaaaaaaaaaaaaaacaaacaccgaaacccataatcgttaaaattagggcttcggtttggtgtttttagtccttttgatgggcaacatctcaagcggcggcaatccccgtcgccgacacagcggagcttcacggcggagccacccgccgccgccgccgcggcccgttacgccgcagcctgagatcgcggcgaatccattcgtgtaccatggtgctgctgcaccgtacccgaaccctcctctgcattaccctcagtaccattaccccggttactaccctccggtgccacccatgccttatcatcctcatcaacatcaacatcatcatcgacacatggacccggcgtggattcaggggcatttccctagtgggcccatgatgcctaaccctgcacctttcgtagagcatcagaaagccgttacaataaagaacgatgtcaacatcaggaaagagacccttaagcttgaacccgacgtagaaaattctggccacttccttgtttcgttttccttcgatgccaccgtttctggcagcatcaccatatatttctttgcaaaagaaggtgaaggctgcatcctcacaccaatgaaggaaaaccaacttgcaccagtgtctgtacatttcgagcaaggtcttggccagaagtttaacaggcagctggaaccggtattgatttttcaacatttgaggagtctgagttattgaaagcgggtgaaatggatgtctaccctctagcagtaaaggcagacgcatcccctggtaatcatgatgagtcagatagatct

SEQ ID NO: 86825 - DNA, 440 bp, Glycine max
  Clone ID: PAT_MRT3847_49413C.1
ggggggtttttttttttttttttttttttttttttgttttttttttttttttttttctgctccctttcgggttgggcccttccccatagggggaacccccccccccccttaccggaagcttgtaaataaaaagggccaaaatgcttcgggggggaattttgttcccccccccccccaaatgggaacccccctttttaaataaggcccgggggggttctcccccctctccggttggcgccccccatgcttgggccctatatccaacggggggggggttcttggggcgttcacccttgccctttaggccacccatgtttctggccttttgggaaaaagggcgtgtgggggccctccctcccccctttatttcttggaacccgggtgggggttttggcccggccacccccccttcttttcctcgccttgttgttggacccccc

SEQ ID NO: 86826 - DNA, 684 bp, Glycine max
  Clone ID: PAT_MRT3847_49414C.1
gtttctttctcatcactcttgtttcgctgcttttgattttgtttgtcgggaaggtgggtgtcggggcggccattgcctttgtgtcgatttatattgtgtatgcattcattgttgctgccaacgagatattgcggaaacatgcacggaggttgaaattggatgctgtcacaccaatgcttcctgtccagggaagtgtgttctctctaggttcggaagaggatacttcgatctatagctctttactggaagacactgagagcgacccccctcgcctccctccgtcgttgccacagtggatgtggtcctcaaatgtggcaatatattcaaaccaggcaaataagatcaattttttggatgatgaaaggcctccctggggatggagtgatggctccacggaaaacaccaggacatcgttcactgtatcaaaactttttctgatgatggagattccactggcaattcctaggcggctaacaattccaatggttcatgaggaagtatggtcaaagccttatgctgtggctagtgcttcattagctcctattcttctagctattttgtgtagcacccaagataatgtgagtaatcagggtgttatactttcttattgtgttggtgttactcttggatgcacctttggtattcttgcatataaatacacagtgtctgatcatccgcctcccc

SEQ ID NO: 86827 - DNA, 603 bp, Glycine max
  Clone ID: PAT_MRT3847_49415C.1
gatacacggttatatacactgaacaaatcgaaaccaacaatagaaaagacaaatcaaaatcaaatacaattaagcaaaaacctcggtggaagcaacctataactacccaacttacatttgacttccatagcatcctatggtctaaatatagcaactttattttaaaaaaattaaaaaaaagttaaaattgaaaagcctttcgtaattctttcctttgcatactaaaggccgtttcgttgtcaagtggctatcagccaaaaacttcataaaagggtcttccagaaaaagatgcttctgtcaagactccaaagacacatgtactgaaactgaggagctccataactctctgtgcagtgcgcacattgttctgctttaagccatgacctcctcatttaatccttcaatgaattcaacccagaactcgtcttcatattcttctgtggttgaacttgagcaaggagctttcggaatctcgctgatttcgtcgttgcgtgcgaatctgccacgtatgcgggttcgattgtcggctagtgtctttcggcatgcatacttaattatcttgttgaacttcctctggcttctcttggctctgtacttagagat

SEQ ID NO: 86828 - DNA, 412 bp, Glycine max
  Clone ID: PAT_MRT3847_49416C.1
ctctagctttcccacgctttttccacccacaacacacgtaacatactatttcaaactccgccatggccactgtcacctggcgtcgtcagcagtgatactttttcggcacccgtgtaagcaacgtttacacgacaaccttaaacaaccgaagattccacgcgcttttgaactgcggtaaaaagaagacggcgccgcacccttcgtcaaagaaaaaggaagagagagtgaaacccttcggagaccggctggtgtggttgccgaatgcagagccaccggagtggctcgatggaagcgtgatccgcgaccgggggttcgacccgttcgggttcgcgaagcccgcggagtacctgcagatcgaactggactcgctggaccagaaccttttgaagaacatcaacggcgatgtgatcgg

SEQ ID NO: 86829 - DNA, 255 bp, Glycine max
  Clone ID: PAT_MRT3847_49417C.1
ttcaaaaactgtctttcttaatgacacatgtgacaatggacggggggggttacccaccaccctctttattatcctctacaatcacaatctctcctcccatatcaacaaaaagattcttactattcttgcgaaaacgaagaaaattctttttcttaccataattgatcccttttcaatttcttcacatccagtcctttttttcaaaaacaatgaaattcttacttcttactccactaattctatgctgactcgact

SEQ ID NO: 86830 - DNA, 160 bp, Glycine max
  Clone ID: PAT_MRT3847_49418C.1
aacaaggaaccagtcctatataaatataataaagcaaaaaggagtgctaaatcatgatggacaatcaccacttactaaaaacgttgagtgtgggggtagtaaggatatatcaggccaaacaattgagaaacatgaccttactttagaaaaacatcatagg

SEQ ID NO: 86831 - DNA, 219 bp, Glycine max
  Clone ID: PAT_MRT3847_49419C.1
ccacgcgtccgcccacgcgtccgcactaaacggtttcctaacagtataaacacggaaaattagaaattcaattcaacgcaaattacgcgttacttataattaaataaccaaaaacccgatggctaccttcattcaactattaaaaatttaaactcagatcatactccatccaccgtttcgcgttacatcaattaaaaaaaaaaaaaaagggcggtcttt

SEQ ID NO: 86832 - DNA, 785 bp, Glycine max
  unsure (1)..(785): unsure at all n locations
  Clone ID: PAT_MRT3847_4941C.1
ccacgcgtccgctcatgcaagtgaagagagcactgagtacatttacttgactatcatcaaactacagatgctttatcatgttggcatggcttgggatttacgctggagaacatgtcataataatagcaccgagttttgtcttctgaagccaactgtttctcctgagcctgtgattccttccattgaacagatgtcatggctggatatggagtggtgctcaattttgcaaaggacacaattgcatatgaatttgctagaaccatttatagcatttcgacgagttctacttcaagttttaagttctagagactgtatgctgcaacatcttctgcagtctgccaccacacttcgtaagggatgtaggttctctcaagcagctgctgctttgcatgagtttaaactcctttctgttgaaaccaaagggcaaagctcatccgtatattggcttggaaggcttgaagaagcaaaacttttccgtgctcaaagtcaaaatgtgatggctatcaaccttgcaatgtatatatcacagaattatcactctaatgaggaggcttcagatgcatatcggttgattgggaagtggctagcagaaaccagatctagcaactcaagaacaattttggagaagtatttgaaaccagcagtctctattgctgaggatgtgaatgctacagctaagaatgccttgcaaaggaaatgtcaggctcattttcatcttgcacactatgctgatgctctatntaaagccatgaagaagacttactctatgatggcagctgcatgcg

SEQ ID NO: 86833 - DNA, 408 bp, Glycine max
  Clone ID: PAT_MRT3847_49420C.1
ggttttgatagaattaagagttatattccttacactctcactcaagattaattctcgttcaaagagcattgcctgaaattatgttatggtacaattacaagttctgtcactacaaataataaaaaagggtaaaatcaaagtgagaggaattgctggtgcacatcaaatggattccttcaatgaaaatgtgaaattagttaaaatacaaactagcttcatgtgtcaagtacctctgactttattcatccatggcaaagtccaagtgacagtagagttatggaaatgagcatctgatgagcctgtcaacttatctttcctagagcattgccagatcttggaaacagaaaagctttcaccttttcttgcactgttcattctcttgccctcaacagcatctccctcaaggaa

SEQ ID NO: 86834 - DNA, 248 bp, Glycine max
  Clone ID: PAT_MRT3847_49421C.1
cgccttggtgttggagatcgtgatgaccttcggtctggtgtacacggtctacgcaactgccattgaccccaagaagggtaatttgggaattattgctcccatcgccattggtttcattgtcggcgctaacattttgttcgggtggggccttctctaggtgcggccatggaaccccgctgtggacattgtggggcctgcttgtcgttgagctggcacctgggaccagatcactggactctactggggcc

SEQ ID NO: 86835 - DNA, 140 bp, Glycine max
  unsure (1)..(140): unsure at all n locations
  Clone ID: PAT_MRT3847_49422C.1
cagaanccnctggtggccngcatattgcagggaatgggctcaactgggaactggcacaatttaatgcaggaggaaatggnatacgcccacatcatggactttatcatatgnggaacanctccaannngcnaacagcnaat

SEQ ID NO: 86836 - DNA, 507 bp, Glycine max
  Clone ID: PAT_MRT3847_49423C.1
atgcatttacagacaaactcgctaagtcagcatgtctgcgctaaaagagttcatccattttgttgaatgttcatcttccttatgaacatcgtagctaagcgactgccgtgtgcactaagccattgtacagatcattaatgacaaacctgtggctaagagagtgttgtctcgctaagctcaggtaccttagacaaatatttttgttgactgcctcacgctaagctgcgcctgtcccaactaagcactattcgttgcggcagaggttgggctaagcgagcctagtcgctaagcccatacaacttagtcaaatattggaagtgttgcttgcgctaagcgtcgttcccttaggctaagcactatttgttgtggcatgcataaggctaagctgacactgctcactaagccattgtgtgaaataaaagtgttttgcgctaagagagtgcctatctcgctaagctaattatgcagtgaaaaattttccgtcatgactagctaaaggcaaccctg

SEQ ID NO: 86837 - DNA, 119 bp, Glycine max
  unsure (1)..(119): unsure at all n locations
  Clone ID: PAT_MRT3847_49424C.1
ggggtgtgcttnctcgaagcgtgttgatgcggcagagtcccctancgtccngcacccacaagcttngnggagtncganntcancaccatngaggnnctatggctgangcacctnaacaa

SEQ ID NO: 86838 - DNA, 241 bp, Glycine max
  unsure (1)..(241): unsure at all n locations
  Clone ID: PAT_MRT3847_49425C.1
cgcgagtncgnatcgtatgcgagggtnacaagncntcaaaaatgcacngatcaccgtgntgtgnnatggntggatgatancntanttnggagggcatgannatcngcaagccgtactttagtggttcnaaattnaaaagcnttcgagcnggtcagaatatcaccagtacntatgatantgacnaaacgagtgcaacnttgcaattnagnaagttagcngattgtgattttctcaagagaaa

SEQ ID NO: 86839 - DNA, 456 bp, Glycine max
  Clone ID: PAT_MRT3847_49426C.1
gacttcaatttaaaaaaaaaagaggggggaacaatacaatggggcgggccgggacaaaccaatgggggggaagaaaaggaaacaagaaaggcgaacacaacatgtaaagggaaaacaaccaaagaaaaaaaaaggagaaaaaggtcagaaaggcaggccagacaaccaagccaacccagggcaacgaggcaggccaaggccaagcccaaaggcaaggccgcaaccaaaaccccggcccggcccaggcaagcctggagggcacgaaaaaaatgatcccccggaaaaacccaagaaattaggcggggtcaagccgggagggctggggggcccaactgtgaaaaaaaagagaaaacggaccgttaaaagaagggaaacacaggaaaaaaaggcgcccgagagggtcgcccgggacaagccggaccgctccaggagggcaaaccgggcccccctgggggg

SEQ ID NO: 86840 - DNA, 923 bp, Glycine max
  Clone ID: PAT_MRT3847_49427C.1
tacggctgcgagaagacgacagaagggggtagaacggtagaagccactttggctacagagttggtgttgtgtcttgcgaaagaggaaaaacgtagaaagaagcaagcaaggaagcgtgctagctgggtttgtttctgttgtgaattgcgatccttaaacctttctctctcactcactcaatcaaattcaaatggacattgatttcaaagaataccagttgcgctgcgagcttcgcggccacgaagacgacgttcgcggaatatgcgtgtgcggcagcaagggtatagcgacttcgtcgagggaccggaccgtcaggttgtggtctttggacgacaaccgcaggttcgtgagttccaagattctgttgggccacaccagcttcgtgggacccttggcatggattcctccgaattcggagttcccgcatggtggggtcgtgtctggcggcatggacacactcgtgtgtgtctgggacttgaagaccggtgagaaggttcacactctcaagggccatcagctgcaggtcactggcattgcctttgatgatggggatgttgtgtcctcttctgttgattgtaccttaaaacggtggaggaatgggcaatctgtagagtggtgggaggctcataaggcaccagttcaagcagttataaagctgccttcaggggagcttgttactggttcaagtgactctactttaaagctttggagaggaaaaacttgcttgcatacctttcaaggacattcagatacagttcgatgcttgtctgttatgtctggtcttggaatcctatctgcatcccatgatggttctctcagattatgggcagtaagtggtgaagtgctaatggagatggttggtcatactgctattgtttattcaggtgattcacatgcatcaggacttattgtcagtggtagcg

SEQ ID NO: 86841 - DNA, 510 bp, Glycine max
  Clone ID: PAT_MRT3847_49428C.1
gctgctgcgcctggctggaagccggccgcggaagtgaaccggcggcgatcccaccgcgtgccgattgttgataaactcgggatcacaggttgccgcaccttagagccggaaacaaaagcactcgttacttgattggaagaatctctcaggtgctccctactggtttgtgtgcgatttcttaagggaaagaaaatcactctctgtgctggccacagactgggcgaatcattttcttttccactcttagttgatttgctgaacactctcctatgtgatataggacttcatgtcagatgaaaacttcatctgactcttactcaggtctctgtgcaaggacaaggtcaagctggtgaaatcccggattagaactcccactctcctatctgacataggagactgcgggtagactgcactatgtctttgcttcactttgactgtcttattctcactgatgcgtgttgccgctcaaagtggtgtgatttgaaaaacacttgggcgttggtgcaaatg

SEQ ID NO: 86842 - DNA, 148 bp, Glycine max
  Clone ID: PAT_MRT3847_49429C.1
aaaaaagtaaacaggggccaggaaattcacgtcatcttacgcatgttgaccaatcaactgagctaggccgctttggtgggcgctagaaacaatgtgtgagattctctatctttgcactatgccagggaccaagtttctcttaagaaaa

SEQ ID NO: 86843 - DNA, 927 bp, Glycine max
  Clone ID: PAT_MRT3847_4942C.1
gagagattataggagaggcatttgattgaaaaatcaaaggaacattagaaaaaagaatcggctattcgcaataaattcaaacactacttccgcgagtctctaaaaatcgctgtaagcaacaacaaaaaaagatcaaaatggctatagggtagtaagaaaaatgaagattatcaaacacattgtaaaaaaggtttatgcgctgcctgcaatttagggtttgtccctgctttatctccttaaagcccgcgctactaaccctagacacagacaacacacagcaattttatgaacacgatcgctccttagcataactcagaatcgatcaaaatagcactcccgaagatcgattataccaatttattttcatctcaataaaaataaaaaacgagatgcatgtatgtaaattaataagcacaaattagtaacaaagatcacataaaaataaaagcccttacagtaatgggtaggtagtaacctaaaacatcacacaccaaacaataaccattgttggattggatccctagtttttttaccctaccccagagggtcttcttgacggttccggagtggtgggattggattattgttcaagagtcctttgaggaaggcgcgtcttgatcggaggacttggtggcggtagcggtggcggtggtgggaggagggttgcgaccgaaacgcgtgacgaagatgttgatgaggctgtagaagtggtagaacagttgcgcactcaccagcactatcaggcacaaaacgacaaaatccattttcaaacaccggaagaagaagaagaagaagtttggatcgacacaagaccgaaagcaccgacgaggaaggtgaggggaagcagaaggcacgaagaggcttttgggaaagatcaaggtgtgtttcttacttgttttttttaaggaaaaaaaacttgattgcggg

SEQ ID NO: 86844 - DNA, 253 bp, Glycine max
  Clone ID: PAT_MRT3847_49430C.1
tttcgtgaaaaagaaaaggtcttcaattaacaaaaataaacatagcttttacaaattggttccatacatataaaaggattacattacaaaagcaaataaagagggaatacaggttaaaaaaatggataaaactgagtgtcctggtcagtagcatagccatggacaacgtgagatcagaactccctggagacacccaaaagttttgactctatcccacaagcttggcttccaatctcaatcatgaaaacaaaat

SEQ ID NO: 86845 - DNA, 244 bp, Glycine max
  Clone ID: PAT_MRT3847_49431C.1
acttaatacctttctgtaccttagtgcaagaaataaggagaaaaggaaaacaaaaaaaaagggcccccctggaaaaaccccaaaaggtgatgaaagagtacacgcacctttttttggtggggcacaggaaaatcaaggagaccccagtcccggcctcgaagatacccccgataaaagcaaaaaagagcttacatgctcccaagaccaacttgattaccgccgcaatgggcggctcctattgcaa

SEQ ID NO: 86846 - DNA, 265 bp, Glycine max
  Clone ID: PAT_MRT3847_49432C.1
acccgggtctatgtgagccataaggagtggaggtcgatctgtggtcatgttgggtctctgactcgcttgataatagtgaagcctcatatagagttttcctatttttgtgatgcattatcactgatagtccatatcgccacaatgtattatctaagatgatgatatctctagaagccagtaaagttacatggaaccacccttgggagttgtcaatagaaggggacttttggatcctttccattaggggggcacataacaaactcac

SEQ ID NO: 86847 - DNA, 1140 bp, Glycine max
  Clone ID: PAT_MRT3847_49433C.1
atgtttactaagcagatgatcagttctgaaatccccatgctgatgtcaaaagcatgtgagattttcattcaggagctcacttttcgtgcttggatgcatgctgaaaagaacaacaagagtattgtgcagccttgtgacgttgccaaagttatcatgcaaactgataccatgaatttcctcactgagattattccaaacaacctcggcgatttcagtgtttttgatgccaaggaagagaatattgcaaacattgcagaagaaaacgaagtttctctgtctttcactgctggttttatgggaaatcctatgatgaagatggacagtgaagagaatgctggaaacattgtggaaggaaaccaagctaccttaccttacacctctggttttatgggaaatcctatgaatatgatgaatatggacaatgaatacaatgcaaatggaagccaagttgccttgccttacactgctggttttatgggaaatccaatgatgaatatgggaaatgaagagaatgctataaacattgcagaaggaagtcaagttgccctgccttacaatgctgattttgtgggaaatcttatgaatatgatgcaaatgggcactgaagacaatgctggaaaccttgcaaatggaagccaagatgccttaccttgcactgctggttttatgggaaatccaatgatgaatatgggcagtgaagagaatgttagaaacattgcagaaggaagtcaagcttccatgccttacactactggttttatgggaaatcttatgaatatgatgcaaatggacaatgaagactatgctggaagccaagttgccctgccttatcctggttttatgaaaaattctgcgatgaatatggaagagaatgttggaaacattacagaagaaagtcaagtcgtcttgccttacactgatggttttatggaaaatcatatagatatgatgaatatgagctatgacttggaggcaggaaaccaactgattcctcaaccaaacatgatgcagccaccctttatgccttcagatcaattgccttacaattttcaacccaatgtaagagggacattgttaacactatatcatggacctatgaacgtagggatgcatttgccgttgccgggggtggatgaatga

SEQ ID NO: 86848 - DNA, 126 bp, Glycine max
  Clone ID: PAT_MRT3847_49434C.1
ggacatctagatttctcagagttccaggtggttgtcatgtcggaggttattatctgagaaaccgatttcaatggacagatactattggaccatgggaggagagacctgtgcaccttggagatgcat

SEQ ID NO: 86849 - DNA, 205 bp, Glycine max
  Clone ID: PAT_MRT3847_49435C.1
cttcgtccaatgaatactgttcctatattattcaaccttcaaaacatgctcgactcaagggttaactatgtgggacgtacgtataacctaaaggagcatattattccgttgcaaggattaacaaacttactgcggcattacttcatctatcatgggcgccaataaaagcagcatgtgcatatactacaacgctagctgaggagac

SEQ ID NO: 86850 - DNA, 282 bp, Glycine max
  unsure (1)..(282): unsure at all n locations
  Clone ID: PAT_MRT3847_49436C.1
cgagctctnccaccttcaaccactanntcacnngggacccacntcgccccagaaatcaacggcaanancagccatcaccgttctgcgccgtgcgacaacgccgccatgtcggaccttctctcgaagnacccctcnatactacaccgtcaagaacgtnntntcnctnnaagtcctncangactacttcggcgccaagaagctccaccagatcancaacggnaccgncctcgncgccacaatgnannaagncaccggnaccgtccccggatcnnggnttnttga

SEQ ID NO: 86851 - DNA, 206 bp, Glycine max
  unsure (1)..(206): unsure at all n locations
  Clone ID: PAT_MRT3847_49437C.1
gcatggccgagcggttgatttttttanngacacggacncaaggggggactttaacagagaaggaggacccctcaccaccaaagaccaatcacaccaagactgacaatgacagccgtaggcaatagcgtgcccaacgaaacgcccataaggacacacctacgaaaaataactgccgccaggccaaagcaccaaagatgccacacaca

SEQ ID NO: 86852 - DNA, 230 bp, Glycine max
  Clone ID: PAT_MRT3847_49438C.1
acgaggggtttgccttgggccgcttgtgatgattcaggaactaataaaaacatggtgtaaggttctggaatctgcgcacagcggatggagatggacacacccaccacacagctgtgacgcatagccttcatgaggggataagacctatcatcttccagaaagaccctactattctctgtgagagcacaaataactctggcgctctgtctatagaaaaagatgcaatacat

SEQ ID NO: 86853 - DNA, 652 bp, Glycine max
  Clone ID: PAT_MRT3847_49439C.1
cccacgcgtccgaagttttgttaatgtaaacagtagccagagcacagtgaaaaaaagacatgaatttgctcaaaaatcttgataccctccgtcggtttgactcattttcaaaaactatagaagactttcgagttaagacatctggcggtggcctagttaccctcctaagtgtatggtgcatgggagttctattctacgccgaggtgaaagatttcatgactcccggcataactgaggatctatttgttgacacttctcggggacctaagctgcgcataaatttagatattgtcatgcctactatatcatgctcttttttatctctggatgccatggattctgctggtgaacatcatttgcacattgaccataatatttacaaaagacgccttgatttaatgggtcagcctctggaggaccctcaaaaagaagatttacaaacaagtacatctgttaaatcatcaacagaggcccctaacattaccaagagtgtagagcttaaaaatgacacatgtggtagttgctatggcgctcccaaagagataatcaagtgctgtaacacctgtgaagatgttagagaagcatatatgataatgcagtggaagtttccagacccggaccagtttgagcaatgtaaaaatgaccaatcaaa

SEQ ID NO: 86854 - DNA, 420 bp, Glycine max
  Clone ID: PAT_MRT3847_4943C.1
acggctgcgagaagacgacagaagggacttatatctgataatagtctcaaactacacaatctccttttttaaaaaaacaaaatcatagtaccatcattactttttcacatatacatatcttggaaataacataaaaatgtgggaaaaattctaaattcgaaatattttctctacacctatatgcaagtaattggatggcttgtacaacaacctattaaggtgtgacattccatgcatagacttgtacacacgagatgtacgtattaaatcaattaatattacaaataattatataaaatatttatgttttaaaattaatttatcacttaatatatatagcaacgatgtatattatttgtacatgaatctctgtaatttctctttcacatctctacgatcttttgccggtcaaaaacttga

SEQ ID NO: 86855 - DNA, 260 bp, Glycine max
  Clone ID: PAT_MRT3847_49440C.1
aattaccacatctgacagctgtcctcataaatctctcatcttctcacacgcttccaagcaggagtggcactctttttttcttttttttttggggggggttaaaaaaacggcgtcaaagcgccctccatttaccattccccgagaggtccaacaacctcacaggtcctctcctccctctccgtcctcccggccgctggtatactgctcctcctgacgggactcaccctggcaggaaccctcatcggactgtcattttgcca

SEQ ID NO: 86856 - DNA, 272 bp, Glycine max
  Clone ID: PAT_MRT3847_49441C.1
cccaaatcggttggcattcgaataaaaataactagtgatttacaaaaaacagctgcagcaggggatggaacggaccttccaatcaaacagggcattaaaaccccggataaaaactttcctcgaagccaaacaaaaagttgtgaccaattaaactggggtaccatttacaaatttattcttttgaaagttatactccaaagagtaatggcggctaatcaaaacaggatacagttttcaacacaaaagaagcttttcacaaacggacccgtggg

SEQ ID NO: 86857 - DNA, 362 bp, Glycine max
  Clone ID: PAT_MRT3847_49442C.1
gtcctagtcaaagtgttgatggtattctgccagtcagtgccaactttgtcagcaagaaccagaaaatgaatctcaggaccataatcatcattgctttatcttcctttgtactcttgctggttttggtgggagcattttcaattattttgaaatggaggaagactgggagaccctcaagtgctgttggccctgcattcacatcatctctaaacaagagatcaggcttggggtctatgttgtcaagtagtattacaagctcgacatcaatttcacttatgtccacaatggctacttcccttctctctgttaaaacattttcactttctgagcttgagaaagcaacagataagtttagttcaaag

SEQ ID NO: 86858 - DNA, 353 bp, Glycine max
  Clone ID: PAT_MRT3847_49443C.1
gtgcgggtgcggctctagaatatctctcattccaacactcctttattttaacatgcagctcaactttctggagggggacattccaaaggggtagctctctccaaatgcaattcatctttaataaaaactcaacctttgtatgcaattatcatctcggaagctctttttttatacattcaacaatttgcaaaacttaaatataatctttaattgccaacacattctaagtctcatgtcaataaaatttctcttatacgtaatctctctctcaaagtttaataactatatcatctcttaaatatgatcttattatcgcaactcccttccaaacataacaaatcttaaatctcctt

SEQ ID NO: 86859 - DNA, 227 bp, Glycine max
  Clone ID: PAT_MRT3847_49444C.1
aaaaagctattgcaacttttttttttattcaaagacttttttccattcacaagggggaaaaaaaaaaaaaagggaaacccccctttttgaccactggggcctggggaaaccacccccattttaaaagagcccattgagagggtttgaaccgagaatcctcttttacccaaaaacaatttacctcctgatctttaacaaataacaaacccctttattctaggggaacc

SEQ ID NO: 86860 - DNA, 376 bp, Glycine max
  Clone ID: PAT_MRT3847_49445C.1
ctttttctttctctctcctattctcccctccttttcagatctgagatattttcccattcttctcctcatctcctcatccaaaccaattccatcacaaggtttttcatcaccgaagcttttgaatatgagtagccgccatcaaaatcggcatcactccattttagatttgtgttgcgagatgaagttgtggtggcttgagactgaacacggtggatgactatgaccccaccccaaacaacgacgacgtgtagggatcaactcagtggtgttgatttgtggttgttagtgacaagtttgttggagcataagatgaagagcgtcatggcatattcttttgatctcttttcttgcagtcgtggatgaagaagagggcatg

SEQ ID NO: 86861 - DNA, 1023 bp, Glycine max
  Clone ID: PAT_MRT3847_49446C.1
acggctgcgagaagacgacagaaggggatcactttcttttcttcaccgttcgctcttcctctcccagacaaacacatggctttgcccaatcagcaaaccgtcgattaccccagcttcaagctcgtcatcgtcggtgacggtggcacaggaaagacaaccttcgtgaaaaggcatctcactggtgaattcgagaagaaatatgaaccgaccattggtgtggaggttcatccgttggattttttcactaactgcggaaagattcgattctattgttgggatactgctgggcaagagaagtttggcggcctcagagatggatattatatccatgggcaatgtgcgattatcatgtttgatgttactgcccgtctaacatacaagaatgtccctacctggcaccgtgatctttgcagggtctgtgaaaacatcccaattgttctttgcggtaacaaggttgatgtcaagaacaggcaagtgaaggcaaagcaggttactttccacaggaagaagaatttgcagtactacgagatatctgctaagagcaactacaattttgaaaagccatttttgtacttggccaggaaacttgcaggcgatactaacttgcactttgtagaatctcctgcattggctccaccagaagttcaaattgatttagctgcgcaacaacagcacgaggctgagcttcttgcagctgctagtcagccccttcctgacgacgatgatgatcaatttgagtaggaattgtgcgtctgtggaccatgttacttagttaatggtttttgtgtatgctacaaaatatgtttttggggttgtattattgacattttttgacgtggatttgaggatttaaatttaatcattgaggtgttttgctcatgtttggttattgccttgtttagtgtctctggtgcattcccacacgaaacattgtgatatctcatataagaggaatgtatcttatatgagtgtgaagattaaatctgaaatgtataatcaaaatttattgtcacctgatcactt

SEQ ID NO: 86862 - DNA, 211 bp, Glycine max
  Clone ID: PAT_MRT3847_49447C.1
ctctttccctttagcacttcttggcacagttgttggaaagaactggagtggtgctctgaataatcccctgtcgcgtaagactattcccttgcccattcctggaaaagaagtggtacccttcacccctctggtgttttctttgaatgggaggactgctacccctttggccagcatattcattgaaatggtttttggattccttcccttctgg

SEQ ID NO: 86863 - DNA, 1479 bp, Glycine max
  Clone ID: PAT_MRT3847_49448C.1
acggtctcgaaacctcccatataaaccctcgcttcgttgtgtgctctctctttcttctgcatcactttccattctcttcaacctaacgcagcatcgctatactcttcattccatggctttgcccaatcagcaaaccgtggattaccctagtttcaaactcgttatcgtcggtgatggtggcacaggaaagacaacctttgtgaaaaggcatctcaccggagaattcgagaagaaatatgagccaaccatcggtgtggaggttcacccattggatttttttcacaaactgtggaaagattcgattctactgctgggatactgctggacaggagaagtttggtggcctcagagatggatactatatccatgggcaatgtgctattataatgtttgatgttactgcccggctaacatacaaaaatgttcccacctggcaccgtgatctttgcagggtctgtgaaaacatcccaattgttctttgcggtaacaaggttgatgtcaagaacaggcaagtgaaagcaaagcaggttactttccacaggaagaagaatttgcagtactatgagatttcagctaagagcaactacaatttcgagaagcctttcctctatttggccaggaaacttgcaggtgatcctaatttgcactttgtggaatctcctgcattggctccaccagaagttcaaattgatttagctgcacagcaacagcacgaggctgagcttcttgcagctgctagtcagcccctccctgacgatgatgatgaatcttttgagtagagggctgtttttctgagtgcgctggtatttgtatgctactgtatgtgctgttgggggttgtagtgttgacatttttggatgcgaattcgaggatctgaatcaattatcatccagatttgttgcttaaatttaaaacctcagtttaatatatcaaccatgggcgttaaaaagatgaggatttggttgtttcgacaaattttggggtcttttaatataccatgcgaattggggtttagccgatggagggtagagtttgttcctttttgggtttttttttaaagttaaactcgatactattgattagaaaaatgagggtttatgttccttttgtcacagtttatcacccaacgtgaagcaaatcggtcgatttctataaaaaaaaaaaaaaaaaaaaaaaaaaaaaaaaaaaaaaaaagggagaacgataaaaaagaaccaaaaattaaatacacatgcatgcaaaaaaataaaatattatatagggaaacctaaaattcaatacaatggccagaagttttacaacttaaaaaactgggggggggccttttttaaaaaaactaattttttctcgcgggatttgccccttttacttttttttttgggtccccaaaatgcctttactggggcggctttttaaaaagttgggcatgggaaaaggctggtgttacccaactttatagcggtgcataaaacccccttt

SEQ ID NO: 86864 - DNA, 1368 bp, Glycine max
  Clone ID: PAT_MRT3847_49449C.1
cggtccggaattcccgcctcgacccacgcgtccgaattctctgtctctctctctctctctcgatcaatcatggccttgcccaatcagcaaaccgtcgattaccctagtttcaaactcgtcatcgtcggtgacggtggtacaggaaagacaacgttcgtgaaaaggcatcttaccggtgaatttgagaagaaatacgaaccgaccattggagtggaggttcacccattggatttcttcacaaactgtggaaagattcgcttctactgttgggatactgccggacaagaaaagtttggtggcctcagggatggatattatatccatgggcaatgcgccattatcatgtttgatgttactgcccgactaacttacaaaaatgtccctacctggcatcgggatctttgccgggtctgtgagaacatcccaattgttctttgcggtaacaaggttgatgtgaagaacaggcaagtgaaggcaaagcaggttactttccacaggaagaagaatttacagtactatgagatttcagctaaaagcaactacaattttgagaagcctttcctgtatttggccagaaaacttgcaggtgatcctaacttgcactttgtggagtctccagcattggctccaccagaagttctaattgatttagctgcacagcaacaacatgaggccgagcttcttgcagctgctagtcagccccttcctgacgatgatgatgaatcttttgagtaaaattatgccttttgagtcgtgctactgcttatgctacagtatgtattttggggggtgtaatgttgacagttttggatgccggatttgagtgtcagaaatttaatcattttgctttaatcttaaaaaaatctcccaatagtttgacatatccttgtagccaagggctgtagtacgtgcttttgtgttatttggctctcttgaagagacagcggggctaggctgtgcccaagtgctattttgattctcgagtttggtgcgtccaaaaagaaatgatatgattatattggtttaaattcctcctattgaaataatgtagaacaatgtcccgatagtttggtgaaagtcaattttatattcagtgaacaatgtcgaaaacattgcggatacattccattggcgtcgatggcctttattttctggtaaacggttacgttataacgtcatgtggtttctggagatttatctagcttaacgtcaatgtattactaggttttttttttacccattaaaaataatctccttcagaaaatattacttactgagatttttttttattactttgtagtatattgttggaagcaaaattatgtgttgcaaaaaaaaaaaaaaaaaaactcgagactagttcctcgt

SEQ ID NO: 86865 - DNA, 295 bp, Glycine max
  Clone ID: PAT_MRT3847_4944C.1
ccaacctcggaattcggctcgagctcgagccgattcggctcgagggctcgaggcaatctattgctctgtggtagtgaaatgtaattacaattcaattcgagatttgtcttatacatttacaattctttcccattttgaaatggaaaaaatttgtattttcttggttgacatataagtgatataaccttgtttcttaagaagcatacaaaaaagggcttctttttcctaaggagacaacacagaatattgtcaaatcgagcatgtacaacactcactgtcatccactctcgcattc

SEQ ID NO: 86866 - DNA, 1334 bp, Glycine max
  Clone ID: PAT_MRT3847_49450C.1
aaaaccttcgcttcttttcacgctctcaaacaccatcatctacaacgcctcgaatccacacagttctactctacgctctaaaccctctctctctctctctctcgatctatcatggctttgcccaatcagcaaaccgtggattaccctagtttcaaactcgtcatcgtcggtgacggcggtacaggaaagacaacgttcgtgaaaaggcatcttaccggtgaattcgagaaaaaatacgaaccgaccattggagtggaggttcacccattggatttcttcacaaactgcggaaagattcgcttctactgttgggatactgctggacaagagaagtttggtggcctcagagatggatattatatccatgggcaatgtgcgattataatgtttgatgttactgcccgtctaacatacaaaaatgtccctacctggcaccgggatctttgccgggtctgtgaaaacatcccaattgttctttgtggtaacaaggttgatgtcaagaacaggcaagtgaaggcaaagcaggttaccttccacaggaagaagaatttgcagtattatgagatttcagcgaagagcaactacaatttcgagaagcctttcctctatttggccaggaaacttgcaggtgatcctaacttgcactttgtggaatctcctgcattggctccaccagaagttcaaattgatttagctgcacagcaacaacacgaagctgagcttcttgcagctgctagtcagccccttcctgacgatgatgatgaatcttttgagtaaaattgtgctttttctgagtcgtgttactgcgtatgctatgatatgtattttgggggggtgtattgttgacattttttggatgcggatttgagtatcagaaatttaatcattttgctttaattaaaaatctctcccaatagtttgacatatccttgtggccaagggctgtagtgcgtgtgtttgtgtgatttggctctcttgaacagagagacacgggggaaagagcaaacaaggctgtttgtgccaagtgctattttgcttctcgagtttgtccctccaacaagaaatgatattggcttatttcctcctatttaaaacgactagtttggtgaagtcaatttaatattcagtgaacaatgtcgaaaacattacgtacatattcgtatacattccattggcgtgaatggtttatgtattttggcctttgttttcttgtaaacggtcactttataacgtcatgtggtgtctggagatttatctagcttcatatttgagttgtgcttaaaacggattctgacaacgatgcttgacgttaatgtattcctctgttttttttt

SEQ ID NO: 86867 - DNA, 3780 bp, Glycine max
  Clone ID: PAT_MRT3847_49451C.1
tgttgcaggtggggttggaattggaattggttattggactttgttgcaacaagttagattttgattgatggaggctgagtttggagcgaagaatcagtacttgtatggacctgtggtgtcaggaatgaagaaagctgttgttgggaatgggaagaggagtttggaatgggatttgaatgattggagatgggatggtgatcttttcactgctcaaccactcaattcagtgccatctgattgtaggggtcgccagttttccccacctcatcctgaaattcctgcaaaaaatgctaatccatctaccaccaatttgtcttattctgttttcatctcaggtgaaggaaagagggaattggagaaaaggaggaggggtgttataggtgaaggtgaaggtgagggactgaattatgaggctggttctcttagtttgaaccttgcgggtcaaggttaccctctcatggtggaagaagaagaaaagagtggaaagaaaacaaaggtaattgggaccaatacaacaactactactactactacctctaaccgtgccgtttgtcaggtgcaagattgtagggctgatcttagtaatgccaaggattaccaccgtcggcataaggtttgtgatgttcattctaaggccactatggcactagtgggaaatgttatgcaacgtttctgtcaacagtgtagcaggtttcatgttcttcaagagtttgatgaagggaagagaagttgtcgaaggcgtttggcaggccacaataggaggaggagaaaaactcatcctgatgtctctgttgttaatgaaggctctctgaacgatcaaagggacagtaactatctgctgatgagtctgttacggatactgaccaatttgcattccaatggctcagatcatacaaggaaccaagatattctctctcatctgctgaagaacctggcaagtctggctggtccaaataatggtggaaggttagcacccttactggaggaatctaaaggcttggtaaatgctgggacgcatggagctgatcatgataaacccaaccttaactcaaatgctcctgaagcttccaggccttcttcttccatcaagacagacaatggcatcatcgctcaggaccctccaatgtcggtggtgcagtatgaaacacctgctaatggcatgacacaaaaatgtatagcttcaggtgatggagtaggaaatttaaaacctccttcaggaccactgctctcaaatgtatgtgaaccaagggacagcgttccatcccaattaactacagcagagactaaagtaggaaggggaaacttgaataacattgaccttaataatgtttacaatgatatacagaatactgttgagaatcataagaagccttatcctcctgtggcttcagggatggggtttattgaccatgcctcatggttgcaatgtgattctctcaaatcaagtcctccacagacaagtagaaactcagattcaacctctacccaatcaccatctagttccagtggagaagctcaggtatactcttgatgtaatttaaatccatttcctcttttctgaataatttaataattctgctatttactttgtatcaaaatatttagattacttaaatgattgtatagatatctttactgataaagatactattttgccaaggtcatcatttgaagtccccttttcaggttctttgccttttcattagtgtgtaggtctactttttgtggctgactcagaatgacatgttatttgtttactgtttacagagtcgcacagatcgaattgtttttaaactctttggcaaggatccatctgattttccccttcttctccgatcacagattctcaactggttatcccacagtcccacggagatagagagctatataaggccaggttgtataatattaacgatatacctccgtcttgaaaaatctgcatgggaggagctctactgtaatctaggatcaagcttgagaaagcttcttgctgcatcaaatgattcattttggagaacaggatgggtatatgcaagggtgcagcacgctgtagctttcctgtataacggtcaggtagtcttagatgtgcccttgcgtctcaaaagcccacaacattgtatgatttcatgcattaatccacttgctgttcctgcaagtgctagtgctcagtttattgtgaaaggtttcaacctttcccaatctagcacaaggttgcactgtgcacttgaagggaagtatctggtacatgctagttgtcatgatttgataggtggagctgatgcacccattcagcatctaagcttctcttgtcaaataccaagtgtaactgggagggggtatactacagatggggatcatggtcttagcagctgttcctttccatttatagttgcagagcaagaagtttgttcggagatctgcaagctggaaaatgtgattgaggaagctgaaaccactgatgatatccagataaaaaaccaacatatggaagaaaagactcaagctttggatttcttgcaagaaatgggttggcttcttcatagaagtcatgtgaaatttaagctaggttccatggctcctttccatgatctcttccaattcaatcggttcgcttggcttgttgacttctccatggaccatggttggtgtgctgtgatgaagaaactcttggacattatatttgagggtggtgttgatgcaggagagcatgcctccattgagcttgcattgttgaacatgggtcttctacacagagctgtaaagagaaactgtaggcctatggtagaactactgttaagatttgttccagttaaaacctcagatggtgcagacagtgaaatgaagcaagttgccgaagcccctgacagattcttatttagacctgatactgtcgggccagctgggttgactcctcttcatgttgcagcaagtatgagtggctcagagaatgtgttggatgcattaaccaatgatccacgaatggtgggaattgaagcatggaaaagtgcccgggacagtacaggtttgacccctaacgaccatgcttgccttaggggctattactcttacattcaactagtccagaacaagaccaacaaaaaaggtgaaagacaacatttggttgatatccctggaactgttgtagatagtaacacaacgcagaagcaatcagatggaaataggacatgtagagttccaagcttaaagactgagaagattgaaaccacagcaatgccccgtcaatgtagggcatgccagcagaaggtggcttatggtggcatgaaaacagcaatggtttataggccagtcatgctctccatggtgaccatagcagttgtgtgtgtctgtgtagctttgctcttcaaaagctcacctagagtttattatgtcttccagcccttcaactgggaatcattagagtatggggcaatgtaatgttgtatatcaggtgttttctgctgtaagcttccaccttttcttaatatattattttagaaactgggtaagtcttagattttgggtttagagtatagacatgttatacatccatagtaatagtagctgtcatcaatatatatggggaaaacccgaggttgacacttcacctgttcagaacagaatcttgattatgaaacctgtgaacctgttaaatatggggtcaatgctattaggccattatatatgtgataatagggataacgccataacagttttaagcaatttgaggaaattgccttgtattaattaatcaataaatacaagatatttacggttcagttt

SEQ ID NO: 86868 - DNA, 139 bp, Glycine max
  Clone ID: PAT_MRT3847_49452C.1
atacggtccaaaaccaaatattgaacgactcgtcgtaaagaagcacacctttccctttcccttcatttcatcgtattcgtgttcgcagtgtctaaactaacccaatgctctctcgctctctcacagctcgtcacatact

SEQ ID NO: 86869 - DNA, 1195 bp, Glycine max
  Clone ID: PAT_MRT3847_49453C.1
cccacgcgtccgttttaggatattatccatccaagactctcgctctcacagggactccatgaatgtatatttcgcactataatattagaccataaaataaacaaaataatgtggaagtttgggctaaggttgggccgagcccagttgaaattcaaattgagaagtgagcgtaatcaaagggtggatatagctgcgttaggttaacgcgttcattcaaaatacggaacttgaaaccctcccaatataaaccctcgcttccttgtgtactctctcactttccattctcttcaaacctaacgcagcatcgctattctcttcattccatggctttgcccaaccagcaaaccgtggattaccctagtttcaaactcgttatcgtcggcgatggtggcacaggaaagacaacctttgtgaaaaggcatctcaccggagaattcgagaagaaatatgagccaaccatcggtgtggaggttcacccattggattttttcacaaactgtggaaagattcgattttactgctgggatactgctggacaggagaaatttggtggcctcagagatggatactatatccatggacaatgtgctattatcatgtttgatgttactgcccggctaacatacaaaaatgttcccacctggcaccgtgatctttgcagggtctgtgagaacatcccaattgttctttgcggtaacaaggttgatgtcaagaacaggcaagttaaggcaaagcaggttacattccacaggaagaagaatttgcagtactatgagatttcagctaagagcaactacaactttgaaaagccattcttatatttggccaggaaacttgcaggtgatcctaacttgcacttcgtagaatctcctgcattggctccaccagaagttcaaattgatttagctgcacagcaacagcacgaggctgagcttcttgcagctgctagtcagccccttcctgacgatgatgatgaatcttttgagtagagggcttgagtgtttgtggactgtcttcctgagtgttggtatttgtatgctaccgtatgtgctgttgggggttgtagtgttgacatttttggatgtgaattcgaggatctgaatcaattatgatcagatttgttgcttaagtttaaaatctcattttactatatatccatgaacgttaaaaagatgagaggattggttttttcaac

SEQ ID NO: 86870 - DNA, 809 bp, Glycine max
  unsure (1)..(809): unsure at all n locations
  Clone ID: PAT_MRT3847_49454C.1
cccgcgtccgaaaattttataaccctttcatttcgtttcgttccactatcactttcttttcttcaccgttcgctcttcctctcccagacaaacacatggtaatgctattgatctctctctgtttttcgattttctctccacattcatttcattcttttgttttcgtcgcaggctttgcccaatcagcaaaccgtcgattaccccagcttcaagctcgtcatcgtcggtgacggtggcacaggaaagacaaccttcgtgaaaaggcatctcactggtgaattcgagaagaaatatgaaccgaccattggtgtggaggttcatccgttggattttttcactaactgcggaaagattcgattctattgttgggatactgctgggcaagagaagtttggcggcctcagagatggatattatatccatgggcaatgtgcgattatcatgtttgatgttactgcccgtctaacatacaagaatgtccctacctggcaccgtgatctttgcaggttcgtaaatcaagtcttcaaaacctgtttttcagtttgatctctaattattttgcaccaagttccttacatcagattatggagattttctgcccaactgatttttcaggggtctgtgaaaacatcccaattgttctttgcggtaacaagggttgatgtcaagaacaggcaagtgaaggcaaagcangttactttccacaggaagaagaatttgcagtactacgagatatctgctaagaagcaactacattttgaaagccattttttgtacttggccaggaaactttgcagcgatactaactt

SEQ ID NO: 86871 - DNA, 894 bp, Glycine max
  Clone ID: PAT_MRT3847_49455C.1
ggtgggacaggacaatcaaggtgtggaggatttcagactccaaatgcttggaatcaatccacgcccacgacgacgcggtgaacgccgtcgtgtgcggggacgggggcgtgatgttttccggctcggcggacggcaccgtcaaggtgtggcggcgggagccgcgagggaaaggcctgaagcacgccccggtgaagactctgctgaagcaggagtgcgcggtgacggcgctggcgatggacgcggcgggggggtcgatggtgtactgcggcgcctccgacggactggtgaacttttgggaaagcgacaagaattacgcgcacggtggggttttgaagggccacaagctcgcggtgctgtgcctccccgcagcggggacgttagtgttcagcggttccgcggataagaccatatgcgtgtggaaacgcgagggtttgattcacacgtgcatgtcggttctcccgggccccgacggtccggtgaagtgcctccccgtggaggaggaccgcaaagcccccgcgaaaggtgaccgggaacggctttggagtttgtacagtgggagtttggataagtcggtgaagatttggagtgtttccgaatccatgaataatgataataataatacccatagtaatgatccggtgaggcccccccgcatggcatttgatgcggactcgttgccttctgtatcagatagtagtttctcttcgggcagggcccatgggaggaactgagaatgggccccgtgtctttattagatgattgagcctttgggttttttttttttttttttgtgattgattgattgattgtgagagattgtggtcgaagatgtttatgaaatttgatgtaatataatgtaatttgtgtatgaatgaacggatgaagtagtttaag

SEQ ID NO: 86872 - DNA, 693 bp, Glycine max
  unsure (1)..(693): unsure at all n locations
  Clone ID: PAT_MRT3847_49456C.1
cgtttcgttcccactatcactttcttttcttcaccgttcgctcttcctctcccagacaaacacatggtaatgctattgatctctctctgtttttcgattttctctccacattcatttcattcttttgttttcgtcgcaggctttgcccaatcagcaaaccgtcgattaccccagcttcaagctcgtcatcgtcggtgacggtggcacaggaaagacaaccttcgtgaaaaggcatctcactggtgaattcgagaagaaatatgaaccgaccattggtgtggaggttcatccgttggattttttcactaactgcggaaagattcgattctattgttgggatactgctgggcaagagaagtttggcggcctcagagatggatattatatccatgggcaatgtgcgattatcatgtttgatgttactgcccgtctaacatacaagaatgtccctacctggcaccgtgatctttgcagggtctgtgaaaacatcccaattgttctttgcggtaacaaggttgatgtcaagaacagngcagtgaaggcaaagcatgttactttccacaggaaagagaatttgcagtactacgagatatctgctaagagcaactacaattttgaaagccatttttgtacttggnccaggaacttgcaggcgatactaacttgcactttgtagaatctcctgcattggct

SEQ ID NO: 86873 - DNA, 618 bp, Glycine max
  Clone ID: PAT_MRT3847_49457C.1
tcttaaggggaatacaccatcatctacaacgggtcgaatccacgcagttctactctacgctctaaaccctctctctctctctctctcgatctatcatggctttgcccaatcagcaaaccgtggattaccctagtttcaaactcgtcatcgtcggtgacggcggtacaggaaagacaacgttcgtgaaaaggcatcttaccggtgaattcgagaaaaaatacgaaccgaccattggagtggaggttcacccattggatttcttcacaaactgcggaaagattcgcttctactgttgggatactgctggacaagagaagtttggtggcctcagagatggatattatatccatgggcaatgtgcgattataatgtttgatgttactgcccgtctaacatacaaaaatgtccctacctggcaccgggatctttgccggttcgtaaatcaagtcctttcatctgataatttagctccaaggtttttacatcagatgatggacattttctgctcaactgatttttcagggtctgtgaaaacatcccaattgttctttgtggtaacaaggttgatgtcaagaacaggcaagtgaaggcaaagcaggttaccttccacaggaagaa

SEQ ID NO: 86874 - DNA, 865 bp, Glycine max
  Clone ID: PAT_MRT3847_49458C.1
agtcctactctccgctctaaattctctgtctctctctctctctctcgatcaatcatgggctttgcccaatcagcaaaccgtcgattaccctagtttcaaactcgtcatcgtcggtgacggtggtacaggaaagacaacgttcgtgaaaaggcatcttaccggtgaatttgagaagaaatacgaaccgaccattggagtggaggttcacccattggatttcttcacaaactgtggaaagattcgcttctactgttgggatactgccggacaagagaagtttggtggcctcagggatggatattatatccatgggcaatgcgccattatcatgtttgatgttactgcccgactaacttacaaaaatgtccctacctggcatcgggatctttgccggttcataaatctgtttaacagtttcatcactgattatttatctgcaagttgtttacatcggatgatggacattttctgtataactgatttttcagggtctgtgagaacatcccaattgttctttgcggtaacaaggttgatgtgaagaacaggcaagtgaaggcaaagcaggttactttccacaggaagaagaatttacagtactatgagatttcagctaaaagcaactacaattttgagaagcctttcctgtatttggccagaaaacttgcaggtgatcctaacttgcactttgtggagtctccagcattggctccaccagaagttctaattgatttagctgcacagcaacaacatgaggccgagcttcttgcagctgctagtcagccccttcctgacgatgatgatgaatcttttgagtaaaattatgccttttgagtcgtgctactgcttatgctacagtatgtatttt

SEQ ID NO: 86875 - DNA, 535 bp, Glycine max
  Clone ID: PAT_MRT3847_49459C.1
cccgggaggaacccaccgtttaatgtaagggcccaacttttcggacgggggggcgcaccgggaaattccgaaccgggcccggggggggtcccagttttccctaggggggggcgaataaaaccggggggaaaacagggccaaagcttttcccggggagaaaggggttcccaataaaaaacccaacaaaaataaaagccggagacataaagggaaaagccgggggggccaaaggggggggccaacccacattaatgggggggcccccacgcgccgttttccagggggaaaaccggtcgccccgggggttttaataaaccccccaacccccggggaaagggggtttgctttttgggccccgggggggttttttttttaacaaggggaaagggtgaaatgtgtttgcccttcaacgcccggcccggagaagagtaaaagagggggtccaccctgtttggccccaagagggaaaaatccggttgggggggggaaaagggggggaaaaacacgagctggttttgggggccccattaccccc

SEQ ID NO: 86876 - DNA, 721 bp, Glycine max
  Clone ID: PAT_MRT3847_4945C.1
caggaacaagccctccaggaaatgggcctgcacctcagccagtccaagctgaagatggaagatataaaagaagtgaaccaggcactgaagggccacgcctggctgaaagatgaccaagcgacacactgtaggcagtgtgagaaggagttctccatttcccggagaaagcaccactgccggaactgtggccacatcttctgcaacacctgctccagcaacgagctggccctgccctcctaccccaagccggtgcgagtgtgcgacagctgccacaccctgctcctgcatcgctgctcctccacggcctcctgaacgtccgtcctcaagagcacagcctcacggacagtgccaaaccctgtgggtctccaggggctcgggaaatgtgttctttcccaagagtatcaaaggaaagaatcaaatttcttgcccggacactggcactccaaaagacagagtgccggaaccggcagctctcacctttctgtgacttgttcggaattaactcctctggatggaaacttccatcttacttggttacatcacggctctggttcagatacaacttcatgattttgctactatcatttttcacttttcaaagaatttaacctattttacagcagttcagttctgctagtgagtagttctcctctcctaccttccttgtaaaaacctgattcatgcacagcgtttgacacacatggagtctgtcagtgtgcct

SEQ ID NO: 86877 - DNA, 1354 bp, Glycine max
  unsure (1)..(1354): unsure at all n locations
  Clone ID: PAT_MRT3847_49460C.1
ttttctcccactctcggttcatttttctttctcccttcttccttcacatccattgctctctcttctctcacccaacaaaaactcattccttttaagcacaatagaagaagaagaacaacaacaacaacagcagcatatctcagatatcatcatggccgttgaagcgcgccatctcaatctcttcccttctcaactcatcaccaaccggcaagtgatggattctggtgaggcgaatatgatgaacatgtacaacaacagcactccgattggtggttactcttcgtttctgccgttatccggcgccgtcacggagacggcgcttccgtcctcggttttcaaccattctctcgccaacgccgtcaaatccgaaagcggcgttacctacaacaacaacaacaacaacaacaacgtttctgtttctcccatgtcgagaaagcgttcccgagataataacaacaattacggttacaacaacaacaacaacgattcattttcgtttctcggccaagacgtttctctccagatccagcagcagcaactcgacatcgagcatttaatcatgcaacgcatggagaaggtgagaatggagattgatgagaagaggaagaggcaagcgaggaggatcattgaagcgattgaggttggagtgatgaagaagctgaagacgaaggaagaggagatagagaaaatcggaaaactgaattgggcgttggaagagaaagtgaagcatctctgcatggagaatcaggtgtggcgtaacatagcggaaaccaacgaagccacagcgaatgctctgcggtgtaatttagagcaggttctcgcgcagcgcggcggaatggcggcggaggaagacgtcggcggaggcgccaccgtgtgcggcggcgcggagatggacgacgccgagtcctgctgcgggagcaccgaggaggacggtttagaaaaggaaacggggggttggcgcacgttagcggggtgcgcaggggtgaaggataaggagggtggtggtaatgggaggttgtgcaggaactgtaggaaggaagagtcttgtgtgctgattttgccgtgccgtcatttgtgcttgtgtactgtgtgtgggtcttcactccacatttgtcccatttgtaaatcctataagactgctagtgtgcatgttaacatgtcctaatttttggataagataggactctaggaccttaatgagaatcatctctttgtctcaactcaatctcataaaaggaaaaaatatatcaaattttcataaattgacaaattgttaaaaaaaaaatctccaattgaaaaatatatcaattttttataaattggcagatgataaaaaaaaaaaaaaagnnnnntt

SEQ ID NO: 86878 - DNA, 234 bp, Glycine max
  Clone ID: PAT_MRT3847_49461C.1
gaactttaagaggtgacaatataattaataccattgtcgcatccaacagttgtgttgcgttcaataagtacaactagagattacggatctcagatgatggcattaaaaaaaattgcatttagagtaaaaataacagattgtactgtacttgactagtatttgatactgtgctaaatgtgatctatgacgctaaaattatacattaagcaccttcatatagaatatatagacctt

SEQ ID NO: 86879 - DNA, 185 bp, Glycine max
  unsure (1)..(185): unsure at all n locations
  Clone ID: PAT_MRT3847_49462C.1
gnntggatcaaattaaaacatacattaataactcattggacttgtccatcgattgtgagactaccaatattgcccgcagattattgagcaaacattatttggttcaaaactaatcaagcgctttaccactttcaaagcataaggaattctcaacacagaccgacctttaattaaatagcatgcat

SEQ ID NO: 86880 - DNA, 278 bp, Glycine max
  Clone ID: PAT_MRT3847_49463C.1
caaaaatcaaattcacagtcttctgtatctctggatagcttatttgatgataaggatcctccagagatttccaatgtcaatcaagcctaggaggagcctgatgaacttagtggagtcgttgatgatacaagaggttccttactgatgatgaatttctctgtggaggaagttgaatttgcaatccacaagcttggtgatggagcatcaattcctgagcctggggacttcatctgtgctttgcagattgctaaaaaactgaaaaaggagccagatgatat

SEQ ID NO: 86881 - DNA, 398 bp, Glycine max
  Clone ID: PAT_MRT3847_49464C.1
aagagatgcatatatatgactctggtgttatttttgattttgcaaattaaattacacaatcacagccgtacattacacatgagttgggcctcttccaacttaaaagcagaggataacattggcccatgacgcgacacatgcaccacctaataatcataattttacatctttacatacaaaattacaaagacttttaatttttaaaaggagaaaaggaattaaccggttatttttatggaattaaaccaaaaaccacaaacattgggttgaattttgggggtggtggtggtcccaacttgatttaacatgaaccggttgattggattacttggacttgaagggaatgggccttaataccaactggtggttaaagggtttaagaactttaccgatgaatg

SEQ ID NO: 86882 - DNA, 416 bp, Glycine max
  Clone ID: PAT_MRT3847_49465C.1
gcaaaattagcaatgtcgaatcttttctttaaccctttcttttccctaatgtacatacaaagaataaatcttcttcaaaactctccttgcatattgtgccacttaagattttagagcttaagattttagtgagaagagcttgagtggatcacactcgagctgagactagtcagcaagtacatggaaatgaaagggtgcagactgcagcaccctgaccacaaatggctacagtaggaaaaagagaaaaaggaaagaaaaacatagaaaaatacatataaaaacacattaatataacagtgttttatctactttcagcccatgtgtatcatgcttacaaacccttaatttactttatgtgaacttctttctttggccatgatttattaaacctgaaatctaatcatgatgatattttg

SEQ ID NO: 86883 - DNA, 864 bp, Glycine max
  Clone ID: PAT_MRT3847_49466C.1
atggagaatacatgcctagctagtaaactcttacattcttcttgaaaggttatacggaaaataattattatttaattgatagtaatgtaaaacttttacacttaattaatattagttcataaaagaaaacaaaaaaaatatttgtaaccaatatgtttccttttacaacgtgattactctcattcctcccttacaaatatctctttctcgtcacacgaaccacccttcatggtatatttctgccaccccaattcagctcttcgatcaaacaatgaaggatacctctgccggggacaccgtggagaacgctgctggcgacggcatcaaggcatggagttctggtagccacctttgggtgagaagggtgatgcatgtaaccatgttccttgctgggcttgctgtgttgtggatgtttctctataactcagcctctccctttgaattccctacctcctcagattactttagtgctgagtcatcaaaggctgattatgatccaaagctagagagtgttctggcaaatgcatctatgaaggataagacagtgataatcacaattttaaatgatgcatgggcagagccaggttccatgtttgacctctttcttgagagctttcgcctagggaatgagacacaatggcttttaaatcacttggtggcaataacttgggaccaaaagacatatgctcgttgccttgctatgcacaaacattgttaccaacttggaactaaaggtggcaatttcacaggtgaagtatttttcatggccccaaactacctacaaatgatgtggagaagaactgagttccttggttctgtccttgagatgggatacaactttgtgttcacggatactgatataat

SEQ ID NO: 86884 - DNA, 268 bp, Glycine max
  unsure (1)..(268): unsure at all n locations
  Clone ID: PAT_MRT3847_49467C.1
nataaatcgacgaaaccgacgcagccggaccaacaggaaaacaaagggagggcggcgcaaagaagacactgcatcagctacaaggagaaacggacgggccccgagcagaacgagggaacaacacaaacggctgcaacaaacctgcccgaaatactggacccagcctcaacgaggcccggcagacaagagcggcacactgccgcaccaaacccagacgcgcgaggccggcaagaaatatcggaaccctagctgcaagagaaacccatag

SEQ ID NO: 86885 - DNA, 205 bp, Glycine max
  Clone ID: PAT_MRT3847_49468C.1
tgacttgtattgagctagtgctcataggatccgaaactcgtggatcggacactgattattccttccctcaatcataatggatatagtttcaaatcttctcagtaatctgtcatgggaataataacatattgggggtaacatgactacaaccgataaacacatctaggctcgtgcagtttgttagcgaagatgtcaggaatcatat

SEQ ID NO: 86886 - DNA, 337 bp, Glycine max
  Clone ID: PAT_MRT3847_49469C.1
ggtttcctgtcatcactgtatgacgtcctccttctttggggggggggggggggggttagagtgagggggaaagagagaagcagtagcaaccagcaaaggacgcgagatgaagggaggatgggaggtagggtacgctcgcccgggaatagatgacgcagtagagagaatgctgcttggtggcctatgtacagcgttataacgttagagcggtgcgaagtgcggcttggatgggcgcaatcgtagtacgcaccactacggtggtgtaggattggtaaccattaaaccacaggcaccatagttgccaaaagtacgataacccgtataagcgtgatagcgc

SEQ ID NO: 86887 - DNA, 135 bp, Glycine max
  unsure (1)..(135): unsure at all n locations
  Clone ID: PAT_MRT3847_4946C.1
tcgaggtcanaatgtactttcatcctccatgactaatgtggataaattttaccccaatgcctaatacaaggatgcattttnactttggatttgcatcttaatcaccaaaaacgtttatttgcacaattcaagaga

SEQ ID NO: 86888 - DNA, 104 bp, Glycine max
  Clone ID: PAT_MRT3847_49470C.1
ggggttgggctcgaggtcactcactgggagcgttgttgtgagtgagggagagggttcctgggctgagcgcgaagttgagacgtcttgagtctgtgcgtaggatt

SEQ ID NO: 86889 - DNA, 542 bp, Glycine max
  Clone ID: PAT_MRT3847_49471C.1
ggctcgaggttagttttgaggaaataatttgttatgaaataaatgatttacattgctcagaggcctcaagcaggatatctctttgcttggaagcttacactgatgttccagcttctcccacccttctgttcctctacaaactatggttaagtatttagttgtttgaactatggtgttttcctttgctatacctttcctttaaaaatgtgagatttaaaatctcagacactttgaatttgactgtattgtatcattgacgttgatcatcacaattaatccttggaaacggaaagtgctatcacatacttgttgcaacaaataaattataaaaaccacaataaaaaaaatcttctaatgagatttccaaaaatggaaaactgggagcagttctactttctaggtgctacctactttcaatttacagttcctcttgctcatattacttgatagttgattccacccacttctttgctaatcctggtagggcaatttggacttggattcttctgggtgtgtttcttgcaaaccccttttctattttt

SEQ ID NO: 86890 - DNA, 285 bp, Glycine max
  unsure (1)..(285): unsure at all n locations
  Clone ID: PAT_MRT3847_49472C.1
ggaagtcggggctgagcgacgggtggaactacaacacggatctcaccggcggntantacgacgcnggcgacaacgtcaaattcgggtttccgatggcctttaccaccacaatgcttgcgtggagcgtgctcgaattcggtgacgtcatgcctcccaatgagctcaggaacgccctcgtcgcaattcgttggggcaaccgattatctcctcaagactgtttctcagcccatcgggattttcgttcaggtgggtgatccaaactcagaccatgaatgttgggagaga

SEQ ID NO: 86891 - DNA, 211 bp, Glycine max
  unsure (1)..(211): unsure at all n locations
  Clone ID: PAT_MRT3847_49473C.1
gataaaattgaatttctgtcattaactacactttcctttagtaattctttaatttctcaanaaatatagtgtgttttttctttgagcagtgatggaccacttatatatttaatttttattacacaataccctcaccatgctatctcattactctttcaagttccttataaaactgctttaatattaaatatgtttttctacatcaacaata

SEQ ID NO: 86892 - DNA, 412 bp, Glycine max
  Clone ID: PAT_MRT3847_49474C.1
gaattggagaagggtcatatttctttcattatcattacaagcttagcaaaacatgagcaacatatttaaaggctctcattcgagcaaccagtttaacaaatcaaacatacccaaaaatgagggacgagtggacttgtgacttgctgagtccttcatcccttaaatcgaattcctttggtcagggtggagtgggtgtatgaatgcagaattcatttgccaaaccttaactgacgcagtcacagaggcctcggtggcattattaaataaaaacaatctagcagctccatagattgccttggttggataaactcgagatgttacacacgttcttccaccttgagcaaaacttttcactatagaatggtccaccagtatccttacagacaatttttcgtcttttagtactgggact

SEQ ID NO: 86893 - DNA, 589 bp, Glycine max
  Clone ID: PAT_MRT3847_49475C.1
ctccaacaacattttttatctcaatttttattattgggatttaggagagagagcacaggaccacaaagttagacaggaaaggaccactagctagtggcgatggagtttgaaatttaacataaacgtaccagtactatagttgagtcaatatatgtcataggaataatttcatactaaaaacattgcacaaacattttacttcttccgtctcaaaataatatttgttttaaattgttttatacatataaaaaatacctgcctggcatgttttggcaacgtacatggccatggcgctagcttctaattgatgatgagtatagtctaattccatttgtggtcttcaaacatgacctaattgatgatgagtatactgccagtgacttattgtaacgttgctcctcctttcattccaaaatcaatgatgtttaatattcttttagacagactgagaacataaatattccaatagaattactatttaactgggaataattttaccaaaatatctttattttttttcttaatttcaataaatatattattaagtcttctaagagaacattatttatcatatgataaaattagaata

SEQ ID NO: 86894 - DNA, 531 bp, Glycine max
  Clone ID: PAT_MRT3847_49476C.1
cgtacgctcggaattcggctcgagctatgccggagattttagacggtgcaattcggcgagccgttgtcatcggaaacggcttcgccggcgctgagaatcagtgcattggtttggtccgtgctctcggtttctccaaccgccactccttatatcgcgtgacgaggcctcgaggaggaatcaatcggtggcttaaatggcttccggtttctatccacaaaaggttagactccgttatcagaatgatctgtggcaaatcgcgttttcaaacgcctcataaaatcggcatttctaacgtgttggatgctgatgctcaccacattgccaccatggtccgtgaaacgtttcataaggatggacccttgttggtgattgcatctgggcgagacaccatttctgttgccagctccattaaacggttagctccagaaaatgtttttcttgttcagatacagcatccaagatttcaactgaataggtttgatcttgtgattactccgcgtcatgattattttccgctgactcctcatgccc

SEQ ID NO: 86895 - DNA, 415 bp, Glycine max
  Clone ID: PAT_MRT3847_49477C.1
ggcctgcgcgcgcgtgcgtcgtatccgaacgctggggcggggcaggcgaggcggtcgcttcgagcgcgctagtcacctccctgaagggagtgacggcggttgggtgcccgcggccacttttgcctttccggggagatgtcctttgcttctcagatgtgaatgcactttaagtttgttattcaacagtgaaaatgagtcatacagaggttaaattaaaaataccttttggaaataaattactagatgctgtttgtttggtacctaacaagagcttaacatatggaataattcttacacatggagcatcaggagatatgaatcttgctcattagatgtcactggcatgccatcttgcatatcatgggtttttctgcctgagatttacctgtaaaggccttaatattgcacatagaat

SEQ ID NO: 86896 - DNA, 205 bp, Glycine max
  Clone ID: PAT_MRT3847_49478C.1
caaggtagcccagccgccctctgatcctaagaggagagtttgtatcaatgccaaggccagttttctcgtcgctacgttatggaacaaccaagtgcggtgctgggagataacaaggaatgggactgaggccaccagcactcccaacgcttggatggagtatgaactacctgtcgggagctcccctccgcaggatgaaggaccaaca

SEQ ID NO: 86897 - DNA, 349 bp, Glycine max
  Clone ID: PAT_MRT3847_49479C.1
aaggaaaaaccaagtcaagatttcaccgggcttttggagcctaaaattccaaattcaatttcaggggtaacgctttggataaaacaactcaacaaaatttacccgttaatctcaattttcaaccttttcagcaaaaaaaaacccttccttggggacagtcaatccctttttgggaaaaattttaatttgaccaaggggaaaggtttacaagagcatcccaaatgttttccattgcaggaaaccacatttgaacacttctccctgccacaagaaatgacaaacccccttttttaagccccccagggggcaatttttttaagatcagcaaccttctgggggattttataaa

SEQ ID NO: 86898 - DNA, 326 bp, Glycine max
  Clone ID: PAT_MRT3847_4947C.1
tttacgattgcggttggtcttccgaatgtagggccagattttgtatgataatatgctagggttgtgttcatagttgccttatgaggtctcatagaaggaaggagggacttaatcttgtatagggtatgcttcaaatatggagtcaaagaacaattgttggatgttaaattgtttaaagaacattgctgtgcggggctcttacatatgaccacagtattcttgagggaggagaggatgtgttctaatctgtaactcatcagacatatttgggaggatactggggggcttatgcttgacatatgaggtgaaacgctaagtttggatgg

SEQ ID NO: 86899 - DNA, 1415 bp, Glycine max
  Clone ID: PAT_MRT3847_49480C.1
ggaaagtttgttcgcgtctggtaagttatcattaaaggagaatgatggaacagatgatggaaaacaaatgaagacaagattagatatgccacaatcacgttttctgtatcttctccaatgttcaaaagagacagacaattatgcagcatttactgattatattaaaggattatctccgtcaactctggatatggagcttcgaatgtttcagatcattgatgatgatgatgatcagcaagaagcagagaagagacctgagttggtatccattgaatggcttctggattattttattcatgagctttcctgcagaaataattttgagtttctacaagctgtcatcaggctatttttgaagatccatggtgagacaattcgtcagcagtcatgcttacaagaaaaggcaaggaagcttctagatattcaatgcatggtatggcagagagtagataaattatttcaaagttcgaggtgtgtgattgcctttcttagtaattcccaaatttaggtgacaaaccttcaacttgcaaccctcgagtgatagcaaaggcaacttgtgaggtcatgtatttgtttaggacttctattcactggaatgatagaaaagtagggcagcaaatttgttaaaagctggtggataaggttttgtaataggctaaaatatgtttttcaatcttgtaaaattatcaaagtttggatttggtccctgcaaaattttgtctgtttttttgtccctgtaaaataattatgtgttacttactttttctgatcaaggcttcaatgctcaaaagagacagaccattatgcagcatttactgattatattaaaggattatctccgtcaagtctggatatggagcttcgaatgtttcagatcattgatgatgatgatcagcaagaagcagagaagagacctgagttggtatccattggatggcttctggattattttattcatgagctttccagcagaaataattttgagtttctacaagctgttatgaggctatttttgaagatccatggtgagacaattcggcagcagtcatgcttacaagaaaaggcaaggaagcttctagatattcaatgcatggtatggcagagagtagataaattatttcaaagttcgaggtgtgtgattgcctttcttagtaattcccaaatttaggtgacaaaccttcaacttgcaaccctcgagagatagcaaaggcaacttgtgaggtcatgtatttggtttggacttttcattggattgatagaaaagtagggtagcaaatttgttaaaagctggtggataaggttttgtattatcattgtcaagttttagggtcattgtaacaggaattcttgtaacgagattaaatggtatggtatactcatcatgctaaagcaatttttgtaacttatatttgtat

SEQ ID NO: 86900 - DNA, 604 bp, Glycine max
  Clone ID: PAT_MRT3847_49481C.1
attcggcacgaggggatgtgccatgtgtactatacttggactttaactgtgttggagtattcatgtttgtctcatgtccagtattggtgttaaagtccctgcctcatagggcattacttccccaatgaatcatagaaaaaatggtaaaactttgagattctggagttcatcttggacataaatattagaaacagatgaagttaatgtgggtggctggaatcggtaactaaatcttatggttgtttttgcattgccttatggtttcaatttttaatcgtaaaaagagtggtagattttgacctgttgaaaattataggtgctactattgctggtggtaagcttatcactttaaagcttcattgattagtgtggaacgagaatatgttttaacttttaagagagctaaagtaaattgcttgctttgatatccaaaggacaaaattaagttcgcaaagttcaatggatgtatctttccattggtttgacagaagaaaatttttaaagggaggaaaagcataccaggttaggtgacatgatggattcttcccaaacaaacaagcagacaaatatgtctttaaagaagattataaatgaaacattgctc

SEQ ID NO: 86901 - DNA, 371 bp, Glycine max
  Clone ID: PAT_MRT3847_49482C.1
aagtcctgacaattgagttaaatgggctttttctatatttcccgagcctaaaatcccggttctttatattaaataatcctctataaaaagctaacgaagttccctcgagtaactaccaactatcttaacaatggcacaacagagcatatgtcccaacctttttttggatcttggaaagcatctgatctaactttgaaccgctgagaaattttgtttcctactataaaaaaagaaaaggcctttacccaattcctaacaagtgattcttggattgaaattgcacttaactcatctctccaagatgaaaactcttgcggatcctacaaattttgatctttgtagcgctgtttcaatcttacaaaatttttttt

SEQ ID NO: 86902 - DNA, 485 bp, Glycine max
  Clone ID: PAT_MRT3847_49483C.1
cagaaccagcttcctctttcattttttccccccttttttctttgaactaacttattattaaatttcatattcaagattatcctgtactgggttctggttctagcaatcatttagtatatctactaaattgtcttctaagcaccaagtggcctgtcgcaatgttttatcttgaaccagagcatttccttgacacacgtgcacatccctgttcttaaggttcataggtaaaagactttctgtaaatgatcaaagcagttcccacaggtggagagagaatattgaaattcagtaaacatcctttagcatcacagatttggccgtactgctatatactttactagcaataaatttacttttatcatcttttatgatggtacgtgggtggttaacaagtatcattgattgagactggcatttgtttggtgtatattagaaaagagacattaagattgaatttcctatacgacaatgagtttgtttcaatg

SEQ ID NO: 86903 - DNA, 283 bp, Glycine max
  Clone ID: PAT_MRT3847_49484C.1
tttttcagcagaaattgtttctagccagaagcatccccttaataatatagaatactaaaatatacatatataaagaagcaattccctttgcatattgctatcctatgtcctgcgatataatcaagcttcagtaactcccttcatcaagagaagggcacacacaacaaaaaggaaactgctgacagagaagaaaatatttacatctctaaaacccttttttgccttctgatttgataaaagcctttattgcgtaggcaaggtctcgagccgccaccagccataa

SEQ ID NO: 86904 - DNA, 582 bp, Glycine max
  Clone ID: PAT_MRT3847_49485C.1
aattcggcaccaggcgccgcaggaatttttttttttttttttttttttttttttcgtggccaatgcttcataggtatgtttacagagttccactagctaagaagaactaaaactgcatctaggctaatctcaaatgcaaaaaaaagcaggactacactgcggctgataacaccgatcatgaaccaattgagctcaaactaaccatcctacttgatggaaatttaagtaatatataggccattcccatattgatttcaaacttgtttgatgaatataatcatagaagtaaatcttcaagaattcctgtcttacccatgtgacaagcatagtcccctcttccataaatgcttcatcactgggttttttcccagttaaaagctccagcaaaacaactccaaagctgtaaacatcccctttcagggttgctcttcctgtatcaaaatattcaggtgccaagtatccaaaagttccagccacaattgttgaaacatgaatggtatttggtgtgatgaacggtggttatccaagatacgaaactcgggcatccatattgtgatccaacagtataatacatgaccttat

SEQ ID NO: 86905 - DNA, 343 bp, Glycine max
  unsure (1)..(343): unsure at all n locations
  Clone ID: PAT_MRT3847_49486C.1
cgcgcgcttttttgtgtttgtggggggtgtttttttttntggggagctaagtgatataaatgggaagaatagcgtatctatcttgcaatggggatcaatgggagttactaattaggatccttggcgcaccagggtaatacattctgcgggggttcagttaaaggcaagaaacaaggggtggggagacaaggctgatatccttctaacaaaaattaatcaacctcctcggataagtgcacgtagcgtcacaaagtgagcatcggcgccccactggggcgtcaagaagccgcgcagcgtccaactgttggttgaggatttctatggggtttagaaacaaggggga

SEQ ID NO: 86906 - DNA, 419 bp, Glycine max
  Clone ID: PAT_MRT3847_49487C.1
ccaggtaggtttcccgtcatcactgtatgacgtcctccttctttggggggggggggggggggggggggggggggggggggggggggggggggggggggggggggggcctcgtgtaaaaaagggagaggtgtttaaaggggagggggggccgggggggattccttgggaggtttggaaaattaattgtggggtgccgagacacaccccaaagatattgccaggtatgcgacgcataaaacccttatagaatggccgaccgggggggcaatacataggcccagaaactaagcgttttcgattaggcggggatagggatgtacgccccgaggttgataccccttggggaaaaagttagtgatgcaataccctgaaataggggggcccggcggatttcccaattggagggtttttatttggga

SEQ ID NO: 86907 - DNA, 564 bp, Glycine max
  Clone ID: PAT_MRT3847_49488C.1
accctcccaagataggagagagaaagagactgagagtgtgtgcgtgagagagagtgagtctgttgtttgttcaacataagcttagactccaaaacctagtgctactgccactgccactgctacagacaaacatcttcttcactgtcactcaccaccaaccctctaaccatttctctctctctctctctcttcaagttttctgatgggttcatgcgaagccacaaatgtggttctctccaagattaaaaactttgatcctgaaaatgcttcaaaaatcatgggttaccttctcatgaacctggaagaatctgaacttattcgtgttgcttgtagtcccgacactgtgctacaaactctcgtactgagggttaagagccacttgggtctcactctctcgaccccttcgtctccttcgcaatttcctccttctccacttaaccccatagcaagactcactggtacttcctcgaacccattttcaagaggaggacccaccaatggttttgacttcactagaaacccggcttcaccttcctctcactctcatgcctggaacttcccaaa

SEQ ID NO: 86908 - DNA, 435 bp, Glycine max
  Clone ID: PAT_MRT3847_49489C.1
tttttttttttttttttttttttttttttttttttttttttttttttttttttttttttttggaaaaacacccctgaattccatatatgcaaaggccggggaaagtggattataaaaaaacttcaggggtcacacaatggctatggccaacatcagaccttccaacaaaaaaatcccggaatcttattggcggggtttttttttttttttttggggaaaattagcaggacctttttattaaacccacccccccagggcctaaaatttattttatccgagcgaataaacaattccctcggatagcaagggccccacaaccttcctgtatctccgaaatggggaccccaagaaacttgggggctcaggaccaaaaacaacccgcaaacccttgtatttaacaggaaacccctttatccctagaaaaaccttggggac

SEQ ID NO: 86909 - DNA, 475 bp, Glycine max
  unsure (1)..(475): unsure at all n locations
  Clone ID: PAT_MRT3847_4948C.1
tgacaaacaagatgcgttcatattttgcagtttgagctcatagtcaataacctatcgcatctgctttactctgggcaagaaaggttcggactcttcaccgtggagaacaaagtgattgttcttggcgcataacacgtaatgctgcaaaatgaacaccccatccaccataatgctcacgaatccgagcgaaaacttgacagggtcccctgtcatagccctccagtcgggtgtggctgtcggatcaagcacttgttgtccgatcgacaggaaccctcctgcattgtccaagagcacgttccaaaggggncacccgaccggcgacttgcgctggtagttgagcgcgagctgcggaagacacttcaccagcggggacatgagtttcacgttgctcagtaaatacacaagattgagcgcatcgatcactgagccttcggtattggccgagactgtgactgttagagtttaaagcactggc

SEQ ID NO: 86910 - DNA, 472 bp, Glycine max
  Clone ID: PAT_MRT3847_49490C.1
attaggcccccgcaccattactgctggtattggtaaaccttgtgcaactttgcaccgacaaagcccgcagactgtgcttttctcaagagaaattttacgcagatgtctaacgtgatgtgggtggctcctgaggacaaggccagcttatggtcacaacttcattctgtcacgtgcaataatctggaaatgcaagaagcttatcttgtcaatctcgcaaatgtgttacgagaattgcatctgcacactccagaggaagctcgcctactgagaaggaaagctctctctcgtattgaacggctgcaaaaagctgatgtgcctaccatagcacagattgaagagtcccattcgatgcagaggatgatgaatgctcccgactcaaatgataatattgttctactgctgagcattgatatgtagggttcacaaggagcaggtcaagctctttcaaacagattgcttttgctgataggct

SEQ ID NO: 86911 - DNA, 408 bp, Glycine max
  Clone ID: PAT_MRT3847_49491C.1
gccgggtccaaaaggacaacgaaaggggatcacaatttcatctgcctgtgttcaaaatccaaccacatccggatgcggtctcatcccattgcacgaactcacacattatccctaatctgcatacattcaattcctgaaacgtacatcaagccttctactgatagaccatccataggaagttctaattgtactgatgcccatattccaatcatcgactcttctaggaacgttcgctgctgaccgacgtgtctcagactcaattcttaagcagatctcataaccttacagcgagagtggctacgatcacggcactacccatgggagcacctctgattttatgcacaaggctagcgaaacttgtcgtcattgtttgcactttccccttgaagggacgcataattctgccaa

SEQ ID NO: 86912 - DNA, 453 bp, Glycine max
  Clone ID: PAT_MRT3847_49492C.1
acactttgaagtatgcaaaccgtgcacggaacatccaaaataagcctgttgtcaatagagatcccatgtccaacgagatgctaaaaatgcgacaacaacttgagtatctgcaagcggaactttgtgctcgttctggtggctctcctgaggaagttcaggtcctcaaggaaaggattgcttggcttgaagctgctaatgaggatcttcgatgtgaacttcatgaatatcgtagtagatgctctactgtagaacaatgcgaaaaggatgcatatgaaaatagcacatgtaatgtaaagactgatgggcacaagaggggcttacctatcacagaatctgattatccaatgagtgaaacaacaggggattcaagggaagatgaagaagtagaaaaagagtgggagggaaaggattagcaaaatagtatggaagagaattcatgaattgttctttatt

SEQ ID NO: 86913 - DNA, 243 bp, Glycine max
  Clone ID: PAT_MRT3847_49493C.1
ttttctctctccttctttctaataactctgtgtgttcgagattgaagaagatgatgcatgctggacccggaggcatggcccaacaagcgaaccaacaatacgcacagaacagcaacaaccctacatgatgatgctgccgcatcatcagcgccctcagatgtgggccacatcagcacaaccatagtcccaatcggtggctcctcggcaactcaccagcgccgatgaggcacgtatcctctggat

SEQ ID NO: 86914 - DNA, 403 bp, Glycine max
  Clone ID: PAT_MRT3847_49494C.1
ggaggagtgtttggttaaacccttgcattgcagttgttgccggaaatgaattctatggcggtgagacttgcgaagcatctccgactctctgcactgacctcattttcactcggtggtgtgccgagaagcggagcttcatggtactcgacctccctatctggaggtgaaaatgatcaccctttacctgataatgatgcacctaagaaggaagcattggatgaagagtttgatgattttcttggcgaaaagcctgagttacagctgcaaggtgtggatcccaagaagggttggggatttcgtggcgtgcacaaggcaattatttgtggaaaagttggccaagcccctgttcaaaagatactgaggaatggtagaaatataaccatctttacagttgggacagggg

SEQ ID NO: 86915 - DNA, 563 bp, Glycine max
  Clone ID: PAT_MRT3847_49495C.1
tacggctgcgagagacgacagaaggggtgagacaattagcttcttctcgctggactgctgctactcagtttgctatagttgctaccctttcttcattaagccatcaccttcaaaagccaagtagtgaagacaataaagatatccttgataaaacaaaggatgcaattataacacttcaagaagttctagtggggaagcatgatgaagacatagaagagacactgtataaataccatattcctacagatagatggtggtctaccctctgtaaagttattgaaggtcttgctctcttgaaggggctgcctctagacaacattcaacatctagaacttgattttgaagggagatcttttgactaacatacatcttgaggtgtagagaggagtttgcaattgcaattaaatctcagagggatcacaatataacaagattctttagaattttttccctctttgttacgccattttcatttgtgtatgttttaacactttctctcatgctaatagggttaccacatacactttctcttatgctaatagggttaccaagtactctgtatg

SEQ ID NO: 86916 - DNA, 574 bp, Glycine max
  Clone ID: PAT_MRT3847_49496C.1
aaatttccatagtcgtaacctctgcatcaaattgccaatgttgtctcaaacgcatgttctgtcttcgcgccctttcagcttcaacagattttcaatgcccacaaaaatggccgttatcacttcacgtgctccgttctccgttcgtgtcagtacctcaaccacgtcgacgccgctcgccggcgacacaattccggcgctggtaatgtcagaacagcagacacccaatttgcagtcgcgggtcgcggcagctccgtccattgcggtggccagaaatctagggttccggcccacccctgaattggggcttctctctcacttgttcgttctctccatggcttttggggcgtttttctcagtagcagtgttttccattccaaccttaattgcttttggaagattaggagcttcagtgaagaaattgtcaaaggttgtttcagaagaggtacctggaactttacattctctgaaactttctagcatggagctgaacgacttgacccaacaacttagtagtctcaggcataaaattgcgggcatttctaagggaaagcaggacagcagcactgccagatca

SEQ ID NO: 86917 - DNA, 855 bp, Glycine max
  Clone ID: PAT_MRT3847_49497C.1
gttttcttgcttattcttcttttctcctttctgatcactaccatggctagaaagaagctgaatcttacatacataaccaatgacccgaagaggaagacaacattgaagaaaagaaagaatggtttgatgaagaagatgaatgaaattagcactctttgtgggattgaatcatgtgctataatatatagtccaaatgatcctcagccagaggtttggccatctgactcaggagtccaaagggtgctttccaggttcatggaaatgtcagaagtgaaacaaagcagaaagatgttgaatcaggagaacttgttgaggcaaatgatcaacaaaggccaacagcagttgacaagacaaaggaatcaaaacaggaagaaagaaatgaccaatcttatgtttcaatacctgactgctgggaagatttttggcaaccctagcttggtggatttgaatgatctctcatggttgattgatcagaacctcaatgaaatagaaaagaagatcaccatgctccaaatccaagaagtgactccagtgatagaaaatggagaacaggaacacatgcatcatgttcaagggctagagagcaacatggacaccaagcaaaagaaacattgatccatggaatttatcaatggtggtattggggatgggatgctcccattggagatgttaaatgtccaaaatagtccttggcctaaagcatctctcctttaaaaaagtatgttcttttaagtgtttcagttgtctttcccatttaaatcagtgatgcttaattttattgtctttctttgaaagtgtctgtgaatacaatagccgtatgtcatagtttggaaaatagtcaaatcttcttgtttt

SEQ ID NO: 86918 - DNA, 434 bp, Glycine max
  Clone ID: PAT_MRT3847_49498C.1
aaaaaaaagcgctttaaccattattccctggattccacatggtttctaagggataccccattttcaaagattgcttataaatacttggctggtttattaatattacaccaaccttaagggggcattttttggggtaattttttttagcctaatttattccccaaaacccttaattttaagccttttttttccaaatttttaacaagaatttaatttttttcccccttatttttagaaaaaggtcttaataaagggggaaatttttttggatggctggggtaaaaaggttttattagaatcaaagggggtttttaaataaacctttttttttaattcattttttatttatggttaacacttttaatttttttttaaaaggggcttaacaggttggttaggcattaccacaggaactaacggttttttgggcttta

SEQ ID NO: 86919 - DNA, 433 bp, Glycine max
  Clone ID: PAT_MRT3847_49499C.1
ggctcgagggtctttttgcctgatgccccgctgcagcgtgatgcccactaatcccaactgtgctgttgccaccatcaaaaccacgacgaccatgcacgtggtagcttggagccctgctgatttcaagggtaggatgaactaccagacgcctaccgtggacgctgctggcgaccacacccttgtgctgagggcagacactatgattccaagactccaccaccaccattgaagacttagctcgccatgatcacaaagtggatcttatgtgtccctagcgaccttctgtacgctggacccctagtgacggtatggaacctggtgaaccaaggctggcccaacttgaccttgctgacgttgcgatggataatgactatattggtgctgaagctgataagggccatgaacaagatgcagactgctatgatctacttca

SEQ ID NO: 86920 - DNA, 495 bp, Glycine max
  Clone ID: PAT_MRT3847_4949C.1
tctcgagccgaatcggctcgagacggctgcgagaagacgacagaagggcagtatagtttacaagtcatatctctcatgtttgtaggccattgggatgagttgcttctggctagtgcttctttggcaacatcatttgtcaatgctactggtttcaacgtgttggtaagttgacactattttctaattttatgttatagttttcccatttccagaatgtgagatgagatctatccatgcttgcatgtatatatatgcatggaagtgttctttctctgccaccatttttgtttatagtatataccaatacatgcaaaacttgcatcgctcttgaagttgcatttttctcaaacatgacaaatgtaaaactagtataactttttctaattaagtacaaatttgattattaacgaagaggggaaatgcacaggacaagtttttaatacaaacacctctagtttgttttcattaagggtcaaagtgtcaagtatcatttga

SEQ ID NO: 86921 - DNA, 270 bp, Glycine max
  Clone ID: PAT_MRT3847_494C.1
gcaataaggaaccttccaaaaggggatattatatcaaaaacgggattgaaacatgcaacaattaacctaaatccctatggtgatcactcacacgcgacaacaaattactatgaactgtataactagattcactctaatacacctggacgctcgcataaatgaaaggatacagtgtccctccaagactgctaatatggcagacagtgcttgacagaagcctaagaacacgcgggccaacaagggcataatcgctcaaggcttgatcagaac

SEQ ID NO: 86922 - DNA, 435 bp, Glycine max
  Clone ID: PAT_MRT3847_49500C.1
acaaaaacaagtttataattgatattttgattgaattatagagtttaattgatcagaaataccttttttaggtcctatgtcatgatacatactagttctatcagcagcattgagggagcaaaaaattatgaacctgtgctctattttagttacaaaagactcacggaaacatactagttctatcagtcctaggtcatgatacaaaatttctacctagttataaataagctacttagtatgcagtttcaaaaggtagagccaattggcctctaaattcaatgccttggagtgctgatagtgaacgcacgtcccaaactatcaactggagaagagtgtggtttatcaaaaaattcactttccaatgtatgttgaaatccaatcctactcttacataggattggtgttcaatgtgacagaacagcgtaaaatgatggg

SEQ ID NO: 86923 - DNA, 711 bp, Glycine max
  Clone ID: PAT_MRT3847_49501C.1
gatcagcaaaaatagatatgtatatatttatatgaatatgtgaagtaccagaggtactcagtacaaaagaagagaagccataaaaatggttccgtgtacagacaaacaagtctgaaaaggaaccatattatgactcaagatgaaatatacatctgctggaaatcctaattatgctacccgctgctactgtaagaaactttgtctaaggttacttgaccaatggttaaagtggattgaaaagtctttctccacactttttttttttatcagcaaaagtattatatatatatataatatatggaagtaccagaggtactaaaactttgccactgttatctatggtttcccattttcccacccattttttgggagaacattgcgattccccaagcaaggttttagcacagtttttgcctttattcattttcaagaacatgcctggagcatgaataagagatgaaatcaaacatattatcaattaatagccatttttcccagctcaggcaaggagaccatgttccttttggtccatttcaagtcttattagtttacgcatattgggaagatggatggatggctaatgggatccctttaaaggcaaagtatccctagactatacctgaacttgaaacaacaaaagcaatacattctgcagaatcctagactatacctgaacttgaaacaacaaaagcaatacattctgcagatggg

SEQ ID NO: 86924 - DNA, 178 bp, Glycine max
  unsure (1)..(178): unsure at all n locations
  Clone ID: PAT_MRT3847_49502C.1
ttctctcacctgaaaatgtcttgctgctttggtttctgtccttgcggaagctcctacaagggcaacgtcttctttttaaactgcgagatgtacccacacttgatctacacctagtcaaccaccacctanacctttctcatggtactctcagttaatgctcaattctagagtgctgaaa

SEQ ID NO: 86925 - DNA, 344 bp, Glycine max
  Clone ID: PAT_MRT3847_49503C.1
gatgatctgaaatgtctttaaaagaaagtaaagataaaaaaaaaaaagtaaaataattacaaaataaagagtttcagaaatcaaaagatccggacttgttaaaaatattaacgtctgataaccataattaaaaaaagaaagaaagaaaatttgcttcacaacacttttttcaccctctttatatttccccgaaaaaaatgtcaaattcttaaacatttttatcgcgaatgtaaaattaaacatgaaaataaaagtgatcaaaaattactgtatggctcaagaccattaagtggccaatctttttatagcacgttaatatttcttaactttaaaaaaaaattata

SEQ ID NO: 86926 - DNA, 2546 bp, Glycine max
  Clone ID: PAT_MRT3847_49504C.1
cttccctccaaaccttgtgattcccttcgaatcaaagcaaaacttagcagttcgattcttggtcaccctctgagacacaacctcaccttcctgacatatccttcacaccaatcttcccttcctcctcttctatatacacttcatcatctctatcccctcttcatattttttctattcttaacctttctctacagtatgtggttgctgaaaggatcatgttgttgaagctttttgtgatatatgtctgattatgttgctaggagttaaagctggtgcagacccagaaaagatcttccaatcaaggtactagttccatccatcaacaaagttgtcaattgggatgcttcaatttcaaggttcttttgatgcaaacctgtgcttctaaaaaattcaattacttgatctctcgtacacgtcttggacaaattctcaacacaacggcaaaaagagaacatttaaaatgaattctaggtgcttccttgttcatccacaacaagagtatagcatggttcggcggttccgtagtgtaaagcattcaagtagtctggtcaccttgcacctgaccctttacatctttccttcttgttcctttttttatttctattacactttcattctccacctcttcttcacactcacttagattttttcacctccaagtctctttctgttcaccatgttattgctaaacggttcatgacatgcccttgaaaaaccttggttggtattaattgtagcactagctttgattttggtgccaagttcttgagctgtggtggtgctgaccctgaaaagttctccaagtccaacatgagataaggctgaaatattggagctggtttcaattagtagacaaatttggttgctgactttcgtattcgtgtgtcttcaatagatggtatttttaaatagaaagcatagttgacaatttcttgaatgttgttgtttcttgccttttgaattatctccaagacttcaaataagttggctctctcctacaattttttaaatgctattatgttcagtattgagaatcaaacaagacttggtctcaggcacaacaggtttttcaattttggactagttctgatttgcatacttatatagaggcaaaaggggtatcctctttttcattatcctctattcatacatatccaaagacaacaacatttcctttcagtacccctattagttgaatcagcatggcttcatttccttcaaattctgcatgggaacatagcatggccagtgcacaacaaaacagtaaccctcatgcttcctcaccttctttcatgactagagtggccatgagaatatctagatcaagatggttcactttcttgagaagagtattccattaccaaaacggaccaagatccaatctcggctccaaccctttcaattccagcacttggatgatgctggagttgattgctttgttggtccaaatagcaagcacaacattcactttggccatttcgaagagtgagaagccaatttggcctatgagagtgtggatagcaggttatgatattggttgtgtccttaatcttctgctactttgtggccgctaccatcaacttcatgtgactcaagggaataatgctcttagcctctctgaattggagcagcagagaaacaatgaagaatcaagtgtgtacaggacttcacatttgatagacaaatgccgtagttcactagagcttttctttgccatatggttcgtgatgggcaatgtatgggcctttgactcacgttttggatccttcccacaagccccaaaactccaagtgctctgcatcatcttgctttcttggaatgcaatatgctactctttccctttcctattgtttttgcttttgtgttgttgtgtgccactaatgagcaccctccttggatacaacatgagcatggggtcctctgctagaggggcatctgatgatcaaatctcacaactcccaagttggagatataaagggcttcattccaacttggacattgccaatgactctcaaagcagtgaaagattgatcaaccaagatccagaatgttgcatttgcttggccaaatacaaagacaaagaagaagttaggcaattaccctgttcccatttgttccacctaaaatgtgtggatcaatggctaagaattatatcatgctgccctctttgcaaacaaggattacaaaggtagcaataggacgaggcagaaaatacacaagaacattcataatcttatacattcccaattattttgttttatctcctttggttacacgagtgagtttgtacatgtacagaagaggtcaccagtaaccaaaactacattgaatacttggttcttaggagtgaatcaatccctttatttttcaaattagtttgtttttacaagtttttcctcccttatcctgccatctaaatattgcaaggtgagcatatagttgtactgaataatgaagtaaatatttatatttgctccttaatttttatacaataaaattatttggactgcgtttcctgtttaatttaaaagcagttatttgggctt

SEQ ID NO: 86927 - DNA, 339 bp, Glycine max
  Clone ID: PAT_MRT3847_49505C.1
ggaaaacaaacaggggtaactttaaggggacaatggagttcaacacaaaccaaactttttttaaaagggtattacagacccattacacattaaatttctttttaaaaggggggggaaaatccaacttcgagcatcacacagaaatcagctcccgcttaaaaccccccacgaagacccaaccccaagggcagaggtgcctccttctggatgttgtacacagggagggtccccccctcctttagctgtttgccagaaaaaataagcctttgttgggccggggggattccttccttggcctggatcttggcgcttaaatttggaagggggggggaaccttcc

SEQ ID NO: 86928 - DNA, 430 bp, Glycine max
  unsure (1)..(430): unsure at all n locations
  Clone ID: PAT_MRT3847_49506C.1
gttgctgaaaggatcatgttgttgaagctttttgtgatatagtctgattatgttgctaggagttaaagctggtgcanacccagaaaagatcttccaatcaaggtactagttccatccatcaacaaagttgtcaattgggatgcttcaatttcaaggttcttttgatgcaaacctgtgcttctaaaaaattcaattacttgatctctcgtacacgtcttggacaaattctcaacacaaagaggcaaaaagagaacatttaaaatgaattctaggtgcttccttgttcatccacaacaagagtatagcatggttccattttcttcaaattctgccacagaagatagagtggctagtgctcgaaacaggcctccgcgtgtcacccctccttcctttttggttaggatagccatgagaatatctagagcaagat

SEQ ID NO: 86929 - DNA, 1168 bp, Glycine max
  Clone ID: PAT_MRT3847_49507C.1
cttccctccaaaccttgtgattcccttcgaatcaaagcaaaacttagcagttcgattcttggtcaccctctgagacacaacctcaccttcctgacatatccttcacaccaatcttcccttcctcctcttctatatacacttcatcatctctatcccctcttcatattttttctattcttaacctttctctacagtatgtgtttgctgaaaggatcatgttattgaagctttttgtgatatttgtctgattatgttgctaggagttaaaggtggtgcagacccagaaaagatcttccaatcaaggtactagttccatccatcaacaaagttgccaattgggatgcttcattttcaaggttcttttgatgcaaacctgtgcttttaagaaattaatactgctgctggattcaattacttgatctttgatacaagtctttgacaaattctcaacacacgggcaaaagagaacatttccaatgaattctaggtgcttccttgttcatccgcaacaagagtatagcatggttccattttcttcaaattctgccacagaagatagagtggctagtgctcgaaacaggcctccacgtgtcacccctccttcctttatggttcggatggccatgagaatatctagagcaagatggtttacctttttgagaagagtttttcattaccaaaatggatcaagatccaatctcggctccaaccctttcaattccagcacttggatgatgctggagttgattgctttgttggtccaaatagcaagcacaacattcactttggccatttcgaagagtgagaagccaatttggcctatgagagtgtggatagcaggttatgatattggttgtgtccttaatcttctgctactttgtggccgctaccatcaacttcatgtgactcaagggaataatgctcttagcctctctgaattggagcagcagagaaacaatgaagaatcaaggtatcctatgctattcatttcaacaacttcctatcagtcattttgtcaattggtagtaccaaaaagttacaatttatagggtacttattatgtgaatgtgctgaaaacattggttagagcctattagaaattagaaaatgttgacaccattgttttttggccgaatacaaacaacttcaagacagaatcttctgtcat

SEQ ID NO: 86930 - DNA, 1688 bp, Glycine max
  Clone ID: PAT_MRT3847_49508C.1
ggctcgagattgaatggcaatgtacaaatattttcatatcgtttgatcatatatgattttattttgtgattaagtaaaattcatgtaagatttattatcaaatattaaagaatattgaaaacaatatattaaataacaaaaatcctctttggtacgagttttttttacacaaattacgcttgaaaattttttcttgttgcaaatttgaagaaacagaaaagtaaattaacttagtcccatgcagtgtgtacaggagctcacatttgatagacaaatgccgtagttcactagagcttttctttgccatatggttcgtgatgggcaatgtatgggcctttgactcacgttttgggtccttcccacaagctccaaaactccaagtgctctgcatcatcttgctttcttggaatgcaatatgctactctttccctttcctactgtttttgcttttgtgttgttgtgtgccactaatgagcaccctccttggatacaacatgagcatggggtcctctgctagaggggcatctgaagatcaaatctcacaactcccaagttggagatataaaggggttcacaccaacttggaccttggcaatgactctcaaagcagtgaaagattgatcaatgaagatccagtaagtgaaataactatcatacacaaaattagtaacatttagattttgctattaatatgcatattctctaacacactttaacattggttaaaatttgttgaaaattataaaattatgagtgtgacacattaaataagtatgacatacaaacttttacgatatttaataaattttaactaacaataaaaagagtatgttaaaagaagaaattatttgtagtcggaaaccattatgtctatgatctacaagcaatcctcgtgtgatacatagtcaaatgttttaatttaggggaaaaagttaataaaattatacatattacataaaaattgattggaaatatgaacacataataatctcaagtcatgtaataatttttcactaaaagaaatgtgttactaatatttctcctatgtgtatatatggagcatgtgtaggtgagaacatgttgtcaataaaggaactaatctggggtataaatgatcaagatttgatttatgtttttttctctctcacttttcaccatatatacctcatatatatgtgtgcatgtttgttttcatatataattattttttattgaattgatccgtttgtgttgttgggtgaattaacaggaatgctgcatttgcttggccaaatacaaagacaaagaagaagttaggcaattaccctgttcccatttgttccacctaaaatgtgtggatcaatggttaagaattatatcatgctgccctctttgcaaacaaggattacaaaggtagcaataggacgaggcagaaaatacacaagaacattcccaatcttatatatattcccaattattttgttttttccccttttggttacacgagtgagtttgtacatgtacagaagaggtcaccagtaaccaaaactacattgaatacttgttcttaggagtgaaccaatccccttacttttcaaattagtccactgtttttacaagtttttcctcccctaccctgtcatttaaatattgcaaggtgagcatatagttgtactgaataatgaagtaaatatttatatttgctcctt

SEQ ID NO: 86931 - DNA, 626 bp, Glycine max
  Clone ID: PAT_MRT3847_49509C.1
gcttctataatggtccaaaattaatctcactaatcaatacaaagtatatggctttgatccatgaatcttaattttctagagaccattaaaggcctcaccggtagggaacatgtgagtgcaattcgttaggcttctggttgcgccttgcgcctagtgccttgtccaaatcaagcaaattgtcctttacacaaggctcaatgaataggcataacggcatataaacaggtcaagggcaacaattctgctacttcatattagaagatttaacaagcagagagcactgaaggtctctctacttttggtgcatgcccaaatgacagctataattaccatggaatgatccactgaagatgtgtgttcaagcttgagcaattctggtcttggaagaagtgaaaatacggttaaggatagctgcaagtcgcacaccaccttgagccagccttttctccacaacaggcagccgagaaaggaagtactcatctttcaaagtgcttcctggggtagcattcctgtaagcaaatttgcatgctaagctaatgctttcagaagcataccgatttggacaggctgtgtagttgtgagcacaatgttcccaagttgatacatcatttactcgtgccgaattc

SEQ ID NO: 86932 - DNA, 346 bp, Glycine max
  Clone ID: PAT_MRT3847_4950C.1
aggacgcgtgggcgtgcaccgctgagatgacaggttgaaggacatcaaggcctgctacatatgcttttgcatacaggcgatacaaatggtttgagttcaggcttcttttatgggcacgatttattaacggatagaggagttctttatgagatgcacacagaccaggagacaaattgtatgtgacacgattggcttctaggatcaccactatagtactggagatacgtctttctgctgaaggaaaactgatagaggttcatttggaagtcgatgctcgaacaaaggaataccctggggaaggctttgagacaagggacaactttgatgtggcagatcggactgtaaa

SEQ ID NO: 86933 - DNA, 268 bp, Glycine max
  unsure (1)..(268): unsure at all n locations
  Clone ID: PAT_MRT3847_49510C.1
gggggttgttttttaaatttttnnnttttttnnnnttgnggggtggggtaaacctcctcctcaccctaagttgaaactttaggtgttggctcaaaatctttcatgattttcttttcttcccctggttcaatggcattggcattgaaaaaagaaaccggggggcttggatcaaaatctttcgggacacttttttttggcttaacatcaacatcattggcaccctaagctgaaacattgggtcttggttcaaaatctttcatgaaatttt

SEQ ID NO: 86934 - DNA, 784 bp, Glycine max
  Clone ID: PAT_MRT3847_49511C.1
gagaaaaaaagaggaaagttctgaaaaaattgaactccgacaattgcttttctcagcaactcttacttcatagaaaatatagctatagaggaagttggccaacggttaacttccctccgaacctagagagagtagtagtctcttgtaatcaaagcaaagttcagtagtcgattcttggtcaccttctgagactctaacttcaccttcctgacatacccttcataccaatcttccctttctgtttccttttcctaccttccttctatatacacttcatctccacctcttcttcacactcactagattttttcacctccaagtctttctgttcactatgttattactaaagggttcatgacattcgcttgaaaccttggtttgtatcaattgtagcactagtttgattttggtgccaagttcttgagctgcggtggtgctgaccctgaaaagttctccaagtccgacatgagataaggctgctgctgctgctgcttttcaaagatgttggagctggtttcaattagtagacaaatttggttgctgaatttcgtgttcatgtgtcttcaatagatggtatttttaaattgaaagcatagtgacaatttcttgaatgttgtttcttgacttttgaatttatctccaagacttcaaataagttggctctctcctacaatttcttaaatgcttatgttcaatattgagaatcaaacaagacttggtctcaggcacaacacgtttttcaattttggacttgttctgatctgaatacttatatagaggcaaa

SEQ ID NO: 86935 - DNA, 231 bp, Glycine max
  unsure (1)..(231): unsure at all n locations
  Clone ID: PAT_MRT3847_49512C.1
ncttcggggaaaaacccttccaatagtagtgtagtgctaactctctctctcttttttttctacacacaacacacactttcccgaagtttgagagggactgcatccaaaaagggttctaaaactaatgcttcgggccattagaacaacaaagccgctgtcaatatttgctgtgcttggtctttgctagttcttttatcttttgggaacatggcaaaaaagtggatctgggaa

SEQ ID NO: 86936 - DNA, 135 bp, Glycine max
  Clone ID: PAT_MRT3847_49513C.1
tacagctgttagaacacgacagaaagggacaccaaatagggatgtattgattcattcccctctctacaataacttatacagagcactcagtctattattactccaaacactccaattctgaatactaactgatat

SEQ ID NO: 86937 - DNA, 160 bp, Glycine max
  unsure (1)..(160): unsure at all n locations
  Clone ID: PAT_MRT3847_49514C.1
ggctntgttttatcattttttttttactttcctctcacgccctctgccacaagggannntccgtctcnncgcaattaaccgggagagtaaaaaaaccaagnntttaattacctnnattatggcnngccganngggatcaatannagacaagnncaacgct

SEQ ID NO: 86938 - DNA, 199 bp, Glycine max
  Clone ID: PAT_MRT3847_49515C.1
gctcttcgcctctgagcttaaactgatgtcaaaagaggctgaagatagtgagtcggcagatgcggcagcagtcagcgctgggaacaaccatgaagtgggaaatacgatacctgaagcatcgcgcagagccggcacaaagggcgacgcgaccctcgaggagggcaacagtgctgacaacagtctatatgtagtcaagggg

SEQ ID NO: 86939 - DNA, 323 bp, Glycine max
  Clone ID: PAT_MRT3847_49516C.1
ctctccaatgaccgtactagttgatttgcggaattactgttggtcctaactgattaagaacagactcctgaatctcctcctatctgtgctttctcttttggtaactctataatcaaaggatacagttttgagtgtcgacgctgatacccatatgcattttgtatatctgggtcaaagctgacatgttctttgataattaaggtatcaatccgagctccgcagtgattgactctgagagatgtgttgcaaaggaatgttgccagggaagattgtgtgatgtgctgaataataagctatggcatgttcattgatggggatgctac

SEQ ID NO: 86940 - DNA, 556 bp, Glycine max
  unsure (1)..(556): unsure at all n locations
  Clone ID: PAT_MRT3847_49517C.1
ggccgccnncgtttttgnttttttattatttattttatttatttatccttttttcttttttttttttttttttttttttttttttttttttttttttttttttttttttttttttttttttttttgggaacaggggccctaaatttattaaagccccaaaaaaaaaaacaacaaagggaagtctttaacaggaatgggggccccccaggggaaacaacaaaaagggaagctggggccccttttggaaccccttttattacataaaaaaaaaaaggaccagccttaattggggagaggggaaggaacccctgattggaacacaggggattagaaagcttaaagggcctgttttccccttgggggcccccgaggaaaacgctccatgggcccccaaagaccccaacaagggggaaccccggccttaaaagtttctttcccgcgggggttttgaaaaaaaccgctttggggggggaagagacttggggacccttgaaaaaaaatttttcccaggggggggacccacccttttttaaatttgtttttgtaacggcctgtt

SEQ ID NO: 86941 - DNA, 1429 bp, Glycine max
  Clone ID: PAT_MRT3847_49518C.1
gaagggatttaatctccatacaataatccgagtgacactcctcactttgtggccatggcttcactgaggtgcctccactcaacccaccctcatcttcatcgcggttcagcgcttctcgccatttcgaaccgctgcttcaaccattcctccttgctgaaccggactctctccgtaaaccctcctcgaaccgctcctccacgcgccatggccaagcccagtttctcaactgcccaagacctagtggcttctcctggcgattttgaatttgcgcagcctctgaaaattgtggagtatcccgacccgagattgagggccaggaataagcgcatagttgccttcgatgatagtctgaagaagcttgtccacgaaatgtttgatgtaatgtacaaaactgatggtattggtctctcagcaccccaattaggaattaatgttcaacttatggtgttcaatccagtaggtgagcgtggtgaaggagaggaaattgttcttgtaaacccaagagttagccaatactcaaagaaactgacactatttaatgaaggattgcctatctttcccaggcatcaatgctgatgtaaagcgaccagaatctgtgaagattgatgcacgtgatatcaatggaacaaggttttcagtcaacttgtctgaccttcctgcacgaatatttcagcatgaatttgaccatctacaaggaattcttttctttgagagaatgactgaagaagttcttgatggtatttgtggacagttacaggccctagaaacaaagtacgagggaatgactggactctcaagccctgaaaagatagaaaaccgcaggaggagaaaggtcgctgttggttttgggaaacgatgatcttcaaggtcaatattaggcataatactgaatgcacacttgacagacatttcaagtttgaacttcataaaaagatgaagcatagattacaggtactgcatatggttggttatgctggagatgtatcatttatatgtatatagaaaatgagctagtgactctgattatcattatacttaatcgagttttctctgggtggacttccttgtctaggtgcaattgtttatgaatagtcattggaaggcatctctattgtatccatgccattgagttgttcatgttgccctgaagggaacaactgtcttgaagggctatttcctacgtatttatttatttattgctttctattgttttaattctagttctaaacatttagctctagttgtaggcatttactatgtattattttaggatttattacttgaaaacagctgatagaatggaggaaaacctttctttatatggctctcccaatatcccgaaagcaataattgtttgtaatataaggggaaattacactgtaataacttgacaagtcttgaatgattctcatttgaatcttgatctcat

SEQ ID NO: 86942 - DNA, 177 bp, Glycine max
  Clone ID: PAT_MRT3847_49519C.1
gggaggggccgaagaaaacagagcggcggcagcagcgggacaagcggaagcggcagcagacgcagccgcgcaagcagaagcagagggaccaggagaagcacaccaagcaacggaagaagccgcgaggggaggcagacgcaccagaggaagaagaagacgcaggcgaccacacagagg

SEQ ID NO: 86943 - DNA, 454 bp, Glycine max
  Clone ID: PAT_MRT3847_4951C.1
atcaagaactctcgttttcctgtccgtccattcttccttccttgagaagcttcaacaacggtggcacgcctccttcgatgatgagtttcccgtaacggtcgttgtcgcgagcaagggagacgagggaagcggctgcgtcggaacgttcgtccaaggaagcaccggagagaagaatggcgacctgttcccagatgaggcagagaatgggctcgttggcggcgatgggagggaggcccaggtactcgtcgtagcgctcgtcggcggaggcacgtgggacgctcgtagaggtcgttgctgttcctggcggcctggcggaggaggcccgccaacttctcagttttggatttctccagacattcctgtcggaaattctggtcctcttccgcaagcttcgaaacctggtccgtcatttgtatcgggctcgccaggacctccttgacgatgctcgacatgt

SEQ ID NO: 86944 - DNA, 218 bp, Glycine max
  Clone ID: PAT_MRT3847_49520C.1
aagcattctacaagggggttgctcctctctgcgatggacagataccatacaccatgatgaagtttcgctgctttgaacgtactgttgaagcactgtacaagtttgtggttcctaagccccgcagtgaatgttcaaagccagagcagctggttgtaacatttgtagcaggttacatagctggagtcttttgtgcaattgtttctcaccctgctgattct

SEQ ID NO: 86945 - DNA, 374 bp, Glycine max
  Clone ID: PAT_MRT3847_49521C.1
tttgggtaaagatgttattgacaaagaagtggtggagaaggtcagccaagagtttttgtgaaatcaactctggttgtctccaaatgaattgctatatgatttgatttattgctttaacaattgtcaattgacaatgcatggtaccatgatacgtatcccagaattgctagttattcacccactgggcacaatttccatctagagctttgttcttctagttctaaactgttgtcggtggatactatatactgatcacaaaattttatatttctgatcaggtgtgggacagaatagctcctggtttagcttcccaatttgattcaccctattcaattccaactatcgcaccaccgtccattgcttattcttggtgg

SEQ ID NO: 86946 - DNA, 202 bp, Glycine max
  Clone ID: PAT_MRT3847_49522C.1
ttttttcattttttcgcaagattgtcttgggccattggccaaactgccaaagccagttgctatttttcgttaatgtcgttttgaaatattatttgaacctaacaattaatttcatgcgttaattcgttgaagtaaaaaaaaaaaaaaaaaaaaaaaaaaaaaaaaaaaaaaaaaaaaaaaaaaaaaaaaaaaaaaaaaaaaa

SEQ ID NO: 86947 - DNA, 224 bp, Glycine max
  unsure (1)..(224): unsure at all n locations
  Clone ID: PAT_MRT3847_49523C.1
aagaactgaatgtttgcttataacaataantttaaatacttgtcangtacaaacacacttnaaactaatgtangtgcacatattcaatataatgaaaaacataatgctaaagaaaaataaaacatgcaaaacttgtttactgagagtagaagtaaaaaggtctactaaaatacatacttaggactaatactggaagggaaaaactttgaataattataataaac

SEQ ID NO: 86948 - DNA, 260 bp, Glycine max
  unsure (1)..(260): unsure at all n locations
  Clone ID: PAT_MRT3847_49524C.1
ccaccgcgtctccaaaagctccgccagcacccccaccgcacaccgacccacttcaatcaccaccaacggagtccaagtgctataaatctccgacngcagcngaaacggcctagaaaaaaagaccatcacccccgaccataaaaaggaactcagaggaaaatnctgtcccaacagcctctccaacatcatcaaagaccacttccaaaacggntcccaaaaaagcgnntgcagcatcaacaacccctttgacccatgggttg

SEQ ID NO: 86949 - DNA, 1833 bp, Glycine max
  Clone ID: PAT_MRT3847_49525C.1
acgctgcgagaagacgacagaaggggggtccaacatgtccttcaatgcgttagcaactataaaaggacgtgtgcatgccacttttctcttcacaattcattcatcaatccattgttcactttcacatcaactcaagagattcaaccaagtcatagaagctagctagggtgtattgttacatttgttagcaaaaaacttgaaaaaatggagagcagcttgggagacatgttgattaaggttgtggtgttcattctagttcaagccttggtgtaccttatcctctccaattcatcaaacatcttcaacaagaacatgaagaaatccaacagcttcaggccagcgaggtcggtgagcattcgccggatgctggctttgatctctgattttcctccagaaggggaaccctctccttcaccaaagggtcctaaaactccatcacttcatcaaagtgatcaataattgtaaggttttaattaaattgtggttgcaattacaaattgtagaccaattcagctatggggtggtcaagtaaatgggcagtaacctccataggttttggctgcagtactttgccaatatgcaatgtaacttaggagacttgttcgaagaggtttggaaattatttttctttcattcctttggaaaccatgatatttcaaattgatataaagaggctagcaagttcttacagttgttttaccacgcaatactttgcaaatatggagagcagcttaggagacatgttggttaaggttgtggtgttcattctagttcaagccttggtttaccttatcctctccaattcatcaaacgtgttcaacaagaacatgaagaaatctaacagcttcaggccggcacgttcggtgagcattcgccggatgctcgctttgatctctgattttcctccagaagaagaaccctctccttcaccgaagggtgctaaaacaacatcacttcatcaaagtgatcaataattgtaaggatttaattaaattgtggctgcaattacaaattggagacaatttcagcttatcgggtggccatattaaggctcagaaacctccaaatgttgcggctgctgtggtggttacaaactgcaatttagactagacccatgccaagtagaatgtaattaaattatttctctctctgtttccttgtgtagaggctatggtattgcaaaatttgttaaaagagtccaaaattattggtatgtaggtattgaattcttttgttcatttattcttttatgatgaatattgtaatatatttatgagtggaatattaatgttgacattaatttacttttacctctgcttttaattagttaagaactcaatggttgtcgcacatgcttgtttgttagaatatgcaattgcaatgttgcaagtaaaaaagatgtaacttcatttttatacataacagacgcatttggtggagtgtgtttgattaaaggtttttcaaaggaacgtggtggggggatcaaaggggctacacagtgggggtggctgcattgttgtggaaaccaaagtgaaaaaacttgcatgcttgatccctctaaataaaggctattattaatgctaccttcactttttggcctagagaatgctactatcctgtatgagatgtcattctaaatttgattagcacgaggattggctcttctttttggtgaaggaatccatgttaggattgtaataatagtattttctattccatcctcttaagattgtgatatatagtcacacggagagagaaattgaatttttttttcttgggtcaaatgttacgaggatctcttcatctcactagatcacattaatttttgattgt

SEQ ID NO: 86950 - DNA, 355 bp, Glycine max
  Clone ID: PAT_MRT3847_49526C.1
aaaacacgacaacaagggacctggattagtactcagagataaatcaaaccaaaaaacagagtggtttttttttaagaaagaaagaaagccctgcctctggcaagcccatcaattacttgctcctcatcagttttgaattcaaacagcttttcttcatgggcatggcccttttttaaaaacaaaggaccattttgcaggttaccaattacttttaatttcacaagggctcccttatttggacgctcatatccttccccttccttgaggatcttcttaatgagcttcttgtcctccggtacttttgagacagtcttccaagaaactatactaagagttatctgccttgttgcatttg

SEQ ID NO: 86951 - DNA, 1157 bp, Glycine max
  Clone ID: PAT_MRT3847_49527C.1
gtggggttatttataatgaaataaatggcatttgcaagagactcaaggcagtgcaatacccaaaatgaagctcactaccatcttaatcttcttcatctttgcccttccgttcacatttgctaacctgcgcgttggattctataccgcaacatgtccaagagcagagacaattgtaggtgaagttgtgcaaaggcgtttcagccaggataaatccattgtcgcagcccttcttcgcatgcactttcacgattgctttgttagaggttgtgatgcctcaatactaatagatccaacaagcactagaacatcagagaagattgcagggccaaaccaaactgttcgtggatttgagatcattgatgaagcaaaagcaatcttagaacaagcgtgccctttaactgtttcatgcgcagatatcatagcacttgccacaagagatgcagtggcactggcaggagggataaggtacagcatccccacgggaagaaaagatggtctattagccgatccttccttagtaatccttccagcaccaccattgtctgtacaaggtgctcttcagtttttcaccgcaagagggttgacactagaggacatggtgacccttttgggaggacacaccgttggttttgctcactgtagtgtgtttcaagagaggctttcaagtgttcaaggaagagttgatcctacaatggatcctgaattggatgcaaagctggtgcaaatttgtgagtccaataggccatcattgagtgaccctcgtgtgtttttggatcaaaactcttcttttttatttgacaatcaattttacaaccaaatgaggcttaggagaggggtacttcaccttgatcagcaattggctttcgactcattgtcaagggacattgtggaggattttgcggcaaatgatggtacatttcaagagagatttgcaaatgccatgataaagttggggagcattggtgttttggatggaaacgaaggtgatgtaagaaggaattgcagggcttttaatattcctctgtagaatgtgctattgcaatattacagagaaatgcctatgcaaaatcaataataacatttgaacgttatatttgttaaaaatttatttttaaaagctaaaagaaaaatcaagatagttttttcttttttgagag

SEQ ID NO: 86952 - DNA, 324 bp, Glycine max
  Clone ID: PAT_MRT3847_49528C.1
cgtatattgatcatagtcggagtgtttagtatgctcagtttgggactttcgagattttacacactggtgaaaaaggtgtgcgttcaatttctcttacgattcaagtagagtattggaacccagtcctgcatgaaaatggaagggagtaacactaacgtgcgcagaattgttgtctatggcactggtccaacaaagatggagggaagaagttggatgatagaataggaaaagagaaggttggtgcttgtggcaacagggtactggggtatggaatcagtgtaccaggtgggaggggaaagatggcaaactggattcgtgaggaac

SEQ ID NO: 86953 - DNA, 448 bp, Glycine max
  unsure (1)..(448): unsure at all n locations
  Clone ID: PAT_MRT3847_49529C.1
aaaaaaaacaaaaaacccgggggggaattaattaataaacgaaccctaacaaaagggggggaattttttagttccctccnttaaaaaaaaaggggattaagggggtaaaaaagggggggggggggccaaaaaccccccccaaaaaaaaaaaaggggcccaaaatgggtttatcgggggggggggttaaaggaagggggggagaaaaccccccttttttagccgaaaagggggaccaaaattggccccttttttttccttttttaaaaagggaattaaaaccccccagggggtaagcccaaaaaacccccccctatttaccccaaaaaaacccggttaaaacatttcttttattaacccctccgcgggttaaattttggaacccaaacccgaccgggggaaccgggttttaaaacccccacggggaaaccgaatttgaaaaccccgggg

SEQ ID NO: 86954 - DNA, 242 bp, Glycine max
  Clone ID: PAT_MRT3847_4952C.1
agatactattcaatctaaagatacagacaccataatagacaacaacatagcacaaacaaacacaacatcacacgcttctcatttcctttaaacccgttggtttgtgttgcaacagtcttttgttctttctacttctacatataacaagtaacataccctttttagcttctacaaccttcaatggccacttcacttcttttcttcatcacttgtctctctcttctaccatcctcttattgctc

SEQ ID NO: 86955 - DNA, 236 bp, Glycine max
  Clone ID: PAT_MRT3847_49530C.1
atggcgttaactgcaaggttctcatcaacattgtgtaggagagtactgatattggtcaggatgtataggggtaccttatcaacaaagctgaagaaagttgggatggtgaggaaggtcagatgattcggctatagagtagatgaaacacctgagattgatgtcattgagcgaagttcttgcaagggaactctgtgctcgactcaccgaggtactaaagtacggtacctgcgcttgga

SEQ ID NO: 86956 - DNA, 139 bp, Glycine max
  Clone ID: PAT_MRT3847_49531C.1
ggctaggaatccaagctacttctaagaacttggaatcagcaatcagcatagaatgaaaagataaatacgtgggaatacaccgaaaaacacagctacagatattttgcagcactcacaggagaagtttcattccaaccaa

SEQ ID NO: 86957 - DNA, 1427 bp, Glycine max
  Clone ID: PAT_MRT3847_49532C.1
cacagccttgaacttgaactatcgtgtcttcttggctttctctgttcaggatcaacatggatattgtatcacgagctttgctatttccgtgggctatactcgagctcatattaagcacaccttgctcatgcgcttacgggaccagctttaatcaaaacctcgttggcttttttttttttgtgtcccaaaaaaagccccgttttatttttttagggttccatctatctatctatttagataaaacacgaaatcccaatcttaatcgcaagcaattcctctctctgagagaagctttcgaattccttctgatcctcgtagaaatttaatggcttttcatcatccgattcaaaaaccagtgacgtcgctgttgttcttttccttcctaattccgataccttccgattctctttccgccctacgcatactcgatacttgttcatctctctctttctcaaattcattcctttttgtagcatacacaccgtactagcccaactaacaaatcaaacaaaaccgttaccatgggaaaacgtaattctcaacgtaaaagtgctgcgatgttcgatagtgatgacgatagtagcgtgacttcgtcgtcaactgctctttctgatttgatgtcggtgtctggggctgaagatgttcaatttgttcaagattcctttctcgaccaagctctcgatgcattagatgagaaaaggggttccacgagggagaaagctttgtcatcgatcattgacgctttcaatagcaacatgcagcatgagtttgtggagaagaaatttgctaccttactacatcaatgtcttgcttcaataaaaagggatccaaaaaggcatctgctaaggagatagctttggcatctcatgccattggttgtttggccttgactgttggatgcggtgacatgcccgcgagatatttgaggatccattcgtcctttggatgaatctctcacatctaggatagatgtttcaaagacaccatcattactggagtgtttggctataatcacttttgttggagggaacgatcaagaagaaacagaacgatcaatggacatgatgtggcgagtgattaatcccaaattaggttccaatgtagttgctgtcaaaccttctgcttcattaattgccaatgtggtgtctgcgtggtccttcctcctctctactgtgagcaatttgaagctaaatacaaaaaattggcaaaattcaatatcctatttatctagtcttctagacaaggaagataggtctgtacgaattgctgctggtgaagcactggctctaatttttgaaattggagttatagataaattttctgctgagtcagacagtgcaagtgatacaacgcaagggagtaaaccacttgaaagctacatatttttacaaggattgaaaggaaaggtgataaatcaatgcaaaaat

SEQ ID NO: 86958 - DNA, 186 bp, Glycine max
  Clone ID: PAT_MRT3847_49533C.1
cgggtttcccttggtttttaaactccctctaaaatggaaaaaggtttcttttccaaaaccccatttggttgtggaaaaaccctccaaatttgttttattgggggctggtcacaatcttcaaaaaaattttcttgaaagggaggtccaggaaaaccccaaaaggttggttcccggttgggaccaaaa

SEQ ID NO: 86959 - DNA, 1915 bp, Glycine max
  unsure (1)..(1915): unsure at all n locations
  Clone ID: PAT_MRT3847_49534C.1
atttttttagggttccatcccatctattctatctatttagataaaacacgaaatcccaatcttaatcgcaagcaattcctctctctgagagaagctctcgaaattcttctgatactcgtagaattttaatggctatggtcatcatccgattcacaaaaaccagtgacgtcgctgaagtgcttatcttcctaatccgatgcctatcgattctctttgcgccctacgcatacatggtacttctgcatctccctctttctcanatgcgattatcgatccaacgcatatgaattttctgtttgtttcattcattaattaattgttttttgtgctgtcatcaggtaattctcaacgtaaaagtgctgcgatgttcgatagtgatgacgatagtagcgtgacttcgtcgtcaactgctcgttctgatttgatgtcggtgtctggggctgaagatgttcaatttgttcaagattccttgctcgaccaagctctcgacgcattagatgagaaaaggggttccacgagggagaaagctttgtcatcgatcattgacgctttcaatagcaacatgcagcatgagtttgtggagaagaaatttgctaccttactacatcaatgtcttgcttcaataaaaaagggatctaaaaaggcatctgctaaggagatagctttggcatctcatgccattggttgtttggccttgactgtcggatgcggtgacaatgcccgtgagatatttgaagaatccattcgtcctttggatgaatctctcacatctaggatagatgtttcaaagacaccatcattactggagtgtttggctataatcacttttgttggagggaatgatcaagaagaaacagaacgatcaatggacatgatgtggcgagtgattaatcccaaattaggttctaatgtagttgctgtcaaacctcctgcttcattaattgccaatgtggtgtctgcatggtcttttctcctctctacatgcctgggatccaacttactattttgttgttgatgcaattcaatatcctatttatctagtcttctagacaaggaagataggtctgtacgaattgctgctggtgaagcactagctctaatttttgaaattggagttatagataaattttctgctgagttagacagtgcaagtgatacaacgcaagaagggagtaaaccacttgaaagctacatatttttacaaggattgaaaggaaaggtgataaatcaatgcaaaaatctttctacaaggctggtggaaaaggttctgcaaagaaagatcttaatagtcagaggaacttgtttcgagatatcttggatttttttgagtatggttactccccggatatttcaatgaagattggtggtgattccctgcaggcatcatcatggtctgaaatgatgcagttgaattttatcaagcattttcttgggggaggattcatcaagcatatgcaggaaaatgagttcctacatgaagtctttggtttctcaccgaagagaaagtatcttaataccaacgaacacagaatgtctggtggtgaaaagagaatgtttaagtctccaaattcgtttttgaacaaggctaggacgcaatcacttaataagcagcggatattatctgagggcagaaacttcggccactacgctgtcggtgtggttgacgaggaggcatgaatttgactggaacaacaataattatgtctcaattagagattcaatctttcatttcatgtacaaattcatatattttatcagtgtttatacttttggtcttgttacttttatcaattatacagtatatttccatgacatgggatttataatatgaatggcaaatagatactaataagaacggatttcatttggttcgaaaagtttatttttcaaggttatgcgcagggtttgaagagtt

SEQ ID NO: 86960 - DNA, 1742 bp, Glycine max
  Clone ID: PAT_MRT3847_49535C.1
ggtccggagtgttaagataccgttccggcataggtttcctctttggttccatagacccagcaagaagcattcaaagtgttgttctgttttcttagcttaatcaattcatttcttatcccccctcgtgcccaaagcttctcttcgctctcagtttctgcacacacgtgcggcttggcagcaatcttcatcaacgttcggcactggagatttggtgacgcaatgcaccgtcaaagtaaagccccatttgctattgaagaggtggagtgaggtgactgcctgaacatgctcagagcagaggtttacggcggagcataatattcgctgagttgttcttgctggaactatttgatacttgctgtgcttcactattttctgtcatgtcaaatgtctcaaaaagttcctttgcatctgataaatatgaaagagtaggacctgattactttgggtattactcttctgaagtagtaaatttattgtcacaagatgaggatgtttttcctgtttctacccaaacacctgagctacctgaaaccaaatatgaagagggaggaaagaagaatttagtcaatcagactgataactgttctggtacgtgggatagtaatgctgttggagctggcctctcagagtttaaaaaggacagatttaaatcactgctcagacagagtgtcattgctctttcgtccgaagttgatgaggtggtagaccctgtttttgcggcatatcatttgcaatccaagctaaaaagtaaatcacaatcattgaatgatacagcgactgcatctgacaatgtaatgcaagttccttgtaaaaagctaaagatctcctcatcttcaacttcagccaggtttcttgaacgaactactaatgtcaatccccaatgcagtaggaagactactgatgatgttcagttcctactagagaaggatagtgtggaggttgcagagatggtgaccgaatattccaatgatctatctggaacactagggtatatggaagaacaacttgagttgcttctagatactataatgttcaagtgcaggcccatgacccttgctgagaaacaaaggctacagagtttaattcagaagctaccagcaagaaatcttgaccgtgtagtggagttaatttggcgaaataggccaatagaagaacaaaattgtgacaaaatatttgttgatttggaaaaagaggatgatgctacactctggagactctattattatattgaagctgttgagaaagccaaaagtctttcttgtagtcaagaggcctagttttctaaatgctttaaaaagcctctgagccttaatgatagttcattagagctctcaggtttttctgatcttcctaactctaaaatttagagtttagagtttagattatacagattttcaaaacgcttacctctgttgcgacaacagggatactatagttcatcgacttgagttaaatgccctatacctgaaatgtatagcatttagttttttttccttttcttctcttgacatgtatatcttgagaagttagtcaccaaatatgtatcatcccagattgtgataggatatatgttatgagtcggaattgcatcttgtattgatagcaaaacgtgacgtgagatatattcaagagaagaatgatagttcttcaaattttttaactactacttactttttcctttgtttcttatttgtctgaatgcttaattaaaacatatctacattgtgatttcctttggttct

SEQ ID NO: 86961 - DNA, 1094 bp, Glycine max
  Clone ID: PAT_MRT3847_49536C.1
ggctcgaggttttctcgagccgttccggcataggtttcctctagggttccatagacccagcaagaagcattcaaagtgtgttctgttttcttagcttaatcaattcatttcttatcccccctcgtgcccaaagcttctccgatattccagtggtggtttttccgatattgtcgtttaactgttttcccaagatcttcagaaacacatccaaagcggttatatcggcgatttgtgatgtggccttggagctgagataagagatggtcctaccaaagagaggaatgttcggtcaccgacatcctaagacaacaacgagtatgccaatcggaaggattgaggtgacttcctgaacatgctcagagcagaagtgccagagcataataatctgaatttttcttgcagcaattatttgatacttgctgtgcttctccattttctgccatgtcaaatgcctcaaaaagtttcgttgcatctgataaatatgaaagagtaggacctgattactttggctattactcttctgaagtagtaaatttattgtcacaagatgaggatggtttttcctgtttctacccaaacacctgagctacctgaaaccaaatatgaagagggaggaaagaagaatttagtcaatcagactgataactgttctggtccgttgtatagtaatgctgttggagctggcctttcagactttaaaaaggacagatttaaatcactgctcagacagagtgtcattgctctttcgtccgaagttgatgaggtggtagaccctgtttttgcggcatatcatttgcaatccaagctaaaaagtaaatcacaatcattgaatgatacagcgactgcatctgacaatgtaatgcaagttccttgtaaaaagctaaagatctcctcatcttcaacttcagccaggtttcttgaacgaactactaatgtcaatccccaatgcagtaggaagactactgatgatgttcagttcctactagagaaggatagtgtggagggtgcagagatggtgacgaaatattccaatgatctatctagaacagatgatgctacactctggagactctattactatgttgaagctgtga

SEQ ID NO: 86962 - DNA, 405 bp, Glycine max
  Clone ID: PAT_MRT3847_49537C.1
caagacacgatctatactagtaaaataaaggatcgaatgggagattttgacatcactatacagcatgagactatctcatccagttgccacgaatggatccctctcttaactaatactgggggagaagatatcctcagaatactctttacatatagatacccttctaactacataaatagccatatataaataacctgatttccttgttctctacatggcataacccggaaagagagatcctttgtcctataaccacgttgcgatgtcgctacccatccaatatcaattaatgtttaactttgagggagagaccaacggctacaccgttgaaattgaccactcttgtaacctttttttttccatgggaggaggagaacagacccaactttttcctcattgcgaagc

SEQ ID NO: 86963 - DNA, 1896 bp, Glycine max
  Clone ID: PAT_MRT3847_49538C.1
tacggctgcgagaagacgacagaaggggggtggtggcaatgggtagcgaagaagagagggttcttgagaatcaactggaacttcaattgcaagagcaaaggggttctctctctgctatcggtcaagctcttctctctgatccaactaaccctgaacttctggcggttcatgaggagcttgttcaggcaattaaggatgcagaagaaggacttcttcacctaaaacgtgcacgattgttacaggaagcagattcagtgctgcataacactaatatttttactgaagaagagaaagtggagccccttgattccacagatgttgaaccagagccattagaggacaagtgttattctgttggatctaaatgtagattccgtcacaaagatggacgttggtacaatggtcaagtggtgcagttggataatgcagtggcaaaagtttcatttcttactcctacttctgcgaatatgttgatgtgcaagttctttttacaacaacgatgtcgatttggtagtaactgtcgcctatcacatggacttgatgttcaattgtctgctcttaagaaatatgtgcctacaatctggaagcagtctcttgtggggtcaagtatatgggcagtctcaactgcaaatgcaggcacttggagagaagccgagctcaagtcctgggacgaaaaggctggagttggacaagttgttttccgagacgacggaagttctgtgaaacttggggcagaagaaatggcactgtctgagcatgcagaaatgagtgacatagagagtgattccagcttagatcaatccgattccagtgactatgaggaggaggaggaatcgcaaggcataggatttctggagagtaccaatctacagagaggtattcaaactgaaactgcgacatttgccacgtgggagaaccacactagaggcatagcttccaaaatgatggctaatatggggtacagagaaggaatgggtttaggtgtaaccggtcagggaatgctggaccctatagcagtgaaggtgctaccaccaaagcagtccttagatcatgcactcgagtctcataaaagggaagagaacaaagagaagcaaggcaagaagaaacagagccgaggtggcaagagaaaacgcgagaagaaatttgcagaagcaaaccgtgcagcaaaagaggaagaagaatcggcatcagatgtctttgcattaataaacaatcacctggcaatgcacaatgaggcttttggcggtggattgatgaagaagcagcaaagtaaaggttctgaggaaggtaagaaggtggatagacgagcattggttgcttatgaggaagaggtgaaggatttgaagattagggttgaaaagctcgagcacattgtcaatgccaatagaaaagagaaggctgtgtatgagggtgctatgagaaaattaaatgaaacccgcaaggctttggcagatgctgaagcagttcatgcctctgcctcaaattcagtaacaagcaaagaaaaagagaagagatggctcaagttttagttaggagtcaagactcagttatgtttttagttgcatgatataatatgtctttattttatgctgatgaccttaaaatgaagagtaaaaagaaaggagatttcaaaatgtgtagctcaactaagatattagtacattgcacttttgtatgcaaccttgtacatgttgtgcgattattcaattgcatgatgtatgcacgtagttttgtatcgagtccttgtgttttgaatagttttacttgccttgtttaaaaggaaacaagaacaagtaaattcagtacctaatagactcaatatgggagagtataacacacggactaagttttatcaaggagcatcaaaaaaaaataatatagaattttggcaattcc

SEQ ID NO: 86964 - DNA, 505 bp, Glycine max
  Clone ID: PAT_MRT3847_49539C.1
ggctcgagacaaaatatagccttttttaggtcctaatttatataacacagtgcccagtgtacaattacacagttgctccactgcctttatattgaattatgcatcatcagtaatatactttggacttctcgttgagcattagcttacagcattaaatattgttgaccttgttcatgtcgcgaaaaaaaaaaaaaaaaaaaaaaaaaaaaaaaaaaaacaaaaaaaaaaaaaaaaaaaaaaaaaaaaaaaaaaaaaaaaaaaaaaaaaaaaaaaaaaaaaaaaaaaaaaaaaaaaaaaaaaaaaaagggggacctccagcacaggcacttttccccccgggaaaaaaaaaaggggggggcccccaaaaaggacaaaattttcccccaggagaaaattaaaaacccttcccgagggggcccccaatttttttttttgggggtaattttaaaccgggggtttcctaccaaattaatttgcccagggaaaaagggtgaaccccgggggc

SEQ ID NO: 86965 - DNA, 245 bp, Glycine max
  Clone ID: PAT_MRT3847_4953C.1
ggcttctatatcctgagcaccacactaaaaaaatgttgaaaaaacagctagaatctatagttgcaaacaaaaacgtatgaataggtcggttattctacggaggcgagaccatgaatcatcttacagtaccaccaacaagctacacgcttgcatgacacgttattatcaggttctattatcatccgtgtcaggccattggatccaggtatcacattcttgttaatactgggcaagacgcacacaga

SEQ ID NO: 86966 - DNA, 180 bp, Glycine max
  Clone ID: PAT_MRT3847_49540C.1
gagaattgcgttatcgagagagagagagagaaacgccatttagtgtcgtctgcacacatggcgtccctacagggcttcaccatcaccaactaccatttagtggatgaggatcaatacgtttcacacactgcatactcctcggtgcatgaacgtatgcaatatatcagctcttcacattca

SEQ ID NO: 86967 - DNA, 264 bp, Glycine max
  Clone ID: PAT_MRT3847_49541C.1
aagacgacagaagggatccactgagattattatctcattaaaaatgttatcataattgaagaaagaagcttttgagatgaaaaaattgaagactttgttcattattagttaaactttgtagatgctcatatttgagaataaaattatttatactcttatttataatatttaaagtattttaaaccattacaatttttaaatttttattttatgaatgttttaaagtatatttttattatagattgttattgtaacaaagtgcca

SEQ ID NO: 86968 - DNA, 503 bp, Glycine max
  Clone ID: PAT_MRT3847_49542C.1
ggctcgagctgctgccgcggctccggcggctgaagagacaccatactccactcctccttctttggaagtcatcaaatcatcattcgtcgacgccgctgcaacacccgctactacaaagccgggtgttgtactacagcgcaacggcagcgctaccaccagatgatattgttgcgccgcctctacttgagaacatcaactcagctggatgctggggggcaacagaggagaaccgccgtagtagcatcataagtagttgctgccaatacgacgttattattctacgaattaacaccttattccttactccggatgtttgtggcgacccttatcatcatcatcctcctcgtcgtcgtcgtcttgccgccctaatcggttatgacgctgcggctgcagatgaatgaacggatggttgtgctatacgacgctgccagcgaccatgatccatccttcatcctccaagaagaaaaaattcttgttgtggggtggggggttttttttttttt

SEQ ID NO: 86969 - DNA, 465 bp, Glycine max
  Clone ID: PAT_MRT3847_49543C.1
tctaaatctcgtccagtactgttgaaggaagaagaaaatcattctttcaatatgaaggtatagcttgtgctaccaatttgattagaacctctcttccttctttagataaatgttttccaaaccaatgatgatttttcctccaaattctatctctcaagtagacaaaaatagattttttttcttcttaccaatcatagaaggaatgccaagttattttcttgtccctaggcactctgttactcccaatttagttgtgatatgttcctttatttgagttggagtgtttctgctaaagaagatctccggtttctgaaaattgatagagacctgaagaggcttcaaaagaactaataattgagtgaagggtgctagcttctgattagttgtcttgaaaaaagaaaacaatcgttagaaaaaacaagtgtgaggagaagggctcctctacacactttcacaccatggatc

SEQ ID NO: 86970 - DNA, 373 bp, Glycine max
  Clone ID: PAT_MRT3847_49544C.1
aaaaaaaagggccaataacaaaaacaacaataaaaaaaaaacccaaggaggggcaaaaaagggccccgctaaaaaaaagaacccgatatacaaaggggggaaaacaaaagaaggattaggcattagggaaaaaaaaaatggcggcgggaaagttaaaaaaggggagacatcacaggggggaaccagggatgaacatgggggaacaccaagcaatacaagggggaaaaacaaaggggaaaagggggccccccaaatccccttaataaggggatctaggagggcccaaagggagagaaaaatttagaaccgggcacctcatatggatatataccgggcttccatgaaaaaggggaaactgcgcaaaaaaggggga

SEQ ID NO: 86971 - DNA, 566 bp, Glycine max
  Clone ID: PAT_MRT3847_49545C.1
gggggggccggaaaaaaatttttttttttggctttccaaaaatgggatgataatgggcctgcttgcttattgttttttgcccataataaaattgttttttgaacacattgctggggcttaaaagaggaagttattttgggaaagaggaacaattttggctgcggggcaggggaaaacctctccatttgctggaactgggtatgtttctggggccacaaggattttgggaaaagtgtcattcaatttcatgtctcgtttggggagctttcttacattttttacaggtttcacccttttgtttaagccattttaagcttttacccctttgtccaaaggtgtcttttttacaaaaagcaagggggggggaactcccacccttgcaaattgttccaaaatttggcctattaatccccggttaaggggttgggttctttgcttttgggcccccctttttaccttttccaccccaccccctttgagcccccatttttggttttgctccaaaaaatgacggtttccttattacaaaatcggccaatttccccccttaaattgaaccaaatttt

SEQ ID NO: 86972 - DNA, 724 bp, Glycine max
  Clone ID: PAT_MRT3847_49546C.1
ccgaaattaaaaaattaactcttttcacaaactctaattatctttacattttgttttcttaatttattgttttgttatgaattggattgaacttgatttcaggcttcagagaagaaactttcgaacccaatgagggagataaaagtgcagaagctcgttctcaatatctctgttggcgagagtggagatcgtctcaccagagccgccaaggtgttggaacaacttagtggccaaaccccagtgttttccaaaggttagttctcaataattttctaaatgggtagttcagtgatgctggtaatggccatagatctcacatctgtgttcattggttttgttgatcatttttgtgattctatcactttcttaaaatatagattgctggtgaagtgattttgaagaatccccaaggtttagggtagtttattttagggttttcaatggaaagatcgtttggttttcttaattgcatcgtcaacactcaaaggtctggtaatagggtggaaatggtagtttgagttttgaattttttgctacttataatctatgatgcacggacaccccagccccttgccgtgtccggtgtccgacacgtgtccgtgtcagtgtccgacacccgaactatgttctatattttggacattacaggtgtccacgtgtccagtgtccgtgtccgtgttggtgcttcatagattatatgattaagtgtgtacctgttcttttg

SEQ ID NO: 86973 - DNA, 342 bp, Glycine max
  Clone ID: PAT_MRT3847_49547C.1
gagagagagagagaactagtctcgagtttttttttttttttttaatttttaatttctgtttttcttcttgcaggtgttggaacaacttattggccaaaccccattgttttccaaagattgctggtgaagtgattttgaagaatccccaaggtttagggtagtttattttagggttttcaatggaaagatcgtttggttttcttaattgcatcgtcaacactcaaaggtctggtaatagggtggaaatggtagtttgagttttgaattttttgctacttataatctatgatgcacggacaccccagccccttgccgtgtccggtgtccgacacgtgtccgtgt

SEQ ID NO: 86974 - DNA, 522 bp, Glycine max
  Clone ID: PAT_MRT3847_49548C.1
actacatggtctaccgaatcttattgtataactaacgtataatgtacatggtacaaacaaaaatagtaattaaagaggttcattattaaacatatgactagacactcgaccgccaaatttgtcccctttaatttacggtggataaaggagcttatctttttccctaaggaaacctagaagaggaaatagctaaccgtcactgatttttcggaaaattattttataaggcctaactgaatgccctagacttgaaaaaaatccttaacaaacatctagcatcctccctttaaatgaaaccgtcttactctacattccttatccaaccaaggggcatgaaataaaggacccaagggaaaacattatcaggtcacttaccaccgggggtacacaactaataaaaaggctcatccccattgtcttttaacccctttgcctttgagcgcattccacaattgacccacttttccatacaataagcaaagtgggtcccttcttttgggaaatacagacaccccttaattc

SEQ ID NO: 86975 - DNA, 651 bp, Glycine max
  Clone ID: PAT_MRT3847_49549C.1
ccacgcgtccgttcttttacactgccgctgcaacaatggcttcagagaagaaactttcgaacccaatgagggagataaaagtgcagaagctcgttctcaatatctctgttggcgagagtggagatcgtctcaccagagccgccaaggttcacttcactcattgctcccgctttttttttttttttaatttttaatttctggttttcttcttgcaggtgttggaacaacttagtggccaaaccccagtgttttccaaaggttagttctcaataattttctaaatgggtagttcagtgatgctggtaatggccatagatctcacatctgtgttcattggttttgttgatcatttttgtgattctatcactttcttaaaatatagattgctggtgaagtgattttgaagaatccccaaggtttagggtagtttattttagggttttcaatggaaagatcgtttggttttcttaattgcatcgtcaacactcaaaggtctggtaatagggtggaaatggtagtttgagttttgaattttttgctacttataatctatgatgcacggacaccccagccccttgccgtgtccggggtccgacacgtgtccctgtcagtgtccgacacccgaactatgttctatattttggacattac

SEQ ID NO: 86976 - DNA, 528 bp, Glycine max
  Clone ID: PAT_MRT3847_4954C.1
ccacgcgtccgacatcttgattttataatttctaaaaacacacatcaaatgatttcttggttttttctagttaatgtggaaagcagatggaattttactatttcagttattgggtgtgctaattttgatttgaaagacactatgctagtgttgtctagtactatttaatactttggccatgcacttgtttttttttttttttgttaattgcgtaatgtaaatactaatttttgttctgaatgtttgtagcctggtccggattccattggaatcgttgctatttctcacggttgccctggagtggctgcacgtgcttgcggccttgtgggtctagaacctaccagggttgccgaaatcctcaaagataggctctcatggtttcgtgattgccgaactgtggatgttctaaatgtgatgtccactggaaatggtggaactattgagctgctttacatgcagttgtatgcgccaacaactttggcaccctggtcgtgacttctggttgctgcgttacacatcacttttgga

SEQ ID NO: 86977 - DNA, 434 bp, Glycine max
  Clone ID: PAT_MRT3847_49550C.1
gatccacgcgttcggtagtttgttaccaaattaattttgaatacaacgactctttacttccatataaaaaaaaaaaaaaaaaaaaaaaaaaaaaaaaaaaaaaaaaaaaaaaaaaaaaaaaaaaaaaaaaaataaaaaaaaattagaaaaaaattaataaaaattaaaaaaattataaattattttttatattattattaaaaaaagaaaaaaggggcgttatttttaaaaagattttaaaaaaaaaaaggcgtggcataaaaaaaaacaaaatcttttatacaacacgtcattttcaagggctggggtgttttttaaaagaaattgattgatgtggcctgttgttaaacaaaatagaaaggggaagcatgggaagccccttttgaaaattgcattaagaaacacccctttggcggggaggggcgatttgaata

SEQ ID NO: 86978 - DNA, 319 bp, Glycine max
  Clone ID: PAT_MRT3847_49551C.1
ggctcgagagaatgaccatcctgctgtgggggaaaaaaaaagaaaaaagagaaaaagaacacaaaaggggcagagcgctagctagagaactgaaaaacccgatatgtaaattgggccacgaacatgcgggcagacgggtgttccctatagtgaggttggaatcaagcgcggagtagtcacggggagtcttatttgcacaggaaaggtgcgatgtgaccacattcttagtcagcataggatccgtaatcatacatgctaaagctgggggtgccttaagagctggctaccctgcactgatggacttgatcgtctctgaccc

SEQ ID NO: 86979 - DNA, 355 bp, Glycine max
  Clone ID: PAT_MRT3847_49552C.1
aatacatggacggtttttacaggtccaagtttcattcaaaagacctttaccaaaatattaaagcatccgattagaacaacggcaagtttttatattccaaaaaaaatcccttatttggccccaggggggggccatttttatgggtcatgatcctaaagcatctctcatttttgggggccatttgtgaaacacagctttttcagaaagagggaacaatgccatatccaacttctgtaaaaagagggggggaaaacatttgatccactaaaaataaaacacttgttcttttggcaaaaggaccttttatccgggggctagtttttagataggccttccttgaggaaaacctgattgt

SEQ ID NO: 86980 - DNA, 326 bp, Glycine max
  Clone ID: PAT_MRT3847_49553C.1
ttcccagctcgaccgactcatactcataaccctaaccctaatctttctcccactctttcttactaccaaacaatccctaatccacgcatgtcttacactgcttgtgttcacaaaccatctcacatctcttcaaccattaccacaactcgttccactccatccatcactttaccccaccatcattctcacatttcatattttttctctatcttctacctcacattaatacaccatcattaacatctatttaactacaactactaattcttactctacttcaattatatatcatccttaatatcatcatcaccatttgcacaatcaac

SEQ ID NO: 86981 - DNA, 172 bp, Glycine max
  Clone ID: PAT_MRT3847_49554C.1
tctctctcaaaactgaaaaattaaagctaaagactgtatgtttggaattggcgattatgattatcctcatcacgaatattatctaagttgtgttgaactatcgatttgggaataatgtgctccttaattgcaacaactatgactccatcttataccttaataatctactagc

SEQ ID NO: 86982 - DNA, 277 bp, Glycine max
  unsure (1)..(277): unsure at all n locations
  Clone ID: PAT_MRT3847_49555C.1
ctgtagttgcccnccanttcttccaccacctatttttgaaaacattctctctnctctcctccaaccacattttaggggagcaaccgcgctnttttctgcgaccccacatcggcgntttttantttttcattttgggggtgttattgctggtccgtttttttttttttgtggcttacccttcaaaatcgtccttaccaaaaattgagcgatgaattgttgggatcaggtcctgtggcattcagagtggctatgacaactccgcaatgtcatgcacnaa

SEQ ID NO: 86983 - DNA, 227 bp, Glycine max
  Clone ID: PAT_MRT3847_49556C.1
atatttccagttttattttctctcgaatcacataaatctatgagggttacatcactcatctggtgtgaaaattaaaattcaaaccaactcatttcaagtgtactcaattttttagctctgcacaacttcctattaattaatgacatgtacacatctcaaataatgttctatacttcatacatcagaagcatactattagaatgttgcgcaaagtcctagataatggt

SEQ ID NO: 86984 - DNA, 964 bp, Glycine max
  Clone ID: PAT_MRT3847_49557C.1
aaaataatcaatccaaagttcaatctaatttaattacattcaagtcaaattaaattgaactacatattactttcattagaaatggtaagaatttttttatttttttttgtgtaagaaccgaatcaaaactaacccctgacacctctaatacctaaatggatatgatacaaatatgtctctaattttgaagtatccgtgtatcatattgtataggaactcagatcggagtagtcttgtcaagcacacaaaccccacttggtgaaacacatttaagaaactcaggcaggttatagtcatgatgaaaagtatcgtgtaagaaattctgtacatatattttacagaaattgagaggcaatgctgaaaaaaacaattagactccttataattcctatttctatatcctcgattgtattccagagtcctaccttttgctgctatggttaggaaacaaaaatgctgaacctccttactccaatgcacaaaaggtctctgataaattcttttaacttttcttcataatttaatttaatgtacctgtttggaatttagttatcaagcatgatccaagaaggatgtattagatgaaaattgacggtgtacatcacttgtcgtgacagctaagaaattcaattatacatggatacacctgctccaccgccagccttcctccaaccaaatcataatgagcataatgtgagcctccaggttctccaaaaactttataggtaaccaggtgctcaggaattagcttaacggtttcttccacagcttcaggtgggcaaatcagatcctggtctccagcaatagctaagataggggtattgcttttgtgtagatgatccttgtaaaaaaaggtcccattcctgttacataaaccacgctctcgaaatgctgttgtgagctgcaagacaagttttgcgggtatggtgcaaaagttattcaaaacaagtctttttaataaatc

SEQ ID NO: 86985 - DNA, 539 bp, Glycine max
  Clone ID: PAT_MRT3847_49558C.1
tctctttctagattggaaaaagtttcctgtacggaggcacattgagctggtggaaaaaccttcaaatatgatataattggtgctggttcacattgttcacaagattttcctgaaaaggaagatcaagaaaaacccaaaacgattgatgccagattgagacaaagaatagatcctcaatataatgaggctcaggctcagatggaaacaaagtctggtaaattgacttttgatgatgacgaaactcctaacggttccatgttggatcttaacagttctcaatctataagtgcacttcccaacaacacagtttgaggaaccattctgcgcaacgatctatctgaaaactgtttgacagagggcaacttcagagcaagtgttgatttgcagcgcactcatcgtattaaaggagtgattaacatggcggccacagttgatattgctgataatacaggtatagcattagactgtgctatgaatcgtactataagggggcgcgcgcaatctgagatagacactatctggtgtcagactgtgaatat

SEQ ID NO: 86986 - DNA, 801 bp, Glycine max
  Clone ID: PAT_MRT3847_49559C.1
cccacgcgtccagccacgcgtccgtacggctgcgagaagacgacagaaggggagatcagaccacgatcaaaccaaaccctaatatcaacttcatctgtttcatttgattttgattcgaacccagacagagacatagcctctttctttcgtttggagaaacaaacccctcgtttcaatcattgatcctttcctgttagatacgaattactcttccaatttcatcatggccaaaacctccttcaagcttcagcatcctttggaaagaaggcaggctgaagcttctcgcattagagagaaatatcctgatagaatacctgtgattgtggagaaagctgaaagaagtgacattcctgatattgataagaaaaaataccttgtccctgctgatttgactgttggccagtttgtatatgttgtccgcaaaaggattaagctcagtgcagagaaggctatttttgttttcatcaataacactctgcctccaactgctgcattgatgtctgctatttatgaagaaaataaggatcaagatggctttctttacatgacttacagtggagagaacaccttcggatcccactagggtcgaatgccataatgcatgatatcttctgtaaatagctcctacaaaatataatttctctgcacccaattatcaatgcacagccttttgagtattattatcctacactttgattatgttatctttaaattatgatttgattaccacgcatcttttcagtaacatctagtttcctactccaaatcttcactggatgaatttagatttggttaccacgc

SEQ ID NO: 86987 - DNA, 398 bp, Glycine max
  Clone ID: PAT_MRT3847_4955C.1
atcttcgtcaaaaagcttctcattcatggcgacaacgctcatttcggcttactcattcatgggcacacctatcgggtaactccctcaccaccaactatcactgcggaccaggctcgacatcaccaaagtcctcgtacgacttcacgaatataccccaatccactccatatgtcccaacattgtcttccccggaatcgcgactagagccgtacgtcttctctacacgctcgccgatgctactgttgctgctgaccctgcggctgctgcagactctgcggctttcaccaccgatgctgaccgacagaaaagcggatgctgattctgcttcatctcacataccatggaattcgttctcaacgaggccaatgatggcctttctgtcgagcatgtaccttatg

SEQ ID NO: 86988 - DNA, 219 bp, Glycine max
  unsure (1)..(219): unsure at all n locations
  Clone ID: PAT_MRT3847_49560C.1
aacagcaaaaaagaccccacaccnagagaaccananagnacgagcaaagacacgcaccgagancngnagccgangcaanagaagcaagnnacgcaaggacacaaacggaaaaaggacgngaacgcaaancnacnggggaacccaaacaacangagccncaggaaggaagaggcagacaggaacagnncccggccaaaccaagagcaccngaaaggccaa

SEQ ID NO: 86989 - DNA, 467 bp, Glycine max
  Clone ID: PAT_MRT3847_49561C.1
ggcaacaaggacttttgcataaactacatgggtaagggatctttgaaatgcccgaaatcaggagcaattttgaactaccaaaaaatatcgacaaaacccccaaaacgccgtgtatccgaaccccgagtgcctttttggggggaccaaagcacgcccattccgtgctcgcccggatagaatgaaaaccaagatcatgaaaaacatcaaaacgctcatgattgcgccctcgcctttcaaagggatcatcatcaaagtctggatggagcgacggtttgtggatcgcccaggtctaattaattactgcttcctaaagcgcgccaaatgcaattggcgcctcgactggtaagtggtaggggttgtgtctgctgaccaaagcggaacagctttgaaacgccctatgctcaactcaactcgattcgactcgactggcaacggcatgaggaatgacggtgcctcgctcgcgtagg

SEQ ID NO: 86990 - DNA, 250 bp, Glycine max
  Clone ID: PAT_MRT3847_49562C.1
cgggccaaaagtggctttgctaataccattgtggctatgagtggtatgatatcatacttgtttacaattaagttttgaatagtacaacccttcacatgattatcactgataactggccgtcaaacccaaacccaaagccatttccttgcaaaagcggccttccaataggatccatccttacgtacacatgcatgccacttcataggtcttctacattgtccaccaaattcagttcaccggacgtcgtttt

SEQ ID NO: 86991 - DNA, 376 bp, Glycine max
  Clone ID: PAT_MRT3847_49563C.1
cactggggggcggggttcacagggaccaaatgcattctggtggctatttgacactgcctacactaactaaggtggcatgaagtaccataaaatggctcactgtacaaccgcgcgacacaaaaacatcatgtggaggctccatcctgcgcgagaatgtatggcccaaaacatggacagtaggaaccttttgtggaggggatgtatagcaatgcacttatcatgatgccggtatgagaagaaaggctgcctcaggtggcacaacagataatacaggaatggcattatcctgtgcaataaagagattccttagggggcgtgccagtaatgacaactacaccatgtgctctaaggactgacatatatggaatactgcctc

SEQ ID NO: 86992 - DNA, 224 bp, Glycine max
  unsure (1)..(224): unsure at all n locations
  Clone ID: PAT_MRT3847_49564C.1
ctganaccacggggaaagggggtgattgggggacgaccacaattttttcataaccccagggagcgacaaaagacaattttttacctggcccccccccccatttataattaaaaaggggatgtgggagaagcaccacccaacattgtcttcaacggcacaaaaaacttacactctattttggaggaaaaataaacccaacaatttattttaaaagggtataaaac

SEQ ID NO: 86993 - DNA, 1388 bp, Glycine max
  Clone ID: PAT_MRT3847_49565C.1
ccggccaaagcttccgctgaatctgcgtgtgtttgtgaattgttgttgagatctgaatcaaaatcagaaacgataatggctacaccggaccacctcttcaacctccgcaacaacttctacctcggcgcttaccaagccgccatcaacagcagcgacgttgccaacctctcccaagaagataccctcgagcgcgacaccctcgtccaccgctgctacatcgccctcggccagctccagttcgtcatctccgagatccacgacgatgctcccacaccactccaagccgtcaaactcctcgccctctatttctcctctcccgacaccaaggattccgccatcgcgagtctcaaggagtggctcgccgatcccgctattggaaacaacgccacgctgaggctcgtcgccggtctcgtcttcctccacgagaatgatttcaatgaagccctcaaacacaccaacgccggtggaaccatggaactgcacgcgttgaatattcagatctttattaagatgcataggtcggattacgcagagaggcagctgcggatcatgcagcagattgatgaggatcacactctcactcaactcgccaatgcttggctcaatttggctgtgggtgggtcgaagatccaggaggcgtatctgatcttccaggatttgtcggagaggtatcagtccaccagcttgctcttgaatggcaaggctgtttgctgcatgcacatgggcaacttcgacgaagctgagacccttttggttgaagctcttaacaaggatgccagggatccagaaactctagccaatctagttgtatgctgtcttcatctcggcaaaccatctaacaaatcattcagccagctgaaactttctcacccagagcatgtattggtcaaacgggtatcatcagctgaagaaagttttgatagagcgctacaatcattttcctcatgagtgtcgatgattgaatttctttcaagagttgaatggtgtgaggtcttcccgtgcaatttttacaccttatcgtggctattgtattggttgcgtatcttagaacataatcaactgggtaatgtgtcatagtattcaaatttgttatgtttttggtttacttgagtcttgatgttgtaaaagctacatctgacattaatttttaaacatgttcatttacatcgtctattttactagaaaagggagaaataccaataggtattaagtaaacaagattacgattgtgtggatggatagggaaaactctattcaattttatccataattttacattcttgcatttgtatttttcaaaaaaaaaaagaatagaagaccaagagtatgaagccttcccgtgcaatttttacaccttatcgtggctatttgtattggttgcgtatctt

SEQ ID NO: 86994 - DNA, 652 bp, Glycine max
  Clone ID: PAT_MRT3847_49566C.1
ccacgcgtccggtcaaagaagctgtcgcacgcattactacctcaactgatctgggaaaatcaggcgtctctttttaccagctgctgctaacgttgttcctgcctgcaattttccatctcccctgcacaaattgccaaaacaaatagccgatggctattcgtcaacatgaagaagttgttcgattttgggaacaaagccctctgttatgttaggatgctttctggatatgaagagcgaagaatacaatcttataggctgcagcttgagctacgtgtacaacaggcacaagcaaggagggcggccataaataaagtaccacaacaggttatattatccgatgatcgtcgaatggttgaagagatgcaggctttcaataaaaagctggaagaaacataggcaggcgttgaatactatttcaaacctctagacaaggaatctgagttcataatgaaaatgcaactacacggggaagagaaaacttcagatatgatgatcaatgcactgtacaaacaagcttcactccaacatgttgaagcagataataatgcatgtacgcatcaagttgacaactctgataccaacctgaatgaatctgagatgatcgaagaagagaaaacattgaacgagatgttgaaagcactactatcagaag

SEQ ID NO: 86995 - DNA, 133 bp, Glycine max
  Clone ID: PAT_MRT3847_49567C.1
atgtctgataacagaattttgggctatgattcctaaccatactagggataagacgtaacagagtttgaatacatgaatatgcattagccaattctatgattggttaagttacatttatataagcagagaaact

SEQ ID NO: 86996 - DNA, 1280 bp, Glycine max
  Clone ID: PAT_MRT3847_49568C.1
ggagggccaactgggtatcttgcttggaagatgatggctgagggtgactatacaagcgcagttagattagtaattcattttacagaatctggtttgaagccagaggtctacagttaccttgttgccatgactgctgtggttaaggagctgaatgaatttgccaaagctctacgcaagttgaaaggctttacaagggctggtttggtagctgagttagatctagaagatgttgaacttactgagaagtatcaatctgatacactagccgacggggtgcgcttgtccaattgggtgattcaagatggcagcccatcacttcatggaatcgttcacgagaggctccttgctatgtatatttgtgccggtcatggaattgaggctgagaggcagttgtgggagatgaagcttgtgggtaaggaggctgatggagatctctatgacattgtccttgccatttgtgcatcacaaaaggagtccaatgccacggcaaggctgctgactcggttggaggttgcgagctccccacagaagaagaaaagtctgtcgtggttgttaagaggctacatcaaaggcggccattttaacgaggcggcagagactatcatgaaaatgcttgaattgggattctatccagagtacttggacagggcggctgtattacaaggtttgaggaaaagaatccagcaatatgggaatctagatacttatgtcaggctctgtaagtccctctctgatgcaaatttgattggaccttgtcttgtacatttgtatataaggaaatataagctttgggttgtgaaaatgctctaaggcctatgtatggattgatagaaaggaacaaaatagtatgaaatgaaaggggatgatacatggttccattgtttggattgcttaaaataggatgaaatggaatggaacattaaggaatatacattccattccattaaacacccctttttcttcccttcaatttggtgagtataggatggaaccatctattcatttcactctattatgttccatcgcattccacaatccaataccattagatagaaaacgaaccggtactgtgccacgtttacaacctttggttttggaggcatatttgtatatcgagcactgattttcttggtgcttgcttacgtatataattttgtatagttttaatgttaaatggaccaatactagtagaagagcaatgttgtaatgaatatgatgattagtatcttctcccgaatgagttactcgtgcatcaggtggatggtgtcatgatatttgag

SEQ ID NO: 86997 - DNA, 332 bp, Glycine max
  Clone ID: PAT_MRT3847_49569C.1
ctgtgctttcttttattgattataataacattgctccttttgccaaaccatttccaaatctatttattactcaatcaagggaaaaaaaacatgcctaacaacagggaacatgttaaactaacctggcaaaattaccagtctccgttgaattctttttaacaagcgaaaaagcccatggtttgaagaaatgggaaaacaaaataaagctattcccaagccgagattccatagttaaatcaattttcagggctcccctcccattgatcaaagaaatgtccaatacaaaggagaccacacttttttttattgaggcaacccaccgttaatttcat

SEQ ID NO: 86998 - DNA, 358 bp, Glycine max
  Clone ID: PAT_MRT3847_4956C.1
ccacgcgtccgtgcgctcgaattacgactttcaagcagacgcccgaacgcgtactacaagctggatttgcttgtgactggatagttaacgaagcaatttcataacatgcatactacaagttctttgtgcacatttcatgtacaatgcatctacatttgccatttacagttgacactttgtagtatgaagcgacaactgtccttacatcctcaaaacttaataggctatcagccactcaaatttagcatgaaacgcctcagatccctgccttgcactgtaccgaaatctgaatcaacggctcagctgtcctgagatatgaactggacttaatacactactaccttcactacttggaaaa

SEQ ID NO: 86999 - DNA, 237 bp, Glycine max
  Clone ID: PAT_MRT3847_49570C.1
tttatatcgaccttctcggtggaggaattttactggacaaaactggagattggatcacacttatacagaattctacaattagtctcgggtcgagagttgctgctcggaagaaaggctgcctaacggtcatgattgtgatgtctggcaatgcagcaggtaaaaggagcgatcgtgcctcattggtacaagtgttcttaacaaactgcatcggggctgagcatcttgatgcatgtaagt

SEQ ID NO: 87000 - DNA, 495 bp, Glycine max
  Clone ID: PAT_MRT3847_49571C.1
ggctcgagatattgctcatattgaatgtttgctcgatttttcaataatattggattgcatcagaatttcttttccattttttattattcaatggaaaatttgaatttggaaaaaaaaaaaaaaaaaaaaaaaaaaaaaaaaaaaaggggggggccgaaaaaaaaagaaacatgggcgcgccgaaaaaaaatgaccacccggacccgggaatgaaacacgtaccgcataccgggaggcgaacacaaatttcccgataaagagtggaaaaaaagcttgcctgagaaaaagtgataccctgtaccagtgcgaaaaagaaatacgtcagaattaaaaagaaaaaacgccggggaggcataaaggggaaaccacgcagtgccaaaggggtgagcaaactgaccttaatagagttgggaaaactggccgctcaacagtaagaaaaaatgcccccccacccggagaaaagaatttttcaattcgcgcccaaaggcggttttt

SEQ ID NO: 87001 - DNA, 116 bp, Glycine max
  Clone ID: PAT_MRT3847_49572C.1
ttgatcaagctgtacatttcgatcgacaatgatcacgagggtggcaatgttagttcaaactcagctcagctaattgctagtccgatattagatctttatctcgcatctgcagctgc

SEQ ID NO: 87002 - DNA, 279 bp, Glycine max
  Clone ID: PAT_MRT3847_49573C.1
gaaaaaatttgcatatggctacatcgaggaccttaagtgccgtgtgctggaactgccttaccaaggcgaggagctcagcatggtcatcctgctgccggatgacattgaggacgagtccacgggcctgaagaagattgaggaacagttgactttggaaaagttgcatgagtggactaaacctgagaatctcgatttcattgaagttaatgtcagcttgcccaggttcaaactggaagagagttacactctcaactccgacctcgcccgcctaggtgtgca

SEQ ID NO: 87003 - DNA, 373 bp, Glycine max
  Clone ID: PAT_MRT3847_49574C.1
cccacgcgtccggcctgctgtaagaccacatgagaggagacgactaaaggggactggatctactgccagagaccctatgaagataggtgttcatggctatacatctgcataggacgctgctgaacacgctgttgtcatgatatcagaccttgactgtgattggtacctatcttacgacaagccccttcctgcgtattgaagtgtctgtatggcacgaaatcctgaatgctgtacattaacacttttacattgacagacctcatgcatacgatgtcaggatggtcgctggtaatcagagctcacacggatactgcagtatggagataaccatctggcttataccccgcgttacagtcagactgacccaccggac

SEQ ID NO: 87004 - DNA, 794 bp, Glycine max
  unsure (1)..(794): unsure at all n locations
  Clone ID: PAT_MRT3847_49575C.1
atagttcgttggtttcttggggcagaagagagaaagggaactacaacatacaaattgtcgttttaaattgctttacctttttaagccaaggcccagacagacaccgcatccccctctctctctctctctcactaccattgatttccccgcacgttcctctccttttttgctactcttgttcttttggggtgaaaactagaaagaagcgtacggagagaaattttgttttaggaacaaaacgaaaccaatgggaggatgtgcaacgaagccgaaggtctccaaggacgatcccgatggaatgcccaaggcaccccaaccagaaccccaacctgaactccaacccaacaaggacacccttaaaaccaaagcacccgccgcccaagtggaacaagctgctgctgctcacaacaacaaccttaatgtcaacgaaattgttgacgacgaccaagccaacaaacgacgctctctcagcttcttgttcaaggagaatgaagataaaaagggttccacagaaaatgagaaaaatacagttgaggaatctgtgaaagaagaagtgttagaggtcaagaaacctgcggaagatgctaaaagcaatgagccaatagttaagcaagaatctccaaggccagatgagaagctgtctgaggagagtagaaataatgaatcatcaaagcaagaaaacgagactttgaagacngaaacatcacatgctgaggaaactcatgtcaatgaaccagctaangaaacagtgaaactagagccagaggcttagaaccttcagangaaactctgcc

SEQ ID NO: 87005 - DNA, 218 bp, Glycine max
  Clone ID: PAT_MRT3847_49576C.1
cacactttgggcttgaagaccttacctgccttttcattacaaaccacgcccactgaggcacctgatccttatactccgtttcttctctcccgcaccaaagccagtcgatgtcccgcccccacgctgttgctaattccatcacgtacattcccactttccccatcaacgctaccatttttgaactcaaagccctatatactagattttaataaattttc

SEQ ID NO: 87006 - DNA, 287 bp, Glycine max
  Clone ID: PAT_MRT3847_49577C.1
atcatttgtgtaattggggggactgccaccccaatgcaggaggttcaggttccaatggatgggttaatttcctctcaggaatgtgttccaagaacctattgtgtttaaaatcaacaaaatctttttgtgttaaatggggggatggaaaaactgactttcccccagggcacttcccgaagtgtaaagagaatgcttttttctataggggggagggagctggtgcaaagaaatgctatttctcatgaaatatggccaaatgcttgttcttttcaaatgtgggaagatat

SEQ ID NO: 87007 - DNA, 1385 bp, Glycine max
  Clone ID: PAT_MRT3847_49578C.1
cctttgcaaaaccacgtttcgcaaactccactcagatacaccaattcacagtccgatacaaacaccaaacagccaagatgcaccgaacatacagcatgcgctcgtctcgcgcgcccacggcgtcgcagattcagagcccgccccctccgtcgtcctcgacgaagagcggacgtttcttcggaaaggccaatatcggccacaccttccgccacaagtcggcaggcgcattcggccccgacctcgcgaagaagctttcacagcttgtcaagatggagaagaacgtgatgcgcagcatggagctggtttccagggagcgcatggaggtcgctcaacaactctccatttggggcgaggcttgcgacgacgacgtctctgacgtcaccgacaagctcggtgtgctcatctatgagattggtgagctcgaggaccagtatgtcgatcgctacgaccaatatcgcgtcaccatcaagagcatccgcaacattgaggcctcagtccagcccagccgcgatcgcaagcagaagatcaccgaccagattgcgcagctgaagtacaaggagcccaactcccccaagattgtggttctcgagcaggaacttgtccgtgctgaggccgagtctctcgttgccgaagcccagctttccaacatcacccgcgagaagctcaaggccgctttcacctatcaatttgatgccatgcgtgagcattgcgagaagcttgccatcattgccggctacggcaagcatcttctggagttgatcgacgacaaccctgtcactcccggcgagacccgccaggcctacgatggatacgaggctagcaaggctatcattcaagactgcgaggacgccctgacgaactgggtctcacagaatgcatccgtttcctccaagttgtcgcagcgttcccgaactttgtcgcagcgccgccgcaacgctacccgccgtggcgaaggccatgacctctccggccaagaccagccactcgacagcagggagtccggcctctggatccccgccacagagcaccaaggtaacgactacgaggaccgtgacgacctcgatgatgatgtcaactccactattgctagcgagcatcagcgcggtcgtgaggaggagagggtcatcgctgcatagacgtctcactgacgtgtatgctagtgttggcctccgtgtcctctaatgatactccgcggttgacgatgtatacccccgacggagttaccgatgttgatggcgctgcggagagtgacttgacgcgtcggacttgcgtggcctcggcaatatgaaggagcgcgttttgtatacacgaacttcttgatgatttacgatgcgataggcggggtgggcatctcgcaataataacgtaatacagtaattgttctt

SEQ ID NO: 87008 - DNA, 583 bp, Glycine max
  Clone ID: PAT_MRT3847_49579C.1
gttcccgggtcgaccacgcgtccgacacattcaatccgaggctgtggctcgatgtcactgcacgtgtaaaactacggcgtcgtcgtcagacatttgcaaaaccagttaaacaacgatgacctcaaccacactattcacgactccaccaccaccgtcgacaacctcagcagctccggtagacaaagacaacctcgccctcctaatcgacaactccaaatccacacaccatcttctccaaatccacgccgcactcctccgccgcggcctccaccaccacccaatcctcaacttcaagctccaacgctcctacgcctccctcttccaccgcaccccaaaccctaacgtcttcctatggacccacatcatcaacgcccacgcgcatttcgacctcttccaccacgcgctctcttattactcccaaatgctaacccaccctatccaacccaacgccttcacactttcttccctcctcaaggcttgcaccctccaccccgccagagccgttcactctcacgccatcaagttcggcctaagctcccacctttacgtctccacgggcctcggtgacgcctacgctcgaggc

SEQ ID NO: 87009 - DNA, 512 bp, Glycine max
  Clone ID: PAT_MRT3847_4957C.1
agaaactcttcaggaaaaggcatgctggaaactagcaatgatcaagtgaaactgaagcctttgcattgggataaggtgaatactaataatgctgatcactccatggtttgggataaagttgatcgcggctctttcagagttgatcaagatcttatggaagctctcttcggttatgttgcgaccaaccgaagatctcccaaaggaaagagtcactcagccattcctagcaaggatgcttcagctcaatcagcaaaaactaatttccttcttgaccctagaaaatcacagaacattgctattgttttgaaatctcttgcagtctcacaaggcgaaattctcgatgcactcactgacggtaagggcctcaatgcagatacccttgaaaagcttgctagagtttccccaacagaagaagagcaatctcttatccttcaatacaaaggagatccagcaagacttgcagcagctgaatcattcctctttagcatccttaaagctgttccgtcggcttt

SEQ ID NO: 87010 - DNA, 484 bp, Glycine max
  Clone ID: PAT_MRT3847_49580C.1
ctttggtttcgagaacttactttttgttgactctttgtcgaaaaaaagaaaattttatgggccaagctttatctgcacaactcaaccagggggttctttgcccacattatatgtgcggaaagtttttttccaatattgcctataacaatcccatccgtggtaatcacgtgctcatatatgcaaacggcatttcccctctaaaacgtgagtgcataacagttttataatgaccaaagggcataagcacatgtggcaattgacatacaaattgacaatactgttatgacactaaaaaggggtgacgcacacagtttggatgcagacctcctgcctccagaacagattgtgccttcactgatttctaccaagggagacatcatcgtctacttgagtcaagggtcccacataaatatgggcgtgtggctcatagaaacaaggaaatccacgttttaaaaagtaatccggcgctggcttcttagcaggt

SEQ ID NO: 87011 - DNA, 332 bp, Glycine max
  Clone ID: PAT_MRT3847_49581C.1
gaaaaacggtaatcttcaaagttacgtccatggtccgaaatctgatcatattgctgtgcgaggactgaaccaagtctatgctgctcactgctgtactccctagaaaacctgagcgtctaggttagcatattgatgccactaataatcacccttggagctcgatggatactttgcctgcatcagctcatgtgataaactctcttttgatgctgttgattaccaagatgaccattgatgcaggaatgaacaatggttataccgttgtcgtcaccgtactaagacatcctaatgatgcgaagagagcttccatagatattactctgaaatcgtat

SEQ ID NO: 87012 - DNA, 620 bp, Glycine max
  Clone ID: PAT_MRT3847_49582C.1
gcacatacaaaacaatatagtttactcaccacatcgttactcacatccctgtatttgtattacactattactcaataagaatgagtactaaaggcaaaacaggttcccggtcttcacaaggtgatgtgaaacagcctcctcccaaccttggtggtgccatgggcaacacgggaagttcaaaaggcaaaacaggttcctggtcttcacaaggtaatgtgaaacagcctcttcccaacctaggtggtgccatgggcaacacgggaagttcaaaaggcaaaacaggttcctggtcttcacaaggtgatgtgaaacagcctcctcccaacctaggtggtgcaatgggctacgcaagttcaaaaggcaaaacaggataaggagaagaaaataccataaaaaaaatttaaaaaaattcttcataaattaaaattaacttatacataagttaaaaaattatgcttttgaaaagctaatacaaataaaagttctaaaattagattatacttcttatgaagaaacttttttatatcttctcttcttatttttttttcatacaagtgtttctagtctaaacatattaaaactactttatttagaaatcacatgtttgtttacaacttatt

SEQ ID NO: 87013 - DNA, 511 bp, Glycine max
  unsure (1)..(511): unsure at all n locations
  Clone ID: PAT_MRT3847_49583C.1
ggggaaaaacaatgtaaattcatatgaatcacaacggattggtcatagcctcctaagttatgtttggaagcaatggagggatcatgcaccgttaagcatattggacccaaatatgaaaggaagttttcctgaaattgaagtaattaggtgcgttcacattggcttattatgtgttcaacaatatcctgatgctagaccaacaatggcaacaattgtttcatatatgagcaatcatttgattaatttaccaactccacaagagcatgcatttttgttgcaaatggatccaaaagcaattgtacaagaatcaagttccagccaatcttccacactattgtccaacaacgaaatatctataaccgaatttcttcctcgatagcaagctaatgttccctttgatgtgttgtgatctacagatattttggttgtataaaaaataaatgttaattggagctttcaccggtaaatgtcaaattataagcttttcttctctggcggggngnnnntggtg

SEQ ID NO: 87014 - DNA, 366 bp, Glycine max
  Clone ID: PAT_MRT3847_49584C.1
ctttgtgttttttgtttttttttttctttttgttttccccctttttttttttttatgctttgtgattggttctttctaagccctcaaatgctcccctccatggccttaagccccgggaaaccctgcccaaaaaactcctgcgtcacgcccacgaacgcatatatgatggagtgcgccaaaagggaaataagacattgacaaggggacttggggtgcattcacagcacagggaattttctccaattgttggaaaggggaccccttggagacctggttgtttgtggtaccgcggatccatataggtggacatcggggggcggtcatggggcagcatcattggctagggactagaacccagtgcttggg

SEQ ID NO: 87015 - DNA, 278 bp, Glycine max
  Clone ID: PAT_MRT3847_49585C.1
ttttatattttttatgttatttttatttattttgcatttgttttccaacagaaaagctcacaatatatacctacaaagttaaaacatctgcaagaaacccgataaacatgtaccaaaaagcagaacgagtcatacaagctgatggccctcccagcatcagattgtcaaaatctggagggcaatcttcataaagaaaccagctctacagcaccactacaagtggtgctcactccaacaacataagtaggagattttattaaaaagcttacaaaaggaaa

SEQ ID NO: 87016 - DNA, 1276 bp, Glycine max
  unsure (1)..(1276): unsure at all n locations
  Clone ID: PAT_MRT3847_49586C.1
aacatatacttggattacatgtaaataacgaaggaatagaaaataattttcctgtagaagcagctgcattgaataatttgattcaaatactaactgttgatttttcatgacatttaccatagatgttcaatacctggggtcacactgtatgttttgatttagtaatatttcattttaatgactgcactaagtattggatgctggatggaatgaattctatatttggtactggtaatgctaaatgctcaagtctagttcatttgtgtgaccaacaacaatatatgctcatagcctcgcgtacggcggccagtaagtaccgctccgggatagtattagcttggcttgactcctctcatcagaagaaagcgaaaaaagcaaaaatgcaatctatgtccctgacgctgagcaagaggctctccaattcaaagcctctcttcagaatctcttccagcctcgtcgctcacgcatcctccgccacaacctctccgccgccaccttcgccgccagtcccctctccctccgccctcaacagcctcctcaccgctccgtggtccgccactcagtcacgcggaatcacgctttccggatctgatattagagtcgggaatctcattggaaaccgaggacgcgctcacgaggttctcaaactgtatcgccctcttgaaggaacgggcaaagccactcttgaggttccgcctcaaagtgtagctggttatgccacagttgctactacagaggatggtgccgaaaggaaggaacgaaacagtggattgagtaaggcaacgaagacaaagagagagcagctcctaaaagctactgcagttgcctctcttcttctaatatacccgaacacttattcattgctcttcgcaaatttctttgtgttctggcacttatatgcagggatcggagagattttggcagactatgttcaccatgaaatgaccagagaatttgtcatgatttctctcaggttgttcttgataatcgcattgaaggatgtttgcttaaattttgtatttgtataatcagatagtgcatgggttgtgctgacattactttccaataagaggccatttagggtcaaacttggcaaaaccttaatttgtagtttctagtcgttttctcaaacttaagaggcgaggcaacgtgataacttgatgatttatcatggtaatggatgaattttagcgtgtcttgcatataaaaaaaaaaaaacaaaaaaaaaaaaaannnnnnnnnnnnnnnnnnnaaaaaaaaaaaaaaaaaaaacttg

SEQ ID NO: 87017 - DNA, 361 bp, Glycine max
  Clone ID: PAT_MRT3847_49587C.1
atctgggtgcacggagatgttatgtcaatttctgtatttctcactgctgtaagaattgcgcacttgccacctacgccagctcaagcaacacttcacggctccctcttcctcttccttacacctgctgaatctcgcacagatggaaggaaaggagatcagtttacacgtagcacgggcggatatgcttccaatgaagaaagccaccgtagctggagccactgtgcgactggccaaagaatctttgaccacgtactggcaaaggagaatgctgaaccagctggggttagagacaccgacgaggccaagacaacccgtttctatgccaacccatctgttcaaattgtgaccgctgatgtcacat

SEQ ID NO: 87018 - DNA, 260 bp, Glycine max
  unsure (1)..(260): unsure at all n locations
  Clone ID: PAT_MRT3847_49588C.1
ctcanctctncttcttttcaatcagtnacatttnctttggtattcnantggncactgttgaggttgtntcagcataggnttcnctcccaganggcacaaaagacgnatcattganggctnangagnagnagaanncagaagaagttgttnagactcnaacaccaacaccagaanatgtcgtcactgagcaaaccaaggnggaaagtactgnggccccacnacctgnagcttcagnagacangccctcggttgannttgng

SEQ ID NO: 87019 - DNA, 570 bp, Glycine max
  Clone ID: PAT_MRT3847_49589C.1
tccgaaaatattgcaccataggtatggccgggctcaaaacgtcatttttagaaaagctcctataaatgaacactattaaaacttaggactaaaattagttacatgccatttattccactctgctaatttactatcaactcttcaccaatgccattagttgagtcaaagctatggatatttatacagatcattattatagacaagtgaaagtatttttatgtcattaattttgttaaattcaataagatattatgtaaattattagtcaccagatgatcagtgaatccccggagatattatgtgaagtgtttaaaattataaaaggaaaaccaactaagtagctagcattctttgtgatttttttgttcaatatatttcaacctttttttttcttttctttgaggacaaagggcaaaggtcctgagacacttcgagaaggggcgaagatgttatgagaggctaattcatggttcaaaattcaaatggcatttcagggtggtcctggtggagggcttgattttggtcgtggttccggtggttatggatcaccttgcaattttggctatcatt

SEQ ID NO: 87020 - DNA, 269 bp, Glycine max
  unsure (1)..(269): unsure at all n locations
  Clone ID: PAT_MRT3847_4958C.1
ttttaaaaaaaagggacatttggatatattatntggggaaaaataaactctatttttcatttttcaacgagaatttataaatgcgaagactagctcctactattctaagaagaagaaaagaaaaactacccgccaaatttttttaggagaggtgttgaccgggaaanggatgatttaacataaacctgttccatgaggaccttattggacccctttaaaaacttggttctctagctaaaaattcacaattccaaccaccatgggtatcc

SEQ ID NO: 87021 - DNA, 159 bp, Glycine max
  unsure (1)..(159): unsure at all n locations
  Clone ID: PAT_MRT3847_49590C.1
caagtaggctatnctaaggtgaaannggnganatggcagctgcaacatcctagtncngtgntaaacgggttnggatctcacttctagtctngaggnaagangagccatgcccttcttgctnctagcattggngggnaanttggtgcttcnnttagtcnt

SEQ ID NO: 87022 - DNA, 505 bp, Glycine max
  Clone ID: PAT_MRT3847_49591C.1
ccacgcgtccgccaagtttctcaacccaacatttatcagagaagggggtcttcctaccgttcaagaaggccttgagacatgagatggcaaagtcgcctgtgactttattcaattttggaaactgaacatgaaacattatttgtgagaacttgccaacaaaaggggcagcagccatatctgcaggaagtatggatagacacaaacttattttctgcatcaaaggaagataaggcaagcggggtggatttgttaattcatgtttcttgttgcttacatttttattatttccccctttagttttttgagctgcttgtagagttggctttagagagatttgttacatattgggaagccatggtgtactttgaagcaatattgtatgggtagaacttctactgatatatatatatatatatatatatatatatatatatatatatatatatatatatacacacacacacacttagcttccattgcatacgaaaggatttccaacttctgt

SEQ ID NO: 87023 - DNA, 419 bp, Glycine max
  Clone ID: PAT_MRT3847_49592C.1
tttttttttttttggagggctgtgttttaacaattaagaattctgaagagaacatcacatattcttgcagccatatgctgaatatagtatttcagagtgtctctcgtgagacttctgagttgataaatgaagaatgaaatgttttaatagcattgtgtaactttacaatttactagtcataggtaatacaattttactgtattgacacactatataacagatttgagtattcaaatggcgcttacgagttacaagttgcttttctggtgcatgtggagggagttcttgagtcagcatcatggtttgtgcttttgtgggaactgtcccagagttgacctgaaagcatgaataatgactaattgagctttgccgtgtcggtgtttccttctcatggtgaaaataaaaaagccaaattctag

SEQ ID NO: 87024 - DNA, 592 bp, Glycine max
  Clone ID: PAT_MRT3847_49593C.1
agcgcgatggaaaaggtagctttgtaaggcttgaagttgtcacagcttcactgggcttcctaactaattttgaggatgtgtataaattgtgggcttttgtggccaagtttctcaacccgacatttatcagagaagggggtcttcctactgttcaagaaggctccgagacatgagatggcagagttgcccgtgactttattcaattttggaaactgaacatgaaatgaaagattatgtgacaggttgccaaaaggggccgcagccgaagctgcaggaagaatggattggttcatgatgatctgtaagacccctagatagacacaaacttattttctgcatcaaaggaagataaggcaagcggggtggatttgttaattcatgtttcttgttgcttacatttttattatttttccccttttgttttttgagctgcttgtagagttggctttagaaagatttgttacatattgggaagtcatggtgtaatttgaagcaaatattgtatgggtagaacttctactgatatatatactaagcttccattgcatacgaaaggatttccaacttctgtaaaaatgtagctttcattggc

SEQ ID NO: 87025 - DNA, 593 bp, Glycine max
  Clone ID: PAT_MRT3847_49594C.1
gatcagcgaaaacaagttcttttgaaagcatcaaatcaatgaagtcgtgttaaaagtacaaatacttacaaatggttgtcctacctgatataatcactttgaagaagcacaactaatggttcacagaatttgtggtttctttctgtctgaatcaggactgagatcaggtcataagaatgaagtaaagcatgataagaaatttccaggtcattctcaatgtctcactatcactgcaaagcaaatacacctctctcacaatttctccaacaatatccaaactccgaaaggtttgtcttcaactccaaaccaaaaaataggaagtaaccaagtttaagaatctgtacaaattagtttggaataattgttggagcttcatagacaatcacaattgtaaaaaatcattgtcatcacacttgcaaatttcttggatagaattgctcaaaccaatgtttcagagcagctgggtgaattttaaaagcacgagcaacaaaattcttgttgcttgtcgcaaccatgcttgcaatggaatatttttttggaagacagacccttttccataatccacatatggaacctgtacctaggcttaatgc

SEQ ID NO: 87026 - DNA, 169 bp, Glycine max
  unsure (1)..(169): unsure at all n locations
  Clone ID: PAT_MRT3847_49595C.1
cagcctccctcaaagaatcatcaaagaaacacagcatttgctcantaagccagcacctgaaattantgcatccccttcagaaaacaatatacaatatttcaatgtaataatccttaacccaactcagtcaccttataaagagaaaagttttcaagttaaaattattttg

SEQ ID NO: 87027 - DNA, 519 bp, Glycine max
  Clone ID: PAT_MRT3847_49596C.1
cacgaaacacacgaatagacacgtgctagcctaactttttttaagaacacaggaaacaccgccgccgccgccgctttctgccgcaaccaccgtcgttagaaaatggcggccagcaaatgcaattcagctactcctctcatccccgtgccccctaaatctcttattttcttacatgaatggtggcttgtcaagcaacgcaagggtttagccgttggcgggcttgcttctgtcgaaattgcagatagagaaagagtgtttttgtctagcgtgattgtaggcagagaagagaccaatgtcctccactctgaagatggtatcactattcttttccgtggtttcattaacacctctcgttcatctcaaaatggcgtcccctttcaggtatgccaacacttccttgttggatttccgcatgattggaaaaagtattcagcttatagttttggagatgcttttggtgactcaagtgtttgttcaaagaatatttgccatggactgggaatttcttctgggaatcat

SEQ ID NO: 87028 - DNA, 1392 bp, Glycine max
  Clone ID: PAT_MRT3847_49597C.1
gagcgacagatggtgagagcccgagggtgcggttccgaagtctgaaccagaatcctacgaatgacatgaagagatgagggaacaaagttttggagataagatgcatggaataacaactctcgctctcactgcaactgcaaacacaaacacattcctttcttgtcctctaagatctgttctaccacttacccctccatcgaattcttgcatacccacttgtaaatttagctatggaattcgtttcaaccattctcagaggaagcaccaaaaaacagaaagatggagcaacaaatatagaacgatggttgtgagagcaaggcgtaacgagtctccgtatgaagttttgggcgtgtctccatccgcaaccgtcgaccaaataaaaagggcctatcggaaacttgctctcaagtatcatcccgatgtcaataaagaacataaggctcaggagaagcttatgaggataaaacatgattagaatcagtagatatatatgaggttcagacatgcataatgatcattgctaaattctagttcccgcaaaaaatgtgattctggaagtcgaggttatgattgaagaagagttttatggactagaggacttctttaaggatcttcaacaagaattcaggaactgggaagcaaacactgcttcacaaggaaagccaaagagtctatgggaggaattggcggaaataggagaagaatttgtggagttccttgagaaagaactcaatattactgatcaaaatgatgattataaaacgcctcagggaggcaacacatcgaactttcctgggacagagacaccaagcaatagcagtcaaggtcaagctggcaagggaagcagaggcgttgaggataaccttgaggaaatagaagccactctggctcagttgaaaaaggaactaggcttatagcataaaaggattagaggttcctccatttggttgagagaaaaagccacagaatttattgcctctcattcttggcacaagacatggcctttaattatgtgaaggcatatctcttggtggccattgggaaccaaagtcaccaaattgactgtgtaacaccagggattcaactgttttatttttttgtcttcgatgttagttgggtgagtaggggcaatataacaacactaaaacttaaatcatggatgtattttctgttttataagcaagagaaatgtaaatggttgataatttattggatttgtaaaacattttaaacggaactcgaatatgcaactggtgagatgaatgcaagagaaatgtaaagggattataatttatttggtttgtgaaacattttatgcggaactcgaaacattgacaaatttatttggattctaaggacatttacaaacaaatgtaaagggtccacttcgtg

SEQ ID NO: 87029 - DNA, 323 bp, Glycine max
  Clone ID: PAT_MRT3847_49598C.1
gctcactagccggggatcgcgcttgagttggatgattgttccttttattttgacgacccggagggatgggatgtcctggggggcccggattcacctcttgcttttggtcaatccaaaaccaagtttcaaatggaacccaacaccggagcgacattttatgatgatgctggggtggatgaagccaagccagactttatggaggttgtggagtttctaatcaatcctgcaaggctcactaccggataaagctcgcataccgagaggacatgtcctagcagttactccaagaactgtaaagacactgccagccaacgctattgatg

SEQ ID NO: 87030 - DNA, 263 bp, Glycine max
  Clone ID: PAT_MRT3847_49599C.1
gacacacgaactcttctatggacgcaaattttggacttttttacaacacgattattattaggaactggtttttacataacagtgtgcagtgccctcacactttataaaggcttagataatgccctattgctattagatcacaactgaggccacacattgattcaacgcatgtcacattcaataacccatggacactcaccctactttgcaccttacccacctacgttcattattatcagattggcgctcatcctatgcatcat

SEQ ID NO: 87031 - DNA, 452 bp, Glycine max
  Clone ID: PAT_MRT3847_4959C.1
ggacaacccctttttaccctttctctatacgaagagagatggcctgctgctctgcccaccagttgaatttctttttaatggggaagcttatattttctggccccgtagggggggagaaattgtatccctctcgcataggtaggaaaagggggtccttgcaccacccccagtatatggaaaatttttttatacacaatcttttttttgtggggccaaaaaggcctggtctaaataaccaacaagggtgggctcatgggcaaaggccacaaaaaaaacgggtacccaaaaaaagggctttcttcaaaggaaaaggcaaaaaggggttgttccaggaaaaaaccccattaggggaagaacccttggaagaatcattcccaaagtcttttgggggcaaaaaaaaaacgcccgagttttggttcctcccccgcccccaagggaacccttaaaactgg

SEQ ID NO: 87032 - DNA, 336 bp, Glycine max
  unsure (1)..(336): unsure at all n locations
  Clone ID: PAT_MRT3847_495C.1
ccataaggncagaggcagagcgagaacgccncangcagngncnngaagcagcaanggaaaggcgagcancngagggaagggggcnggagnngngcacagaagaacgcgnaggacnccncnncagaatgggaggaacannncgngaaaacagnnnangnancaaaagagcagaaanancaaccgaagaaggaaaggcaagaganaccccnnangncacagangnnaccggnaacccagnngaccccaagaananaganncaanncgcagacaaangggggacaaagnaccgaaaggaaagcanaacccnaaaccnncaccaaagcccccccaaccaa

SEQ ID NO: 87033 - DNA, 537 bp, Glycine max
  Clone ID: PAT_MRT3847_49600C.1
ctctcttctgttcatcgagcgctaaaacaggtaggactgcgacgtatttaagatgcttatccccaaaaaaatctcgaagacaattttgaagtacctcttcaaagagggtgttgttgttgccaagaaggatactgtgggtaaacaccccgagattgatgtccccaacctctatgttatcaagttgatgcaaagtttgaagagcaagggttacgtcgctgaaaaattcaactggtggtacttctactggcatttgactaacgacggtatggaatacttgcgtgacttcctttccttgcccgaatccatcgtccctgccactctcaagcctcaagctcgcgctcaacgcgctcctcaagcccaaggtcaagcccctgctaaggagggtcaagccgaaggcactcaaggcaagactggagcccccactggtcgtggctactaccgtgactccaacaaggcgcaacagactggcagcattggccgtggttccgctcctcgcaacaacaccaacaaataagacctgcccgtacactaattagt

SEQ ID NO: 87034 - DNA, 627 bp, Glycine max
  unsure (1)..(627): unsure at all n locations
  Clone ID: PAT_MRT3847_49601C.1
cnnnnnncctcnnnnnnggcgnnnnnccccagttgtcgggatcaaaaggatcaaaaaatcaaaaagaaaagaaaaggcagattcgttatatcccattaattagcaacatattaggagtccctaataatccattgaacttggagttctctcttacttaattagtcttggtctcttcatacttcgtttgtgccactggttcttccgttccgaaccccaagccacgggaaattttgtcataagcccatgaagcaaaagacccggacttctgcgcagcagcatcaatggtcggtgcagcggcatccatggcggatttaaccgtcggtgcggcggcatccatggcggagtcaaccgtcggtgcggcggcatccatgacggagtcaaccgttggtgcggcggcatccatggcggagtaaaccgtcggcgcggcggcgtccttggcctgttctgctttgcctgtggtatcatcaaaaaaatgaccccaggaagtgcccacgcacacggcaaggcacaccaccaacacaacaaacatcatgttctgggtcttcatctttttattcttaaaaattaaaatgatatattcttctattgctcttttatttatttattggtgagagaatcccgtcccgt

SEQ ID NO: 87035 - DNA, 960 bp, Glycine max
  Clone ID: PAT_MRT3847_49602C.1
acgaggcgttagacacgccccacaattaagccatagtgcacaaagcttttacaagaaattgaaaagtcaatatccaaattcatcaattaattgctaaacttcaattcgcaatcatgcaaaaccaacaaccctccggtatcatcaaccctaagtattgtgctccatataatgtcgacctagcaattgtgagaaaggtcttggcattaactgatagctttaccgtcaccgatgtcaatggccaaattgttttcagccttaaggcctctctcatgaccctccatgaccaccgtgtcttgcttgacgccgccggagaacccgtcgtcacactacgccggaagttaatgactgctcatgatcggtggcaagttttccgtggtgaaagcacggagccgaaagatttgatctttagtgtgaagcgatcgtcctttttccagctgaagacgaaattagatgtgttcttagccaataatactaaagaagaagtatgtgactttaaggtgaaaggaagttggttcgaacgatcttgtgttgtttatgctggtgaatctctgaacattgttgcccagatgcataagaagcacactgttcaaagcattgtgtttggaaaagataatttcatggttacagtgtatccaaatattgactatgcattcatagtggcactgattctgattcttgacgaaattcacaaagacatgaaaaatcaatgattattgagctttctgtttatgacttcctctgagttctctggttgtcataaaaaagttcatcaaaagttgtacgtgacatagatagtcaacatgcaagttctaatttcttgccgtcctgtatacttcttcagtcctgtaataaatattgtaaagtgtaaggaaaaaaatctgaaaaaaatatcattttaatttttcaatattgtaaacttattttttttttatatctctaataatataaatgatgaatagt

SEQ ID NO: 87036 - DNA, 564 bp, Glycine max
  Clone ID: PAT_MRT3847_49603C.1
gattgctagatggttttggtttcaaatgcttagatagagtggcactggtgtaattttcagattcagtcatggttttcaattattggatctgggactcgtttctaagaatttagtagatactagcatatgaacaacatacttagttaaaagctactgtgaaagctgaagcaaaaattattttacataattatgagtacaacattttagcggctttcagtttcatacgatgaagttaggcatttataatttctcagagcatctgtcaaaatcaaaagttcaataaaacatatgttgcagaatgttgggtaagaagatagcacaactaatattattttgaaactgatgaatgttagacaattgactccactcatcccctagggagcaaggtaaactgtctgtggcttcatttagaatgtcaggtgatgaatttttttttaaaaaaatatggttgtaattgggatggtttttgactaaaatttctcaaccgtgtctatggatgtttttgccttccaagctcttatgtttggtcaaatttttgaactaagaaattttggtggtcaggat

SEQ ID NO: 87037 - DNA, 1205 bp, Glycine max
  Clone ID: PAT_MRT3847_49604C.1
ccccatcttactcaacccccgtccgaaacttggatatcgtatcgaggagctatgcctatggtctcccaggaagaaaccttagtggaagcggcgctccgagttctgaacaccgccgacccgttcgagaaggcgcgactcggcgactcggtggcttcgcggtggctcaatggcgacatagcagaaccctacgacccttccggctccgatctcacgctccctgatcgccccgcaagactatcctctgtgaagttggtggcgccgagcttgatgccgaagctgggtagagcgggcagcttgcagagcaggatagccattgttcatagcctcactcacactgaaagctgggccattgacttgtcttgggatataatagcacgttttggcaagcaagagtcaatgcctagagagttctttacagattttgtgaaggtggcacaggatgaagggcgacacttcagtcttcttgctgcacggcttgaggagcttggttcttattatggagcattaccagctcatgatggcctttgggattctgccactgctacttccaaggatttactagcacgattagctgttgaacactgtgtccacgaggccagaggacttgatgtggtgcctacaacaatcttacgattccgcaacaacggtgataacactacggcagatttactttacggcagatttactagaaagtgtagtttatccagaagagattactcattgtgctgctggagtgaagtggttcaagtatctatgtgagaggtctagaaatccagcctcagagcaagaagaagaaagtggaagtggaagtagaacagaggagcatgaagcgatagcaaagtttcatgcaatagtgagggcatattttagaggacctttaaaaccaccgtttaatgaggcagccagaaaagaagctggatttggtcctcagtggtatgaaccgcttgcagttaaagaggttaatagtatacccaattactaacttatgtccttaatttaagtagcagttttttactccatacttgagctgctgtaacacagaatagaagttttgagcctttcatgtttcaaagtttttgttttttcttctctttttcgaaagacctttgttgctggccgaaagcataaagataaggtcaacaacttatatgaattttaaaccatacgttgatcagaaaaagattgagaaagaaaaaacaattttt

SEQ ID NO: 87038 - DNA, 128 bp, Glycine max
  Clone ID: PAT_MRT3847_49605C.1
cttaacatggcatctttcttttgacttactgtcatatacaagcaagcttcgcccctcgcttagatgacaggacggagatcaactgtaaactcttcaccctttctggtgatcaaacactgtataattat

SEQ ID NO: 87039 - DNA, 273 bp, Glycine max
  Clone ID: PAT_MRT3847_49606C.1
aaaaaaggagaccaaaaggaaaattttgatttacagtgttccaagatggacaagagggtgcgactgataccatgcggggcgatcactagaattacaaatcttatcatttcgttcttcgaccttcacttctttcttgctctaccaatcatcttccttctcctttacccttagaatgcatgtcctctctcttaatgggtctagggagtatgagattctataatgaatatttgacacacaatcccaattttaaagacccctttctttacaatgctt

SEQ ID NO: 87040 - DNA, 393 bp, Glycine max
  Clone ID: PAT_MRT3847_49607C.1
actgtatgagtcctcctttgtcgggggggaggaaaaggaaaggaataggggttagaaggagggcacgtacaagatacgcaacaaagaatgatacaaaaaaagcatatatgaaaccgcaacaatattatacagcgaaacgcgtaaaaccgtgtttttgcgtagcacaacagatgatgaagtgggaagatagaagtcacaccctgtaaaccaaatcggcgtaaaatatacgttaaacgtaggtttaaggaggaggaaatggcttagagtaattgttagtgtgttaaggagtggtgggttatgacagttagtagaaccaacacaaacataatgtaaggagcccccggatgttgcaagcagttaacagttggactgctattgctgtggaacagcaat

SEQ ID NO: 87041 - DNA, 299 bp, Glycine max
  Clone ID: PAT_MRT3847_49608C.1
atattccttcaaattgatgagttgtctttacatccatgtgtcacaaactcattctaccaagtgttagccacaaaactatgatgccaaacttaaccaaccctcaaccttttcctcgtgcaactttttccagctagaaactagaatagaaacccaacagaatatttaagagtgatgaatcaattcattacactctctctatatatttttaacacactttctttatatattttaatataagtgaaggtaatgcatgttatctttgtaattattgatgccagaataattaaataacatttttt

SEQ ID NO: 87042 - DNA, 516 bp, Glycine max
  Clone ID: PAT_MRT3847_49609C.1
gttcaacctctgaatccaccgatcggtcaccgtttggttttcgcaacactattttttcaagtgaaaaaagaaaccgtttcccctgatttcatttgaaaacacaaacacagaggatttcaatggcggatgatagcaaccgcagcgtgagactgctatgccgcccgaagcagctcaacacaaaaggatccgacccgggaatccatttctggcttatcggatccccattcttcccgccactcaccgtcgcctccttcctccgccgcatccacacgctcccctcctccgcttcccccgatttgcccaaagaatctgaggaccttcgaacactcatccccaaaggcttcgaagtcgttggagccctagcttctggggacgatacccacgctcgcacggcgttgacgccgcgcgtgcattgatgaaccttctctacggcgacggaacagatcgaccggttatcggagcggtttgcggctcggattccggcgagctgcggtttgttgtgtcagagagtgaaaa

SEQ ID NO: 87043 - DNA, 1042 bp, Glycine max
  Clone ID: PAT_MRT3847_4960C.1
gaatgatggggaggttgattaggggtttggaggaaagaggggtttttgaggatgttagtgttattatggttggtgatcatggaatggttggtacttgtgataagaagttgatctttcttgatgatttggctccttggattgatgttcctaaagattgggttgtcacgcatactcctgtgcttgcaattcgtccaccttctggtaatgatcctgctgatgttgtcgctaagatgaatgaagggttgagctcggggaaggttgacaatgggaagtttttgagggtgtatttgaaggaggatctgcctagtcggcttcattatgccgcgagtgatcggattgcgccgataattgggttgattgaggaaggtttcaaggttgagcagaagagaaccaagcgccaagagtgtggcggttcgcacggttatgacaatgcggttttctccatgaggactatttttattggacatggtcctcgatttgctagagggaggaagataccgtcgtttgagaatgttgagatttataatttgattacttctattctcaagataaagggagcacctaataatggctctgcctcatttgcagagtctgttcttctatctgctgcataagtgatactaagaccgagtttttattggtggacagcattgcagatgttgaactctagcgaacaaaatatttgatcgctaagctgtatgataggtaatgtgctctctaggagtgatgctcggatcagaaatatgggcatgctgaaagaataggggtcatatacctttgcacgcgattgctgaaattagtctatatgtaataaaggtagttccatccacttggttccatttttgtttgttatgagcagcacaagtagagggcaagcttagctttaacaacgtgtctgtaagtagtatacgatcacaggatttaaatgttcttgagctagagtgagatccccatttggatctcaaggatccatggatttgaacactaaactgtttccatctttcagttgttttaatttctcaactctcatatttgctgctta

SEQ ID NO: 87044 - DNA, 635 bp, Glycine max
  unsure (1)..(635): unsure at all n locations
  Clone ID: PAT_MRT3847_49610C.1
cgaattcgagctctgtacccggggatcctctagagtcgacctgcagctcaagaggcatctcacactaaaccagatgagatacaaatctcatctgatgatttctccaagacttcagatccttctgttactggtgttgagcttgtgcagctaaggaatggtccatctaaaaatgcagagccatgtgctaaaaataatgcccgtgataatattactaaagatccgttgctttcaattgatgctcgaccttcccgtacatggaactcattgcctgcaaactcccaagctaatgatgaccaaggccttcaacaacatcgctcaggagagtggggagatattttagatgtcatctctcgcagaaagacccaagctcttgctccagaaaattttgagaatatgtggactaaaggcaaaaattacaagaaaaaggatggtgagaaccagtcaaatgagcatgtttcgcagcatcctgtggtagggaaactgccgaaggtagatcatatgaaagcaatatctggaccaaaagaaagagatagtaattccaagcttattcttccccctaagagacgccacattaattctggacacagcagtcaattctctgtagaaatacatncatttatgtagacagaatggat

SEQ ID NO: 87045 - DNA, 241 bp, Glycine max
  Clone ID: PAT_MRT3847_49611C.1
tcgatttgcagggtttatgaatttggtggcgggatggcgtattataacatgtggacgctacgaatgcagaatacgtggagaacatgtgagaaatttcagacatctgtggaatttcaaagttggccggatttcgttttttgaactggttaatatttgttgtcttttggagcagagaaaaataaagctgtgaaaaaaggttaaacattatcggggaagaactgggtcgtgcggcgattccgta

SEQ ID NO: 87046 - DNA, 693 bp, Glycine max
  Clone ID: PAT_MRT3847_49612C.1
aaaatcaagctttcaatctacaaattttacagctttcgtggtattcattcattataacaattgtactaccagtaagatgatgtatacagaaaatacacataaacttgtcactctagtcaatcatattcagcacaaactataactcaagagaccctttgtgatggacatctatatgtaggaaatcaatgaatatacatttgttgaatatgtataaagaatcagaaatcggctgtggagttttgctcagcttttccaatggcctttaccatatttcaagagagaaacatacagtaattcattccaagtatcaggtactccaggcaaacaccaatgactgcaatcttgatgttgttcagcagcggtctgttcttctgctgtcttatactccattctgtatatagaaggatgtccatcttttctgtaatctgtaagcctactaatgttcatatatatcactggggttttcatctttgggatgaccacatgctcaaaagccctcatttttgagggatacttgcgtaagtgctttccggacgcgtttggctcggtttctttgtggcactttccacctgaattccattgcccacccctgaaatgggttactgaatatcctctgaagaaacctgagttcgattggcgtcaatattattgtcaacccatgtagcccaagtggtcaatgccctagtatatgca

SEQ ID NO: 87047 - DNA, 315 bp, Glycine max
  Clone ID: PAT_MRT3847_49613C.1
tgcaacctacatcaacattgatcatggtggacgagcttactcacatcgcgcaggtgctctatcagatactcagccccgacgccatcgccgtcacagccgccaccgatgcgctcgatttcctcacgcttactccgcacatgatttgctatctccacaccatttccacgttaccaggagatctgagtcagagcatctctgctgcgatctaccgcatgaatcgcattcgccgtagcttccatagctgtagagttaagccatcaatcgtgagcaatgatttccaattccagctgatgcaggcgttgcttcaaatcgggt

SEQ ID NO: 87048 - DNA, 384 bp, Glycine max
  Clone ID: PAT_MRT3847_49614C.1
ggctcgaggaaacacccacaagtgtatagtagcgtttctccattttccatgtgggtgtttcatagagccaaaaatgccataattaaactgaagaagaccatgaagaatctcacgtggattatggagtgtcgctactcatcagcttgtctcaattaagattctgttctgtcttgaatacatggcaaggaaataaaacgctgccaccgacatgtaggaggccatgtgtactttgttttattataggatgtgtgtttgttgtttgtgtgattgccgaattatattattgggctgtttttttcagtgtgggtagatccggatcgcgctacctgccaggtatgggatgtgtgcatataaacacttttcaactcattagacccttatgtc

SEQ ID NO: 87049 - DNA, 451 bp, Glycine max
  Clone ID: PAT_MRT3847_49615C.1
tccggaattcccgggctcgacccaacgcgtccgatacaatggaactcagccgcaggccccacaactatctctctccttcactccaccaccacaggattctcctactccgccacctaacgcctccccatgaagagtacaaatatgactcctacctccaatcgcgcccactcgcgcgcagtataggattctaagaaccgaacccgttgcgcatggggaatgacttactgcgcgaagcacaagcgagaggaggaaaggccgcgagggaaagaggagtccacggctaacaatagcgtgatggagctgagcgtcagaggacactgaatgggatacaaggtcttctgcagaggcgacctcaaaggccgggaagacaacaaccaaaacatcaccgacgacaacataacacgagacatcattcgcaccatgaaacacctaaaacaaaacggcgccaaag

SEQ ID NO: 87050 - DNA, 144 bp, Glycine max
  Clone ID: PAT_MRT3847_49616C.1
ctgtgataaacgacgtgcaagtgactactgatggagagatgattatgcgccactgaactttatggctaggtctatattggagggaagtgaacatctccattgccattgaagaaaaccttgagtgggggaacccatcatgtgtga

SEQ ID NO: 87051 - DNA, 676 bp, Glycine max
  Clone ID: PAT_MRT3847_49617C.1
aattcggcaccagcgaaaaagtaacaaaatcgtaagaaacagacgcataagtgaaccactgaaaccctaaacgcatcagcctcagccgtcgttgccgtcgagcaagtgaggtcgcaccgccgtcgcaggaccaccacccgggcgccgtcacaatttggcctcaaagtcacaagcaaattcataagcaaaaccctagcaagcagtgagtgaaagagtaaagtttggaagatgagggaggaagagatggagaagcttcgaggagtggtgcgggactgcgtgagcaagcacctctactcctccgccatcttcttcgccgacaaagtggcagccttcaccgccgaccccgcagacatctacatgcaggcccaggccctcttcctcggccgccactaccgccgcgccttccacctcctcaacgcatccaaaatcgtcctcaccgacctccgattccgctacctcgccgccaagtgcctcgaggaactgaaggagtgggatcagtgcctgtcgatgctgggtgaggctaaagtggacgacgatggaaatggttatgatatgaaggactctaatgtcatgtacttggataaagattgtgaagatcgggaaatcaatatatcctccgcaatatgcttcttaagaggcaaagcatatgaagctttagaaaaccgggcccaggcca

SEQ ID NO: 87052 - DNA, 239 bp, Glycine max
  Clone ID: PAT_MRT3847_49618C.1
cgagaaaggccactggtaagtactaccaccatagcagctggaaagcaagagaggaacatgatgaaagttgcacctacgagtccgcttcccacgaagcacgtgcggattctgtttcaccgcacgtgccttgagcattcaataattaccaccaactcgccaaagtcacttaattataaacgcggaacgatttcaccaggagaagcagaaccatcgctcaagctcacactcacagtaaaatc

SEQ ID NO: 87053 - DNA, 778 bp, Glycine max
  Clone ID: PAT_MRT3847_49619C.1
cttaaagccaaattactaaccctctcttcgccttcgccgcatctacccacttcctgttgtatccctagcttcctgccattcttcctcttctcaacaaggtttggggtgtttgtttggtttctttctgattgtttaatcagtagaaagaaaaagaaaaaaaaaattgtcgacttttctgggtagtgttgtggcgaaagaaagttcagtttttttaggagaatggcgggttgttcttcaaattttgctgtggctcgttttgccaatgtgaggaaagaagttgttttggggaatgaagagacaaatttgattaggttgagtttcaggggtgtgttgaatgaatctgcatttcaagttctacgtgggagtaagtgtggtagatcatgtgtgcctatgcaagagaaagcaatgtttcttataatgagtatgtcgcagccatcggctgagaacgaatcgcaatctgctgtgacttccataggattatcagaagggggaggtgataatgtcctgagcaatgatgacgggactcgggatagcgagccagactccaaaaatgaaagaaatgatgataatggagttgtattggatggtagtggtggtaatgggagctttggaagtggtggagctggagatgggagtggaggggggtggcagcaatgacgatggtaatgacaatgaagaggaggagtttgggccaatactgaaatatgatgaggtaatgagagagacagaggctcgaggcgctacccttcctttggatatgatagaggctgctaagagt

SEQ ID NO: 87054 - DNA, 612 bp, Glycine max
  Clone ID: PAT_MRT3847_4961C.1
gaggaaggtttcaaaggttgagcagaagagaaccaagcgccaagagtgtggcggttcgcacggttatgacaatgcggttttctccatgaggactatttttattggacatggtcctcgatttgctagagggaggaagataccgtcgtttgagaatgttgagatttataatttgattacttctattctcaagataaagggagcacctaataatggctctgcctcatttgcagagtccgttctactatctgctgcataagtgacaagaccgtgagcttttattggtggacagcattgcagatgtcgaactctagtgagtaaaatatttgatcgctaagctgtatgataaataatgtgctctctaggagtgacgctcggatcagaaagtataggtgtcatatacctttgcatgtgatcgctgaaattagtctatatgtaataaaggtagttccatttttgtttgttatgagcagcacaagtagagggaaagcttagctttaacaatgtgtattttgggtctgtaagtagtatacgatcacatgatatatatgttcttgagattgagtgagatccccatttggatctctaatcacatatcataaattgcctaccaac

SEQ ID NO: 87055 - DNA, 1141 bp, Glycine max
  Clone ID: PAT_MRT3847_49620C.1
gcgccggggccccttgtcgcttctctgctcctcctgcgttcgtctcactcgtgtttgcaccgccatctctgccctttgcagccctgcggcggctttgtttatttcacttgtatattcatcacagatacaggcattagctgccttgtggcggcttttcaggggtcggaaatggaatcctctgaggcagcggttagatagctttgactatactgtgaagcaacacattgttggatcacttttatttacaccacttctacttcttttaccaactacttctgttttctatatattctttagtatcatggacacaaccattaaccttgtctgtctactgattgaagtcactatttcggtaattcatgttaccccttataccaagatatttctttggttggtaagaccaagaagattcccttctggaatatggcttgaaattattggttgtcagagtaatagtactgcttctccaagtgctgatattactgatgaaatgacctcatacaaggagtcattgcatctaaaggatttcaatagagaaaaatctagtagtctagtttcagctctccacagcaactacttgagcataggaaaaattatctcacctcactacatacatgtttttttgggagtttctgggtcatccatctccacagtggctcatggaatactcattggacaaagaatgccatctatgcgtggcacccttctaccttcaccaatgccatggacgtccatgcactacaaagagtattggcgcctttgtcatgattcacttattgcatgcttcagatgacaatgggctttggctcaggttttattattcttatcgtcaactcgggatttaattacaaacacagattcatccaacttgctctactctcgtgttagtggtttttttctctcttcgatgggtagaatgctttataaaattattcttccatagtttagtaagttcctactcttgagtatggtatagtcggcatttttttttttttttgcttttcccatgctgagaatggtgtgtgctatagaaaaataacatttttattttattttactgattttgtaaatatattgtataactcttatgcttgggcgcatatacaaggttatcaaaaaaaaaaaaaaaaaaaaaaaaaaa

SEQ ID NO: 87056 - DNA, 507 bp, Glycine max
  Clone ID: PAT_MRT3847_49621C.1
cgtaagctcggaattcggctcgacctcgagccgaatcggctcgagcttttttcctttctctctctctctctctctctccctctctctttcattatatggaaacacaattctaaatgtcgtcgtttaaaaggttatagtgttgagtgcctcagcaaataagctaggaaatctcaaagtgcatgctgatgcgtatgcatctttgataatggaagagcttgaccctgatcataatggatatatagagatgtggcagctagaaactcttctgaaggaaatggctagtgcggaagatggcaccaaaaaacttgataattgtagagccatgactttgagtagagctatgataccgagcaagtatagaactcctgtgagcaaatttctatctacaactgcagaatttgctttggataaatggaaaaaaatatgggttgtcgcgctttggttggccataaacttggtgctttttatttggaagtttaagcaatacagggaaagggaagcctttaa

SEQ ID NO: 87057 - DNA, 192 bp, Glycine max
  Clone ID: PAT_MRT3847_49622C.1
cctgtttccccttctgaaatcgacgatatcaagtacacccgcgccaccaacatcaccagcagcttaagtcttaatttcagaaccaccgcgaccgccgccgcgcctgatgcgggaagacggtgggaggtggctcaaggacaggaaggagaagaagaaagaggagaccagggcgcacaatgctcagctccacac

SEQ ID NO: 87058 - DNA, 1524 bp, Glycine max
  Clone ID: PAT_MRT3847_49623C.1
tatagactatatataaaatatattattcttgctgttttcttcggctaattgcacctctgtaggggtttcacctacctttgctttagtatccacattttccccttcaactcaagactttgtacgtagttcgggttaattcagctaaaataagacttgaatttaaagggaatggctgctggagtgtataaccaaccaattgttgcttttcaatcccattctcacatcaacaattttaatcatcagcaaaagttcaatcatttggtaagagtggtgacaaaggactttatcggcagtaatttcctctcaagaagggattgtagagtaattcaatctttagcatctcaaacatctgtggttgacacagtttcatccccttcaaaaagcaaaactagtgatagagacactcacaagaaatcaaatgaagcttctttaatccttattcgacatggtgaatccttgtggaacgaaaagaacttgttcacaggctgtgttgatgtccctctaagcaagaggggtatagatgaggcaattgaagctggcaaaagaattagcagtattcctgtggatctcatatttacatctgctttgattcgagcgcagatgacagccatgcttgccatgacacagcaccgccgcaggaaggtgcctatcataatgcacaatgaaagtgaacaagcaaggggatggagtcaagtttttagtgaggatacagaaaagcaatccattccagtcatagcagcttggcaattgaatgaaagaatgtatggggaactacagggtctcaataagcaagaaacagcagacagatatgggaaagaacaagtacatgagtggcgtcgaagttatgacatacctcctccaaatggtgaaagtttggaaatgtgtgctgaaagggcagtttcctatttcagagaccaaattgaacctcaacttttatctggaaagaatgttatgatttcagctcatgggaattcactgagatccattattatgtatcttgacaaactaacttcccaagaggtgattagtttagaattgtcaactggaattccaatgctttacatttttaaagaaggaagattcgttaggagagggagtccgatagggcccactgaagcaggagtttatgcctacactaggcgtttggctctttacaggcagaggttggatgatatgttccaataattttttgaagggttagggaatacatcacacgttaatcagcagtaaagtattacataaggggtaaaaaagatgttatcagtgttacagttagattgcatgaaaatttgagaggagtttaacacagtttcgaactagtggattaggatccatgcttgactccagtgttgttctcatatggtgaaggagtaattgcttccatgtgcctatatatatacaaataaatcattgaatcttagaaatgttttcgtgtctattacaattaattgtaaatgagttgtcatgtgaatttaattggacattcggaatgtttttatatatagaaacttattacttaacccc

SEQ ID NO: 87059 - DNA, 258 bp, Glycine max
  Clone ID: PAT_MRT3847_49624C.1
gtcgcccacgcccccctactgctttgagaaaacacgagaaagggggaagggaaatttttctgagcctgctataaacacggggtgggggaacaaaccagcttgcccaagatctccattctgggagccggtattttttagaagacacaaaaaccttccagacacttcaagatccttcaaatttttactccgaaaatccactggagccccacttaggaaatatcctcaggtggccgtaacatatgttgtgagcatttttcc

SEQ ID NO: 87060 - DNA, 219 bp, Glycine max
  Clone ID: PAT_MRT3847_49625C.1
aaaaagtatcaaaattaactattattacctattaccacacataacctatcattccaataacagaccgtgcgaggcaaacttgcaaatctatcttttatctgtctcacacacaaacccatattgtatggcccttttatatggtttaaactttacattaatgccacaccagggtcttgcaaggggaggggagttggttccacaaaggcgggaggaagaaat

SEQ ID NO: 87061 - DNA, 830 bp, Glycine max
  Clone ID: PAT_MRT3847_49626C.1
ggaatcacagtgagaccacgcgtccgcactgtccctgttccgttaattggacttgtgcgttcgtttcttctttgcgcttatcctttccgcgcattttcagaacaaaaccctaatcctccattttttcccgttttcagcctgcaaaaccctatctctaacttcgttacgcttttccccgctgaacaggaattctgaaaaagaggtagtggaaattccagcactctaataattgaagatttcaagtaaattgtgtccaatttctggatgttgtgacagtccagccatcttttactcacagaactgaagttgtctgaatactagatatagtggagcatggcagaccatcggaatggaagtgcccaagcagccaatggaactgcccaagcagcaggaactgcctattccattgatctcaatgcatttcaaaccagactaaggtcattttatcaacattgggatgcacacaaaacagatctttggggctcttctgatgcaattgctgttgcatgtcctccaccttcagaagatctgcgatacttgaaatcgactgctcttaacttatggttgcttggatttgagttccccgagacaattatggttttcacaaagaagcagatccatatattgtgcagccagaagaaggcttctattctcgaatctgtcaaaaaatctgccagagaggttgttgatgcagatcttgttttgcatgtcaaacctagaaacgatgatggaactgctctaatggatgctatattccgtgctatccgtgctctgtcaaagtctgatggtcgggatactcccactgttggatacatatcaagagagggctc

SEQ ID NO: 87062 - DNA, 581 bp, Glycine max
  Clone ID: PAT_MRT3847_49627C.1
ccacgcgtccgccaagagtgggagctgcaaactaaatttcacgttattctcactccctcccaaacctcgtacgccgtaccgtgtttcctcgtccgaccaacaaaccgcaccctttctgcgattctgcagcagcagcgacgcacacatgccacaaccaaaggaccttccagggttttactatgactctgagaagagcaggtatttccccatcaaaggccctattcctggttcttcttccaagcctatgacccctgctcttaactcaccccaaacctcctccaaccaggaaagtggtgggagttgttgtaggaagcttagaaacagaaccccgtctaagctgcttcgggctagggagttggatggtcactgtgccattgcctctcgctattgcagaagtaacttcaccgaggaattccggaagatgcaagcatctagacctgtgatctggaagtatcggggaactgatgggatgcgtattactgctttggaacacttgcgcgttgatgtgcagacgtcggcagggaaaactgaaactgatgttttgttgacggacagcacaaatggctcgatgagtttttctc

SEQ ID NO: 87063 - DNA, 162 bp, Glycine max
  unsure (1)..(162): unsure at all n locations
  Clone ID: PAT_MRT3847_49628C.1
tcacccnnacaaagaacacacnnnacactcactaaataaatncnnnctnctaacntcnatcnccncagnatntcaaattatcacatcaatcaaatctnncncactacngtacacaacccaacgnannaacaannnatgtaaaatntnncccaaaactacntt

SEQ ID NO: 87064 - DNA, 272 bp, Glycine max
  Clone ID: PAT_MRT3847_49629C.1
tcccacacgtccgcaagtacggtgtactagtggtagctttgaagaacacacggttgcctggtaggcagaaactatatatgttacgagcgcaattgggtttgcagggcaggcactgtttggcctctttcatcactctaactgatgctaaccgtggtacagccagatctgctctagtactttgtcggtgggccctaataaaaaaaaaaagaggccgtaccacttcgcagtatccaaccatgcgtcggcatgaatgacaattggaccccctatgc

SEQ ID NO: 87065 - DNA, 229 bp, Glycine max
  Clone ID: PAT_MRT3847_4962C.1
agcgagaggcacagcgcaagaataccggggaatttgcaggaccatagccagtcaaggcctgcacaagctgccatcaaatagcggcaaaaacacgtatgcctgtgatggacacacctacagttgcctcctagacaatggatgtgtattgcgtgctgatgctgatgaatcgattggcaggagtggacctattcgatgtcttgaacgggtgaaggatgactcgatgaagcgc

SEQ ID NO: 87066 - DNA, 248 bp, Glycine max
  Clone ID: PAT_MRT3847_49630C.1
cgtagctggtttacgtgaatggtttgtccaatcagctgaaagacacgctcatcccagaattcccttcatggtcaatatgtccgcaacagctttttcttcgaagaagaattagaagccctatgatttcgctctcaagcttactccctctgatcaaatgaatgctgcaagcagcagttctgcgttgatagatgagtatctgatgatgcagaagattacaaatagcggaactgaacaagaggctaccaaat

SEQ ID NO: 87067 - DNA, 635 bp, Glycine max
  unsure (1)..(635): unsure at all n locations
  Clone ID: PAT_MRT3847_49631C.1
ctcaatttcaggttaattaggcaagttttgaagtgttgattttcaccctctcgctaagccaatgttttggcttagcgagccatacgctgagtgcaacacatcttggctgagcgcatggaagaatctggaagaaggatgagttgtgcatattcgttgagcgaagggtcatctcgctaagtgcatcgcttcaatccatccgctgagcgagaatagccgcgctaagccgaaattcactaatgcgcgctaagcggttcagaattgcgctaagcgcacgagcacaaacaaagccacctatttaagcctggaatcaaatttctgaggggattttggccttttcttgaagcttcggcataattggagagttctagagagagaaaggtccaagttccaaagagtttgagagaatttgttgtgtgaagatccgcagagaccagagctggaagaggaagtcatcctgagagcttgagatgagtttgtgagtgattatgaggtcctagaggtgaaggagacatccccactacttgtatttctgcaatatttcattctcttctctttgttgtaaaggaagcttcccagttatggaaagctaaatcctctgttggatctnnnnttgtaagtacttgatgtaaatatct

SEQ ID NO: 87068 - DNA, 462 bp, Glycine max
  unsure (1)..(462): unsure at all n locations
  Clone ID: PAT_MRT3847_49632C.1
tacggctgcgagaagacgacagaagggatcacatcatatgtttctctatttactctatgagtagttgtgactttttggccttgttatactaaaagggagataaacattgcattagtattgcattaggaagtattaatgcattgtatacatatattcatacacaactctacctaatgatgatgatgatatgaattaacacttctcttagtattcagaaacttttaggttttctaagaaaagtctctactcttaagactctccaaatgcactcaaatgacaattcaagttcggcatcatcaaagccaaaaagggggaatttgttggagatagggggaacaacatgaataagctntggagcttgaagacgttttgtttttttacatgctcaactctttaagtgacatttgtattgattgttgcatcttaaatcttatattttcatatgtagatcatccataatca

SEQ ID NO: 87069 - DNA, 501 bp, Glycine max
  Clone ID: PAT_MRT3847_49633C.1
gaaagagactgggcaaaagatgaaacatcactgaagtcaggttttaggcatctagagcacatgccattccctttctggttggccctttttgttgaaggaactcgtttcacgcagacaaagcttttacaagctcaagagtttgctgcttcaaaagggctgcctatacctagaaatgttttgattcctcgtactaagggttttgtcacagcagtacaaagccttcggccattcgttccagccatttatgattgcacatatgcagttccaaagagtgaggcttcacctactttggtgagaatatttaaaggcatttcttgcccggtgaaggttcaaattaagcgtcacaaaatggaggaacttccagaaacagacgatggcattggacaatggtgcaaagacgcgtttgttgccaaggatgctttgctcgagaaatatagtactacggagatattcagtgaacaagatcttcaacaaatccgtcggcctaaaacatctattttg

SEQ ID NO: 87070 - DNA, 389 bp, Glycine max
  Clone ID: PAT_MRT3847_49634C.1
ttcgtccgcccacgcgtccgagaagatactggttgccaaggcaacagatcataactcaagacttcaattaacaaccaccaccaaaggtgtgatatggttggaccaagtgtctgctatgccactggacacatataagggacatggtttccgaactgaccttgttgaaatgctgacagctttgaaaccaagatttatcagatttccgggcggttgttttgttgaaggagaatggttaagaaatgcatttcgatggaaagcatccgttggaccatgggaggagagacctgggcactttggtgatgtttggatgtactggactgatgatggacttggctattatgagtttctccacttgcggaggacttgggtactgcaccaatatgggtatt

SEQ ID NO: 87071 - DNA, 426 bp, Glycine max
  Clone ID: PAT_MRT3847_49635C.1
aaggtttcccgtcatcactgtatgacgtcctccttctttggggggggggggggggcaaaaactgcagaaggatgaagaaaacccgtgttccaaaaaaaagaaaaatactatagttgtactgtttgaggttgcacgtgtcaactaattagggttatgtaatttgttattttagcgtgaggcttctggttgttgagtaaaaagagataatattacggcgcgtaagggtgaggccgggtggcgttaaagaccattctactactcccctaatcgtacataaatgttaaaccaaccaaggagcggcagcaaaattcgttatggaaatacgcaaatgtggtgtgttggaaacatatagtgatacgaatcgtagaacgtacgcgtgataaataaccccagagagcaacggataaaaaagaagtccatcgtggg

SEQ ID NO: 87072 - DNA, 586 bp, Glycine max
  Clone ID: PAT_MRT3847_49636C.1
gtgtatgttgaaaatggaaggggggccaaaagaaaagcagaaggggccagaaaaaaaaagactgcttgggaggaaaaaaaaacagtgaaggagaggtaggatacaagaaaaaaggcttcggttgaggaaaaaaaaggagctgggtttgggaaaaaagagtatgggaactaaacctggatgggaacccaagaggccttgattaggccccagaaagccggggtgacgggccccccggggcaagcgtatactccacaaagcgggcaaccgacccaggcaaaaatgaatgacaaaagttcattgaaaaggcgtgaaacttggtgactaggatgtgataaaggggggggcaaacattggccaacgctccgtggagcgaacaagggacagagaaattgccttgggaacatatcaacctggtcgtacgggggcaagaaaacactcttatccacggggacaaaaccgtggaaacccgatgtcacttggggcagaacctccatgaacaatggaaaagtgcttcttgcaacccgaaaagcctccaagtgttttaacggccaaagccgggggttatatgaaccgcaaaagggttcaa

SEQ ID NO: 87073 - DNA, 343 bp, Glycine max
  Clone ID: PAT_MRT3847_49637C.1
acgcgtccgccaacgcgtccggacgacagaagggggagttgagaggatcgtgagatgggcagtagccgagagtccgtgagttgcaaaaatgaagatcaggctttccaccgagaccatgaagatcacggacagcgtgagcatcaaagtccacgccaaggtcatccaagtttaaggccctcgcggaaggttggtgcgagacctcacgcatatgactcgcgattttcagcccatgactgacgagaaccgtactggaaagctgaacatccacgcgtggtttggttctcggaaagcattcaccgccattcgcagcgccttgagccatgtggatattcataccaccggc

SEQ ID NO: 87074 - DNA, 188 bp, Glycine max
  Clone ID: PAT_MRT3847_49638C.1
gagggcgatgaagctacatatagacacaatacagagtgagttgttgctccttcgcgacaactctctgccaacatgggtatctccagagactccatccacaatatgcctgccactggtggcaataataatgcctggtggaaaaagataaagtatcaccttggtcgccatgctgctaacaccaagctgtc

SEQ ID NO: 87075 - DNA, 731 bp, Glycine max
  Clone ID: PAT_MRT3847_49639C.1
cactccatcaaatcaatcgtgtctttgtagagagaaacaaagttctcttttactttctctctcctgcaggctcagaatccttttgtaactattctctgaatttccattcattctatgtagtttcctcttttgttttctcttctttttccttggtaagttcactctgatcaattctgaatatttctccctctccttgaattcttccttctcttaattttttggttgctttttaataatatttattcagtgaattgtatgagggtgtgaactctatgatctttggaataatgggtgtttgtttaactgagactctttttgaaagttacgtgctttgatgacaaacatggtatggtttttgtgggattttactcctcaatttcgatttttgtgcttctttcattctcttctctttctggctttgtggttgtggttgaggaaaggttctgtttctgtggtttcagctacctggttcttgcatgaattttgtttctccttaattcatctgtggtaattgaacttttcttttttagttgagggtaaaaattgatatcatttcaatttgtatgtgtgaagttatggagctttgtttctctctggaatttctggaattgaactgtttttggtttggattatggaaggaagtattcctcttgtctgataatgataaataaaaaagtaatccaaaattcatttgatttttcttttttggtcaattttagatggatctcttg

SEQ ID NO: 87076 - DNA, 268 bp, Glycine max
  unsure (1)..(268): unsure at all n locations
  Clone ID: PAT_MRT3847_4963C.1
aaagaaccaacaagcggcggaacccncncagccaaaaaaaacaangcagacccaccagaacccncccacaccggannccgacccgcagcncccgcagaacaaaanccaccaccccnccnccccgcgccancaccaccccnccnccgccgccacccccacccccaccgccggcgcacgccgcaaaancggcgnggccgncgaccccnccgacgagagcgccnaccgcggccgcngggccgngcagcacnacanccgccccggggacgcc

SEQ ID NO: 87077 - DNA, 399 bp, Glycine max
  unsure (1)..(399): unsure at all n locations
  Clone ID: PAT_MRT3847_49640C.1
cttattcgtggggatccaccgcgatcacaggtcgccgctccttaccaccggcaacagcagccgtcgcttcttgacaagaagaatctaacaatttcctactacttcgtggaggacgatttcttaagggaaagaaaattactctctgtgctgaccacagacttggagaatcattttcttcaccactcttagattagctgcagaacactctactatttgatagaggacttcgcgacagataaaaacttctgctgnctctttatcagttctctgaataattacaagttcaagctggaaaaatcttggattagtactaccactctactatctggtataggatttcgggggaagactctactatttctctcctttctatcactctcttcttatcactgatccgca

SEQ ID NO: 87078 - DNA, 141 bp, Glycine max
  Clone ID: PAT_MRT3847_49641C.1
ggttgtgggatactaaacatgaacggcaaaaaaatcaatgccagctgagtgcaaaactctgaacagaactacacctcacacgagaaggtttaccaaattagaggccccattatgagaccgggagaaactcaagccaaataa

SEQ ID NO: 87079 - DNA, 960 bp, Glycine max
  unsure (1)..(960): unsure at all n locations
  Clone ID: PAT_MRT3847_49642C.1
aagtaaaagtcatgtctctgattgctaaagctatagtgacaagatacaatagacgtataccagggattcaaatgaagatctaagcgacaaactacctaacaaacaaatgattagttgattacatatatagatatatacatagccactcgcttttcctcaaatgacaaggtaattgtatacagctagctaactagtgagtgaaaagccacctcttttcctttgtaaattgtatattcagacacaaagagatactacacacgacatacaagaccgcaacatgtttcaaaaatgtcaaatgaacaccaaaagccagcgattaaccccattccattcttattaccttctgtgttatatctccaccctgtggaaaataaaaggcttggagtagtgttagcattaagagtgagttgtcaaataagatcagttctacacacgtgttgtcaggcagctggaagttggcacgcgagaaagttgtaacatatgcgttcttaagctacaatccttgacctgcatggctgctaacgaggacaaaaactccttgcaatgttcaagcaaaagcctttcttttgatgtcacctttaggatttccgccaccaagcagttagtttcttccacctttgaagaaagagagtatattgaggatgccattgcctgcatcacatcaactgcagaccccaaagcatcctttagatttggtacatcagctattgctttttcnaacaactggaagacggagggtactggccttcaaagcttcagttgctccaagcaaagaactggagtgatctctatctagaagggcccattcctcaaatacgaaatctgtccttttagaatggaagttaacttcaacttttgcctcagtaacacaagcttgattcttttaagtatgactgaatgccggagttctgagattgttacccatgcattccacaaatgtctctcagcattcagtttctg

SEQ ID NO: 87080 - DNA, 369 bp, Glycine max
  unsure (1)..(369): unsure at all n locations
  Clone ID: PAT_MRT3847_49643C.1
cgactggacggtgcacgaaacacannnaatttgcgtgcaaaccccggaagttgggtatagtgctggagggagtggcaccctttctgctaatatatcaacgcctaagagtgctgcagaccagaccatcaatgtactcactcctaggaggcttgggcccctgatccacctgagggacaagtagccttcagaaccaaagatcacaaggcaccaccagaaggggaatgacgctacaccctagatatgctgcagggtcgacgaagatatggattctatgggagagggaatacaatgctaccctacgtgagcaatcggggactatgtgacaatgatttcttctggacgaacaaggaagagcctatataagacgag

SEQ ID NO: 87081 - DNA, 309 bp, Glycine max
  Clone ID: PAT_MRT3847_49644C.1
ctaacaatacaattttgctttctaagctaagattcttctgaattaatacgctacccacactgcattcagagtagcgcgtccggtattcagcctgaaatggagtacatgaaccagagaccaaaagatgatagcctaatatttgagctagatgatactatgcatccactaaacactggtcttgcaaaagcatgtggccaaaacagtaaagactatatggccgaaaagctcggcatagagaaaagcaaaattgaagactagtccaacctcctctacaagatccaagggaaaactacggctggcaaaaggacc

SEQ ID NO: 87082 - DNA, 347 bp, Glycine max
  Clone ID: PAT_MRT3847_49645C.1
atattataaaaacaaagttgggaaatatgtatattagttacgaaccatttatcccgaggacattaacggaggcgttgacacatgccacgagatatatactagacggctgtacatgatactcagtatacacagtgattcgttggatatctacatgaacacaaactcgtgaccttgcaagcctatcaagataaacgctaggtataagaactcaatcttagtcattgtagctaacgatatatgaagctccaaggctcagaacccatgtataggatacttggatacattgacctcagaccctagcaagcccaaaacatgttatcatgggttacccaagctcaccgacttga

SEQ ID NO: 87083 - DNA, 420 bp, Glycine max
  Clone ID: PAT_MRT3847_49646C.1
cgcccgggaaacttcacactgatgatctacccactaagcctccattggtgccaacatacaaggagtggtctggccttatgcggtccctcttccttgcgactcttactaacaatcagtcaacttttgattctggttctcatggcttcattgcaggagccctaaaaaacacaccgcaccaactcggactattggctccgcctaacaagttacagaatgtattagaaaatgattacatgaagtccctggtcgaaagtccaactgaagaaactagtttgatttatgtgtcccagctggcttcacctatatgcggagaccaggacagtcttgtcacgaacccacccatgccagtgtacggttcagagtataaaaagcaaatggcactttccgggagcctcacatcaacttctctgaagagaacac

SEQ ID NO: 87084 - DNA, 308 bp, Glycine max
  Clone ID: PAT_MRT3847_49647C.1
cctacgcgtccgcccacgcgtccgcccacgcgtccgattacaaaggaaaggtctcgttgtgatatggttaagaaaaatatatttaccatgtgcagcactatctctgaacatttgttattacaaaattatttcatgtgtcaaaaaaaaaaaaaaaataaaaaaaaaaaaaaaaacaaaaaaaaaaaaaaacaaaagcaaataaaaaaaacatataatgacaattagaatgctttgtacaaaaatttctaaatgataataataactcttacctggacattaaaaaataggggggaccttttaaaggatcc

SEQ ID NO: 87085 - DNA, 560 bp, Glycine max
  Clone ID: PAT_MRT3847_49648C.1
gccccagccagttcctggacttgaagatagtttaagggataaaacagtgaatgtaggcagcagtgagtgtgcagtggaagcacctgcacatgggccatttgaagaggactactctaccatgccaatgagcccaaaatctggtgaattgagtcattcacatgggatttcaggaaatagattgaatcataggattaagcagaaaagcattgctgaaattatgggagaggacaaagatgtcaataccaaaaatcaggaaggagatgcaactgaaaaagtgactgtaagaaagaagaggaaaggcagtgaggatacaatggcatctaaatctgtgcagatgagaaaagcgttgttctcaaatactgatagaaatgtggcaggtgctgaaaatgatggtggttgttggggcaaagaggacggtgacaatggaacattggcgcagttgaaaaagaagaaaaaagcttttggtattggaaagtctagtagtgggagcaaaaaggaaactgatctagaagggaagttcaaaggaaaaaatgagaagggttctttgtcaagagaaaacc

SEQ ID NO: 87086 - DNA, 320 bp, Glycine max
  unsure (1)..(320): unsure at all n locations
  Clone ID: PAT_MRT3847_49649C.1
gtcgcntgcacgcgtacgtaagctcggaattcggctcgagnnnnaacannnanatgantggncagactcngangntntctatntagtaaaaatctttcntagtntntntcntatgcactcccatagtngaacngtnnnagctaaggtattattatggcntntcaagngtnggngantngngnggtctccagcatagtgtntgcananatagtntgganaanananaggaagncaaagcttccaccgagtccaaagggccttcccatcattgggcacctccacnttgngtcnccaataccccaccaagatttttacaagct

SEQ ID NO: 87087 - DNA, 122 bp, Glycine max
  unsure (1)..(122): unsure at all n locations
  Clone ID: PAT_MRT3847_49650C.1
ccagagcaaccnccgngccggagagcagcgccggcaacacncggcncaanacncnggaaccgggagcccngnnagggcgcngganccncnncaacaacnacnncaacancnacaacaaacag

SEQ ID NO: 87088 - DNA, 771 bp, Glycine max
  Clone ID: PAT_MRT3847_49651C.1
tctcttggcggcatgtcacataaacataaagagagagacatgagaaaacgggagagcgctacaatctttctcacattcaggaattgacctcgcattccgttcaataattactgtgctactgactgctcaacgcaaaggaccatagaacgcttagaattgacttccaaaacatttggtggaaccaatggcttgcaccctttcaagtacaagaccttgattaccttgaatacctttcatatggattgcctcccatcatacctattcggactcggcctgaattctgatacggagcagcattatagaattataagactgagcaatcccattaccaagctattgcaatatgtgatacactactataccattgcatatacgatgctcaagcaacagtactattgcattatataaaatgattactgttgctcgttttcaatcaaaaatacaccagcattgggcagccggagtaaggaaataccgtcttaacatgagtacgtctttaccagctaagattgatattaaaaaaattgactttctcttataagtaaactttatcaattctcagagttagacatttactataattatcatggtccaccaatgagcttatcaccacgaatatagatagtgcacggtataaaagaagatatactatcccatgcatcaatattgtaataaatgcaaacatagatcttacgaacaacttattaacaagacaatgaacactatgtgccacatatcttcaatgcaatgatgtgcaaactgatgatatga

SEQ ID NO: 87089 - DNA, 502 bp, Glycine max
  Clone ID: PAT_MRT3847_49652C.1
ggaaccttcaaaactataacgatcaaatattagtttattacagaaagagcaaatgaatatagcccttagttgatgacaaaaaaaagtatccgctaggggctatatatgttagtacatgccatggaaagatcttccatgtgtggcattctaaaaaattttccgccttacttggtaattgccaagttaactgatcagcagcttcaataacaagatgaatggaacttcacacactgactgaatccaattatgaagctatgtccggagtttgtggcagtatggaaattaaaacagtaggagagatggtccagctgtgtcatatttaatcagcaaagcaagtcagcttttataggatgaccagaagaaccaacgttagtagaagcccactgattccacgattaatgcacacaagttcaatccatcgtactttggtccctagtgaaacgaagatacaaacgacatgagtgaagaacgcaaacgacaaagccgtccaaaacgacacgac

SEQ ID NO: 87090 - DNA, 855 bp, Glycine max
  Clone ID: PAT_MRT3847_49653C.1
ggagattttgtggttactgaagcacaaaacaaagaagcattatgttactaaaatatcttattgattaatatttaatttaataatgtatatttctcaagtcaattcgtcgtaaacattaaacacgcgcttcgagctattggcgattgcaattgtcttttctcgattctcatatctcgatattcgagtcttgataacttattagtaattctccgatcgccgccgcgaactggactcaccttcgccggagtcgtgtcgttttggacggctttgtcgtttgcgttcttcactcatgtcgtttgtatcttcgtttcactagggaccaaagtacgatggattgaacttgtgtgcattaatcgtggaatcagtgggcttctactaacgttggttcttctggtcatcctatataagttgataggcttcactgattatttatgactcagctggaccatatttcctactgttttaagtttcataataagttggaataaaagctcgtccattatgaattgactcaccttttaacttcatatagacagcctcgttctccggacatagcgtgataattggattcagtcagtgtggtaagttccattcatcttgttattgaagctgctgatcagttaacttggcaattaccaagtaaggcggaaaattttttagaatgccacacatggaagatctttccatggcatgtactaacatatatagcacctagcggatacttttttttgtcatcaactaagggctatattcatttgctctttctgtaataaactaatatttgatcgttatagttttgaaggttcaacatggaaagaataaaaataaaataaaataagatcatggccattttca

SEQ ID NO: 87091 - DNA, 1950 bp, Glycine max
  Clone ID: PAT_MRT3847_49654C.1
ggagagtagaaacaaaaagaaaaaaaacattgtaagcgctgtaacagcaggtttcggaggcttttggggtagccgacgagacacagtggattccttaattctccatggatatggagatgaaagaaggtgaagcccccgtgttgtggttcgaaacctctgactctgtctgttgccaacaccagtttgaacccgatggtcgactctccgtagtgattgttgatgattccaggcccctataccaaaggatggctggatctttcatgaataaatttttcccctcaggatatccgtacagtgtgaatgaaggctatcttagatacacgcagtttcgagctttgcaacatgttaccagtgcagcactatcggtgctatcaactcagtccttgctattcgctgcagggttgcggcccactcctgcgcaagcaactgctgttagttggattttaaaggatggaatgcaacatgtagggaagctaatatgtagcaattggggtgctagaatggattctgaacctaaacgttggagactactagctgatgtgctctatgatataggcattggcttggaagtgctttctccattatgcccgcatctttttcttgaaatggcaggcttatgaaatgtggcagaaggcatagggaatttggccaaggggatgtcaattgttgcatcacgagctacaagattacctatatattcttcatttgctaaagaaggaaatctaagtgacctatttgctagaggggaggctatttcaactctctttaatgttgttggaattggaattggaattcaattagcatctactgtatgtgcgtcaatgcagggaaagttggttgtggggcctctactatcaattatacacatatacagtgtttctgaagaaatgagagcaactcctgtcaatacattgaatccacaaaggactgcaatgattgtggctgattttctcaagttcaagtcaggctggaagtgtatcaagcccagctgatctaagatatcgagaagatttgctatttcctcgaagactcatagaagatgctggaaatgtaagagttggtagggatttgcacaaggttattaagccttcaaggcttcttgaatcaaaacaagtattccctggggagaagtttattttaaatggtgataataggtgcatcgacatggtattggagcaggatgctatcggcaaagatgcattgagagggtggctagttgcttcatatgctgtacaaattggcaagtcctctcacgagctcagtaccagtaccctgctacaggcctatgagaaaatgaatgaggtcttccctgcctttataaaagaattacagtgcaaagggtggcatacagatcggtttcttgatggaagtggttgccgctttgcattgtagtgtacaaattaatcctatattggctttagtaggccttttacctattgcgagagatttgatgcattacatgtgatggttcaggttacttcttcaagttaatcttaatatagctgtctgtatctaactatcctgctgcaggatgatcaacggtccatatcctgaaatgtaggatgcatatagtagcaattgactttgttttcttctcttaaaaaaaaaaaaaaaaaaaaaaaagggcgtcgagaataaatcatctttgacttaatgtgctatgggtggagtaaactgtatattttatcgtattattttttaaaaagtaatgttaggacatacctttcttcaaaaaacatgaagatggaggaaggtatgataaggactttgtggcttgtttgagggatgcggattcaagcttcttgatggccaaatctggtcttattttcagcacgaggagaggtcaatactattttgcagacaataatttggctttcacagcaccacagagttaatgttgtttttgaatcagattgttgatcatatatacaataaaggggaagatattac

SEQ ID NO: 87092 - DNA, 381 bp, Glycine max
  Clone ID: PAT_MRT3847_49655C.1
ggttcttgtttgtgtaaaagggaggcgagggggagccggagaagagcggggcggaaccgggggggagacgagggctgcctgaagggggaatacgataacaaggcggaacaacaggccaaaccggagccctgagggaaaaggcaggggggccaaaagcgggaacaaaacaccagcaagaggggagagctgaaaggccgggggggccaaaggaaagagggaaggcccacaaagagggtggggcccaccgacccctgggagaggggaaaacagaagtgccagccagaaaaaagaaacggcccacccccgggaagggggcgggggggtttcggcccccagggggggccttatttaccaccaggaagcgggacacactggagggcc

SEQ ID NO: 87093 - DNA, 1133 bp, Glycine max
  Clone ID: PAT_MRT3847_49656C.1
ccacgcgtccgagaacactttcatttggggagaggatatggatgaatgggcgcccatccatatgatttatggaatggagcgtgcaatcgccacttgggaagttagacttgctgcttccgcaacagcattgcttcacaaactacagaaaggtataccaccgtgggttcctttgaagggatttgaaaagaagacttataagcaacttcaagaagaggctatagaaagcaagagacgtgatttagcagtattggaagctaatgatggtctttggcctggagctaaaattccaagtcatgccctatttctttgggctagtggctctgaactgaccactatattggaacaggatcacatgcccaacaaatacattcccaaatatcttagaaagaagttggctgaaattattccagggttgaggccatgggaagttctgagcatagaacaagcaatggatcgattaacatttaacggggaatggtaccgtgaaccacttggttcattcaccactggtcccccataccttgagcactggaatagagatgttatgaggttgtataagatatttgatgatcttaacaccgagttgtacgaacatatggagaattcaattgctggctttgataaaattatggagaagatcagggatgattttattgcgagaactgataaaatgttggagaagaaagacaaagagaaaagagaagctcggaagaaagctgggttgcctgagtatcaatggcccgaaaaaccatatgttccttagtttcatttcttgcatgatttctgcagatcatatggatcttttgcattacagggcaaggttgttagatggtgagaagtgtagcgaggctgatccatttattaagattgcaatctgggattggctatagcaatttttgtctttcttggagttggttcgaacgtctctattgttaaatattggcatctaatgaatgaaaatattttttagcctcttatctgttctttgcttttcgaggaggtgtcttgcacaaccccaacctttgacagcttgattaatggtgtgtttggttccacttagggaaccaaaattcaccggaaaaacttgaaaacgttgtcatgatccaatgtagctttggacactgtttggacgc

SEQ ID NO: 87094 - DNA, 254 bp, Glycine max
  Clone ID: PAT_MRT3847_49657C.1
ttttgtgtggcttttgcttttgaatggtaatgctgatggttcaaaagatgtttataaacttgctgagcttgaggaacaacatgtaaaagggtttcatcagaatgttagcaagagttttgtgaaggaaggtgagaatccagctgaaaaggtctccgaactgagtttcgaaaagggggaagaaatagctaaggcatctcatgaatctctggtttctgatgctgaatgggtatgtaaaagccccaaaagctggcgtc

SEQ ID NO: 87095 - DNA, 476 bp, Glycine max
  Clone ID: PAT_MRT3847_49658C.1
gtgacaaccttcactgaaatccaaaacctagggtgtgtacaatgacagatttaccccatatggggaccaattccaactcaaatgataactctttcgcaaagcatggatgcaatgaattcatgaacattcattttgctctgacaagcaaacctgtattgccatcaaaccacccaagaatcaatctgttacacattaagcatgttacaatcaatatgccttaacagaaggtgatctaggaggagaagttgaacaagttgcaccatttttggcacattcttgttcaggcctcttggcaaacgctgtaccgacccgattgttcctcaaaccattaaaaacacaggctgctgaagaagctgtagctcctgtgctacaggcttgatcagtatggaaacgatgcttgaggcacaacttaatgagccaagttttacatgtgctggagttggaaaacgtcaaaacctccctgctacgctcgacgg

SEQ ID NO: 87096 - DNA, 141 bp, Glycine max
  Clone ID: PAT_MRT3847_49659C.1
gctcgctaagttttactttattagttagctggtgaaactaaccagacacagtttcttatcgaaaaactggatataggataggacacacagattttcacctttcaaacaaaataacacgagtaaaatgtgaaaaaattgaag

SEQ ID NO: 87097 - DNA, 522 bp, Glycine max
  Clone ID: PAT_MRT3847_4965C.1
ttcgtccgcctatcgcgtccgcccacgcgtccgctcaatttatttggctcgtagaacaaagcggtgtcattgtggtgcgaggatcctcgctgcgatgtgtagtcgaggaacccttgcaaaagctcgatcttgtccttgtcggtccacagccgctgaaacagctgccgcgagtcatccagaggcggcgacgactttttctcctcgattagctctaggcaacgttgcttcagatcggatgagtcggtgaggacgatggtggcggtgggttttgaaattggagtgccgccaccgttggagacgaaggaatcggggacggcgacggtgaccgtgagagcggtggagggagagggcacgttttcttcgtcgtcgtcttcttcgtactctgctgcaccttcaggtctgtgcccaacggtgggtaccgggggagtttttgcaaaataagcctgtgactttggctttctagttatgatctagaagacccttttcagtgaagacacaaaaaattcctgattccggaagagt

SEQ ID NO: 87098 - DNA, 139 bp, Glycine max
  Clone ID: PAT_MRT3847_49660C.1
acaggataaatggaaaacattattgcacaccgcaacactctcctctgatcaattgatgggatagccattacctcaggagctcttgaacatggtgttggctgctcatgctttctggtcttaccaccaatctaatcatcat

SEQ ID NO: 87099 - DNA, 188 bp, Glycine max
  Clone ID: PAT_MRT3847_49661C.1
ctcgagccgttcaaatcaaatccaattgaaatcaaaaataaaaaggaaaaaagacaaagtacagacctctcaacacatggctgcttcaatcccatttacaggtatcaactcctcaagggatcttcccattcctagagaatcaaacaacccatttcccaattggtcctcaaacatgtcaaagtttgcat

SEQ ID NO: 87100 - DNA, 254 bp, Glycine max
  Clone ID: PAT_MRT3847_49662C.1
tccacgcgaccgcccacgcgccgaagcagggggacttgaaacaagaagcgcgcaaccccccccaccccttagggacgaactctcaagggaaagaaaaccaccctctgtgccggccacagacagcgagaagcatgcgcacgaccaggccaggttcaagagccgaacacacagcgaaaggagaccggactccgagcccaccttggacgacacccgacactcagccagggacctgttcagctggaacagcgagaaaa

SEQ ID NO: 87101 - DNA, 326 bp, Glycine max
  Clone ID: PAT_MRT3847_49663C.1
tccacttcgtccgagcaaaagctgaacacactccttcgaactcactgaggtatttgatccatctctgagagcaacttctgatcagccaaagatgccggaaagcgaacacgacttggatgaggaggcgcccaacgccaccatggaaaccaaagtggcggtcggcggcgcggcgcccaagcgcgtatggcgctggacgtagtcacagctgcaccagacggacggtatcattccatcccaggccggttggaacaagggagactcgcagaagttgatgaccaactttggtacgccgcgtaacaccaccaccaaagtcaaaagtggagaat

SEQ ID NO: 87102 - DNA, 665 bp, Glycine max
  Clone ID: PAT_MRT3847_49664C.1
gtttgtctgtcttgtttcggtcatcactcgcatactattgtgaatggagaagttgatgaattagtccatctttgaaaatgccatagctgtggagaacatcggtaatcagctaactgaaccattatttccttaagcaaaaagcttgtggaataaaaaaattatgatataatgtggaaaaaagatgaagaattaatgtgacttgaagattaaacagttgaaacttagcaggtatatatatttattagttcttcccttggctatttgatctttctgaagttatagctaccctggctgctgtttcagaggaggtacgcggctgactctgtgaatcatttggggaaggaaaggtttgcctctttggtgtttgttggggccgcctgtatccactgtccgctgctacttttcgcgatggccctctctccctcggtcgtcccggtcctcgtcgacccgctaggcatcatacgattcatggcacaaccgagacagctcattcacatggctctgtggttgcccatgtggacccctttaggggacggaaaggtttgcctcagtggtgtttgttttgaaggtcggtatccagagattgagctggctcgtccccttaatcaggagtgtaggttgtatagccatatggtgggtacagaacaggtggtggcggctcgtgc

SEQ ID NO: 87103 - DNA, 236 bp, Glycine max
  Clone ID: PAT_MRT3847_49665C.1
ggtggggcctttagaacctgccgggtaatcccacagacatgacgaatagcagcacctactgaacgagctcctatgagacctgaggtacacatattctagataagcgctgacttattgcatatcttgcgtggataaccaaccaagatgaatggcttcactatccttgctgcatgagggaacttgagtacagctgcacatgcagtaatcctaaatgttgcctgagggaaagataaggt

SEQ ID NO: 87104 - DNA, 129 bp, Glycine max
  unsure (1)..(129): unsure at all n locations
  Clone ID: PAT_MRT3847_49666C.1
ggctcgatggcatatatgaaggtgaccttgctaaggttgttgatgttgacaatgtacgtnaaagagtanatgtgaagctgatnnntagaatagatntacaagnntttggtagtaatatggaagggagag

SEQ ID NO: 87105 - DNA, 359 bp, Glycine max
  Clone ID: PAT_MRT3847_49667C.1
ccgagctgtcactgggctcctgacctgcccctgaactgcaccctgccaggcagccaacagacaagctctcggtaattgacccaggcaagagaggggagggattggaggagaaagctgggataggcaggccctggaaaggtcacctacctgctggctccaggccagtcttgaaggtgccaggggttctggcccagtgcagcccacaggcccccagcagcccatgcactccaggctctgaccacaaggccagtctagagggatgtgtgtgggcagagtgaaagggcaggggtggagcatagcatggatgcatagaacaagaaagaacagggacactgcagtcccattgccctgggagtcag

SEQ ID NO: 87106 - DNA, 318 bp, Glycine max
  unsure (1)..(318): unsure at all n locations
  Clone ID: PAT_MRT3847_49668C.1
ntcangncncnnagtaagcncgnnantnngctcgacgaanagtnagcnnnnagncgattcgggctntgggcaattngggactnctaanaatntanatgaggntntntccgcaagatcnctcgngtnatgtttccatacaatantgctnagaantgancttaggnggcaaanncatcntaatcntnanagnngtnatnngggnagccatgattatngnttnnncnaaanctntggttcaagtctgcnnnagntccngttgnntcagcacgatcnatncncnttgctncaatttgcattcngcaaaggnccatcttnggg

SEQ ID NO: 87107 - DNA, 302 bp, Glycine max
  Clone ID: PAT_MRT3847_49669C.1
ctcagctcacatacttaagcaactgaagaagcacacacaggcccagaaatgctgcaacactcaacccatgactatacagtcacagtggtaagttattgctaaggggacaaactaccttatattacatgattccactctcaaaaactgaggttggtgctatgcatcaaagcacaactgattcatgctttgacaacggccagtgctgctccacactgggttaacctcatccgatgctttatcccaactgaccctggcatatgcacaacctcgcaacgaaggttctaccttcaaaggcttttcct

SEQ ID NO: 87108 - DNA, 290 bp, Glycine max
  Clone ID: PAT_MRT3847_4966C.1
gacagctgcaataacaatggctgcctcactagatgctgcagctaccttcatgcgacccaccagcgttcgaatatcctctcgcatcctcatatctacacaatgcatttctaaagcatttggcatgtcacctgctgcaactaacctcacttgctcccttcagcctgatttccaagaacttgctcaagtgtgtgtccacgctaccaaaattgcaagattcgcccttgccacctctgctctcgttgtttctggatcaagtgcacaaagtgttccaatcaggccaaccctcaacc

SEQ ID NO: 87109 - DNA, 419 bp, Glycine max
  Clone ID: PAT_MRT3847_49670C.1
gatgcagggtaactctattaatatcctaatcccgccttgtctgaatgatacatgactctttacataacttatggacaacggaatgctctggtgggggtaaagcaaaacgattgtatttgacatggacatctgaagttcgacacctctacgttgtgctgacatctaggatgatgctttaatcatggttcttgcactttgcttaagagtgaaagggacttaaacaacagagaggcatgctcaaacatgaaccaatgggtgatggggctactagaggcctgaaacttaattgatgctgaggggagacgaaacttaatcctaacacacacttttgtatgtggaagatgcggctacgggccgccccggtaaatgatcaaactcattgattacctggattacgaaatgggtgatatcgggacaga

SEQ ID NO: 87110 - DNA, 768 bp, Glycine max
  unsure (1)..(768): unsure at all n locations
  Clone ID: PAT_MRT3847_49671C.1
gctagcctcctctacagccgccgccctctctttttttttttaaaatagacttcacatattaggttaaatcttacgagttgagttgagcctgaatcgagtttatgaaccttccacaaattttacataaactctaagtttgataatcttgtttgatagcaattacatctgcagttctagacttctagtagtcacataaaacacccaaaggaaattcaatgtcatgggaaagaaaagactatgtcaaaagggtaatcctgtaatgacagaagctggtgtgttacaaaagatggggcatcgataggagctgaactggaagcaccttctggccatggccataccaacacctgagcagggattggtcacgcaccttcaggagtgaaataccttgtggccttaccccaaaatatgttgcagagatggcttcctcaatcacagactaagattgcatgttttatacattttattttggatataatacgcatttgggtaagcaacttaattaaaaactaattccataagctcttaccaaatgagctattttaaagttactaaaaggaacgtatttgataagcttctccatgaagctttaaaaaacatgtaaggtcataaactagatccatgagctcaaataaactcttccaaaagtccttaattggtcatgaaactncctcaataactggacattaccaattatcttataagntgaagctattaagctagtttgtcatgaatatgtgatatgatatatcagcagtacagccaatactt

SEQ ID NO: 87111 - DNA, 290 bp, Glycine max
  Clone ID: PAT_MRT3847_49672C.1
ctcggcatacggctcgagcggctcgaactcgagccgaatcggctcgagacggctgcgagaagacgacagaaggcgaggttgggaccttcactggtgggacttcactagtcagccaatcgatgagatttactcatattatggggcaaagattgcaatctattttgcttttcttggaatgttcacacggtggatgctcttccctgtgcattggggcttacttggcatttgttagatttggggtcattgaagttagttgtgcttcctatttccttcatcatgatgatacttgg

SEQ ID NO: 87112 - DNA, 1351 bp, Glycine max
  Clone ID: PAT_MRT3847_49673C.1
gaggagagagaggatatgggttcgaagaggtatgcgctattgatgtgcggtgaggattcggagtacttggtgaagatgcacggaggcacctatggggtattcatgaagttgctccaagagcaagaggaaaagtgggacctctacaagctcgtccaaggagagttcccggagcagcatgacttgcctctctacgatggctttgtcatcagtggaagctgctatgatgcacatgccaatgacccatggatccttgacctcattgctctcgttatcaaattggactccatgcacaagaagatccttggcatttgctttggccaccaggttcaatttcttatgcttaacacttcgcatccctatcaatcatcctttggatcttcattagttaattgccaccccttctatattttttagtttcgcctctctcattgctctgccatcgtctcaattattattctcttttttttttatctagttggaacatgtatattattacgggggcttatcgattggccgattttagtttttaaaatcttgagagagaaaaacatagtactgaagacaagtctcatgttagagatgtacaaacgagaggatacaattatacaaataactgtattaaaaaaataacaaataagctgagttagagattttagaaaggtggacacgattttcattattgatgtgtggtccagtccgtcggaagaaacatgttgtcgatgctatgtcctattactctggaccatagatgttggaaagttttggtggacccatttgcattctgggataaaaagaatttaggttaaattcggagggtcttaactctttaagtcttatatatactaatatacttatgaaatgatcgaggattacttattctgagtcctgtcgtatttcgtacgcagaagcagaagtattcaggaccactaaaaatatattatgtggacttttgtgttgaattaatattccattatgtgtggaaatatttgtctatttgggtcctaccaaaacaaaaagtttgtggtcagcctgcgttctgataaaggagaaaataaagtcaggataaggatgcaattcgtttacttaaaacgaaatttaaacctctaaaaatcaatgggatttatttgtcaatttaatcatttgatgacttccggcggttgatttttgctttatcattctcagtttttttaattattattttcaattgcttggtcatggatacatagtataaaaatgtttattaacatattttataatatggctaaagccgggttgacacctttttatgacatcaaaatctttttaaagtgtgttgcatagactagagcttaagcaatgatcagggtatccc

SEQ ID NO: 87113 - DNA, 364 bp, Glycine max
  Clone ID: PAT_MRT3847_49674C.1
gatctctgtgctaggccatggatctctttggagtagaatatcatcaaagctccacaagttagagctattgtagatattctactccaaagagatctctgtgctaggccatggatctgagaccgctagcaagcttcaagggacaacaccccatgatcagcttctgattgacacctctgattccttctctggattgttgttgttcacaatagggttccttctgttgatggttgcttttgttaaggacagagaatttcagagtttctttgccaaagggtgtgtgatgcttcacatctccatggcagtgtggagattcttctttgagaggaagcttggggatcttgcacatgagtggcctaggcatgct

SEQ ID NO: 87114 - DNA, 253 bp, Glycine max
  Clone ID: PAT_MRT3847_49675C.1
ttcgttctcaggcgggcgcaccttaagaccggggtggagaagcattcgcaactggattggaagaatcttccaatgactctctaattcttggtgtactacttggtaagggaaagataaagactctgtgtgctggcctcagacctggcgacacactttctgaatcactctcagttccactgctggacactttgctattcgatataggacttggtgtaagacttaaactctgtctgaaactttctcaggtccttgc

SEQ ID NO: 87115 - DNA, 4525 bp, Glycine max
  Clone ID: PAT_MRT3847_49676C.1
cccgacgtagctcggaattcgttcctttcaattgcttaccagaccaagcatggaagctaccggggaaaaagcatggcattttctgcatgtggttcggaatatggaagcaaattctatgctatttaattatggcataacaaccaccttgtgtcttcattaattcctatgcaaatctccaacctagaagattaaccatgtccctttgtaagtaccctgaggctgaaatagtaaccctttatatacctttctgatctattgacatattcaccctccaagcaaaacatttttattcttattttgctccatctctttagatcatcacaacttcagaggcttggttttaggattcaacttccaaaggcttactctaacatatctctgattgaaggggttctgtgagtttcttgttttagtttgagctttgtttggtaaacttgtcaagggggaattgcagtttctgatttgtgaaactacaaaaaattgaatttagaactgataaagggtctaatagaagagttaccaccatatcatgttataccaaactagcattagaatttatcatgatccttatggatatttgttagtaatgttcttagttcttatatagtactagaaagtggtgcttgaaatttcaactactattattggtgtagaggctcaatcgagttaaaagtgagaaagcaattaaaagtctttgaagtgaatttggatcaatggtttcttctgtgtttacccttatgtgtgttcttcattctacaatagctctaacttgtggagctttgatgatattctactccaaagagatctctgtgctaggccatggatctgagaccgctagcaagcttcaagggacaacaccccatgatcagcttctgattgacacctctgattccttctctggattgttgttggctcacaatatttaatttgcttctttcacatgccccacggagcaacataataccattctttcaattgatcaccagaacaagcatgtatggtacgggagcaagaagatggtagccggtgatagcaacaacaatttaatacctcaaaaatggttcactctctgctcctacttcttctcctcctcactctcactgcaacctctgctcaacatgacggcccttcgatcacagccaccatggagcaattctccggttacaaaatccacgaacctcactctttccaaccctcttcactctccgttgatgctcaggctcttcagaaccagattgatgagcttgcggcgttttctgactcacctgctccatcagtaaccagggtcttgtatactgacaaggatgttttaggtcgcaggtatgtaaaaacccagatggaacttgctggcctatctgtgagagaggatgctgttggtaacatatttggtcgttgggatggccttgaacctgagcttgctgcagttgcaacaggttcgcacattgatgctataccttactcgggaaaatatgatggagttgttggtgttttaggtgctattgaagccatcagagtcctgaaaaggtctggttttaaacctagaagaccattggaagtcatatcattcacatcagaagaaccaacacgctttggaataggttgcttgggaagccgcctattggctggaagtgaggatcttgcaaattctctaaagacatcaactgatattcaaaacatatctttcctagatgctgcgggatctgctgggtattcaaaaaatgaagatgacttatccagtgtatttttaaagaaaggaacatattctgcttttgtagaactgcacatagaacaaggacctattctggaagatgaaggtatatctataggcatagttactgccattgcagctccagcaagtctaacggttgaatttgaaggcaatggtggccatgcgggtgctgcccttatgcctaacagaaatgatgctggtctggctgcttctgaattagccctggctgtggagaggcatgtgttggattctgtgccaattggtactgttggcaatgtggctatgctggagatagacctgggttggattaaggttcaattgatactgttttcactgtcgattgcctggaactgcattctggagcaatcaacagcatccccagcaaatatcatctagaaattgacacaagagacattgatgaggaaagaagaaataaagtggttgagaaaattcatcaatcagcaattaaaataaccaaaacacgaggtgtcaagctctctgatttccgtgtcatcaatcaggatccaccagccatttatgatgaagaagtcttcaagctagcagaaaccacaatatatggccaggacgtctccaatgagtatgtttttcataccatgtttcaaaaggtacagtctaaagcctgaatgtttcgccaccattgaagattcatcacatgttgtaaaggtatcggcgctaaccctagacaaattgtccagtcagtaacatcttctgtattgagtttatgtggactatcattgtagaaaaaggacatgtaatttatttctgttacagcctactgattaaataatttcaaattttggatataccccctttaatctatcagaatgaggggctgaaccattcaatatgaaaagtggatctataagaaccacttttttataggactaggaacaaaaccactcaataaaaaagacatatctatcacaattactcttatagagttttaaattcccacctatgtttaccatagtcgaaacagctagattcaataaataaatgtgattataaaataagggggaaaatgcatatattttagtttggtagttggaatagcccttcatggatcttttgagtgagaaaatgaaattgagggttgtaagtgcttcctcaagaagaaggaagttagtaaagtttggatgaagattaaagttggcaacttggcatgcttgaggtgggtagttttgttcttgcctacggagagattcaaaagaatacgtctgaattttgactctcaaatataccaacatgactcgagctcaatgtgagcaaacattcactatttatgctttacttgacttgaatttgtgatctatttggcctttaatgggccctgtgtatgctcgaaggcttgtcttctgtgcagagccttttcggtgttccggtcttctcccacgagtgaccggaggtgcgtgtggtgtcatctttctgggtccgtggtgctccgattctttgttgacccacgcgcggggttccttctgttgatggttgcttttgttaaggacagagaatttcagagtttctttgccaaagggtgtgtgatgcttcacatctccatggcagtgtggagattcttctttgagaggaagcttggggatcttgcacatgagtggcctaggcatgctgttggggacattgcattggccatttcatgggtcttctttcttgtgtacacatggagagagaaatatgattagttaatttatttatttattttgcaagttatggtgcttgtggttgtggaaacaacatggcttcaagaaaggtaattgttttgttttagttggaaggaaccaatattttcagggttgtttgggcatttcaaagggacaaattgagctcaaattggccttgtgaatgctcaaattcttgacataaatggagaaccattacatgagttctggtcttcttcaaagagagaatggaagagcttgttgagtcaactttctggttctgaggtgcacagattcattatttagaatctgggttggaaacttttccttgattgcttcaatttcaatgggggagctccagtaatttgtgaaaacttcatttttctagtgagtccttaaaaaaatgtaccagctttttaccccccctttctggcttcaattgtgaaagttctgaatttatatttttcctgttttgcatccataacattggtgcaggtatgtctatttaggatttggcatattgctgagtccaatcactagggagggtggcatccttatgttgagaaaaataccttttcaaattgagtgaggatagcaaggaatttttccctcttggttcaacttcaagccatgtctttcaggatgctgatttgttctttttctagttgttttctcttttcttttatctaaagtagatgctctcatttaacacaatcgccaattttgttgtaatttgttagtgttgtaaagaataaaggtccttacttttgaagtcaaaaaaaaaaaaaaaaaggggtagaaaaaggacatgtaattaatttctgttacagcctactgattaaataatttcaaattttggatataccccctttaatctatcagaatgaggggctgaaccattcaatatgaaaagtggatctataagaaccacttttttataggactaaaatgaaaactccctgtggaaggagtcacggcagtgaattttatttcaccagagtgtttaaaagacaaaggaactactgatattgtagaatccagttgcaataccccaaccagaatagcctttttatatcttaagagttggaccactttgtttggagac

SEQ ID NO: 87116 - DNA, 243 bp, Glycine max
  Clone ID: PAT_MRT3847_49677C.1
gcgattttcgtttttccaaattccaacagcgagagcaaagtccgttctgttctgcagagcagagaatatgtggcaccagaacttaggtgtggattccacgggaactgtgagagagactgtcttcagtgcgagtatatttgtgcttgttgctctagttctctccgtgtatttggtattcgagcatttagctgcctataatcaaccttaggatcagaagtttttgattggtctcattttaatggt

SEQ ID NO: 87117 - DNA, 1772 bp, Glycine max
  Clone ID: PAT_MRT3847_49678C.1
ccggaattaccggctcgacccacgcgtccgatttaatttttcaaaaatgattcactctctgctcctactttttcttctcattgcagtctcagctcagcaacatcaacatgatgacccttcgatcacagccaccatggagtgattctccggttacacaatccacgaacctcactcttcactttccgttgatgctcaggctctgcagaaccagatagatgagcttgcagcgttttctgactctcctgctccatcagtaacaagggtcttgtatactgacaaggatgttttaggtcgcaggtatgtaaaaacccagatggaacttgctggcctatctgtgagagaggatgctgttggtaacatatttggtcgttgggatggccttgaacctgagcttgctgcagttgcaacaggttcgcacattgatgctataccttactcgggaaaatatgatggagttgttggtgttttaggtgctattgaagccatcagagtcctgaaaaggtctggttttaaacctagaagaccattggaagtcatatcattcacatcagaagaaccaacacgctttggaataggttgcttgggaagccgcctattggctggaagtgaggatcttgcaaattctctaaagacatcaactgatattcaaaacatatctttcctagatgctgcgggatctgctgggtattcaaaaaatgaagatgacttatccagtgtatttttaaagaaaggaacatattctgcttttgtagaactgcacatagaacaaggacctattctggaagatgaaggtatatctataggcatagttactgccattgcagctccagcaagtctaacggttgaatttgaaggcaatggtggccatgcgggtgctgcccttatgcctaacagaaatgatgctggtctggctgcttctgaattagccctggctgtagagaggcatgtgttggattctggttcaattgatactgttggcactgtcggtatcctggaactgcatcctggagcaatcaacagcatccccagcaaatctcacctagaaattgacacaagagacattgatgaggaaagaagaaataaagtggttgagaaaattcatcaatcagcaattaaaataaccaaaacacgaggtgtcaagctctctgatttccgtgtcatcaatcaggatccaccagccatttctgatgaagcagtcatcaaggcagtagagactgcaacaaaagaactaaacttgaaaagctagttgatgagtagtagagcctatcatgattcattgtttatggccaggttgtctccaatgggcatgattttcattccatgttacaaagggtacagccataagcctgaagagtttgccaccattgaagatatgtcaaatggtgtaaaggtattggcgctcaccctagccaaattgtccagtcagtaacatcttctgtattgagtttatgtggactatcattgtagaaaaaggacatgtaatttatttctgttacagcctactgattaaataatttcaaattttggatataccccctttaatctatcagaatgaggggctgaaccattcaatatgaaaagtggatctataagaaccacttttttataggactaaaatgaaaactccctgtggaaggagtcacggcagtgaattttatttcaccagagtgtttaaaagacaaaggaactactgatattgtagaatccagttgcaataccccaaccagaatagcctttttatatcttaagagttggaccactttgttggagac

SEQ ID NO: 87118 - DNA, 347 bp, Glycine max
  unsure (1)..(347): unsure at all n locations
  Clone ID: PAT_MRT3847_49679C.1
gaattcggcaccagcacagacgatatgaacaagaaatcacgggttctcaaatggacgccgatgcaatgtgggggaaatcacgggttctcagatggaagctgatgcgcaatctttggtttaggattgaagccattatgacattttttggcattgtcctcctgggtagtgcctgggcgtcttaagaagtcatttctgtgttagtccagattaaatgaattagacttctaatccacgaaattatatgaactcttagttaacttttcaagtgtcgtttctttggtccccttttctgtaannnaataatgaagaataaagtgtaaatgangttccctttncnntaaaactat

SEQ ID NO: 87119 - DNA, 386 bp, Glycine max
  Clone ID: PAT_MRT3847_4967C.1
gggcccccaaagagaacccaaactaaaatttctaacccaaaaacaaaaaaatcggggatttaacccgggacccccaacccctatttaaaggccaaaaaaggggcccggttacccttttaaaaaaaaaaaaaatcaatattccggagggccccccccaatttattatccctatcggggaaaaacacttatttgggattaaaatcaacaacaggcccggggaaaaaaagccctaacttggtcaaggctaaagcccacgggatcccaagaaaaaaggttaaccaggaacccgggtataaaaacaggaccccgggtctgaaaatcaagggaaaaagcacgcccccaaactaaaggggaaaaaggggggaggaacccccccaaacaagggg

SEQ ID NO: 87120 - DNA, 532 bp, Glycine max
  Clone ID: PAT_MRT3847_49680C.1
agtagtggtctcgagactgagagacagagggtcacccctacttgccacgtgactcgcaccttcctggctaccttgcttgcttccttaccgcctctaacattctatctgtctatgtcttctcttctctcctgcttatatctttcgtgtggagctcgtaacgacgccctatgaaaaccacaggccctagactgctgatgtgctggctggccttcacaggcctcacacacacgattattgagggttattttgttttctcacctgagtttttcaaggataggaatggcttctacctggctgaagtttgtgagcttcttttacattgaacacaaatgtaccattgatagaatttggagacctttcaaggaattttctggttcttatttgctggaaattttcaatcaacaataacagggaaggaatattgcaaagcggattaaggtatgcacgaaggaatgctgcagtagttggttttgagggcccacagcttgttttggggttcagcttgcctttagcagatatgcaattgaactga

SEQ ID NO: 87121 - DNA, 171 bp, Glycine max
  Clone ID: PAT_MRT3847_49681C.1
cccacacatgcggttaaacgctcatttgtttatgcaaaaagattgctcaatgaggagggtgccttctgtaacgagtggcaaacccaccagagcacccactgaatcatccatttattattctcactaccatagaatcattttcacatgacttagaacctaacatgcacttcc

SEQ ID NO: 87122 - DNA, 470 bp, Glycine max
  unsure (1)..(470): unsure at all n locations
  Clone ID: PAT_MRT3847_49682C.1
ggaggaacagagggttgcacaagtggaattggcgaagcagttgtgcttgtgcgtcattgatgccattaacagtttaccttgttccaccaacatcgctgtctcgtgcaggcgaaccctcctcaagttggcacgtgccgagctcgctttcctctctcgcccctcttcttcttccgtgcccctcaggtcactcttgttcaaatttgtgacatgtttgtgtttataatcatgttttgattggtgggtattcctgttatgtgtcactcttttgagttgtcatatattgttaactatgacctagttaatgtatttggatcctctgatgatgttgagtaacatgatataatcgtagttatattggagacagaaagacacagttttttattnttatttttattgaggatggacttatcatgattaattataggacccgataattatttgtaataaaattgcatttttctccttttaag

SEQ ID NO: 87123 - DNA, 872 bp, Glycine max
  Clone ID: PAT_MRT3847_49683C.1
gcggatgctgcttgcccactagttcccgtaccccgcgccgcccggtaccatcgtgcagaggtctcttacgatcacatggggaacaagccctggcgggcccagctgcaaacccgactcgagtggagtgctccttgtaccccactcatttcgaatgcgtcagcgatttaacccctggttcgctttgccccattttgacccgacgacggtccaaatccctgcccagttcttaaataacaatacccaccccattgcttttaaaatgcaaggactaagatcaatgttaaattgaggaatccagaacacatttcgcctttattttggtgttaatctaatcttccctgcattttatccagaggagtggcagttgaggatccagcttccccgcatgggcttcaccttacttatagaggtcttgtcacatgcttatgctgatgagttgtaccttggacagagagatggtggtgaattttggacttttgacaaagagccattgcacaagaggccttcaagaggtttggaaagaagttggcagaaattgagcaaaagctcatccaaaggaacaatgatgagacactgaggaaccgatacggcccagtgcagatgccctacacattgctttatccttctagtgaagaagggttgacttgcagaggcattcctaacagcatctccatctaaagaggtttatggttgtgttgcaatttaaataaaagatgaggtgtaattccttcattcccgtgtatagttattatgtatgtttggatgctttgatgttttgctttaataaattttctctgtttctacaaagtaccatgctagatttacaatatgaagtgaagctttcatgcatggaaatagtaatttaaaacacc

SEQ ID NO: 87124 - DNA, 382 bp, Glycine max
  Clone ID: PAT_MRT3847_49684C.1
ctgttgtctgttgtttatggtttcagttgtttatatttatttataagtatttattactctcaggggggccaaagcccgttgatactaacccctgcgttagaggcaacttctttaaaatggggggcccaaaatttaaaccgtggggccgggtagaaccagggcgggccgggaaaaaccctgggggtacacaaataatatgtcttgagaaacaccccccactatatcagcgggcacaaattggcaataggccccagccgatcggccttaaagaagttgggcaaccccaatgggcgagggaatcccccctgtatcggggcaattaacccggagggggggggggttacccgcaaggggacctaaccctggccaagccctaaccccc

SEQ ID NO: 87125 - DNA, 1197 bp, Glycine max
  Clone ID: PAT_MRT3847_49685C.1
ggctcgagtaaagatcttgcatttcattcaattgcaccagaggcactgcttccctatttccagaagctagatatatggcctattaatgttcgggtggattacagtcccaatcgtgtagatctagcagcattaagtcatggaaagtatgtagaacttgtaaatcttgtcccttggaagggggttgagcttaacctgaaacatgttcatgcttctggcatctatggttgggccagtgtttgtgaaactactgtaggggagtggttggaagatatatctcaaaatcagattcgtaaaatactgcgggggcttcctacagtacggtcattgattgcagttggggctggtgctgctaagctggtttcatcaccagtacagagctacaaaaaggagcggagagtgctcaagggtgtgcagagaggtacgatggcatttcttcgaagcatttctcttgaagctgttggacttggagttcatctagctgctggagcccatgacattctgctccagcagaaattttggcagcataccctctcagtcctctgcctgtaaaagacaaatcgaaaacagatgtcgatctatccaacctaaggatgctcaagaaggaattcaacaggcttatgagagtcttagtgatggcttgggaaaatctgctgccgtgttagttcagaaccccttgaaaaaatcctagcgaggttcaggtgcaggacctgccttggctgctgctgttcgagcagtttctgctgctgccatagcccctggttcggcctgtcatagtgaggtacattatgctctttttgtatcaggaaatatcagtctatccccgttctgtataaaggagtctatattgaaatattgtccaacacaaccctgggaagaagactgattaatggtgccattgattcagaagagttttttttttttaatttgctgggcagtctcctgcgtatcatatgtacagcaacagaaccagtcagctgattcttttctaccagattcagagtaactgtaaatatgggtggtgcttgttaatcatattcttattcaaacggatgtcattgtaagtatgatgaccccattggtgtagttagatgtacataatataatatcattctttgaaaaccttgatattcttgtatattgtctttatttgttgtaaatagtgtatcgtgcttaatactcagcaatgtccaatctttt

SEQ ID NO: 87126 - DNA, 1503 bp, Glycine max
  Clone ID: PAT_MRT3847_49686C.1
gcatattgaaggatgtctttccttatagtattcaaaatttgtagggatcaagatcattgcatgagaagagttagaaatacatagaatttcatcttggttccagagcatcaaagtccctgtttacttacttttagtatctaaattattggaccgttattgatcgggtggattgaccggcctgttatgtagaacttgttgcgttaaagaattgttagtatgtaagacttgtaaatgttgttccttggaagggggttgagcttaacctgaaacatgttcatgcttctggcatctatggttgggccagtgtttgtgaaactactgtaggggagtggttggaagatatatctcaaaatcagattcataaaatactgcgggggcttcctactgtacggtcattgattgcagttggggctggtgctgctaagctggtttcatcaccagtacagagctacaaaaaggagcggagagtgctcaagggcgtgcagagaggtacaatggcatttcttcgaagcatttctctggaagctgttggacttggagttcatctagctgctggagcccatgatattcttctccaagcagaaggtattcttgcaagcataccttctccagttcctctgcctgtaaaagacaaatcgaaaacagatgttcgatctaatcaacctaaagatgctcaagaaggaattcaacaggcttatgagagtcttagtgatggcttgggaaaatctgctgccgtgttagttcagaaccccttgaaaaagttccagcgaggttcaggtgcaggacctgccttggctgccgctgttcgagcagttcctgctgctgccatagcccctgcttcggcttgtgcaagtgctgtacactatgctcttcttggattcagaaatagccttgatcccgaacgtaaaaaggagtctatggagaaatattgtccaacacaaccactctgggaagaagactgattaatgattattatgaggattgaatagttgatactcttgcttccctgaccaagcagattcagaagagctgttcttttaatttgtcggacagtcttcccatgtatcatatgtacagtaacaaaaccagtcggctgattcttttctaccagattcagagtaaactgtatatactgtaaatattggatggtgcttgataatcatattcttattcaaacggatgccattgtaggtatagtgaccccattggtgtagttagatgtacataataatgtaatatcattctttgaaaaccttgatatttatgtatattgcctttatttattgtaaatagtgtatcatgtttaatactcagcagtgtccaatcttttaattttactttgtggttagtaccagaactgttgataatacagtctctcaatgtggtaactatatgttgccaatgattgctgggaatgtttttccatgtaataacagtgaagaaatacttgtttattgttaattgctgattattgtaaattaattgattttttttaccgtgaat

SEQ ID NO: 87127 - DNA, 256 bp, Glycine max
  Clone ID: PAT_MRT3847_49687C.1
ctcgagccgaatcggctcgaggcagagtttgctagaaagggggtaccggtttgtaagaaattttccatagaaccttgggcacctgagatgtactttaacgagaaaattggcttcctaaagggccaaatgccacccaacttttgtaaaggacgtcgagcttttaaaaagggattccaaaaagttaaaggtaggatccattgccttggttgttaaggcccaaaaggttcctaagggaggatggttcatgcaggatggg

SEQ ID NO: 87128 - DNA, 556 bp, Glycine max
  unsure (1)..(556): unsure at all n locations
  Clone ID: PAT_MRT3847_49688C.1
ccgggacttttgactattgttggtctcataaaactttcacaaggctgatgtaaatacagagatcatttttaattgtcaaatggggcgtggacgaactacaactggaatggtcattgcaactttgttttacctcaatcgaattggagcttctgggattccaagaagcaattcagttggtagagtttctcaatgcttgactaatgttgctgactatatacctaattcagaggaggcaattcgaaggggagaatatacagtcataagaagcttgattcgggtgttagagggtnggtgttgaggggaaaagacaagtggacaaagtcattgataagtgtgcctcaatgcagaacttgcgtgaagcaattggcacctaccgtaatagcattctgcggcaaccagatgagatgaaaaaagaggcatcactttctttttttgtggagtacttggagagatactactttctaatatgttttgctgtatacatacattcagaaatggctacactctgttcttgttctgcggatcataggggttttactgactgcgtgaggaacag

SEQ ID NO: 87129 - DNA, 389 bp, Glycine max
  Clone ID: PAT_MRT3847_49689C.1
tgagggcagttgcttaaggactgcataagaggggttgcatgcagaccttaggcttaatctttcagatagggagttgtcataagaagacgaccgtccaaaacattcaattctctatacaagcccataattttattcgtcataccaaattgcatcacaggtaaacacgggctggttgacgctgaccaagatagagatacaagaggaaggatcagaggatccatccgtgagatctattaacaatgaagctagagtgctaacactcatctacagaggatgacaaacatatgcatggtggctctggaagcagatatataagtgctgaactgggaggagaacattgagagaaatctcaatgagattctcattggtggacaggatctgtacacaga

SEQ ID NO: 87130 - DNA, 162 bp, Glycine max
  Clone ID: PAT_MRT3847_4968C.1
gcttcacgttgggtgcaaatatctcaataatgggactgggtatttctgtaagtggggttgagctactcacactctttcaatacaattgtcccaaatttagaatctgttacttttaaataaatcgtctgctcatatttctccactttttacaaattaaatgct

SEQ ID NO: 87131 - DNA, 1853 bp, Glycine max
  Clone ID: PAT_MRT3847_49690C.1
tgagattgtgggtgggaagttcaattccgcttcaccaaaccctgaaagcccttaaaccccaacccaaatctccatcaacaacagcaagagttccatggtcgttgaatcccaacaatgaaagctctgagaaccctaagaagaaccctctattccccaacacccgcaaccgtttttcgcgccttcttctccgcacaaccacagccgcaccacgatgaccccaccgactcctccgtcttcgatagttcccactacgcccttgaggccgagcccacgctcaagcccgagccaaagcccacgtgggacgagaagtaccgggccagggcggaccgggtggtgttcggggaagagggccccaaggggaagctgcgggtgaaggaggaggaggatgagaggcggagaagggccctcgcgaaggcccttctcgaagctgcgatggacgagggcgaagacgaagaggaggaagggaaaggagcgggcttggtgaaggaggacgaccagaagtcgctgtccgtgggaatcattggcgcccccaatgctggcaagtctgcgctgactaattacatggttgggacgaaggtggcagcagtttctcggaagacgaatactacaactcatgaagttgtgggagtgttaactaaaggagacacccaaatttgtttttttgatacaccagggctcatgttgaattgcggtggatttccttatagggatgtcaaggtccgtgttgaaagtgcttggagttcagtcaatctctatgaagtgctcatagtcatttttgacgttcatagacatattaccaggcctgattcaagagtgatacaattaattaaacgaatgggagctcgatcgattccaaatcaaaggagaattttgtgcatgaacaagattgatctagtagagaaaaagaaagacttattgaaggttgccgaagaattcaaagatcttcctggatatgaaaggtatttcatgatatcaggactgaaggggtctggagtaaaagatctgactcagtacttgatggagcaggcagttcaacgaccctgggaagaagatccatttaccatgagtgaggaagttatgaagatgatagcattagaagttgtgcgtgaaaggttattggaccatgtacatcaggaaattccgtatgatgttgaacatcgattgattgactggaaagagttacgagatggttctcttagaattgagcaacacttcatcactaacaaattaagccaatgcaagattcttgtggggaagaatggctcaaaaattgggagaataggaattgaagccaatgaagagctaaggtccattttcaaaaagcaagtgcatctaattctccgagttaggcataaaaagtgaaccaggcaaaaatagatttgatgttgaagtataccttctttgccactccatgttatgctatattgaaatgccaaagctgtggcgtgtcttacacttacacatgaagtctgcaaaagtgacaagtaacaaaatggtgatcgtggggaaaatcatgggtatagtgaacacaggttgagttcattggtgatcacacaagcaaacttttgtgccatttaccattcggttgcccttgtttaaggagttggactctttaagtttattttgtgcatgaatttctgaaggaaattttcatattttgtttttgtttactcaaatataatttgatttatacatgtttttatcaaaataaactactagcacttttggtctatagttgtacgattgttacattgggtgctcttaaaattgcccatgacccctccccacttaatgagacaagagactttgttattgtataaaaaaaaaaaaaaaaaactcagactagttctctc

SEQ ID NO: 87132 - DNA, 417 bp, Glycine max
  Clone ID: PAT_MRT3847_49691C.1
acgcccacacaaacagcatcttgtcttcatgatcctagctaacgtacacatccatgcaaggaaataaactttctgttagtgcacgaataaaacagtgcagcaaatcctgagagcaccatacaatagaacagcaagacgcttacccctcccagttacctagaagcaaaaggaattgcctgttataatgaacttgctctctatagagagtgaggaggcgaacagaccttcccatgcctgcatcagcttgctcaggcaaggggaaagcaaaagcgcaacgcagcattgataaaaagcgatgagcctcgcatttactgtcacatcgaaaccactccccatgacggggacggaccaacaattaatttgccggccggacatggccttcccgactgggggaacaaccgatcccgctaaacctaa

SEQ ID NO: 87133 - DNA, 287 bp, Glycine max
  Clone ID: PAT_MRT3847_49692C.1
ctcacacgttggaaggaatgggacacgctacgatatcaaacagtgatcggatgcgctatttatcgatgacacaaacgtcgctgtcctatggctgaagatgaaaatggtatcgtcacacctgtcgtcacgtgcttcagggtactcggctctctgcactgacagggcccacactgttactagctctctagagagcatgacagaatagcatgggtagtggatgaacacactggtggccgaggcagggctgtctagagaccactgccccactgatggctaaggagtagcta

SEQ ID NO: 87134 - DNA, 359 bp, Glycine max
  Clone ID: PAT_MRT3847_49693C.1
aaagccaaacaaaacgttcgggctttattttttcttcattcaaggggaaagggttcattggccatttaagggtcttgctgggcttcccgacttgctaatttggcttaacaaaaaaacgtgaggaaaaaaagggaaaaaaatgccccattcctaaaatgaaaaaaaaaagcccataaaaagtggcttaattaaaaaaaaaaaaactgaaacaaatgcttgaagccttcaattgaaaaaggggcttttttctttagtaaaaggggaaattataccctttaaggaaagagggaaaagggaataaaagtgtgtgtgaaaatatctatagggtgtttgttggaggtcaaaattgaaagatgatc

SEQ ID NO: 87135 - DNA, 321 bp, Glycine max
  unsure (1)..(321): unsure at all n locations
  Clone ID: PAT_MRT3847_49694C.1
tggatcctgtagagcggccgcttntttttttttttttttttttttcccatttgatttcaaaaagctatcttcaactggggcggatttctacagaaaggggaacaattcaatttccaaagtggctgtacatccataaataaaacgtgaaattactgattcaaaaatttcaaattcatgccaaatttctaacaaccagaccttcacattggtttaggcaggatttgcctatgataatgtaattttactaccatttaaacatctcatttttgcataattacctattctctttatctaaaataaaatttattttcattacccctt

SEQ ID NO: 87136 - DNA, 178 bp, Glycine max
  Clone ID: PAT_MRT3847_49695C.1
tatagggatcaacactacaagcgaagcatccgggaagaacctcatgaatgactgcgtattcataatttactccaacgcctttcatgaatgcctgctacttactttatgcctatgcctttatactagacgatcacctttcgacactctcctgtgaccacactttgcctataaacttgct

SEQ ID NO: 87137 - DNA, 366 bp, Glycine max
  unsure (1)..(366): unsure at all n locations
  Clone ID: PAT_MRT3847_49696C.1
cgaagcgcggacccggctctgtaacaaagagccacaaaataaaaccccaangcgagcaacagcaaggaggggcaaacagaaaggcccaagaggcaaagccacactccgaggcaaatgaaggagaacgaataagcggcaaaatgataccctaagcccacagaagagacgggaggcgcaagaccgaacaccagaaccaccggggagccaacaacaccaagcggggcgcacgcgagcagaacgggccggacacagcgacacccgcccccccggaggacaagaaccgcaagagaacccatgacgagacggcctcaccccagagatggaggagacagccacgaaaagcaaccaaaaataagggcaaggagc

SEQ ID NO: 87138 - DNA, 340 bp, Glycine max
  Clone ID: PAT_MRT3847_49697C.1
ggctcgaggcacaaaacggagagcacatagctgcatttattttaaaacctgtccaaggtgaagctggggtgatattccctccaaatggttatttaaaagctgatagagatcttagctccaaatatactgtcttgatgattgctgatgaaactcatactgtgttagctagaacgccaatgatgctagcttgtgagtgggatgaagaacacccagaagttctgatactacggaaagcattgtgtggaggaggtattccctctcgtgcattgcttgcatacaaagatgcaatgccttgcatactacctgtacagaatggaagtaccttagatggaaatacgat

SEQ ID NO: 87139 - DNA, 428 bp, Glycine max
  Clone ID: PAT_MRT3847_49698C.1
aaaaaaaaaaaccccaaaacctagttgggggggttttcaggaaaacaatttaaacaaagcatacttaaagcagaaagcactcggcccaaaaatatataaaaaaccaagttaagcaggacctttaacccccctttgaaaaaaagacggtttacccccgggccaaggaaaacgggaaaaaaaaacaattattctttccaagttttcaacaggtttaattttaaaaaccaaaggccatagtcccactttggatggagaggaacccctacaattttaaaaaaaaaaaaaaggcccccccccatttggaaaatttcaaattttaaaaggggtccaatggaaaaaaaaatccccacattggaatggcccctccccacaattttaaaaaaaaaaacgggttgcacaatccaaaaaagattttggggggggcccaa

SEQ ID NO: 87140 - DNA, 321 bp, Glycine max
  Clone ID: PAT_MRT3847_49699C.1
cttaacccccgcaccctgcttcttaggaaaaatcggaagcatctgattagaatcgatggcatattaagggtgatgggctgcctttaaaagatacgccataggatcttgtcacctatactatccgcatagtaccaaacattacgttacatacataaataaatactactgcagttcagaggcactttatcatgcacgatgctcttggaatgaaaagaggacatattgatgctgcaacaaaccatggactgaaatttgacacaataccacgtgatgagatcccaaagtaaacatcatgtgctgaaatggtcatatatctcatcg

SEQ ID NO: 87141 - DNA, 682 bp, Glycine max
  Clone ID: PAT_MRT3847_4969C.1
gggggtcttacttgagagtgagtgttagcagatctctccaggttttttatttaatttttttcccatggtggtgcgtttgttctacgcgcctccgtgatcctctctggaattctcaatgcctatatcttgataaaaatgtattgattgattttttattttgtcttttctttcctaggatgacttggttgaaatttgaagaaaatatctacgttggagtggtttttccgtttttttgtttttagccttttaagtttattaaatggtttatatgatttatcgggatgtgcaattgtacatgtttagaatgaatgaagtaaaaaattattttcaagacaaataataattttgataaaagatcaagatcattattatttatttttatctattagatattttttagaagtgtgtatcacaacaattttacagacaatccaaaaatgcacggagtattgtaccttgaagatgaatggcaacaaagataaacaaacccatgatattggcgcgtgcatcacacggcgcgtggatgaaggtggggaagaattgagaagaggggcaataaggatgaattgtacgggaacgggaaagatttgagatcaggaaggaatgtggagagagatgcaaagattctttctgggctttgtggaatttttctttcttgttttgtagatagggaataagttgc

SEQ ID NO: 87142 - DNA, 282 bp, Glycine max
  unsure (1)..(282): unsure at all n locations
  Clone ID: PAT_MRT3847_496C.1
ttnacatcacnacanttttcctttcattttcgtncattcncttcgagcagcgaagcacangcacacaggcgnntaccctgcnnnccngcncnctccancatcccatatcatcatctggtccatcagattnatccatcatcatccatggnggttcatacgtnggtngcngccgctccggcgnngtctatgtcggagactcnacccgnagtctccgacagnaacntagtagacgnattgtccganttcaanngctcggtcngttcgcgtctgcaaanatctcca

SEQ ID NO: 87143 - DNA, 877 bp, Glycine max
  Clone ID: PAT_MRT3847_49700C.1
aaggctactagtgacgagtgagtgagagaaagacagagacattactttttggtagtagcaacaagcaaagggaggaaagaaggaaagaaagagagagaatcttcattcatttttttctgctcattttctgtgtacacctttatcgtttctctcactaactttggagtctgctttactccacactccacaacaaagatcgtctgcattccctttcccttctcttttcacccccctttttttttctctcttcttcttttttctttttctggtgggggcacctcatttgtttttgacttcataatactactacttcttcactcaaaaaagagatagaaagagaaggaaaaaaaaggctattatggcaggaggaggagctccagctaaagcagatgagccacagccacatccaccaaaggatcagttaccaaatatttcttactgtattactagtcctcctccatggcctgaggccatacttcttggttttcaacattttcttgtgatgcttggcacaactgtgttgattcccactgctcttgttccccagatgggaggtggcaataatgagaaggcaagagttatcgaaaccctgctttttgtagctggtattaacacattgttgcaaacaatgtttggaactcgattgcctgcagtaattggagggtcttacacctttgttccaaccacaatctcaattatccttgctggccgattcagtgatgaaccagatcctatagagaaattcaagaggataatgaggtcaatccaaggtgctcttattgttgcttcgactcttcaaatagtactgggcttcagtggtctctggcgtaaatgtgcaaggttcttaagtccactttcgtcagttccttttgtatct

SEQ ID NO: 87144 - DNA, 647 bp, Glycine max
  Clone ID: PAT_MRT3847_49701C.1
ccacgcgtccgcggacgcgtgggcggacgcgtgggtcttaactcacttcttaaattgtgctattattgtcccacgcgctttcacttggctgggtaaagagagtccccagctcaactctctagttgttgttgctgcatttttcattttctaggcttagtcattagatagaaagagaaggaaaaaaaaggctattatggcaggaggaggagctccagctaaagcagatgagccacagccacatccaccaaaggatcagttaccaaatatttcttactgtattactagtcctcctccatggcctgaggccatacttcttggttttcaacattttcttgtgatgcttggcacaactgtgttgattcccactgctcttgttccccagatgggaggtggcaataatgagaaggcaagagttatcgaaaccctgctttttgtagctggtattaacacattgttgcaaacaatgtttggaactcgattgcctgcagtaattggagggtcttacacctttgttccaaccacaatctcaattatccttgctggccgattcagtgatgaaccagatcctatagagaaattcaagaggataatgaggtcaatccaaggtgctcttattggtgcttcgactcttcaaatagtactgggct

SEQ ID NO: 87145 - DNA, 2645 bp, Glycine max
  Clone ID: PAT_MRT3847_49702C.1
ctacactataacttaaacacaaggctactagtgacgagtgagtgagagaaagacagagacattactttttggtagtagcaacaagcaaagggaggaaagaaggaaagaaagagagagaatcttcattcatttttttctgctcattttctgtgtacacctttatcgtttctctcactaactttggagtctgctttactccacactccacaacaaagatcgtctgcattccctttcccttctcttttcacccccctttttttttctctcttcttcttttttctttttctggtgggggcacctcatttgtttttgacttcataatactactacttcttcactcaaaaaagagctgggttggtgttagatttgatttttttttttttttgtagatttattaatttattggttgttgttgttgtttattcattgttcagagatagaaagagaaggaaaaaagggctattatggcaggaggaggagctccagctaaagcagatgagccacagccacatccaccaaaggatcagttaccaaatatttcttactgcattactagtcctcctccatggcctgaggccatacttcttggttttcaacattttcttgtgatgcttggcacaactgtgttgattcccactgctcttgttccccagatgggaggtggcaataatgagaaggcaagagttatcgaaaccctgctttttgtagccggtattaacacattgttgcaaacaatgtttggaactcgactgcctgcagtaattggagggtcttacacctttgttccaaccacaatctcaattatccttgctggccgattcagtgatgaaccagatcctatagagaaattcaagaggataatgagatcaatccaaggtgctcttattgttgcttcaactcttcaaatagtactgggcttcagtggtctctggcgtaatgttgcaaggttcttaagtccactttcgtcagttcctttggtatctcttgttggttttgggctgtatgagttagggttccctggggttgctaaatgtgtagagatcggcctgcctcagcttatattgctagtatttgtttcacagtatgtgccccatgtgctacattcggggaaacatatcttcgaccgttttgccgtgttatttacaattgtaattgtgtggatatatgctcatctacttactgttggaggggcctataatgatgctccacataaaactcagatatcatgccgcactgatcgtgctggacttattgatgctgctccttggataagaattccatatccctttcaatggggagcaccttcatttgatgcaggtgaagcctttgccatgatgatggcatcttttgtttctcttgtagagtccagtggagctttcattgctgtatataggtatgcaagtgcaacaccattgccaccatctattctcagtcggggtattggttggcagggagttggcattctgttatcaggattatttggaacagtcaatggatcctctgtatctgtagaaaatgcaggtcttttggctttgacacgtgttggaagtagaagggtggtgcaaatctctgccggatttatgattttcttttcaattcttggaaaatttggagcagtttttgcctctatcccacctcccattattgctgccttgtactgcttgttctttgcttatgttggtgctggtggtcttagttttcttcagttctgcaacctcaacagttttagaacaaagttcattttaggcttctcaatcttcataggcttgtctgtgccacagtacttcaacgagtacacagcaattaatggctatggtccagtccacacaggcgcaagatggttcaatgatataatcaacgtcccattccaatcaaagccatttgttgctggtgttgtggcatattttctagacaacactttgtttaagagagaagctgctattaggaaggacagaggtaaacattggtgggacaagtacaagtccttcaagggtgacacaagaagtgaggagttctattcccttcctttcaatctaaacaagtacttcccctctgtttaattgtgcacaagagctcaatcaaatatataaaggtggtctcatcatcttcaccacggtctagttctaatatttaatttaaatcttgttacacgccatagctctatgaatagtccatcctattatattttatagcattttgtaatacatatattttaggtaaacattggtgggacaagtacaagtccttcaagggtgacacaagaagtgaggagttctattcccttcctttcaatctaaacaagtacttcccctctgtttaattgtgcacaagagctcaatcaaatatataaaggtggtctcatcatcttcaccacggtctagttctaatatttaatttaaatcttgttacacgccatagctctatgaatagtccatcctattatatttatagcattttgtaatacatttattttattgctcttgtttctgtaaatcctgatcaaacaagtggattgacgtagcaaatgcgcatggttaaatcctcgcccccttcatttttgttacgttcactttagaatgccccctccatgcaatgcattttgtactcaattgtctattgaattatattgtactgtttattaatct

SEQ ID NO: 87146 - DNA, 245 bp, Glycine max
  unsure (1)..(245): unsure at all n locations
  Clone ID: PAT_MRT3847_49703C.1
cccacacgtccgcacacattattttgngtccttcctcactctaaaaccgccattggcattgggatagcgaagaaggggaggtccgtaaccacgcgccttgacnaagtggatcgaaccatgtactcgactttctgcagcaccgtcaacttcttctctcatctttacacccactccatgaatcaacaaaaactcttatttcaggccggtgaacgacactcttttgaaaaattgtatcattggattct

SEQ ID NO: 87147 - DNA, 505 bp, Glycine max
  Clone ID: PAT_MRT3847_49704C.1
ggaatatcgatgctcagtcatatctattaccctgctcttctctcttgctcttgcaggagagagccatgtgcatacatcgctacctgacgaacacaaatgggaagcctgttggccaaacactcccatacccactgcactgggaaagcttctaaagcctctccctgcaagtgttgagatcgatgaactccctaagcaaatggatgatacacagtacccaaaaacattcttctctaaagaagaccttcatccatgcaaaacaatgagagtacaatgcaccaagcgtccctatgcacaaccttatggtgtatatacatggttgacggatattcaacacgcctctatagaacgatgtagttgtgacgagatatgcatcacgaaagaagcgtttgagggagaagagaagtcatgtgcacaatccttgggaacactcataggcttggccattgtcaacgctgggaaagaacattcaagctcctcgcaagttgccttagtccataagcgcgag

SEQ ID NO: 87148 - DNA, 325 bp, Glycine max
  Clone ID: PAT_MRT3847_49705C.1
cttacatgggggggtttttttttccttccgttttttttaaaaaaaaagcaagagtaactaaaattaaaaaaaaaaatcaaattacattaaacaacaacgcatctaaatctaataaaattttcacagaggatctatacagggcaaaactatttaacatctccaagggtctattaacgggctggtccattcgaattggacagagaataaaatgggcatattattgcaacaacctaagagattcaactcatagcaattcgaggtcgggcacagaaccatattcaacaaacaaagcgataaaaacatattggggaatatcacccactca

SEQ ID NO: 87149 - DNA, 130 bp, Glycine max
  Clone ID: PAT_MRT3847_49706C.1
cggacgcgtgggcggaggcgggcgttatggaggatacctagttgcgcatctcgtcctacatcgtggtagttcttttatggtgacacaaaaatacaaactagtggccgttatataacaactttactattga

SEQ ID NO: 87150 - DNA, 466 bp, Glycine max
  Clone ID: PAT_MRT3847_49707C.1
acttaagacggctgcgagaagacgacagaaggggatgcaacaaatgttgctattgtcactaattatgagtttctatttatgtgggttaggtgttaagaaatcaaggttaaagcaattggatgaaattcaagtgaaaactatcaatacttctaatgggaagaatttacataaatgtccagctttaatctttgaattcacatgtgttgtttttggtataagaattaataatttacaactagcatatttccttttcaatttattttccttattcttatcttatttactaatgttaataaatcttaattgattaatccactatcttctataaaatatttaggcatgcaaaaataccattttagcctcaacatatttgtgacacctattcaattggaggccatttttggcatctaccaaatctttactaaattttttggacgttagggttggatgaattctggaatgcgtt

SEQ ID NO: 87151 - DNA, 191 bp, Glycine max
  Clone ID: PAT_MRT3847_49708C.1
ctctaatccatgagactcgttcttagtctttctcccgggcggtagtccatgtcactgtagactctccaccaccaactgtctacctgaggatgatactgcccctctggctctctctctaactgtctcagcggctaactcagctgcaccatggacgcaggtctgatgtacactcagtgcatcgactacgccaa

SEQ ID NO: 87152 - DNA, 651 bp, Glycine max
  Clone ID: PAT_MRT3847_49709C.1
ttttaggaaattaaaaacttcttccattttccattttcatattcactcacatcaatgtttccaacattgtccacgtaattaaatcagataggataggcaaagaccagaaacttgttcttggaaagacagtgcgcagcagcgatagccagcggagtcattggtcaaggcctaaggagacgttgacagaaactatgctatttagtaaatgtcaactataagataacatagttacaaatgtttgatttatctaaaattcataatgcattattgaggatattttggtagttcatgttaatcccaacctacatctgttggaagcttaacctctttgataatcctgtggctgcagccagttactgaccatcaagtcatggaaaaacagtagttctctagccaggcagaagcagatttgagaatgcgaagctcaccttgtaggagatcttgagccattagttttctaacagaaaatcttccacacaaggagagagaatccagtgacataatagccacactgcgctcctcaattaattggatgaatagtgacaacaacatcatgtgtgcttgtatctctttgctgatatcctgtaaagggcgcctagccagcctaccatcagtttgagcagcttccgcaatcaaattgtcaatttcctg

SEQ ID NO: 87153 - DNA, 321 bp, Glycine max
  Clone ID: PAT_MRT3847_4970C.1
ccagttccatcatatccttaactcccacaaggatcaggttgctgcaaaatccgacccatcttatcgattgagcgaattgtgccaaagaacacaaccgatctctgctaccagatgcactatgaaaaaaccatgccatattccctcggtctctatgcctatctcgaaagaacacgcgtttgaagcacccaaaaaaccctttctgtctcgcctctcaatgaatgagatattctaacgattcgaaagactcgattcccgataccttactaacgaaaccgaagtggaccaccaaattgacgggcgtatgtgcgagacttatccatg

SEQ ID NO: 87154 - DNA, 867 bp, Glycine max
  Clone ID: PAT_MRT3847_49710C.1
ccacgcgtccgctttttgatgctactgaaatggatacagctcatgcatttgcattagataacactatttcacaaacatccatgaaaagaggtagtaactgatcttttctttctgttgaagaaatcctctctctccccgcaccgacacaacattacctcatcttatccgggtagcgaaacctccaaatccaaaccaagtgtaaaggaaagtgtagccgtgtcagcaagttaccactttgcacaaagaaaaaaataaaagctagtagttattattattattattcaaacaaaaaggagaagttgccaacttctttagtttcgattcaaacacttagaaaaaaggtgaaactgaaacggaggatcattttcccatacttctagctacatcttagattagagttaagagagagattgggagaatgagttactccaggatattgaactctctattgttagtagtgttattggttacatgtgcaagtggggaggacccttatagattctacacttggaatgtcacctatggagacatctatcctcttgggatgaaacaacagggaatattgataaacgggcagtttccagggccacagatcgaatctgtgaccaatgataacttgatccttcatgttttcaatagtttggatgaaccttttcttatctcctggaatggggtgcagcagaggaggaattcatggcaggatggagtgtatggtactaactgtcctattccaccagggaagaacttcacttatgttcttcaagtgaaggatcagattggagctacttctactttccttcccttgcattccataaagcagcaggggggtgtggtggattcaaaaatgctagccgctcagagattcct

SEQ ID NO: 87155 - DNA, 546 bp, Glycine max
  Clone ID: PAT_MRT3847_49711C.1
ctactaaactacgaggcatgtcaaatatcatcacacttttcatcatctttaaaaaagtgaggcgtggcggaaagagacaagacctttacatcccttccctttttttggataacatgacaagccaaactgggacggttcacctccactctatttttttgactggacttgccactacttgacattgtagggttggattcccatcccatcaaattgaaatgtgagaaaaagaaagggcctggtctactactttactgccatcccacccatacccttggcctttctcctacccctttttttgtcctttcctttaacacaacattatttaatttagggtttccaggccataatgagaacatcacttggccatccttaccttaccgaactcctcgtatttgatcaggccattgacattaacattggccaagcaaatcatctaactaaccttttgatagctgagctcctaccctaggcttgacatcacatggctgagctcaacagaagaaaccaacccattccgtgccttgaacaaaacccggaatgcctatt

SEQ ID NO: 87156 - DNA, 399 bp, Glycine max
  Clone ID: PAT_MRT3847_49712C.1
tccacgcgatcggtgggagacctccatactgttaggacaaagggtacttggtggattgtgctatggagtatctggaaatgccagatgtgatgtcatatgtggtggattctgagtggatacattatgaatatgatgacctgataacaatatgtgaggtgattactatcatcatgaatcctgatgactctatacgtgcatcaattcatgcattatgcactatatgcaagagcaaaatgcacataccattaaatgatggagctaaaggcattatcactgactgtgcgatgaactagcactatggtcataatagatctaattatacttagctaacttaacatgcactatatctgaagcatgcagacctataaccattaatacttctgtgactacacatcttat

SEQ ID NO: 87157 - DNA, 833 bp, Glycine max
  Clone ID: PAT_MRT3847_49713C.1
aagcgtgtaacattagattctttggtggttcaatatttgaagcatcagcatcgccaatgcccagctcctattaccactcttcctccactgtctcttctgcatccacatgtctgtcctgaaccaaagcgaagcctagatgccccttctaatgtgacagctcggcttggtacacgtgaatttaaatatatgtatgggggagtgcatgggaatcgcagggatcgtcaatttgtttacagtcggtttaggccgtggcgtacttgtcgggatgatgctggtgccttgttaacatgcattacatttgttggggactcttctcatattgctgttggaagccataatggggagctcaaattttttgactccaacaacagcaatgtggtggagagctacacaggtcaccagtctcctttgactcttgttcagtcttttgtttctggtgagacccagctattactttcttcaagctcccaagatgttaggttgtgggatgcaacatcaattttaggtggtcctagccattcatttgaaggatgcaaggctgccaggtttagcaattctgggaatgtttttgcagctttgtcatcagaatctgcacgacgggaaatccgcttgtatgatatccaaacatgtcatttagagtcaaacttttcagatacatttgcagcttctacagggcgaggtcatgtttattcgttaatccattttaacccttctgactcaatgctgctttggaatggtgtcttatgggaccggcgggattctgggcctgtgcatcgctttgatcagtttacagactatggtggtggaggctttcatcctgctggcaacgaggt

SEQ ID NO: 87158 - DNA, 687 bp, Glycine max
  unsure (1)..(687): unsure at all n locations
  Clone ID: PAT_MRT3847_49714C.1
taaaagcatttgaaacactttgaaactcaaagagtaacatattgctttttattggttcttaaggtgttacaaataattaattaatctttttgaattgttttccatttggaggatcaaagatttgtgaagttgaagacgggcctttgctaactgtttcaaaggcagctttagaaggaggcggaccataatttgatggataattccttgaacgagttacatcaccttttggattgttacggaaaggtggagcggtattacgaatctttttaccctcttctcgaccttgattgctagaaactgatttatctgcttgattttcagaagctaagttgggcgagattcctgaggctgctttatcgaagctgcttacagagtggtttgttttgtttccttctttatgagagcttgcagaattggatacatcatgatttactgtttcattagcgacaaccacggttcgagtaaaggttgtttggtttttaattggatggtcgtgattattgttatcactgcttttattatcatggcgatttgggatttcactttttgaagaacttttacccttcgaagaatttttatttcttgaagagtttttagcagattctccttcgtcaggatggtttttgtctaaattatcagatttaatttgannnnntcgttttctttcatccttttcataagtttctg

SEQ ID NO: 87159 - DNA, 138 bp, Glycine max
  Clone ID: PAT_MRT3847_49715C.1
gaaatagattttgaaaacagccacatagacaggcttccgtaactgcatcgtgtagtgaatgaatgtcgtcgcttacatcttccgagtcggtggcttgactctctcagggatatttccgctacatagttcattcgacaa

SEQ ID NO: 87160 - DNA, 137 bp, Glycine max
  Clone ID: PAT_MRT3847_49716C.1
acgaggcaaagataaacttgtaaacgaggcttatgatttatattctgaaatggatgctaggggaatttttcctgatgctatcacttacactactctaatatatggtttttgccttttgggtcagttaatgggagcat

SEQ ID NO: 87161 - DNA, 300 bp, Glycine max
  unsure (1)..(300): unsure at all n locations
  Clone ID: PAT_MRT3847_49717C.1
ggagaagtcgatgccgtctntgctgaggnatatcttcaattttnttcctgaanacngntagtgngnannagggntgggcntgtcnagagttgcnggcagcntgaganagcataatagataccataggtatgcagcgggattataggaagntgggtcgnnagggatcnataaacctnaccanatcctgctcatccatccaactatggccttttcaccattcggaaggatttcaaaagcccaattgttccccagagacaccaccattctgtaacattcccaaactaacaaaacacaattcnc

SEQ ID NO: 87162 - DNA, 495 bp, Glycine max
  Clone ID: PAT_MRT3847_49718C.1
acggctgcgagaagacgacagaaggggggcacatgaccactaatcttgttgattcgattaattcgtactctagaaatcaagaaatctgccaatagatgcgctagtaaaatccacatatttaaggtgtaatgcattgctcaacaaaagagggagagaaatcacaataatgcttgcatctagccaagtttgtacggaagtgctaaacagggtcatcaaaggcatacttaaaaaggaaaacactcacaatgtttttgagtttgatcgatgcgacatacggttcttgatccaagagataataaacccgagagaggttcaacctgctagagatttcactgtcagactagacgaaaggtggtgtgactgtgacaaattctagaagttgtacatgtcttgttctcatgttgttgttgcttgtaagcatgttcatcatgagtacagaaactacatacatcttgtgtaaaggttgaaaaatgtctccaacatatacagatgatt

SEQ ID NO: 87163 - DNA, 1279 bp, Glycine max
  Clone ID: PAT_MRT3847_49719C.1
attcccggctcgacccacgcgtcccgctccaccacttatttttttaccccaccgtccgattatcttctcttctcttccgccaaggtaatcccttccctctccaataatcaaacaatctcacttttttcttttgatacattcaatctcaaaaattgttttaaaaatggcaatggcagcccaagccatggctcaattccgtttctctcctctatcttctcattaccgttaccattaccagtacaattaccattccaccccttctttcccgtccccgcgacgtcacccccgcaaccaaaggctccacctttccttctccggcggagacagaggcggaagcggcggcggcggaggaggaggagattccgatggaggaggaggcgacaacgagaagaacgtgggattgggagttgtgggaatggtgttaaacggatggagatcgagagtagcagcggacccacaattcccattcaaggtgttaatggaggaactggtgggagtgagtgcggcggtggctggtgacatggccacgcggcccaagttcggtctgaacgaactggacttggttttctcaactcttgttgtggggtccattctgaatttcatcctcatgtatctgctggcaccaacgtcttgttcttcttctagctccacactaccatggatcttcgccaggtgtcccagcagccacatgttcgaagcggggccttacgggagcgtggagcgtttggggactctgttgtacaaggggggcgtgttcgcgctggtggggcttggcgccgggcttgtaggaacagcgatatcgaatgggctgatcgcgacgaggaagaaggtggacccgacgttccagagcccgaacaagtctccccctatggttctgaacgccttcacttgggcggcgcacatgggtgtgagcagcaatgtgaggtaccagactctgaacggtgtggagtttcttttggacaaatggcttcctcctttgctcttcaagttctctgttttggctcttagattcatcaacaacgttgctggagggatgacctttgtcatgctcgctaggttcaccggctctcaggctgctgctgctgctgctgttcctgttcctgttcctgttcctaaacactcttaattactttgggtctagtactttggaattactcatgacgtgccaccttgtcctgagagaaccaacaattaaatgcactatttatttttattagctcttgtttcatttgcatctttttcacggccacttcatttacttaatatagtgttgtttttc

SEQ ID NO: 87164 - DNA, 1196 bp, Glycine max
  Clone ID: PAT_MRT3847_4971C.1
aagtgtaaggtgctagctagagaaagaaaaaagtccttgtgagtctttgattctagcatccttcctttgtgcaagtttaaagaatggagaaccaacaagaaatgatgaaagtagaaaaggtatgtgaaatctatgaaaaaatctccaaactagaagacctcaacccttcaaaccatgtcaacaacctcttcacccaacttgtcacaatttgcaccaccccatgccaaatagatgttaccaaactaagccaacaagttagagaaaccatagccaagctaattaggctttgtgggaaagctgaagggcttcttgagaaccactactcaaccctaataggatcatatgagaaccctttaagccacatgaaactcttcccttactactccaactacttcaaacttagccacttggagttcaccatgttaaccactcacatcacacaagtccctacccaactagcctttgtggggtcaggtcctcttcctctcacctcaatcatgttggccacacattacctcaaacacacatgcttccacaactacgacatggatccattggcaaatgccaaggcccatgaacttgtctcctcggacaccgacttgtcgaagaggatgttcttccacacttgtgacattctaaacgtgtcgaatggcctcaaggactactacgtggtgttcttggcagcacttgtgggaatggaccataaggagaaaggaagagtcattagccacttggccaaattcatggctcctggggctattttgttgctgaggagtgcacatggtgctagggcttttctctaccctgtggttgatccttcttctgatctcaaaggctttgaagttctatcggtttttcaccccactgatgaggttattaactcggttattgttgcacgcaaagggctttattcatcaccagtgttggctagcaaatgctctggagttgaagggtttaatcacttcaaccatgggaatgttattgaggagttgaccgttgacgatcaggcttgactcttgaggggacttgctcactccttaatttgtggcatcgctcaaattaaagcagtgttatgaatcaattattggatctaatagtgcaatataactgtattagtcgtgattatcaaacccaaaatgtcttaccaccaaaagattattgttgttggataataaaacggttttgttaacatcttt

SEQ ID NO: 87165 - DNA, 295 bp, Glycine max
  unsure (1)..(295): unsure at all n locations
  Clone ID: PAT_MRT3847_49720C.1
ccttttngtggttcctctttttttttttttttgttttgtgttttttttttacgaattcttcgactgtctcctgcgttttctgcgactggttttggataccattgtcttgccggaagccccttatttcaagctcaaacaatttggccgcagcaaaacaaaaaatgtgtcgctgcccacaacaaagggggaaaccccccttaaaaaaaaaagggtttgggccaccaaaccaaggggggcaaaccccccggacgggtgtccccgccggggggcaaccaaagggaaccggttcgcaaaa

SEQ ID NO: 87166 - DNA, 233 bp, Glycine max
  Clone ID: PAT_MRT3847_49721C.1
gtagggaaagaaagcaacaaacccatgtcataaacacgcttggaaggtttggctgagtgaagaaggctgaaagataaagaagggcctctggacaaggtgaaggagagacatcgtcaagtatcaagcaaagtgaacagaataagtggtatgagattatgaggtcactccttaacttcttacagtcacaaccaaaaggatgattataagcacaaatagaacatccatctcacaat

SEQ ID NO: 87167 - DNA, 567 bp, Glycine max
  Clone ID: PAT_MRT3847_49722C.1
cccacgctttcgccctcgcgtgcggcggaggctggatacacggcagagaaggacgaaacaacggcgcgagcggcttgacaagcaaactaacatacagaaggtgccgtcaattgaatagtctccactctccaccgtcgctcaggtttccgtgaggatcaatcggtcatttacatccaccgtgtctcgattaagtttagtttggtgcagtatttctatcttttggtttcttgcatgactccgacttaaatgtctaggattgcgtccatggctacaatctgttcgaactatttcctcagccaaatcattgtgctctccttgtgttcaactcattacaatctactcattgtaaatacttgtgttcgattaactaatcgcaatatttatagcatagacttttattgaaaaacacaatgaatgagttagactgttgaatgttgattatcactttttttattcttgccgtttttgatttatattacattacggggtagttaaatatagacttttaattaaacacaaattactcaaggaccaggctaatgattttatgatggatgtataggatac

SEQ ID NO: 87168 - DNA, 1133 bp, Glycine max
  Clone ID: PAT_MRT3847_49723C.1
acggctgcgagaagacgacagaaggggccagcgcctctctctctatctttttcttttccttctcctagccctcttccctataggagaaggaataacaaaaacaaaaatacacaatggctttcactttcaccagaatcctaattctctttgtctccctctcctctctcatcctcgacacccacgcagcccgtgcgccccgcaccatccagacccgcctctacagcctctgcaagcccaccaccaacatggacctgtgctacaagaccatccttccggaggtggtgggcctgtcccgcttcagcaactacaaggccctcgaggtggagatccttgccacccagaaacaggtggagacaacctcgaagctcataacctcgctcctggcgaagcctgacaactcgaaagacctgacagaatcgctccagatttgcaaagagcagtacggcaacatcctggactcgatcgaggagtcaaaaaatcaagtggctcagcgcaacgtgatagaggcgcgcttcaagttcagcgccgcgatttcgctccaggtaagttgcaatgactcgttcaccgccgggacatcgccgatagtgaaggaggcccaggacgtgttcgacctcgccggcaactgcttggacatcatgaaagccattgaagatagagagagtcgtcgccgtcgaggtgggagcccggttacaagcccatcagtacctagcccctgccagggacaagttgggctttgcagttagttaggcccaataatatattcaaggcccgtgatcttgtttatcaagacggaactttttttttccttctctaatatttgttgtatccgtcgtctcggtgcttaggtgtgggtttggagatgcaatgttatatgtgaataatgtgatactaatcctcatggagaaacaaggaaacaaagagatttgatttatttcaaaaaaaaaaaaaaaaaaaaaaaaaaaaaaaaaataaaaaaaaagaataaaaataaaaaaaataaaaaaaaaaaaaaaaaaaaataaaaaaattataaaaaaaaaaaaaaggggcggcccccaataattgacccctccaacccggaaataatttcgggccggttacttgaggggttacaatttttcccaaaagggggc

SEQ ID NO: 87169 - DNA, 262 bp, Glycine max
  Clone ID: PAT_MRT3847_49724C.1
attacagcttctggtcggagttccattcaaaattatgaatgtggtataacctaaatccccaaattcattattggaatgttttgaaatttcatcttcttgctcttctaatatgaaagtgacatgaagtacaggaaaccaaaatggggtagaaaaacatatttcttatgcagttttataattttccaatatctggctatatacttaaatagtgttgaattttaaacttgtgttgttccctttagaactccgaaacatttttcgt

SEQ ID NO: 87170 - DNA, 317 bp, Glycine max
  Clone ID: PAT_MRT3847_49725C.1
gctgaaaaggtttatattgaatgaacatgagaggggataacaactgttacattcacacgcacagggtgtgggtttgggtatggggatgatcggacaggcctgaccatgggaggtgggttctcatcgcttctgaatgaaacactgtaaggccctaatagatgacgttggctctcttctaggtctggaaagcaccggcgacctactgatgtgactgtacaaggtcgaatacaagaatgagggaaccgcgttgctgttatgtaacgagaacactttggatcacgacctacgcgtgtatgaatgcttctgctacctactac

SEQ ID NO: 87171 - DNA, 438 bp, Glycine max
  Clone ID: PAT_MRT3847_49726C.1
cccgcgtccggtgaataattacgtaactaccctgttatgggtgacacttagagaactggcacagtcagctgacgctggattttcacccttggcacacccagctatccaatggccaaactgaggcctactatcttcacaaggagatggatcccagtgaccaattgagagacaccaacatagctgacgacgataatggttactaaagcatgccagagaagaggaaggtataggcgcagccacagctgacgatatatagaattgcacacgggaccgtcagcacgatgaccctagacgacagtgagatggacctgcatcaaagctgagcggggagaacaactagggctcccatgagctacacctggctaccactggatatatgcaagcccagggaccgggagcatgatgtgaggaccatggctcaggtccctgtggtgaaca

SEQ ID NO: 87172 - DNA, 459 bp, Glycine max
  Clone ID: PAT_MRT3847_49727C.1
ctcactccactaaggcacgtacactaaatcagcacgagagtgtgctaagatgaatagatataagatgaagtatgggcgtactctgtggattctcgatcgtgacctattggttgccgcgcctggcagagctccgtctgagcagctgctcggtctcttcattccagagaagctccaagctgcttctgagatcatatatagtggaacgctcgtctgctcttctggggcttggtgacatgcgttgtcagataacctgtgcatatctgccaggaaccacagtcatggattctctgcatcagagtgccaagccaaccaggctagcgccactagcgaggaatgcactgtggcttggggagtttgtaaccatgcttttcacttccattgcatcagtcgatggctcaagactcgtcaagtttgtcctctatataacagtgagtgggagtttcagaaatatggccacta

SEQ ID NO: 87173 - DNA, 546 bp, Glycine max
  Clone ID: PAT_MRT3847_49728C.1
aaaagtaaatccttttatttcattcattttctcaattccatcaatcaaaacagcacacatttccattcaaaattcatttctatttctttcatctctatttctttacttcctaattgtaacttgtatccaaacaaagtgttacagaagactatcgagtattaaaaaaatggaacaattgaaagaacatgcatctccataatcgttgagggataaaactatacagtaaaattccatttatcaaaatcggttgtgggctgttaaaaccacttgctgacttctctgcatctctagatcaagtgctctcgtccatactcgcgcacaattacggccacacttgtaggagggatcattccatggtctgtaacaatggccgatacataatctgaaggagtagcatcatagaacaaattcagaagctgcaaattgtcttgattagtccaattgtccagataattgacatccattcttccaggaaccacgggaacagcatctgggtcacctagttcattagaacatattgaatcaagttgcaccctttcatgaaac

SEQ ID NO: 87174 - DNA, 589 bp, Glycine max
  Clone ID: PAT_MRT3847_49729C.1
gagaaaataaaaaaataaaaaattcaggttctcaaaaactgtacgcaactagaaacaatggctgagatgaagaagaaagcagaactgatcttctttcccataccggagattggccacttagcttcattcctcgaattagcacaactcctaatcaaccatcataaccatctttccatcacattcctctgcatgaaactcccttacgctccctctttagatgcatacatcagatcagttatagcctcacaacctcaaattcaagtcattgatctccctcaagtagaaccacctccacaggaactattgagaccactatcacactacatctggtcctacttgcagaccctcaaaccccatgtcaaaggtatagtgcaaaacattttatcatctcattctaaccccattatcgggttgctcctagatgtccctcgttccccctggcttggcctgggtgatgaccttggcatcccctctttcttgcaccgttcttcggttggtcgttgttgtcgtctctgccccccccttcggtggcgccagtgacttaggtatcccttcttatttgtacatgccttcaaatgttgggtttttg

SEQ ID NO: 87175 - DNA, 393 bp, Glycine max
  Clone ID: PAT_MRT3847_4972C.1
aagctccctatttagttcctcccatcccagatgtcataagggcatttttgaggaaaaaggaaaagaggagctgcaaaactcaactcgccacgacaagcagagccaccaccacaatgagaaaaggatagagatcaagtaaaagagtgtgaagactccccacgacaaatctacacctcgccataacaaatcctcattctgagaccaagaacatgagcaaaaactcaacaacgagtgaaaattttgccatatcgagactaggtgcagagagcatgaagattctagagaagaaggcttttgcaagagatgaagaattactgcaaagaaagttctcactacagtgagatcctggtgtggtagaaaaaataatttcacttcattaaacgagcccgtgta

SEQ ID NO: 87176 - DNA, 376 bp, Glycine max
  Clone ID: PAT_MRT3847_49730C.1
tgcttagttacaacttcatgttatgtaacttcactgcctaattggatggttattaaagctcagagataaagagaagaaaaaaaattgcaccattcttcatcagatatcacatttgaggtttcacctttcacattggtggaagacattgttaatttattgtcaaaaactcagagacttgagactaacaatgagtctcattcactggtctttaatcttatggatcaccatgatgcttttcatccataatttggataatgtggaaggaagataccactatcacaaggggcagaagaaaaattccccagctcctaatccacctgctgagtcccctacaccaccagaggaccctccttcacccccttctaattccccaagt

SEQ ID NO: 87177 - DNA, 252 bp, Glycine max
  Clone ID: PAT_MRT3847_49731C.1
ggaggatatgacgttggtggtggagggtatttgtagtaataaggaggatgacaagtgggagatctacaaggaggactcttatagtaatacagatcataccatatattatatcgatactccttacccataacattttagcccacatttatttaaatttcatttcaaagaaagtacactctattctttcctacaatgacacaatccattcgattaaaaacgatttaccttgtctgactgtcctcattacttatc

SEQ ID NO: 87178 - DNA, 422 bp, Glycine max
  Clone ID: PAT_MRT3847_49732C.1
taaaaaagtaaattttaataaaaagatgtgtagaagagataaagtaggatttatttactatcctctaacaaaacaattgatttagattggattagacttaaatttagaatcaaactaattgatgttattgaataagatgattttgtccttcaaaaccatttcatttcaatctatgaacactcctatgagtggctattcacatatagtcgatgacaatatgtcacatcagacacaacttgtgcaatgtgtacagtataggcctctggtgtgtgcattaggtgtcttttatgttatcattttgtcttttatttttctctgctctcccttcgtatgtatgtgtgtgcgtgtgtgtgaaaaacctactattctcttttgataattttttattttgtcaattatgccaattccaattgagcctggat

SEQ ID NO: 87179 - DNA, 480 bp, Glycine max
  unsure (1)..(480): unsure at all n locations
  Clone ID: PAT_MRT3847_49733C.1
agataagcggtttcccaattttttttttttttttttttttttttttttttttttttttaatttcataccccagaaaaaaagggggaaaattttaccaaaaaaaaaaaaacggaacctggaaaacaaaaaaaccaagttttaaattgggtgggacaagaagttgggaaccccccaaaaaaacccccccaaaaaaaaaccccccccggggggggggggggggggaaaaaattttttaaacccccccctccnnncctgcctnnctccgaaaaaaaggaccaaaaaaaaaaaaatgggacaaaggggaagaagggaaccgggaacaacgaagcaaggggggcccaccgtggcgagccccccaaggtaaaaaaggaaaacctgcaaaacctaaacggagaaaggatcatagggggggccgaggggattaagaagaagaaccacagcccccgggggcccccgcccgcgcgcccccctggcaacccc

SEQ ID NO: 87180 - DNA, 710 bp, Glycine max
  Clone ID: PAT_MRT3847_49734C.1
ctaattttctctacaggagctggcttattgacattggaggatttgcaaagaaagtgaaaagcactactctatcttcagctacatgtttatcaatgagttcatcccaacactggaaggagaccaaggaatttgctacacacatccggaaaatcttccaggtgctaagaaagatgggagttatgtccatttgtttcacagaacaatcaatgcatatgctactggtcaacgaaagcatcgaaagattcatcatcaacagggtttgactgtaaattgcccgttttaatgtataatttccacttatggcatgcagaaaaaataaaaaatgtaagtaatggagatgtagcagacgactcatatcatcggtataaggaggatattggaatcatgaagtatatgaatttggatgcttatagattttccatttcatggtctagggtactaccgaaaggaaaacttagtgcaggtgtaaaccatgaaggagtaaactactacaacaacctcatcaatgagctcatggctaatggtcataatttattgacccaaatttcataactatgtattattattattattattattattattattattattattattattattattattattgttgttgttgttgttgttgttgacgtcacaaatttcgtgtgttatcactacattcattcttattatataataattacataatcactaattattag

SEQ ID NO: 87181 - DNA, 1876 bp, Glycine max
  Clone ID: PAT_MRT3847_49735C.1
ccacgcgtccggtcattcttatgaattgttgatgacttcatagcttatgccaactgatatggttcctctaccgctaacatttttagacctttttgtagtttcttctagtatataagtttttgtttcctacaaacaaaaacttatattaactataagtaaatatgtatttaaaggtcttcatttatttttagtttgttagtcatagactggcaatatagagtatatttgctaattttctctacaggagctggcttattgacattggaggatttgcaaagaaagtgaaaagcactactctatcttcagctacatgtttatcaatgagttcatcccaacactggaaggagaccaaggaatttgctacacacatccggaaaatcttccaggtgctaagaaagatgggagttatgtccatttgtttcacagaacaatcaatgcatatgctactggtcaacgaaagcatcgaaagattcatcatcaacagggtttgactgtaaattgcccgttttaatgtataatttccacttatggcatgcagaaaaaataaaaaatgtaagtaatggagatgtagcagacgactcatatcatcggtataaggtatatatggtttcaatagtagtattttagaagtagttttcatatgaataaagaatataattgatatgtagactcatgatagactggtccacctgttttaggaggatattggaatcatgaagtatatgaatttggatgcttatagattttccatttcatggtctagggtactaccgagtaggtcaagttttattgaaattccacccaaataattttttttccttagtttgtgttccatagtaactattattaatttcttataaatcatttgcagaaggaaaacttagtgcaggtgtaaaccatgaaggagtaaactactacaacaacctcatcaatgagctcatggctaatggtcataatttattgacccaaatttcataactatgtattattattattattattattattattattattattattattattattattattattgttgttgttgttgttgttgttgacgtcacaaatttcgtgtgttatcactacattcattcttattatataataattacataatcactaattattagaatattctaattaataacactaatatactttttttttctaattaagataattataattatagtaaccaatgatgattagaatattctaaaaaaaattatattttctaattcaaattacttaataacacaaatatatttttattctaatttaaatttgattaacactaatatgttttttttggtaattatgatagtaaaaacaaattaaatgttatcttaaataataataataataactacttacatttttattattaaaaaatacaatagttaaatacattaaaaagttataataatataaaattaatactcatgcaaggcagtataatcgacactgttgtgacaattttctctgggacagtgtgtgatttggttgaaagacgccctatgttgataacatcttctatcatgttcttccttagtggtttggtaatgttgtgggcacctaatgttgttattgttctgttagcgaggataattgatggggttgtcattgctcatgctgttactcttactcctctctacatatctgagatagtgccggctgacatcaggggccaattgaacacttattctctgaaccttgggccgctacaagcaacaggaattagagtgtggacaatatttaatatttaatccatttgatttgatgtaacattacattagtagctactttcggtgtctttaaaatttcctttgttattttgcttttccttttttatgcatattttgcattgagc

SEQ ID NO: 87182 - DNA, 736 bp, Glycine max
  Clone ID: PAT_MRT3847_49736C.1
actggtaccgcctgtctgggccccggaggagggaatcgggcccaatttaatccagggtttagtaaaccctaactggatactgaatctgaagtaagggatcgagcctcggaggagggaatcgcagcgaagtccactatgccgaagcaaattcacgagattaaggacttcctcctcactgctaggaggaaggatgcacgctctgtgaaaatcaagcggagcaaggatgtggtgaagttcaaggtccgttgctccaagtacctttacaccctctgtgtgtttgattctgagaaggctgataagttgaagcaatcacttcctccaggtttaagcgtgcaggatgtgtgattcttactgctgtatgaagatcaggtttttctctggattttggggattcatagttagtaaaatggttcagagaattttcgtatttgttgttacattcgggatcatgttagtattttgtttaagacggatccaacttgcttggggattatgtggctagttgattaaacctcgttaatttgacgtcaatacattatgtgactagttgattaaacgtcgttaatttggcgtcaatacatttccagtcgtttatgcattcgttttgggctgaattgtagattaggatagaactacaaaactgtagataaaaacatctcttggtcgaaatctgttgccaacttgttacctcagtttaaaacaatccttgtccacaagaaaatggacaccagttagc

SEQ ID NO: 87183 - DNA, 347 bp, Glycine max
  unsure (1)..(347): unsure at all n locations
  Clone ID: PAT_MRT3847_49737C.1
ggggaaacaaaaagctgggagcttccacccgcgggtggctggtccgcttcttagaatctagtagnngatcccctcggnngctgcagnngaattgcgggcaccgagcctactctctcccttctacctcaccatacagttatatttactgtccttttcacttctctttcttctcgttcatctcacacgaagcagtcgtgtacccataatactttttaatcaagttcatattttgcttcctcttgggttaaacttaactttgagatatacataatataaaacttgttgtgcataatgggttgcaaggacatggcaaaggtgaagtgggggaggaggaggaggaggaggag

SEQ ID NO: 87184 - DNA, 129 bp, Glycine max
  Clone ID: PAT_MRT3847_49738C.1
gtcattcgtacgtagagggatgcttgtttgagataaagtatttatgcttaattgtatagggggcacgctcagatggagacttgatactatgaacaggctttgtatgcagcagacagtccagaaggatgc

SEQ ID NO: 87185 - DNA, 163 bp, Glycine max
  Clone ID: PAT_MRT3847_49739C.1
ggtagcaaactgctgttatcattggtttataaaatttgcggttctgaaatgcagatgaaacaaggcttggtactattattttttatattggaactttacgggaaatgacatgagcaccatattggtgctgaagagtaaattctgtctcaggagcgtgagcgta

SEQ ID NO: 87186 - DNA, 442 bp, Glycine max
  Clone ID: PAT_MRT3847_4973C.1
catggggtttcccaaggatccacatcatgcctcgagcatgcatccagtctgtgtgaagaccgtgctggctgacctgcgcttacatacatcctatggttacgcccttcgtgctgctcaacattacatttatatagcgaatcaatcttccattgcctcttcatatacctggagtcaacatactgaccttggcgctaatcatttaatccctatggagattgcgctcgcgattgctgcctccattgtggccagtgagagatccgccgtgtacattcatctcccgatgtggccagagggtgttccaactggtgctgccgccctatgaatcctattacggcgccatctaacactgtcggcgatgtatgacactctctacactgctctgtatgaactttggcttgactcagcattctctccacactactatgtgcacctttctagtctt

SEQ ID NO: 87187 - DNA, 332 bp, Glycine max
  Clone ID: PAT_MRT3847_49740C.1
caccttcagaatggccttaattatagctccaacaaggtggtttatttccaaagagttactgtaatactttcggatttgtctcttctttatggggtttacagacttactcggaatctggattcaagaaagcagcagttgatctggtcattggttatttggtcacctatgctttttatagtggaccatgtgcatttccagtacaatggatttctcattgggattttgttgatctcactttcatatttggaggaaggaagggatttgttaggtggttttgtttttgctgttctcttgtgctttaagcatttatttgcagtggcagcacccatata

SEQ ID NO: 87188 - DNA, 297 bp, Glycine max
  Clone ID: PAT_MRT3847_49741C.1
tatcgagcgctcgagtacggctgaagacgacagaagggggagcgacgaagatattagggtacttgagtgacgtgcggctatcctagcactctcttctgcagctttcgccgacagcttcattcaccatggctgagcaaaccgagaacggttttttgaaacatacaaaagtgtttctcagctcgaataaaactgggaatggaaagagacccggaaagggtgtgaaccgcttttggaaatccattgggattggatttaggactcaccaggaagctatcgaaggaacctacattgacaaga

SEQ ID NO: 87189 - DNA, 142 bp, Glycine max
  Clone ID: PAT_MRT3847_49742C.1
gccacgcgttcgtacaactcataggtaggggtgagataatacaactgaatgggataacctggcaagagtggacattgatgtataatgggcatctgtctcaatctaacgattttgccattcatcagcaatctttccgtctcca

SEQ ID NO: 87190 - DNA, 204 bp, Glycine max
  Clone ID: PAT_MRT3847_49743C.1
ggctcgagcccagagcagtcccgtataagattctcatgtacgaccacgcttttcgcgcctcctacctcatatcgcacgacggtgtcactaacgctggtggcacggtgtcctatgaatcactgagccataacgctctctgtattgaagctgatgacttggccactcaaatattagctaccaatggcaagtctattacataaatat

SEQ ID NO: 87191 - DNA, 349 bp, Glycine max
  Clone ID: PAT_MRT3847_49744C.1
ggcggaatccgcgatcggttatgaaggtgtcgagaaaaggatggaaatatgcttattgcagccgggactttttgctgaccctcaaggaagggggataagggctattacaaaagacccaggtgggagagaatataacaccaactgcttgcaccatcggtggtatcctcaaaacctaataggtcgactcctatgcgctgtccgagtgcagactatttgtttatgcctacaagaacatcatcaaaacctgtggtactactaagctgttgctagcaatgccacccatattgaagatggcagaacagctttccaatgatgttaagtctgcgaatgacaccaggggaggcttgat

SEQ ID NO: 87192 - DNA, 477 bp, Glycine max
  Clone ID: PAT_MRT3847_49745C.1
tttgacatttatatgtctgaactatttcgtgtgggacaatctaatcttctctatgaggccaactatttatctgttctcataagattgctcgtttaggtctagtcttccaaggaaatgtttttcttttatgattggagtgtttgatttttttttaatcttctgttcattcttttgccaatgacgagagaactggtaaatgggtaatgtatgatttttttatgattacagaccctactgccttccttctgaggccttgactttaacggttgtgattatctattttttgctggatttctttttgagatgtttgagagttcttgaagattgagtatttttttaaatctattattttcggtcccttgaccggtttaattgttgagagggtatatgatgattagaagcatcgtgcagatgatttatctgcgaataattctgttattaggcttttgctcctatctgaagaccccatcacatcac

SEQ ID NO: 87193 - DNA, 147 bp, Glycine max
  Clone ID: PAT_MRT3847_49746C.1
cactattccatttctaaattaaagttatgctaaattgagtaagctgtttatcacttaacagctcattttgtctttttcaatatacaaattttaaaaatactacaatatttaactaaggcccaaccgatttccataatgtagcagtta

SEQ ID NO: 87194 - DNA, 323 bp, Glycine max
  Clone ID: PAT_MRT3847_49747C.1
ccggaccggaatgagccgagtcgaccgcacgcatacggtttattatcatttatgattgattatgacttttgctaaaaaaataataaatttataatatggctaagggaaaaggggaaaaaaaaaaaaaaaaaaaaaaaaaaaaaaaaaaaaaaaaaaaaaaaaaaaaaaaaaaaaaaaaaaaaaaaaaaacaaaaaaaggccagcgacataaaaaaaaaaaaaataaaaaaactcataaaaaaaaaaaggggccgctttttaaaagaaaccaaagttacaatccccgccttggcactttaaaacttttttattgggaaaaccaa

SEQ ID NO: 87195 - DNA, 286 bp, Glycine max
  Clone ID: PAT_MRT3847_49748C.1
cccacgcgttcgcccacgcgtccgcacacgcgtgcggtgaactgaatggtcggtgttgggattgattatgagcatgaatactttcctagcatgcatgcgtgcttctgattctacattataccaatactctgccaccttgacactaacacaactctattatcttttagatctaatgcaattacaaagcgtctgacatagcattggtagcatattgctccatctagccatgcagcagatgaatgacaccaaaccatacttgtcaactaaaccgctcattctcatgtca

SEQ ID NO: 87196 - DNA, 341 bp, Glycine max
  Clone ID: PAT_MRT3847_49749C.1
tattgggctcgagctcaaatattttcaactgatgtttgaattgctctttcagcagctgacatggagacggtgaccatggccatgataacgggagtggtactgttcacggaagtatatgatgcagctgacctagatatggagataatgtctgtcgtcggctctcacgcctcttcgctggacacagacttagagcttaagtctatgtactagctgtggctatgagagcatggtaagcagtacgctgcgctcggactgactgataccaggatacgaagctttgtgactgcgcgtgaggtaatgggaactccggatcacctgatgaacacatatgcatgctgatt

SEQ ID NO: 87197 - DNA, 504 bp, Glycine max
  Clone ID: PAT_MRT3847_4974C.1
aaaccatgtaagaaattgaaatagttagatgaagaacaactattcaacattcatagattaatacagtacaaactcccaagaacaattaagtggtagtttttaatggaaaagtagagatgaccaaggagcaactggttgcttatcaataccaggggacggcctagtttgaagtctctttctcatagtttacgggtgcagataatgctaaaagtcacaggctcactcttaggcagataccctcaggcctttactccaaagtcaaatgcattccctgatcctttttcccatatgtgtatgttatactatacaagctcaactccactaggccactggagaagaggcaccttcagcaataagctattcaaaggaatatggtgttgaagtgatcaattcaattaaccaccttctggccggccatgttgttgccccgcccgggaaagattaacccgttttctgttatgagtgttatcagctggtttctcattagctgcttcaatatgttcc

SEQ ID NO: 87198 - DNA, 456 bp, Glycine max
  Clone ID: PAT_MRT3847_49750C.1
acgaggataaatcaaattatctggtataagctaggatttgaagacaaaatgaatcgaaacacaataaaaacgtttaaaagaagatagtagtaagttaagcattatatatatatatatatatatatatatataaaagcatatcttcttagggttaggtagaccttgtatatgggatatgtttatcttttatttataatacattgtgagtaattattataatttaaataaacttataatgattagtattctattacaatatttattttgatcaagtgttacaatatttattctggataatttttaatataacaggaaaaaattataatatgtttgtcaaaatatttttttaagtgattattgtaagttatgctcataatgataaaaaatgataaaaatttactttaaaattatattttacccttagatgaaacaaattttgaggtctaataaattaat

SEQ ID NO: 87199 - DNA, 473 bp, Glycine max
  Clone ID: PAT_MRT3847_49751C.1
cagagatgctctgtatggtattggctatgctgtaccgggctcggttctacaacttctgctttccaaatacggtgatggaagtggtaggagggttgaacttggttttgacagttttgtcgagtaagatttttttatctgggtctttgaagagagtaaattttcattttggtagttgagagattttttaatcattaatttggtcctcgaaatgttattacatcaatcttgtcctcaaatgatgtttttcttttttctgtatcaaaatagtaaaaagacttaatcttgtcatacatactattatgataacataatgatttgggggccattttggtgtagcttatgtttggagcaccaaattggtattctgaaatctttcaaggactaaattggcttttgttgtatttgaaaatgtcaataatgtcattatatatctaatgttctgtttttggatgtatgcaggtgtgggatgatta

SEQ ID NO: 87200 - DNA, 311 bp, Glycine max
  Clone ID: PAT_MRT3847_49752C.1
cactcttgtacatgatattgtatgggcatatctacactcatgacttgctcctatccgggtgcattgcactgcgaacagagtgagggaacagggtcttattagcgcgtcggagcttatacattccggggaatacaatcctcgatgtatacgcatatgtcctggatagaaggtgtcacatatgcttcgctgctggctgggctataccaagtgtgaaggctgctaggggcatcttgcaaggatgcatgaacatccatggattgcgtattatggcgggtgaatgcaatgctactttggtagtcgcctctggtgac

SEQ ID NO: 87201 - DNA, 195 bp, Glycine max
  unsure (1)..(195): unsure at all n locations
  Clone ID: PAT_MRT3847_49753C.1
gtgcaaaggatgccntngganngtcngtatgcccatatcctattccanacaganttntcatagtnnctgcnanngcatcatctctgcctnttacnancctcaaggctnatgtctgataaatgctttgagnanaatctcacaggaactcagagctgncctttgctgtagttcttcagtctcgagcagtgtanagga

SEQ ID NO: 87202 - DNA, 218 bp, Glycine max
  Clone ID: PAT_MRT3847_49754C.1
agcacactgatccataagaatacaaatgcttaagaaaatgtttgtatttgtgttgttatctcttgttggggcatattgatcgctacctttgaattgtcctcagctaccttctcacactcccagcaacatctttgatctgcgtccaaatgatatcaaagtcgtcatggctctgggtgactcaatcaccgcaggatttggtgtgatgggtaccgctggcg

SEQ ID NO: 87203 - DNA, 329 bp, Glycine max
  unsure (1)..(329): unsure at all n locations
  Clone ID: PAT_MRT3847_49755C.1
gggagagctcaacatgatttaaggatgtatactctgaatttcaacctctcatataagcactcacgctgggggtantacatgcgctggactttatactttctacataatttctcatttaagtctcacatggaactcaagacatcataaatcaaacaagtggaggttgtttacaaagcccacaagatcacttatttaaattatctcataaacattacccataacttagcattctatagattggatttttcactctacttttgacatccacataaatgacatcatttattaaaatacttatacaatctttcggcttaggtatctcaatgtca

SEQ ID NO: 87204 - DNA, 544 bp, Glycine max
  Clone ID: PAT_MRT3847_49756C.1
tttatattttatccttgtttgtatgggtaggctgaatgcctgagacaaactttactcaaacattttggagaatcttttgatagaagagactgcaagtatggatctagcccctgtgataactgtctcaagactgtattgtgagtagagattggaatttaacatttaattgtttaaaagtggaggaaaaaaagcataaatagatgataaaagttgggtgggattctgttcttgatagatatgatatttatgtcatgacttcagactttagaccaggaactgaatacaatgatggaatttcgaagttctaatgggtctataggtttattcctcaggcttcaggtgctgtttatttgggaaggagggggtgtcggattgatagttacagataaatgttcttctgaaatagtttacataactaattgctatgttacaatggatttttcagcaaactagtgctgtggattaaatcagacgaggaatcaagagatcagtgtggcagactaattcaagaaagaaattcaaagcaagcacaagtgatgctatg

SEQ ID NO: 87205 - DNA, 480 bp, Glycine max
  Clone ID: PAT_MRT3847_49757C.1
aaggaattcattcattaaagcgtgtttgtttggtagaacaaaactactagcttacccaggaatgagtacactcatttaagtatacttaaaaaaatagaacgaggtatacacgtatacaaacaataaaagaaaaactagtttgataacatcaatattacaaacgaaattaactaacatattcagtttgatttgtcattgagattagcaccaactttcaagattgatcgcagaggcttcattttctttggagcatgaggtaaatctcccaccaccaccactttctcatcaatgctgttcctgcatggaatattcttctctacacatggtatctctggctgcactactttgtctgcattagcgccaaaacctcttgttgtaatcttcaccttagttgagcttgaatcgtaatgtgaagatcttcctaaagttaccgtcttcatagcttgtgaagccaaagtttccatgatgaaatctcgagcc

SEQ ID NO: 87206 - DNA, 490 bp, Glycine max
  Clone ID: PAT_MRT3847_49758C.1
aattcggctcgagtaaagtgttgttttttttgggggatttgcaacgcaaaggttgtttgttgttgccccaggaaatcatagagagcgaggcataaacatcaatctctctgtgaaaaaaatggggacgacgaagaacaacaacaacaacttcaattctacctcaaaatctgataacagtgccaatgacaacaaaaacaacacacgtgtggtgttgaatgtctacgacctcacccctctcaacaattacctttattggtttgggtttggaatctttcactccggcattgaagtgcacggtaaggagtatggatttggagcccatgacttccccgccagtggagtatttgaagtggagccaaggaagtgccctggatttgtgtacagatgttctgttactttaggccaagtaaatatgcatccttctgagtttcggacatttattgagggtatagctaatgagtatcatggggatacctatcaccttatttct

SEQ ID NO: 87207 - DNA, 487 bp, Glycine max
  Clone ID: PAT_MRT3847_49759C.1
acaaactaagtttgggtgcatgtataaattataattcacaatatacgcgtattaactcaacttggggcttattaaaaaaaaaaatacacgtattaaacaacatatacaataaactatagctaacttcactcatttgcaatttgcatgggtcgactttgcctcccagccaagcactgtttttcttcataacatcatagtcaaaacaaaaaaaatgaaaaacatttagacaaaagtacaaaatggtttagtatgtatcactctctatagatactgtaataatctgtttgtaaaaaatccacgtcagcagaatctccaatccaacctgacctctggtgggccatgcacgtggtgagtgggcttcctgaaggacacgacgtggctgctaaccatgaacgccgtcacacgctcgctcattctaatgtcttccatcttcatctcttgtaaccgtcgcacgtactctggcacgtgcacaaggtcccacacaacc

SEQ ID NO: 87208 - DNA, 297 bp, Glycine max
  Clone ID: PAT_MRT3847_4975C.1
ctagctgagggcctataccctgcttttgcgagggcccccttattttgttcaaaaccctcaaaggacctttctttcagttttctcctgggcaggtccttgttgcttttccggcttttttgggcatccttcctgttcttactttgggggaagactattgatttgggagcttcaatatctttttcagtccccttcacccctttttccgccggtaagcaatgcctgaaaaatgcctttgaaccccccaagtccctttttatttggttccccttgatttccttttaatcctggcgccttttt

SEQ ID NO: 87209 - DNA, 365 bp, Glycine max
  Clone ID: PAT_MRT3847_49760C.1
ctcggaatgtctgctaattgcggctacgacgcatgaggcgcgagccgtgtccaagtccatattattgtcctgctgaactacgcgttgctcgtgagctgcgctgcttagcgaccaggatcatcgcaatgcctatgaattactaccttctgtactacaagtgactagtgctaactattgggaacaccaacatgctgtttaaccgttggagctagaggcgcaatgctgctggcggattatcatcttgtggagaagcttgcagcttttgatgaggtagcctatgccagatcgtgtcgtacatgctaggggcgctagtgcatagggttactgtgaggacacccatgacatggctcacctgacctgtgcag

SEQ ID NO: 87210 - DNA, 310 bp, Glycine max
  Clone ID: PAT_MRT3847_49761C.1
cccgggcgtgcgactacgcgtccgattttttgactttcttgggcagatcacagactcgggcaggagatactctaaactgcgaaaaaaccactgcgatcaatggcaacgatcaagggcgacaaagctcggcagatcttcgacagccgaggaaatccaaccgtggacgttgacggtactctcatcgatggaagtcttacacagagacagcagtgcgctagcggagcgttaacaggtgtgatatgaggcttcggaattaatggatcgacgctcatactacgctcggaaaggtgctctcaatgctgaggagaat

SEQ ID NO: 87211 - DNA, 3954 bp, Glycine max
  unsure (1)..(3954): unsure at all n locations
  Clone ID: PAT_MRT3847_49762C.1
ccggtccggaattcccgggttcgacccacgcgtccgattctaccctagcaagaattcagatctgttttctctcctattcctctaatgcccatttaaaacgaacacttctattaatatttttaacccattatttgttgtacccaaaaactatttccatttttccataattataataatgcattaatggcccctatcccttgacttacaattcaaaaaaacacaaaccagaaaagaaaaaaccccatccatcattttcatttcaaaacttgtcttccaccctttttctttttccatcactactactcacagatccaccattcctttccacctccttcactccccttcaaatcagttcacattttcctttcacagattacttttactccttccacctttctctctctaatttcattcaacaaaaccatttttttttctctcactcacttcacacaatgaagcacccaaaaccccaaacccaatcaaccccaacaccatcaccttcttcaagatcttcttctctctcgtcccacctcgctatggtggagctgaagcagaagatcttaacctctctttcgaagctctccgaccgcgacacgcaccagatcgcggtggaggacttggagaagactatctcggggctctcgccggacgccattccgatgattcttaactgtctttacgacgccgccaccgaccccaagcccgccgtcaagcgggacgcgctccgcctcctcgccgccgtctgcgccgcgcactccgacgccgcggcggcccaccttaccaagatcatcgcccacgtcgtccgccgcctcaaggacgccgactccgccgtccgcgacgcctgccgtgacaccgtgggcgccctcgccgcgcagtatttgaagggagacggcggcgggggtggcggtggagtcgggacggtggtggggctgttcgtgaagccgcttttcgaggcgatgggggagcagaacaagggggtgcaggcgggggcggcggtgtgcatggccaagatggtagagtgtgccggtggcagcggaggggaggcggtgccggttgcggcgtttcagaagctatgtccgaggatctacaagctgctcaacagtcccaatttcatggccaaggcggcgattttgccggtggttgccagcttgtcccaggttggagcgattgcaccacaaagcttggaacatttgctgcctagcattcacgaatgcctttctagtactgattgggcaacacgtaaagcggcagctgaggcattaagttctttggcattgcattcaagcagtttggttactgatagagcggcacccacactggcagtacttgaggcttgccgatttgacaagataaaacctgtaagagatagcatcaatgaagcattgcaactgtggaaaaagattgcagggaaaggagatgggtctcctgatgattcaaagccctcatctgatggtgggaatgaatcagctatttcgtcagaagcaagtgacccgaaaaaagtaaatcttgatgagaggaagactgattcaccagtaaagggttcatcaactagttcttcaaatatggattcaactaaggccaaagcagctagcatctcagagaaggcagttgtgatactgaaaaagaaaccacctgtgttatctgataaagaactaaatccagaatttttccaaaaacttgaaagaaggggttcagatgatttaccagtggaagtagttgttcctcgtagaggcctcaattcttctaactccaacaatgaggaagaatcagaggcaaatgctaaagattcaaaagaaagaataaattctgttggaaacatccctaatgatgatcatggatcctccagtaataaatatcgtatctttgagagaggcaatgatggaaattccaaacaaaggaattatgatgattttggccatgacagattctctgaaaggagagtgaacacaaaagaactgaggacaaaagcttatgatactgatggcaggactgaaaatgatcagagggacggttctgccaatgctgcaggtttttctaaaactgatggtcaatcagaagtacccttctccaataacagagcaaactggttggccatccagaggcagttgttgcaactggaaaggcaacaagttcatctgatgaatatgctgcaggatttcatgggcggatctcatgatagcatggtgactctagagaacagagtgcgaggtcttgagagaattgttgaagacatgtcacgagatttatccatatcatcaggtcgtagaaactttgcaggatttgaaggatcatctaataggccttctagcaagtataatggttttaatgactattccagttccaagtatggaagaggtggtgatggacgcattccatttggtgaaagatttgcccaatctgatggaaatgctttgggaatgaggggaagagggccatcttggagatctgacatgtctgagggctgggatcatcctgggtatggtgcttctagaaatggtcagatgtcctcaaggagggcttttgggggtagttctgctgatggaagatcgccaaaatctgtgcatgagagtgatcaagcaggcaacagaagagcttgggataaagcagcaatgcccattcggcttggtgaggggccttctgctagaagtgtctggcaagcttctaaggatgaagctaccttggaagcaattcgggttgctggtgaggacaatggaacatctcgagcaacaagggtagcaatccctgaaatgactgctgaagctatggctgatgacaatgttgggcaagagaaggatgccatctggacttcttggaccaatgcaatggatgcccttcaagtaggtgacatagattcagcctttgcagaagtattgtccactggtgatgatattttgcttgtaaagataatggatagaacgggccctgtaattgaccaactttcaagtgaagttgcatgtgaaattgtgaatgccattggacaattcttacttgaccagaacatgtatgacatctgtttgtcttggattcaacagttgctggagatagtattggaaaatggccctgacacctttggtattcccatggaagtgaagaaagagctcttgctgaatttacacgaagcttctacagatccagctgaggcctgggaaggggtacagccggatcagcttttattgcagttggcatcagcctgggaaattgatctacaacagcatgacaaatagcttgtagagaacaaattatgctgctattgaatcttgaattggatggtattgagtgcaatttgaaatataatgctgttcatgtttttggcctccacacaacaactacattgccacaaatttatgctcctttttctcctgtatcttggtgaacttaggctaatcctataccggtcagagcaatgttcgaccgttgatatcattgtttttttttaccaaatgtctacagatattgtcattactaagaggtagtgtctggttgtcactaagtgcctgcttaaagacaatgtgtaaattgagacgaatgaacaaatcttccatgtaattattaatgtatttgttcttgatttgctactttagtttcatcatttgcaacattttctctcgttatgttacccaggctaatttgtaattggtcaatgatcatgtctgaggggatatcagagacaatctgtattattgatattcagacatataaaatgaagtgttacacttagatttttgtgtttttttttctctaatcaatattttggaagaaaatttatatctaaaggttcagcacaagaatattatgaatgaaaaatgatagaacctaaaatcaacacaaaaacaagattcaagagtagatctacaaaatttgaaccatagaaatgcangaacaagtgtagatctaagatttaatcggtttatttttttgaatctactctaaacaacaccaaaccacaggacaatg

SEQ ID NO: 87212 - DNA, 673 bp, Glycine max
  Clone ID: PAT_MRT3847_49763C.1
gattcaacagttgctggagatagtattggaaaatggccctgatacctttgacattcccatggaagtaaagaaagaactcctgctgaatttacacgaagcttattcagatccagctgagacctgggaaggggtacagccagatcagcttttattgcaattggcatcagcctgggaaattgatctgcaacagcatgacaaatagcttaagaacaaattatgcagctattgaatcttgaattgaaatataatgctgttcatgcttttggcctccacacaacaactacattgccacaaatttttgctcctttttctcctgtatcttgatgaacttaggctaattctatacggtcagagcaaggttcgaccgttggatatcatttttgtttttttttttttaatctacagatatcctcattactaagaggtagtgtctagttgtcagcaagtgccctgcttaaagatattgtgtaaattgagacgaatgaacaaatcttccatgtaattattatatgtaatttgttctcgatttgctactttcgtttcatcatttgcaacattttctctcgttatgttacccaggctaatttgtaattggtcaatgatcatgtctgaggggatatcagagacaatctgtattattgatattcagacatataaaatgaagtgttcattt

SEQ ID NO: 87213 - DNA, 846 bp, Glycine max
  Clone ID: PAT_MRT3847_49764C.1
tcgacccagcgtccgaccaatctttaatataagcctcttcgggttctgggacgctcattcatcatcaaatcaaatccacgagaaccctgtttctcctcacgcttctgcctcagatccgatcttcataacccaaagcttcactttcccagggaaacatgccacaggaaaccttaccaaactctaatttcatatctcctctgaggagaggattgaatttgaaaggttcggcggcttcagcatgtaacaacaatgagactttacacagtgtgacggaggagaccatcaacgatcatgaattggctcagagaaaagcagaggaagcagcttcaaggaggtacgtagcagcagaatggcttcggcaaatggacaatggcgcgtcttcatcactctccaaagaaccctccgaagaggaattctgcctcgcactccgcaacggtctcattctctgcaacgtcctcaacagagtcaaccccggcgctgtcgtcaaggttgtcgacaatgcggtggtcgataacgtcgccgttcagtcttcggaggggcccgcccagtctgcaattcagtatttcgagaacatgcgaaactttctcgaagctgtcaatgacatgaagcttttgaccttcgaagcttccgatttggaaaaggggggttcgtcgagcaaagttgtggactgcattctctgtttgaaagggtattatgaatggaagctatcgggtgggattggagtgtggaggtttggtggaactgtcataagaattacttccttccctaaatggtcttcttccaacatactgggcctgaaaggtggttgttgatgagactgagtatttcgcagtttcttcatctgtc

SEQ ID NO: 87214 - DNA, 517 bp, Glycine max
  unsure (1)..(517): unsure at all n locations
  Clone ID: PAT_MRT3847_49765C.1
ttcgagctagnaattggaatgtgaaaatggcaaaacagaggtagtgatgacgatgaaaatggtaatgggtgtccgtgtccggtgaagctgtgtgattgtttagaggaacttgtgaggttcactctgaactctaactctcaccatctcaatctttcttcccagtttttctccaaccttctcaaagatgacgcaacgcacccatcttcttcacactcactatcacaaccaaacggtttgtaactttcaatttgtattccaaaactgcttctgctacttacagccttgtctgttctgtttttaggtgaaaaggctgctctttatctgcgtatcttcaaataagccaataaactcacgagtcagattgtcaaattcattataaattactctgctttntttttttttcctgggtggcgtgatgtatattttcgagtttaatagatatgcatcgtcacgtagaagccatcgacaaattagatatcatttcgatatgattttttaagttagttattataaaagt

SEQ ID NO: 87215 - DNA, 162 bp, Glycine max
  Clone ID: PAT_MRT3847_49766C.1
attgctagtacacccagccaactagagcaattgtggtgggtgcgcgtagcaacagcctgacattttgtggatcttatgttaattcatgttctgcttaatgcactatgtattgccatggcccatatctataaaattagtctcaacattctttcttgatcatga

SEQ ID NO: 87216 - DNA, 172 bp, Glycine max
  Clone ID: PAT_MRT3847_49767C.1
aaatcgaccgaatcggctcgagcggctcgagacggctgcgagaagacgacagaagggggaatccacacctggtaaaaaattcacgagtctgttagcgtctctcctccaaaatggaatagcaagacgcactaaaggttccatccatttggaacttgggagtgtagagtaccat

SEQ ID NO: 87217 - DNA, 445 bp, Glycine max
  Clone ID: PAT_MRT3847_49768C.1
aaaattgacagtattggcacttcagttgcttgttgacaatatggtgcgttatgaatcagatttcattaacagatgggaacctatttaaggacatctgatacatgttcttatcattgacgattaacttttaggtttggaagaaagtggtatatgttgatagactactacagctctttagatacataccccgtgaacaattgaccatcccagatttcgtctttcagttgagtctatgttttcatgttataatcatttgttccttttcataatatgctattacatgggtaacacactctggtttaaatttattggaaattacaattaaataaaaaagcgagacttacaagtaaatgtactttagattgtaggttctaattcattttgtacttctattctcataggcatgacttagaagtgaatggaggaaaaggtcttattgtggatc

SEQ ID NO: 87218 - DNA, 280 bp, Glycine max
  Clone ID: PAT_MRT3847_49769C.1
acaaagaaaatactttcaaacagtagcgtaatttcacaagacattatattccccttatattttccgccgtaaataatacggaatgaggaaggggaatctttacgagcacacaatggaatgcttagtccacttaggtggaggcaagaaacgacactaaaaggacctttttgaaaaaaacatgggctcgacttctcgtactacattgcaccgatataagccaaacctaagggatcaaacctgacaccctgaatacctctcgtgaataagccaaggaacatga

SEQ ID NO: 87219 - DNA, 247 bp, Glycine max
  unsure (1)..(247): unsure at all n locations
  Clone ID: PAT_MRT3847_4976C.1
ggcttcctcaataatctcttccccaactattaccactatcaaccatgaccatacgcacatagttactccattcactaacctcaantccataactagcttccccaccagaaaaaccaacaataacattacctgcattactagcaacgatgaaaaaatgcaatacatgcgaatatgaccaccaattaacaagaagaaattaaaactcttcgctacttccagacttaatgatgcacaattagcaaaagaa

SEQ ID NO: 87220 - DNA, 332 bp, Glycine max
  Clone ID: PAT_MRT3847_49770C.1
aaatattttctcccaaaagcccaactcgtgtcgtgattcaaggaacaacagaactctcttcgaacactatgctgcgagttgctccaacctagctgaaacatacaaggtcttttgaacgctcactagcgaccaaaatgcagacatgccgtatggcagcagatcatgcgctgggtgggcacgctgaatgctcgcgaatctatgcttgcttatttcactgtctcgacccatcgcttcttgtttgttgcagagcatcggtacatctttctctctatctatctatcttccatcctagcgttcaccacgtataattactcttagccatcgtctgtggg

SEQ ID NO: 87221 - DNA, 546 bp, Glycine max
  Clone ID: PAT_MRT3847_49771C.1
gttcgatcggagcagtcacttgtaaggtgggctacaccccaactccataatatagatgccttggccaaaatggttgatcctactttgaacggcatgtatcctgcaaagtcactgtcacgctttgctgatatcattgccctctgtgttcagccggaacccgaatttcgacctccgatgtctgaggtggtgcaagcattggttcggttagtgcaaagagcaagtgtggttaaaagacgacccagtgaagaatctggttttggtcacaagaccccagaccatgaggccatggacatgccattttaaatgttagtgcctttaagtgatcttttacaattttgtgcagtagcccggctaaaaaaattactactacagaacacaggaaggaaggagtagaaaagtttgtgaaaatgtatcatcaatcaaacaaattacgtgttggaatttttcacacaccatttaatactctggaaaataagctgtatattttaattaacttgcaatgctgtaatataatgtaatttaattgaaagcccattattgtttctt

SEQ ID NO: 87222 - DNA, 271 bp, Glycine max
  Clone ID: PAT_MRT3847_49772C.1
gatctatcatgctcgccattcccaccgtcctcctcgcgtgccttggcagtgccatcgccgcgcccacttcccggccagccggctcccgtcccgtctggtggtgttggtgtgcgtcccaatgatacggcgccgctgtatcacaccatctctgacttcgacttccagagcttcaatctggcgctctatcaggagtggattgagctcgatctcttcaacttacatcgtccagcgcttcagcgtcgacgagtttgccgaggcggcctcaacgaag

SEQ ID NO: 87223 - DNA, 2626 bp, Glycine max
  Clone ID: PAT_MRT3847_49773C.1
ccacgcgtccgctcacacactgaacactctcgtgctgcttttgcttatgatattctctctcttcattagactgagcaagcttcgaatctacaatatctgtccctttctttaatggccttgccttgtacaaccagtcgcgatctgaaactcaactactgcttctacttctacttctacttctacttcttctttcgcctccatgatactctgcatgtgcctctccgcacctgaaccacgcttctgaacgcaatggctcgtcctagtttccctcttgctctctgtttctctttcatcttcgttgctcttcctctttccctcgccaccactgacccttctgatgttcaagctcttgaggtcatgtacaatgtgttgaatagtccaactcagctaacgggttggaaaatcggtggtggtgatccatgtggagagtcatggaaaggggtaacgtgtgagggatcagccgttgtttccattaaactctcaggtttaggactcgatgggactctggggtacttgctttcagaccttatgtcactcagagaccttgacttaagtgataacaagatccatgatacaattccctaccagttgccgcccaatcttacaagcctgaattttgcaagaaataatttatctggaaatcttccttattccatttctgccatgggttcactcaattatttgaatttaagcaataatgcactctccatgacagttggtgatatatttgctagtcttcaagatcttggcaccctggctcgagctttcttctcttttcttgcagaagaaccagttgactggttctcttagtgctctcgttggtttgcctttggatactttaaatgttgcaaacaataatttcagtggatggataccccatgagcttagttccatccataatttcatatacgatggaaattcttttgagaaccgtcctgctcctcttccgccgacagttacttcacctcctcccagtggatctcatagacgtcatcattctggatctggttcacataataaaacacaagcttctgataatgaaaaatctaatggccataagggtttgacagtgggggctgtcataggcattgttttaggttcagtactggtggctgctattgtgttccttgctcttgttttctgtatccgaaagcaaaaggggaagaaaaagggtgcaagaaattttagtgggagccttcctcgtggagttattaatgtaactcctcagatgcaagagcagagggtaaaaagtgctgctgttgttacagatctcaagcctcgtccagcagaaaatgtgacagttgagagggtagctgtaaaaagtggatctgtaaagcagatgaaatcccctataacttctacatcatacacagttgcttctctccaaagtgcaacaaatagctttagtcaagaatttattattggtgaaggttctcttggccgagtttacaaggctgatttcccaaatgggaaggtaatggctattaagaagatcgacaactcagctctgtcattacaggaggaagacaattttcttgaagctgtttctaatatgtcacgcttgcggcacccaagcattgtgacattggctggatattgtgcagagcatggccaacgacttctagtttatgagtatatagcaaatggaaatctgcatgacatgctccattttgctgaagatagcagcaaggcattgtcttggaatgcccgtgtacgcatagcacttggcacagcccgggctttagagtacctgcatgaagtgtgcttgccttctattgtacatagaaatttcaaatctgcaaatatattactcgatgaggagctcaatcctcacctgtctgactgcggtttagctgctttgacaccaaacactgagcgacaggtatcaactcagatggtcggttcattcggttatagtgctcctgagtttgcattatcaggagtatacactgtaaaaagtgatgtttacagctttggggtggttatgctggaactattgactggtcggaagccacttgacagtttgcgggttcgatcggagcagtcacttgtgaggtgggctacaccccaactccatgatatagatgccttggccaaaatggttgatcctactttgaacggcatgtatcctgcaaagtcactgtcacgctttgctgatatcattgccctctgtgttcagccggaacccgaatttcgacctccgatgtctgaggtggtgcaagcattggttcggttagtgcaaagagcaagtgtggttaaaagacgacccagtgaggaatctggttttggtcacaagaccccagaccatgatgccatggacatgtcattttaaatgtcatagtgcctttagtgatcttttgcaattttgtgcagtttcccggctaaaaaaattactactacaaaaacactggaagtaaggagtagaaaagtttgtgaaaatgtatcatcaatcaaaaacaaattctagatactaattacgcgttggaatttttcacacaccatttaacactatggaaaataagctgtatattttaattgatttgccatgctgtaatataatgtaatttaattgaaagtccattactattattattattattattaatattatttcttgccttgatgc

SEQ ID NO: 87224 - DNA, 389 bp, Glycine max
  unsure (1)..(389): unsure at all n locations
  Clone ID: PAT_MRT3847_49774C.1
actatcatactcaagtgtctctacatgtcattaatacgagncgtccagctgtttcgccatagctgagcggtcataagtgcgagagacaatttgttattcatagcacttatctttggacagactcgccgatcaatactcttaataaaaatcagataatttatcgtcggtagattccatcgtggacccaggcaacaacaacaacataaaaacattgatcaggggcggctgctcaccatatagaacggatggccatgggggaaacccaacaccacactagcacagtgataacaaaggttttgactaactagctgcccaatagggaagtcaggattgttaagctgaatagtcatgaccacaaccccgatagcgagaagttcataccggagatc

SEQ ID NO: 87225 - DNA, 214 bp, Glycine max
  Clone ID: PAT_MRT3847_49775C.1
gaaggtctgcggggctgccctctcctgcctcatgcttgttgctgtccttggatcccaggcccagttcacaaatgatgcagagacagagttaatgatgtcaaagcttccactggaaaatccagtagttctgaacagctttcactttgctgctgactgctgcacctcctacatctcacaaagcatcctgtgttcactcatgaaaagttattttgaa

SEQ ID NO: 87226 - DNA, 128 bp, Glycine max
  Clone ID: PAT_MRT3847_49776C.1
ctccaaccaatcatttctgcctgtaccttcagcacggaatctcgtgtctttggcatccattgacaccgtgtaagcggctgcctatctgacaacatacctacctggttctggaaacaggcatattatgt

SEQ ID NO: 87227 - DNA, 302 bp, Glycine max
  Clone ID: PAT_MRT3847_49777C.1
tttgtttttaaacggtataggcacgacaagggcgcgacgtttgtgggcgaacagctctaactaagaaagtccaggaactatgggtgaccatgcctcacgaaaagaagctcgcaaaggcacacaaggactacaaaaaagagatggccgggacccaacagaacgaacagatagcacaagtcaacgaaagaaccaccgccggaatcgcaccagaagaggcaaataaccttccggcgactagtgccgttgcagtgactgcaacgacgccagcgaaagctgaattatgatgactgatgtaaaaggcc

SEQ ID NO: 87228 - DNA, 329 bp, Glycine max
  Clone ID: PAT_MRT3847_49778C.1
atcactgcgtctgatgagagagagcggaagagataggaaggaagagcacagcagtgatcagctccgtcatacgagggggagaaattttgtaggtcttggagttcgtgtatcgcatgttgccacattgctatcactcaaagcttgtcccgagtgcaatttgaatggatcggtagtcaatgcgtcgcggtctgcatctagaggatgattcccttcaattagattgtggcattggacgcacaggtcgtgacatctactcgattctcaccacacttctgcgtttatggtggactcattagatgcatgagcacttcgtgtatactatggctcac

SEQ ID NO: 87229 - DNA, 503 bp, Glycine max
  unsure (1)..(503): unsure at all n locations
  Clone ID: PAT_MRT3847_49779C.1
tacggctgcgagaagacgacagaagggatactccaaaaactgcagtattttagaattagtgagaattaggaaaaatcgattttgaatcagtctttttaaaaagtaaattgttttttatttaatctaaaatattttaaatataaataaaaatacataaatattttacataattatcaattattttgttaacggttattaatctttatcttgtgaaccatataattaaattatttatacaaattttataatttttcagaccctaattttactattttattacttaaaatattatataatattaaaatatataaaattaattcaacatgattcaacacgtattgaatcattaaagcttaaaccagtgtcttcatcaatttactcatcaattcaaatttaaaaatattggattatatattatagattcagtaacaaacaataaattactttagacaagacttcgcanagggtagagatatcaccaggtactacaaacattatcactg

SEQ ID NO: 87230 - DNA, 715 bp, Glycine max
  Clone ID: PAT_MRT3847_4977C.1
cttgcatgccttgctttcattgccaaaaaaaaacatgccaggaatcacttaaagaaaacgcatggaaagtattaataggatctacgtataaattattcacaggaaaaaaaaatccatctctctttccttatcagaaaatgctaataacataacacaattggtctaaaaaagtaaaattttgttttctggagggttaagtctgtaattcttgaacatgtggctttgttaaaagaaccgacctttaaataccgtttacatgatctgaagcaggtaaagactatagtactggtggaattgcactcacccccactctcattgacttcttctttgtcttctcttgagcataccatttattttcttcatgcttttttctgcttatgggcacttcagttccaggactttgatcacagtggcacactcaacttgtcttcttgccacttgatggatgcagcatattactatgacagaaaataacaatataatgtccattggtggatatatgcatgcagtcgcagcatatttagaagtacgtgcggaacatgagacaccagcgtcaggccgaggctgctgtgtaggaaaaagctcaacgctgctggacatgaaaaggcatatatgcggagaagctcgcgaggggcagaaaataatgctgctaatggtggaaaagcatcgaacacacacagaaaattgtctgtgcaacaagatgttgacaggttga

SEQ ID NO: 87231 - DNA, 382 bp, Glycine max
  Clone ID: PAT_MRT3847_49780C.1
atctcaccatatcgtcaatcaaaagactcctatctacgatgtctgctccccagttcgaccccaagaacatgatctacaggaacatgggccctaccggcctccgtgttcctgtcttcagctacggtggatggcttaccgtcggcggtacccagaagggtgacatcgtcaaggagctcatgaagacctgctttgacaatggtatcaacatgttcgacaatgccgaggcttacaatgccggcgagtcggagcgcgagatgggccgcgtcattgaagagctcggctgggatcgccgcgacatcatcgtcactaccaagatcttcttcggtaccgcccgcaaggacactggcaacacccgtggtctcagcaggaagcacatcgtcga

SEQ ID NO: 87232 - DNA, 442 bp, Glycine max
  Clone ID: PAT_MRT3847_49781C.1
aaagggaaaggcaaatttcaaaggttttggcaaaaaaggctggcaccctttaacaggggctacaaaaaattacattaccccgagttcctaattctcagcccataggaaaaacctttaaaccctcctaaattaaaaaacaccccaaattttcaaaaaaaaccaaggggaagggaaaactaataatagggcttttcaaaattaaccaccttcttcctaaaaaaaaagtttttgataaaagggccaaaccccgggaccctttccaacccttttaaagggagccaaatactttgaaattttcttaatggatccaccccggcaaaaaaaaaggggggtttcaacaaacttgggttatttcagcaaaaatacagagccaccttgcaaatttaagttcaaggttcacagaaaaaaaccccctttaaggctttcaaatttatttttaggg

SEQ ID NO: 87233 - DNA, 401 bp, Glycine max
  Clone ID: PAT_MRT3847_49782C.1
gctggagaaggagaaaagtgccccggatcctttcaggactcttggtctttggggagcgacccaaatcgactgagggaagagggaggaaaattccctggatccctgcagggttaatttattcaaaaaggaaatcgaaaaatactcaacatgcaaaaatcttgtggagaaaatgaaagaaaaccacagaacatgccaaaggctgaggaagaccgccctttggaagctgtaccacaggaggcagaaggaaatcctcaaccttctgaagaaggtgtaagccaggaagcagaaggaaaccttagaggagggctgactcagcctggtcagggatataaagaggactctcctgttaggcatttggaccctgaagaaatgataagaggagcagatgagttggaaaggct

SEQ ID NO: 87234 - DNA, 200 bp, Glycine max
  Clone ID: PAT_MRT3847_49783C.1
caacaagctcagaggcaactatcgaacgcaatacactggctagagtaacgagccttgtgggtagcatataggtttgatgcgactagtgggaatggagcttgagttgccttgaggacatacggaccaggttcaaattgcctgtgaaggaaggcttcaaatacagcatgcagagccaggatatgtgatgttaacatactgga

SEQ ID NO: 87235 - DNA, 263 bp, Glycine max
  unsure (1)..(263): unsure at all n locations
  Clone ID: PAT_MRT3847_49784C.1
acggcaacagcagctgccacctcgtcctttatggggacgcgtctnccggaggctcactccggngcggggcgagtncacgnccgattcggcttcggcaagaaaaangcccccgccccanaganagcnccnggggatcgggccgagnnaccganagacccctntggtatccgggcncnaaatcgccgtaattncctntacggganncntgttggagnttatgggntcgatccgtttttggctannganncctcngantatttttt

SEQ ID NO: 87236 - DNA, 281 bp, Glycine max
  unsure (1)..(281): unsure at all n locations
  Clone ID: PAT_MRT3847_49785C.1
accaattcagaactgaaaagctatgcataggacaaggaagatacatagaatggggtggaacacagcattttgtcaagcactgtgcaatattccatatttttccccactatggtagacaaccatttcgtggaagggcagcctattatcccacactgcatctaattttatgtcnctgtcacttctgtgatccattttaatttccaggccacaagacagtagtgatgctctgaaatgaaagtttgtcttcacaatatagaggcccaaaatggaggaaaactaag

SEQ ID NO: 87237 - DNA, 1284 bp, Glycine max
  unsure (1)..(1284): unsure at all n locations
  Clone ID: PAT_MRT3847_49786C.1
cgaagaatggaattgaaaaaaagaatctatatatattgccgcgcgccgtgggctacgacctgagctgggttgcagaatgcatatggctaattcctgagatggtaacagttgattttcgtttaattggggcttgtgtatattttgcactgttccgaacatgaaggaaaagaagaatactgcctctactctaaagcgcattttagtgaattgttcatctcaggcaaaagcatatgggagctgtgttgcagcgaaggttccagatattgaacgtgatatgtgtgtgaaggaatttgcggcactaaaaagttgtatgcagaatatgaagctcaaaaagaaggtttaagtgaacactctcttgtttccttgttctgggggctgctgaaagcaaactagaaagcttgacggttatgaatagaagtttttattaaagttctcaatcataagtctgagaggaaggtcctacaactttttggatgcctagtttttattttacatctgccactcattgtgtaaacgggacttaacatgactggaaaagcatcagcttcaaaacctaatataggtctgagtggatctgatggtctttcacatgcttacattcagtatccgccacttcggttcaatgttcctggatcaagtggattattttatgatgatggaaataagtttctactctctccaacagctgaccaggtaatgtgatacacagttatcaatctctgataacaacacagcagcaagcatgaaaacactatagcgggatagcaggaagcagggtggacactattttaaatatgataaaataatctaaataatttataatgcgcttagaaataaatatgcaaaaaaagcccacaattaaagaaattcatgataaataataactcacagtttatactattttttttttatctaatttgttatgttattttttatacacaatcatcatcaatttaggagcaataagaacatagtaataaagtcaagaagatggtagtgaaattaatagaaaaataacataacaaattagataaaaaatagtacaatttgaatataaagtttaacagaagaagaaagaatgtaacaaaggaaaaaaatagttaggtaaagtgtgaaagaaacataggtcaaaacttgaggttactttttttggaatagtcaacaaaaaagggtttcaaatcctattatgtttctgaaccaaaaaatgtattagaaaatggagaagtcacaattttaccaaaaaaagacaaacagtgnntgtttcgggggccaaaattggctttt

SEQ ID NO: 87238 - DNA, 141 bp, Glycine max
  Clone ID: PAT_MRT3847_49787C.1
gaaaacccggcccgaccgacgcgtccaatggatcttggttattttttataaaggggttgccaggcctttatttggaatttacccggggaagtttgttccagcaaaaccccccccaaacaaagtgtacatttataaaggggg

SEQ ID NO: 87239 - DNA, 270 bp, Glycine max
  Clone ID: PAT_MRT3847_49788C.1
cctcgagccgctcgagccgctcgagccgcttttgggcagagcaagagagattccgctgcagtactcaggttaccgagttgggctgacggcttcctgggcagtgcgatgatcatcaatgttctaacaacgctacctgcacaacggtcgacagggttgggttccggtgccagtgtatcgaaggtttcaccggagacggcttcaaaaacggcatcggttgccggaaagcttcggcttcaagttgcagtgcttcaacactaacgtccggtggat

SEQ ID NO: 87240 - DNA, 437 bp, Glycine max
  Clone ID: PAT_MRT3847_49789C.1
cagacacattcacatgctcacacacatacatgcagtatcttgcgggcaattgctgtactagtactactgacccactaaaataattttagaggtacgcagtagtaataataaatgttacatgcctaaaatggtaaaaaaaaaacacattttcccattaaaaaagcaatgtggcaaactcggggaatggatcctctcaggcgaggttttcgaattttgtcatgtgaaaatctccaccatcaaaacctcgagtctttattcttttattatttaaactttctcttccctatttttaattaaaggctaagatttcacatgacgataatgtgactagagaggatccaacccgacaatgtattgtcttatctgtagggaaccataatagtagtatttctctaatctatcttgtcactcaatttttttttctttatgtggagcct

SEQ ID NO: 87241 - DNA, 270 bp, Glycine max
  Clone ID: PAT_MRT3847_4978C.1
tatagactcatactggtccaacctttgaacttcggagagcgattcacgggggagggtataaagacgtgcggtggaggacaataaaagcgctgcttcatgtcacatggccttccattccaatgagaggatcaaccgagccatgttacatagcatgtcagtccaaaaacgtctatttatctcacaagggaattctcttcctatgagcatgtgagtgatgtccaatcgaaactacttcatgatcatgatcatgaaaaaggtaggggtcaagac

SEQ ID NO: 87242 - DNA, 1695 bp, Glycine max
  Clone ID: PAT_MRT3847_49790C.1
actctacatttattgtggctgcaagacagcgtcacggagagagaagggaaggaagagtgggtgttggtggttgtcctcctccctcctcatgggtatggcaaccctctcctcctctcttcctcttttccatcgctaccctaaccctaaccctaatccttcgctctttcgcccctccctttccctctccttctccttctctcgcactaaaccccgtcgtgccccctttctcgttctcgcttcctcttcccacgatttcacctccaactccaagaaatcagtgctcactgagttgatacaagagatagaacctctggatgttagccacatccagaaagatgttccgccaactacaacagatgccatgaaaaggactatatctggtatgctgggcttgcttccatctgatcagtttcacgttgtcattgaggccttgtgggaacccctttccaagttactaatttcttcaatgatgactgggtatacgctgcacaatgttgaatatagactttgtcttgagaaaaaccttgatatgtttgaaggagatatagagaagccaaaggcagaaagtacgaaagtggacttacaagggttgatgcatgacagtgtaaatgtaattgactttggtagagataagagcttgtcttctaaagttgaaaagcttcatgaggacgctgacattcaagaacttggtgacatatctgcagaagctctgcaatatatttttaatctgcaatctcgcttgtcttccatgaaaaaggagctgcatgaagtaaagaggaaaagtgctgctcttccacgcgtccggtttgttggagaggaaaagaacgatttattggattacttgagatctcttcaacctgaacaggtagctcagctttccgaatttacatcccctgagcttaaggacaccatcctctttgttgtccatggtctccttgctaccctttctcctaagatgcattctaaaccttccaccatctcagaaaatacaacagttggagcaacaaatgttgggaatgaggattgtgctgaggttgttgagaactctgctcatcaatttcagcctgttgtttcattaactcgggactatcttgctcgcctgctcttttggtgcatgcttttgggacactatcttagaggccttgagtgtcgattggatttgacagatttgctttccttgacaagtgatcctgagaatgatgcttctggcagtcaaccgattacttgaatgtgcatgcttttgggacgctatcttagaggccttgagtgtcgattggatttgacagatttgctttgcttggcaagtgatcctgagaatgaagatcaaagttcggtggttcaatatgtatatagacgtgttgtttcaacctgatttttgcgatacagactcaagtaccaatcacttctgctaaggagttatctttgcttactgaagaatattgcattcctgccatgtaccaattctcggtctcttccagtgttagagcgtcggtaggatcgaagatggttggcatgtagccatttgttttggctgggtgataatatcttaatagaatatggaaatgttgtgacgaactctgcagtagcagttctatttaaataaaacaatttagttaggtgatctatagattttattttccacttatatctcatttgatgtcttgatccgggtaataaagagcaaataattttatt

SEQ ID NO: 87243 - DNA, 349 bp, Glycine max
  unsure (1)..(349): unsure at all n locations
  Clone ID: PAT_MRT3847_49791C.1
tccagctgtccgaacagctgcgagaggacgacaganaggcaagatggtgtttcttatgtgctacaacttgacagatttaccaatggctataaaagctgatatcttattcaaatctatatcattctttgaggagatcttccatttgagtgaccaaaccaactagtatatggatatatgtatcttgatagatctctctatatatatgtaactaaattaggaatctgagaaagacaattagtcgatccatcacacgagattgccaacatataacagatctacccgattctttgatttgttagggctcctggccatccggcgcaagtttcggatttaataccgatattttatc

SEQ ID NO: 87244 - DNA, 386 bp, Glycine max
  Clone ID: PAT_MRT3847_49792C.1
ttctctagacggccgcttttttttttttttttttttttttttttttgcctgctaggggtgatattgtccgcatctctcctggccaatataggacttctccggcttcctgcctagtctcaatctccagacccacgaatgtctgttacttccacaaaggccacacaaaaaagggccctactgggagcctgcacatggcaacactttccatccttgcgaggcttcaaactggctatttgactgtgcacgaccaacttgcggggttaaactcctcatgatctgccccgtctttttttagccctctaacggaggaaatttgttatctccccaatgttgcccaaaatcacttccaaaccgaccttggtctgttatggtggggttctcctccc

SEQ ID NO: 87245 - DNA, 211 bp, Glycine max
  Clone ID: PAT_MRT3847_49793C.1
cccaataggaaaacaacactgagaaatctgggaagttttaaaggcagttcctcctccttcaccttcttcttccatggactttaactttgatatcaactgttcctctccttacatcactgcaccttctaaccctcaacgctttatcaacttctactatattactcccactatccctactctcatacacttctcttctttcactcctaacacc

SEQ ID NO: 87246 - DNA, 239 bp, Glycine max
  Clone ID: PAT_MRT3847_49794C.1
aggtgcaaggagtaagattctggtgaggagttgccgagctgacgtgatgaagttgacattatttttggagagagttgtgttttgtaatcaactcctccgtagttggtttaagttttattttgttgagttaaagatgtaaaacttggattttaattatatttatgaacagatttaatttccattatgcgtatgatgtgtaacaagttactattcctatataattatatattcacttaagt

SEQ ID NO: 87247 - DNA, 197 bp, Glycine max
  Clone ID: PAT_MRT3847_49795C.1
tttactcttgggcgatcgcgagcttgctggcgatactctaatgatagaccctcgtgtccgacaggctcatgcgaaaccttctgaggatgcgaactcctgtgcacgatctgcactaccacttttcctgccgtaggtcgacaggtgcatagaatgctggaaaatacgcatgactcctgatgttgagaaaggtctgacta

SEQ ID NO: 87248 - DNA, 1027 bp, Glycine max
  Clone ID: PAT_MRT3847_49796C.1
tacggctgcgagaagacgacagaagggggaagaaaaagagcgtgaaggtcgggggatagatagggtttgcctttaccctgctttgctctcggtggtgtcactgattggcgttgccaaatttcctttggcttcttcttctccgaatctttcagaatctctctctcatttatttttgaattgaagtttctttctcattatctaaaatatcctcgcgcgtgttattagcgatgccggaggaagaagtagtggagctcaagttccgtctctacgatggatccgacatcggtcccttccgttactcccctgcctccaccatcgccatgctcaaggaccgcatttttgcagactggcccaaagacaagaagattataccaaaagcagcaaatgatataaaactgataagtgctggcaaaattttggagaaccacaagacagttggccagtgtagagtaccttttggcgagcttcccaaaggggttataaccatgcatgttgtggtccagccatctttgctcaaagcaaaaacagagaaaaaagttgatgaggtgcccagaaaacatatatgtgcatgttcgatattgtgagaatccgttgtcgtcatcatcatcatgaagagttaagctgctgatctcgccttagttgtatgctgggatatccgaaggtcatggatatgcgtagctgggaagacaataatttgtaaaaaagtcccaatccccatcatagttgagtgttgttggagggcattcctgtgtagcaatgcttgccagtgatgattttctcatgtcctataaaatggttggatgtttgatgtatcaaggtaggtgcagtctatatcataatatcaaatataatattatagaaaaaaaagttcgatccctattttctaaggatattcaacagtattcccccccggaatgatcaaacccgtttcttgtggcattcttgtcttgcatttggatcatcatggatctctacaatcggaagaggtttttttaaagttaagaggaaattatttttcccagatttt

SEQ ID NO: 87249 - DNA, 148 bp, Glycine max
  Clone ID: PAT_MRT3847_49797C.1
tctcgagccgaatcggctcgatacggctgcgagaaggcgacagatactgatggctccatcaacttgaaaccagtaacggtgactgcctgcaccttaaacaggttgaagcagagcatgatggtatacttttcgccatgaccatgatgtc

SEQ ID NO: 87250 - DNA, 582 bp, Glycine max
  Clone ID: PAT_MRT3847_49798C.1
acccacccccccccccccccccccccccccccccccccccctttcctttttttttttattcaatatttccaaaacccaaaaaaacataaaataatacttaatcactaccttccaacttccatccatttattatgcaaaataaacaccgggcccccaccaatttccattttttttttaaacttttgaacattttgacttttttttggatttaacccaagccattcaaatttcttttgacttaagtcaccggaaacctggaaataaagtttttggtgttctttttttttttgaaggtggtggtgggtgttcctcctcactactatacaacaggggttgcacccccaagaaaaaaaggtttaaaccttttctcccaaacacccttaattggcggggccacggggttgcccccccttttttttacctccaccaccggaagctccgccgtgagccggtaaacctccaccccaatcccaaacctcccattaattcttttcaactccaccccaaattttttttttcaacgaaccggcatccccggcggcgcccccgaattctccgccggcttcaaaaccctttccgggg

SEQ ID NO: 87251 - DNA, 388 bp, Glycine max
  unsure (1)..(388): unsure at all n locations
  Clone ID: PAT_MRT3847_49799C.1
tactgtcttgatcttcctaattgngatatactcccaggttttcgtgtgggctttgcctgtangatcaaagaatgctcgtggaaagcagggttcatatccaatcaatttgttttttccttccaattggcattattttttaggctggccctgggttcaaaattttattattttcccaatggtttccccgaaataaaaccggaaatttttttctgaattatttggaaaatggagggaattttatatttgggggggggcgccttttcttcttggggggtttttttttattttttttcccccccccccctttttttgtttgggcgccaaacccttcccgggccgggtgatttttggggtagtatttttattccgggccggtgtttttctaaaa

SEQ ID NO: 87252 - DNA, 215 bp, Glycine max
  Clone ID: PAT_MRT3847_4979C.1
cacgcatccgtaaagttccaagacgacagaaggggaaggtgcaatagtttggtgtgagctataagctagtttaacgttaggagaatatgaagtcgttggtttcctcggttgctgcagttagttaggaagcaattgcatgccatggcacatgttaccacacgttccctctccgaatgataactcgcgttggcgagcgttcttctgaggtaaaatgc

SEQ ID NO: 87253 - DNA, 553 bp, Glycine max
  Clone ID: PAT_MRT3847_497C.1
gaaatctctcaatgataataaattcgtttatcatttcatacaacaagattcttcttctagcctctctggagtttttgatgcgtcttctagtgcctcgttgaaaaatgatttagatttcacacttagaagtggagatcatgtggtttccttttccaagcgtttacgaattcctgggagttcttccactgcacatgatctcagtcagcaggtttggagaattgataaggatgaatatgtgacttcatttgctattatgaggtttaatcttgtacagctttttctacaaaatgatcaaagtgctcatctgcggaggatgattgttgatcttgaggctcctagatttgacagtggatctttagttagtcaggatccagcgatatcctatgtttggtcagagaagagtttgaatgatgaccaacgtggagcaattctcaagatacttacagcaaaagattatgcacttatattagggatgcctggaacagggaaaacatccacattggtccatgctgtgaaagcctttgtgattagagggacatccattttgctaact

SEQ ID NO: 87254 - DNA, 496 bp, Glycine max
  Clone ID: PAT_MRT3847_49800C.1
agtgtaaatatgtcaaatatattattatgtcatacattagttaaataagtaccaaatttcagtagttaagttacatgtgtggtaaatctaatgaatagtgctacattagctaacaggcaacgcctcagttaaaatacaaacaaatcaagggatcacttgtgttgaagattaagtgattaccataatctgattacaaccaaattaagcacgattaactaggaagctgatgctccactctaccagtttgatcgatcaaagtgtcaacttccacataatgctcttgaaacattcgctggttcaagcatgttgaagactacaacaggtattccattctcttcacaatatgccagtgccatcatgtccatggaggtgacgttcctagaaacaatttccctaaaggaaatgtgatcgagtgttacattatcattatggggatggcagtcaaagacaccattcacattagtaactttcagaaccgcatcagcattaacccaga

SEQ ID NO: 87255 - DNA, 309 bp, Glycine max
  unsure (1)..(309): unsure at all n locations
  Clone ID: PAT_MRT3847_49801C.1
gttagtgtaattagtttgcttattatggacattatccacggacacctaatgattataaggagaaagtaagacaattatttacaaaataaggcttaaatactctaatttcttggagttatcaatttcagcatcaacaggccaacgaatcccttacaaataaaataaaataaaatacaggctcatctcatattaatttggaacttaaaatctgttgaactgacctatttctcaaatcacaggatgggagtttgtttgaaactgtatggaatcattcttaaatcaagagagcctttttttcaaaanaaaaaa

SEQ ID NO: 87256 - DNA, 820 bp, Glycine max
  unsure (1)..(820): unsure at all n locations
  Clone ID: PAT_MRT3847_49802C.1
atatgacagtttcaaagnnnntgatggtgtggcatatctaatctactcctctgaagacaatagtgaactgcacatcggaccccttactgaagatttatctcaacgtgacatctgtcatgagaaggattctggtgggacagcatagagaagcaccagctttgttcaagcatcagggcacatattacatgatcacgtcagcctgcactggatgggcgccaaatgaagcattggctcatgcagctgagtctattttggggccttgggaaacagttggaaatccctgcattgggggaaacaaaatgtttaggcttacaaccttctttgctcagagcacttttgtggttcctctacctggctttccgggttcatttattttcatggctgatcggtggaatcctgccaacttaagagactcgagatatgtatggttgcctttgatagtggcaggacctgttgatcagcctcttgagtacagttttgaattcccattgtggtcaagagtgtctatctattggcacagaaaatggagactgcctcaaggctggaacggcttcaaataatgtagcttctctttgtacattgtaatatacaaagatttggtatacggttatatagaaacccgagtctcaataatatgctcactttaatttagggtaagctgagaatagtttgagggagcgcatgtatacgagaaagattatccacttgattggaattttgctaataatccagcattgttgatgagttgtgtcatgacatcatgtaatgaattgttagttatgtaaatgattctttcatgtgtgtattgataactaaaaaa

SEQ ID NO: 87257 - DNA, 2048 bp, Glycine max
  unsure (1)..(2048): unsure at all n locations
  Clone ID: PAT_MRT3847_49803C.1
ggtccggaattcccggctcgaccacgcgtccggaacgagggtaacgaaaaccctttagaggagtttggcacactggaggagcatgtgccgtttcatgaagagcaacatgcaatggtgcatcatcagcaagggcaagcagaagaggaagatcatcaggttcctttttgtgaagagatccaaggagatgaagaaggtggtgatggtgttggagtagatgatgagatgagtaatgtgttcttggagtggcttaagtctaacaaggatagtgtctcagctaatgacttgaggaatgtgaagctcaagaaggcgacactcgaaagcgcggcgaggcggctagggggaggaaaagaagccatgaagcagttgctgaagctgattcttgagtgggttcaaaccagccatcttcagaataagcgccgaaaggagaataatggtagtagtattagcagtgtacttcaggcacagtttcaggatcctagtggccagaacaacaaccagaatacacaaagtggttcatttgcacctgaatcaaacacttgtttcaacaaccaaacaccatggttgagttctcaaacttttgcaacagatcaggctcctctcatggtgcctccacagcaatttccacaacccatggttgggtatgtgggtgacccttacactagtggtgctgcttcaaataacatatcagccactcataaccataacaacagcaacccttatcaacctggtgcagaacaataccacatgttggagtcagcacattcatggccacattctctgttcaatgttgcttctaactatagtcagtcttttggggacaataatggtcttaacccacatgggggtttcggtggtggaggctatggcaataaccagtacccttatcagttttttcatggccctggtgataggttgatgaggttggggccctccgcgacgaaggaagcgaggaagaagagaatggcaaggcaaagaaggtttctgtctcatcacaggcatcatagtggtaatcaccagaatcaagggtctgaccctcatgcaagattggggggtgataattgcaacactgctttggctgcacctcatcacgcaaatccttcagccaattggatgtactggcaggctatgattggcggcgcggcaggtcctttggctccggtgattccggccgagccgccggtggtacaaccggtcgtggaccggtcggccatgcagacacagaattgtcatcagaatcgagttgcatcagataggagacagggttggaagcctgagaagaacttgaggttccttctgcagaaggtgttgaaacaaagcgatgtgggaagtttggggagaatagttttgccaaaaaaagaggcagaaacccatttgccagagctggaggcaagagatggaatttccataacaatggaagacattggaacttcacgtgtttggaacatgcgctatagatactggccgaacaacaaaagcagaatgtatttgctcgagaacactggtgactttgtgagagccaatggactccaagagggagatttcatagtgatatactcagatgtgaagtgtggcaaatatatgataagaggagtgaaagtgaggcaacaaggtgtgaaaccagagaccaagaaagtaggaaaatcgcagaaaaaccagcatgggacagggacaaatgcatcaactacagcttgtactgctgctaataatggcacgccatcgtcaccgaaaaccaaagctgaaaaaagtagtaaattaatataatacatagaatatgtatgtacaatatatattatattatattatatataataaaataagagactctgaagtctgaacacggtgctcacataatgttgaggagttttagcatgccctgcaatggaggctgtcaaggatttgtataacagtattttgggtatatttcttttcgtagtttattttgcgattgttattatgtgaaaatgttgtatgtgtttaacttggatgtacatgttacgttattagtggtctatgtgatgttcatttaagactgaaaannnnnnnnnnnn

SEQ ID NO: 87258 - DNA, 431 bp, Glycine max
  Clone ID: PAT_MRT3847_49804C.1
agacatgatatgtagtcgcgaaaatgcgaaggtcaacgggggagatacgaggatctgcactggcaagcccttaatgatggcctatgcagagcatacgggttgtgtatatctgcatctataccagagcaccgtatcagcaccacaactatggcctagaggcatagtaactattctataccttccatagctcagttatcacacattttagatgccttgctacatcaggcttatactgtcatgcagcgtgcagaaactgctcagggaaaatttcatggaaggctgctaaatatctgcacacaggggctctaatgaatgtacacagggatcaaatgtggtggttctatccaattcactgagtatgaatcataatcttatgggtgtaatgtttgctttccatgcgacagggctgtctaacactattaatactccta

SEQ ID NO: 87259 - DNA, 2893 bp, Glycine max
  Clone ID: PAT_MRT3847_49805C.1
ccggtccggattcccgggtcgacccacgcgtccggatatcccttatccctttgcttcctcccttggatccgcgcacaatagcagatcttcttttcccctttttcacttccgaaactatacacacatcacatacctaaaaaaaaataaaaatcatacccctatcgtttctctcaccctgtacctctatctgtacgtctttatctactttctctctcttctctctcactccaaacaccccatacctataccatacctgaagccaacagaattctcaaaagggttttcaaagtttcaacctttgagggtggttttctccacttttttctattttttttctttctgctctttgaaagatcttgagttttgttgagatggagtgtgaagttgaattacaagggggagatctgcatgcaggggtggtaactgagccaaaccctattggttttggcaccatggaaaacgaacacactttggcggttgctgagagagagatgtggctgaacagtgaccaagacgagttcctaggagtcaatgatgcttccatgttctacgccgatttccctcctctccctgatttcccttgcatgtcatcatcatcatcttcttcttcagcactaccatttcctgtgaagaccatgacatgttccaccagaaccacaacaacaaccaccacttcctcttcttcctcttcctcatcctgggccgtgttgaagtcagatgctgaggaagatgcagagaaaaatcattgcaaccgctacatgcatgaccaacttgatgcaactttgtcttccactgcttccatggaggtttctcaacagaaaaacctcgatcctgggcttggtggccctgttggtgagtgcatggatgatgttatggacacttttgggtacatggagcttttggaggccaatgatttcttcgaccctgcctctatctttcagaacgaggataacgaaaaccctttagtagatttcggcacactggagcagcatgtgccgttgcatgatgagcaacatgaaatgttgcatcatcagcaagggagaacagaagaggttgatcatcaggttcctgtgtgtgaagagatccaaggagatgaagaaggtggtgatggtgttggagtagacgatgagatgagtaatgtgttcttggagtggctcaagtctaacaaggatagtgtctctgctaatgatttgaggaatgtgaagctcaagaaggcgacgattgaaagtgctgcgaggcggctagggggaggaaaagaagccatgaagcagttgctgaagctgattcttgagtgggttcaaaccagccatcttcagaataagcggcgtaaggagaataacggtagcagtattagcagtgcacttcaggcacagtttccggatcctagtgtccagaacaaccagaatacacaaagtggttcattttcacctgaatcaaacgcttgtttcaacaaccagacaccgtggttgagtcctcaaacttttgcaacagatcaggctcctctcatggtgcctccacagcaatttcaacaacccatggttgggtatgtgggtgacccttacactagtggtgctgcttcaaataacatcacaacttctcataatcataacagcaacaacccctatcaacctggtgcagaacaatatcacatgttggagtcggcacattcatggcctcattctcagttcaatgttgcttgtcactatagccagtcttttggggacaataatgttattttcccacaggggggttttggtggtggctatggcaataaccagtacccttaccagttttttcatggccctggtgatacgttgatgaggttggggccctcggcgacgaaggaagcgaggaagaagagaatggcgaggcagagaaggtttctgtctcatcacaggcatcataatggtaatcaccagaattcagggtcagacccacatgcaagattggggggtggtgataattgcaccactggtttggctgcacctcatcatgcaaatcctacagccaattggatgtactggcaggctatgacgggcggtgcggcgggtcctttggctcccccggccgagccgccagctgtggaccggtctgccttgcagacacagaattgtcatcagagtcgagttgcatcagataggagacagggttggaagcctgagaaaaacttgaggttccttctgcagaaggtgttgaaacaaagcgatgtgggaagtttggggagaatagttttgccaaaaaaagaggcagaaacccatttgccagagctggaggcaagagatggaatttccataacaatggaagacattggaacttcacgtgtttggaacatgcgctatagatactggccgaacaacaaaagcagaatgtatttgctcgagaacactggtgactttgtgagagccaatggactccaagagggagatttcatagtgatatactcagatgtgaagtgtggcaaatatatgataagaggagtgaaagtgagacaacaaggtgtgaaaccagagaccaagaaagtaggaaaatcgcagaaaaaccagcatgggacagggacaaatgcatcaactacagcttgtactgctgctaataatggcacgccatcgtcaccgaaaaccaaagctgaaatttgtagtaaattaatataatacatagaatatgtatgtacaatatatattatattatattatatataataaaataagagactctgaagtctgaacacggtgctcacataatgttgaggagttttagcatgccctgcaatggaggctgtcaaggatttgtataacagtattttgggtatatttcttttcataatttattttgcgattgttatgtgaaaatgttgtatgtgtttaacttggatgtacatgttacgttattagtggtc

SEQ ID NO: 87260 - DNA, 192 bp, Glycine max
  unsure (1)..(192): unsure at all n locations
  Clone ID: PAT_MRT3847_49806C.1
gtcgcatgcacncgtacgtaagctcggaattcngctcnngnanncncnncnncngccntngantnnnagacttncgnanaaccgngaannattncagattccgagtactcntgcggganttaccantctntgncctanagggggctcgtcaatagaagcttgtgtcgatgtacatccntacacgatntcatt

SEQ ID NO: 87261 - DNA, 1010 bp, Glycine max
  Clone ID: PAT_MRT3847_49807C.1
ggagcttgttgatgtcaagcttggccaagaatatgagcttgttgttacaactcatgccggactttataggtacagagtgggagatatactaaaggtatcaggattcaagaacaaggcccctcaattcagctttgtttgtagaaaaaatgttgccctgagcatagattccgacaagactgacgaggttgagcttcagaacgcaatgaaaaatgcagtgacacacttggagccatttgatgcacacgtgagtgagtacacaagctatgcagacacaaccacaatcccaggtcattatgtcttgtactgggagctcaatctcaaagggtcaacccctattccaccttgtgtgtacgaggattgttgcttaaccattgaggagtcactcaacagtgtgtatcgccaagggcgtgtgtcagacaaatcaatagggccccttgaaatcaagattgtggaacaaggcacctttgacaaactcatggactatgccattagcttaggggcatcaattaatcagtataaggcaccaaggtgcgtcaagtttgcccccattgtggaattgttgaactcgagggtaacatccaactatttcagtcctaagtgtccaaagtgggttcctggacacaaacagtggatccatcagaattgaagaatctaaacatggcacattattatatgttttcatgcgagagtgaatctttttatgttgaatttttatgtggtcatgttttataaaaaaaaatgtatttatctctctctgtacacaaattttaattgtctcatctatttaatttttaagaagaaagagatacgcacattttttttaccagatatgatcatataaaaattaacacatgatagtttattctaatagacatgttagggaaaggttaattactctatttaggtcaaatctatgttttaacttgtgtaatgtatatagtgcgtgattaatcgtgacctttatcttagccactgtaaaattttatccatttcaatagctttttttttta

SEQ ID NO: 87262 - DNA, 365 bp, Glycine max
  unsure (1)..(365): unsure at all n locations
  Clone ID: PAT_MRT3847_49808C.1
gattcatatgatagatattggtaatgactattttcttgtatactttcctcatccggaggacaaagaaaaagctcaatcagagggtccttggtttgtgtatgaccattacttggttgtgagagactagaaccctaattttcactcggatttggaggccattgagaaagtggcagtgtgggtgcgattttcaggattacctattgagtactatgactacaaagtgtttgttaccaatggagaccacattgggagaacagtgagagtggatagaaatatgttatcgcaactttctgttacttctcattccaaatatcanatttcaatccattcgttcaaacattctgacccattatatcatccgaaca

SEQ ID NO: 87263 - DNA, 445 bp, Glycine max
  unsure (1)..(445): unsure at all n locations
  Clone ID: PAT_MRT3847_49809C.1
gaagcattagcaaaagcaagaagaactagtctaagcagaaaaatggcctcttcagtgatggcatnctgtggnccctcaaacctgcccnctttcactgttnagaagtncctcagttangaggccttcccttccctctcaaggaanctcctcttcattcagagttgtggccagtggtggcaagaagatcaagactgacaagccttatggaattaatggtggcctggctttnatggaaagagttgatgcatctctcccgaaaagaaagggaaagggcgttttcccccttgtttacaaataccgggcttatgtggatgggtacacacctatctacgacccccaggactgggctcccaccggtgatgtctactctggcggcacgacatggttggctatctgggctgtgactctaccttgtcttcttgctgtggggcacttctttgcttac

SEQ ID NO: 87264 - DNA, 254 bp, Glycine max
  Clone ID: PAT_MRT3847_4980C.1
gaactctatatacatctcaatttccacgctctcatgttatggattaatagtcaaaaaacctctaccgtgcctgtgtgtgctatgggcgcacagtatgctcgattaccttcacgggctaatgtatgatgtgtctgaactttatatattttgtaatagcccaactcgcgtatgacttctgccgtgcattgttgtatccgtactatgatgatcgccactcaatctattataagttcccttagggttctggatcttgc

SEQ ID NO: 87265 - DNA, 147 bp, Glycine max
  Clone ID: PAT_MRT3847_49810C.1
cacttctacatactctgtgaggatcatggatctcgcagtagtgggtttacttggtacagcatcacatcccactcaaatttcaggtccagctataggcaattggtccgtagcggctcggcacattcctagagaagtggaggtcgcgat

SEQ ID NO: 87266 - DNA, 464 bp, Glycine max
  Clone ID: PAT_MRT3847_49811C.1
tttcgtttacgcgtacgcccacgcgtacgaaagaaaagaacactatgagctggccacagacttagagaatcaaattcttatccactcttagaaaattagcggaacactcacctatatgatataggacaacgagtcaaaatgaaactgaaactgtcactatcacagaactctgaggaatttcaagtacaagcaggtgaaaacttggattaggacacccacaaagctagctggaaaaggaaatcgggggtagacaaatctattgaaatccttaatataactctatatatctcacagagccggatagccgcaaaaaggggtcttatttgaaaaacacttggggcggggagcaaatgatcgatatctaaaaaacatctggagaaaaaaggctcaactgagaaaacagatattactcgcagagattgggacaatttggctgttaaaacaccaataacagctaagttaga

SEQ ID NO: 87267 - DNA, 313 bp, Glycine max
  Clone ID: PAT_MRT3847_49812C.1
accgcccacgcgtcaccccactcgttctctcacgcttccacccactcgtccttccacgcattcgtgcactcatcctaaatattgcatggtatatatcgcctgaagacccttctctacttgcgtcgagtcaagtagagcatgtatagtggcacacacaagactctgacagaaccacttagaccccttacggacaccacaacagtctccttggctaatgtcaacagtgattacaaggaatcggacattgctatagttagagcctcatatcatcgttaacgtccagctaatgaaaaacatataagatctatatttt

SEQ ID NO: 87268 - DNA, 479 bp, Glycine max
  Clone ID: PAT_MRT3847_49813C.1
ggatggagtttgggttgatcgcatccctgcttggatcaaatatgccactgttgatcctaccagatttgccgcaccatatgatggtgtctactgggatccaccactttcagagaggtatcagtttaaatatcctcgtccaccaaagccaaaggccctgcggatatatgaggctcatgtggggatgagtagctttgaaccccgcataaactcttacagggaatttgcagatgagattttgccccgtattcgggcaaataactataatacagtccagctgatggctgtgatggagcattcttattatgcatcatttggatatcatgtaacaaattttttcgctgtgagcagtagatctggaacccctgaagatcttaaatatctgatagataaggcccatagctaggtttgcaggttttgatggatgttatccatagtcatgctagtaataatgttactgatggactcaatggctttgatgt

SEQ ID NO: 87269 - DNA, 332 bp, Glycine max
  Clone ID: PAT_MRT3847_49814C.1
atccttaaaataaaaaaccaggggtttataaaaaaacgggactttttttaggttacccccccgcaaaggcgtcttccaaggcctttgggggggcgaaaaggggggggggccccttttgggggccccaaggttcttcccaagggcggaaaccccaagccccaaaaaccctttacccaattggggcacaatttcccggggcccttggggccccaaaaaaaccagggggtggcccggggagggggcaaccatctgggaccccgccgggtcagggattgaactggggggaaaaacttcgggggagaaaccactggggagcccccctgggggggccc

SEQ ID NO: 87270 - DNA, 543 bp, Glycine max
  Clone ID: PAT_MRT3847_49815C.1
acatacaaaaacacatacagagaaaaaaaaattcaaatccaaagaaaggaaaaggaaagtaagaaaaaaaaaaaataaaaaaaaaaaaaaaaagaaaaaaggtttaaaaaaaaaaaaaaaaaaaaacgtcgtgggggggggcctttttaagattccaagtttttgatcgggggggaggaaacttattttttttttaagtccatgccaaaaaaaaattcccgggccggtgttttataacagctgggtgggaaaaaccctttttttaaaaaattaaattgctttaaagaaaaacccttttttccaatttggagtttaagcaaaaagggccctccatattctttttccaaaaaatttgccccctttaaatgggaaatgggaacccccttttaacggccctttataccggggggagtggggggttttccccatattttataccttttttttttttaaaagggctttataaaggccgccccttttttttccctttttttacccttttttttttttccgcgcaacaattttctggcggttttttttccc

SEQ ID NO: 87271 - DNA, 659 bp, Glycine max
  Clone ID: PAT_MRT3847_49816C.1
atcatttgtattgtaatctcgtttaatcactgttaaaacaaaatctaaccgatcgttcacgttgtaaccacggttaaaccaaaaagaggtaaaataataatataataatcaaaaaatatcttttagtaaaataaaccaaaaaaaatcaatcggacgttttctctttgggatttctcattcttaattgaattgactaaataactaaagtgaaactaatgctaaaatcaactcgcctagtcaagctcgtccacaaaaaagtcactaaaaagggtttgaaagtttatcatttcaattttttccttatcaagtaaatggatcatttttaaggtccaacaccttaaaatgatcacctttcaagtaaaaagaatcgcttgattcactcttaagaaagaactacgtaggtctgatttcctcttcgatggagggtacataggagcaaaagccccacttttgtcgacctcgtgagatggttagaggtccaacgccttagcttttctcaccaagtaaaatggatcattttaaggtccaacgccttaaatgaccaccttccaagtaaaaagaatcacttgattcgccccttttgaaagaactgcgtaggtctgatttccttatcacaattgaggaatacgtaggagcaagggaaacacctttgtcgcccc

SEQ ID NO: 87272 - DNA, 262 bp, Glycine max
  Clone ID: PAT_MRT3847_49817C.1
ggaaatgctgggacggctggtgcgcctgcaggagccggcccggaatgaccgaggcgaccgattcgtccgttaacgcggccccacacacggccgggggcgattgaacactgacgcaaaaatctcgatcatcaactcattcggagagcgagtccccgaaggccccacagccttaaaccaataagtccggacacggccacgcgaagaacggggaaaaggcctatcacctgctccacacccctaacacggctccgccttgcggatg

SEQ ID NO: 87273 - DNA, 613 bp, Glycine max
  Clone ID: PAT_MRT3847_49818C.1
aaacaatgaccatttctattgcctcatgacagaaatcaacaactttgtcaattctgattctgactgttaatatactattagtactaaaacgactacgactgcaactactacttaaccttaccttaccttaccttacctacaggaggcatacataactaaagcttgacattttacttgggttatcttttttttttcccctcacttttgtatcttgtcttttctttgtagtaaggtgtgtagttataagattgtgtagcattacttgttattgtcataacatctatggtggccaatttgagagttctgtgacctggggactactgcttcttgttctctctgtttgtgtctcttggaaggtagcccctagcaccagcttcggcagtaccagaactcggttcatttggggggtttggtcgaaccaccgtatacaacgcttccccccccccctttgaggtccatggcaggaggggcgatagaagatgaggattggttcatcattttgtttgattaagtgaatggtttcctcttgtagcactaaattactgaatgtaaactggagtcccaacctgttgttatatgaatttgtatgttatatatgtacctatgttatatt

SEQ ID NO: 87274 - DNA, 721 bp, Glycine max
  Clone ID: PAT_MRT3847_49819C.1
cccacgcgtccgtacggctgcgagaagacgacagaaggggatacacataccactgtacctcgttctcacgaaaaccttcaactaggaatccatcgagccagagtgttgtgttgctagtgcaagaggcaccaacatagatagatacatacgtgcgtgcgtacgtaggaagggtacgtacgcggtagtacacaacacaccaacacaccgttttgcactctgttctgatcatgagggcgcacaagatgggtgttatcgtccggatcactgttgctgcttcttaagcctttttcttttcttatgtgggttccccccttcccctttcgattttctgcactttagagagacaaccagacatggctggcagtaaccagagtgttgttccgttaaatacatgggtgcttatttccaatttcaagctgtcttacaagcttctcagacgtgacgatggaacgttcaatcgtgagttggcggagtttctggataggaaggtccccgcgaacgcaattcctgttgaaggggtgttttcaatcgattatgttgatagaaacgcgggtttgttttaccgtgtgtacttgccagcctctggaaacgaggctcaatggggtatcaaagaccttgagaagcccgtgagtactacagaaattgatcctgtgatcatattcttccacggaggaagcttttcgtattcttcggtcaacagtgccatctacgacaccttctg

SEQ ID NO: 87275 - DNA, 453 bp, Glycine max
  Clone ID: PAT_MRT3847_4981C.1
ttaaaagaacaaacttagctgatcaaaattaatatgaatgtgaagagtaggttacatgagagaagactgcaaaccatttttgacatgcaagactgccacaggaattgtctttaactttatactcattctaattgtacattccttctgtatatatttcaatcattccaaagactgatggggtgctggcaaccttcctgacttatgtcgtgttccactcttcatatatcaatttatggacgcaaaacttgatcttttgctttcttgttgctgaacaagggatggagtcattgcatttaataagccatttatagatagcatcaaacaagttttgaagggatgaagattggataggactgatcgcaatattagagagacagtcttatatataacttgaagtgtggaggtaaatactatgtaggctatatttttccatagagttaaaatgattttttt

SEQ ID NO: 87276 - DNA, 377 bp, Glycine max
  Clone ID: PAT_MRT3847_49820C.1
cttggggggggggggggggggggggggggggggggggggggggggggggggggggggggggggggggggggggggggggaataagggcaaaacaatttggtgggtttaaatgaaagttttgccggaaaaacctaagcgggcgtgatagggaaaaaccggttttttaaaaaactggggccctcccaaaaacggttttacttttttaaaggggcgggaaaaaaaaaacaaaggggggggggtaaggggggggaaatcggaaaaataggtgggggtaaccttaggatcccgtttgggactaataaaggggcacccccccctagttttcccggggggggatgggggcccactagggctccttgggaaagttttttggcccc

SEQ ID NO: 87277 - DNA, 2203 bp, Glycine max
  Clone ID: PAT_MRT3847_49821C.1
gcatggcaccgcgtaccccgtaagctgcggaatgagagcggaagacagagtcgttcttttgtgtttgactctctctctctctctctctctttcatatcttatcgctccccgcgtcctctctctgttcccttcttctgtctcatgcacacaccactgtaccttgttctcaccgaaaccttcaactaggaatcgatcgagagtgtcttgtgttgctagtgcaagaggctccaatatagatagatacatacgtgcgtgcgtacgtaggaagggtacgtacgcggtagtacacaacacacgaacacgccgttttgcactctgttctgatcatgagggcgcacaagatgggtgttatcgtggggatcactgttgctactgcttctgcttcttaagccttttcttttcttatgtgggttccccctctttcgattttctgcactttagagagacaaccagacatggctggcagtaaccaagtcaatctcaatgaatctaggagtgttgttcctttaaatacatgggtgcttatctccaatttcaagttgtcttacaagcttctcagacgtgacgatggaacgttcaatcgtgagttggcggagtttctggataggaaggtccccgcaaacgcaattcccgttgaaggtgtgttttcaatcgatcatgttgatagaaacgcgggtttattctaccgtgtgtacttaccaacctcaggaaacgaggctcaatggggtatcagagaccttgagaagccgttgagtactacagaaattgttcctgtaatcgtattctttcacgggggaagcttctcgcattcctcggccaacagtcacatctacgacaccttctgccggcgccttgtgaggatttgcaaggctgctgtggtgtctgtgaactaccggcgatcaccggagcatcggtatccttgtgcctacgacgacggctgggcggcattgcggtgggtgaagtcgagagcatggctgcaaagtgggagggaggccaaggttcatgtctacttggcaggggacagttctggagggaacattgttcatcatgtggcagtgagggctgcagaggaggaaattgaggtcctggggaatattcttctccaccctttgtttggtggggagaagagaacggaatcagaattgagattggatgggaaatactttgtgaggcttaaggatcgtgattggtattggagagcttttctacctgaaggagagaatagagaccaccctgcttgcaacccttttggaccaagggggagaagcattgaaggactcaaattccctaaaagtcttgtttgtgtggctggtttggatcttctgcaggattggcaattggcatatgcaaaaggtcttgaggattgtggacaacaggtcaagcttctttttctcaaggaagccactattggcttctacttcttgccaaacaatgaccatttctattgcctcatgaaagaaatcaacaactttgtcaattctgattctgactgttaatatactattagtactaagacgacagacgactactactactactgctactacttaaccttaccttacctacaggaggcatacataactaaagcttgacattttacttgggttctcttttttttttttctctcccccacttttgtatcctgtcttttctctttttctagtttgtagtaaggtgtgtagttataagattgtgtagcattacttgttattgtcataacatctatggtggtcaatttgagagttctgtgacctggggactactgcttcctgttcctctctgtttgtgtcttttggaaggtagcacctatcaccggctttggcagtaccagaactcggttcatttggggggtttggtcgaaccaccgtatacaacgcttcagccccccttttaacgttttgaggtcaatggcaggaggggagatagaagatgaggattggttcatcactttgtttgattaagtgaatggtttcctcttgtagcactaattactgaatgtgaaccggagaatatcccaacctgttgttatatgaatctgtatgttatatgtatacctatgttgtataaatgtcttggatgtttggttttgctttttagttggattctcctcctccaatatgttgtgcttgtctgtctctcgtgaatcctgctatggttccaattaagcagtttcaatttattgagttgttgaagatgtttcatt

SEQ ID NO: 87278 - DNA, 376 bp, Glycine max
  Clone ID: PAT_MRT3847_49822C.1
ggcagacgcactcccttatccatttgcacactataccatggcctcaaccaacgctctctcttcagtgcatcatgctacgctctctcaaccgccagtctctgacccgaagagcgaaccatattggacgagtaaactaccgctaaccgaataaccggctcatcgtgaaagcctgcgacaaagagattgcactcgaccagcattcccgttctgatatgcatgcacggcattgacaagctcgacgacgctgctggtctcactcttgtgcccatatggaggaaagttgtgttggatgagtatggaagttctaaagcggtctacgatgacgtcaccattagtcacgcaatcgagcatgctgatcctatggagaatgctggtg

SEQ ID NO: 87279 - DNA, 268 bp, Glycine max
  Clone ID: PAT_MRT3847_49823C.1
atcccataccaacttttcatagcttctttaaatcacgaccaacccaacatttactactataacatatttcataacaccttcattaacattcacttcttctcaaatcattttatactttatccctacaacttcaaattcctcttcaacattcatcatcaaatccctaatattcctcatattttacacttccaccttaccaaaaaacctcattaaattattcctattaaccatattcacatttttcccttttccactaattaaacccctt

SEQ ID NO: 87280 - DNA, 103 bp, Glycine max
  Clone ID: PAT_MRT3847_49824C.1
cctgcggtaccggccggaatccggtcgacctttgtcaaattttaaattgaatatgcctgttaattttaaagattctgaagggacaagaaacccaaaagatgat

SEQ ID NO: 87281 - DNA, 252 bp, Glycine max
  Clone ID: PAT_MRT3847_49825C.1
gctcccgtgtttgttttttcttattacagagtttggactgttgcttcatgtcacaggcgttcttatgtgctggcaaggagcaacatgaggctaacagctaaagacagacttctgaagggcttgctgatggtaacacccgtgagctaggcacccaggattgagtaccacctgaccagtgctgccgagacatcaatgtctgtagcgtcctacacgattacatagtaggagaagggcatgaactggctttagaga

SEQ ID NO: 87282 - DNA, 346 bp, Glycine max
  unsure (1)..(346): unsure at all n locations
  Clone ID: PAT_MRT3847_49826C.1
gcgnacgtaagctcggatcccgtatagcggacgccctaaattaacttgttttactaccaaaatgcttctgtccactctcgtattctcaagggggggggtgctttagacactgcgatgaaatccgaaccggacactcccctgagaaagatcttctctgaagcccagccccttactaacatcaacgtttcctacgacgactattctcttgtcaactgaaacactatcctccaccaacgttgaaaaaaccatgagcaggccgacgcgttgtacaccaccgaactcgaacaagttactatacgcgggcaccaaactacagcaaatgtgccgctagctatactccaacgac

SEQ ID NO: 87283 - DNA, 425 bp, Glycine max
  Clone ID: PAT_MRT3847_49827C.1
caaaaacaaacgggggggggattttagggccctttttttaaggggccccattggggtccaacacaacccgaccttttttgaaggggccttttttccagccccataaaacataaaagttcttaaaaggtttggggaacccatccaaaattccacaaggggcttaaacccccccacggaaacgggggacaaggggaagggttaatcccttcgggatgttgaaaccagggagggcccttccatcctaaagctgttggccaaaaaaaataaccctttgttggcccgggggaatcccccccttgccctaaatctgggccttcacatggcaaagggggcaaaacctccccacctggggggaaatagcctaccccgaaaaagtcttcacaaaaatctgcttacccccacgaaaacccaaccccagggggaga

SEQ ID NO: 87284 - DNA, 1141 bp, Glycine max
  Clone ID: PAT_MRT3847_49828C.1
aaggctcacttaactgcttctggttctaatgctgctggtcgggcatctccagatgttgatggcagaaccacatttgttagcaatgtacattttgctggcaccaaagattgcctgacgcagtcctgtagcttttagagcccagatcccccaaatagactgggtgccaggagcatgccagtggaaacgggaagctcacagatcatgtcgagtttttgtctgaggaaacgggcagtgttgcagcacctctggataacacggttttcatgtaaagaattctcaatgttattaagaaaagtgctactcctcaagaatcagctccagccatggcattgttacgctttggtaacggtactccattcccttctgctaggttttccagacatccctttccaagaggtattcctggtgtgtttagagctcgacccccaattaaactgggtgccagcccccgcgtccggaagcgggatgctcagggatcaggatctgacagtagttcatcagtgaataccggcaatgttgctgctcctgttggtcgtgggttcacctacatcagaacagaatctaagcccgaaggcagcttgggtacgacaacatagtttatttcttaagatggtgttggactgcgatttcatcagagtgctttttcatgtccgatggcctaaaaattggtaaaaaaaaaattattgatgtaagaagatgcctgccctaaattttcgattttttcatatgtacatggaggatattttatatctaggtgtctatgtaggtaagtagatgacgtttctaaaaaaagaggtaaatgacgttcaataatgtttatttttttatgtcatcggttgaagctacaggggaggacattgattttgttagagtgcacagatgagaagaatgttgtggatatgttggaattatccgtacatttgaagtgtgtggataaggtggatcttgtggttttggttgcgggatagcatgtttctctgcaatttttttgtcatgtgctacctatgaaaagattaaataaaaaaaaaggggtaaaggggaatagttgaatttcatttagactgcgtaattatcttcactgtttcagaacttaaggaaattaaatattttattctttctgtaaaaaaaaaaaaaaaaaaga

SEQ ID NO: 87285 - DNA, 523 bp, Glycine max
  unsure (1)..(523): unsure at all n locations
  Clone ID: PAT_MRT3847_49829C.1
ccacgcgtccgccctgtgctggcacacgcacaagcacgatgaaagtaaatcaaatcataggcagtttttaggtcgttaaatctctgagttggacagacagtgataacctcaaatcatatcatttgctgtttcaatttccgtcttccacaatgttccacaacaacaacaacaacagtgtgtcgatctccgtctcggacgacgaacccgacgagctgggtcggatgcggatccgcgcgcggcggaagcggaagaaactcgggaacagacgattggtgaggaagctgctcctcaaatactggatgcttctcatcattgttcccgccctggctttgctcgttttcgaggccacccgaattgcccgaagtcccagttcaaacacagaaacgcgcaacaataaagctgatagatcgcgcaaggaaccccctgcaaacttgaatcgcctcgatcctaccacccatgttgtcgctggtgtcagagaacgttgcttgaagctcctaccacctgagaagctngagcaactgga

SEQ ID NO: 87286 - DNA, 319 bp, Glycine max
  Clone ID: PAT_MRT3847_4982C.1
aacctggagacagaaaagggaaggggcccacccctaaagaaagggccccctgtacgccaacttaacaaggggagcgggcccatttaaaaaacaataacaagagcaacgctaacaaatagaaccttttcctcccccggaagattcagaaacccaaaatggttccccccaaggttccctgaaacttgaagcgggggggtataacccccccccgtgcaagaaaagaatacttgtggggcaaaaggacctttgcccccctggaaaaagcgggaaaataccccccccgcttaacaaccctcggagagagcaaaacaaaaccccc

SEQ ID NO: 87287 - DNA, 1456 bp, Glycine max
  Clone ID: PAT_MRT3847_49830C.1
attcggcgcgtcccacgagtgagcgatgttttccctcctctaaggtcccaattttttcttaaaccctagaacactctcactgaagaagctgctgcagaagagaatttccaaaatgtcgatgtcgaagagttccaagatgcttcagtacatcaactaccgtatgcgtgtcaccattcaggacggtcgtcaactcgtcggaaaattcatggccttcgaccgccacatgaacctcgtcctcggcgattgtgaggagttccgcaaacttcctccggccaagggcaagaagccagccgaaggaggcgaccgcgaggaccgccgcacgctcggcctcgtcctcctccgcggcgaggaggtcatctccatgaccgtcgagggccctcctccgccggaagagtcccgctccaaggcagtcggcgccgccgctctcgccggccctggcattggccgagccgccggaagaggtatcccgcccgctcccgtcgtccaggctcagccaggcctcgccggccctgtccgcggtatgggcggccccgcccctggcatgatgcagccgcagatctcgcgcccgccgcagctcaacgcaccgccggtgtcttatcccggcggtggaccgcctgtgatgaggcctcctgggcagatgccggggcaattcgctcctcctcctatggcgaggggtccgccaccgcctatgccgcctgggcaatttgcaccaccgagacctggtggccctccgccacagttccaagttccaccgccgcagtttggacagagacccatggggcctccccctcctggacagatggtgagaggacctccggctcctcctcgtcccgggatgccggctccaccaccgcctcgccccggcatgccaccgccacctggaagtggtgttcccgtgtttggtcctcctcgacctggcatgccccctccgccgaaccctccaaatcaacagcaacagtaatgggagaattgattggtttcttactggtaatctgaagatatggactctgggcttcttgcacgcaattcaatatccagcttgtacgttggacctgattgttgcttgtacaaccttgaagaatcactctcttcttagggattgtttttctgatgtcttgatgagaatgtgtaatgttagaagaacaactttatgttttggagggaattattctactagaacctgagcattagacatataagtcggctatgtagattttcagggaaaaaaaaatgccggattgcatagacatcgtactgatttgagtgtaggacaagacccctttatatcatttgggttaatattacatgattatgactttgctaatgtttctggatcattttattttttatttatctgcagttatttgggctttgtttttcttagtgtgtaataactacatttattttggagacgcaaatgtactaggaagattaatcagaaactcggtggattatt

SEQ ID NO: 87288 - DNA, 2368 bp, Glycine max
  Clone ID: PAT_MRT3847_49831C.1
cacgcgtccggctggcacacgcacaagcacgatgaaagtaaatcaaatcataggcagctaaatctctgcctgcaacattctgagttcgacagacagtgataacctcaaatcatatatcatttgctgtttcagttcccctcttccactcttatcgtcttaggccaaatcttccttccacaatgttccacagcagcagcagcaacaacaacaacaacaacaacaacggtttgtcgatctccgtctcggatgacgaacccgacgagctgggtcggatgcggatccgcgcgcgacggaagcgcaagaaactcgggaacagacgattgctgaggaagctgcttctcagatactggatgcttctcatcattgttcccactgtgggtttgctcatattcgaggccacccgaattgcccgaagtcctagtttaaacatagaaatacccattaataaagctgatagatctagtcccacatttcgcaaggaaccccccgcaaacttgaatcgcctcgatcccaccacccatgttgtcgctggtgtcagagaacgttgcttgaagctcctaccacctgagaagcttgagcaactggatatccctgtggaagaagaatcttctagtgttcctgttggtgaagttttatacatgtcagagagtgatcggtcttttgtaggagggagtgttacgttgtctcaattgcgtacagaggacacgaggtttaatttgtttactggctcgagcaaacatttaagcagagagatcaaagttttgagaagaaagaaacaatggcgatacattgtgggttctacagtgtgaatggggggtttaagatatctgatgaagataaaagttacatgcaaggttgcaaagttgttgtatctacttgtgcatttggcggtggagatgatctctatcaaccgatcggagtgtctgaggcttcgcttaagaaggtttgctatgtagcattctgggatgaaatcaccctgaaagcgcaggaattagtggagcgcagaattggggaaaatggatttattggaaaatggcgtgttgttgttgttcgggatctgccttttgcggaccaaaggttgaatggtaaaattcccaagatgttaagccatcgtctttttcctcaagcaaaatactcaatttgggtagactccaagtcccaattccggagagacccactaggtgtgttggaagcactcctttggcgctcaaattctttacttgctatatcagaacatggagctcgcagtagtgtctatgatgaggctaaggctgttgtcaagaagaacaaagccaagccagaggaagttgaagtgcaactgaatcaatacagaaaagatggcttgcctgaagacaagagatttaatgggaaaaaagctctatgtgaagcctctgttatcgtcaggaagcatacaccagtaactaatctattgatgtgcgtctggtttaatgaggtggctcgcttcacttccagggatcagctcagcttcccgtatgtcctgtggcggctgaaagcattcaaaaatatcaatatgtttcctgtctgtacccgcaaggatcttgtcaatagtatgggccatgtccgcaaggccaaacctttgcaaagctgatttaataaaatttgttcaaagcaatgaatgcctacctgcattttcatctaactcattccttacttcattagtttctttagccaatctgaatcaggtatatgtgttttttttttttctatctcacccccttttctctcatagccagtgaatggttataatttgtatttagtatttattgtttactgtgagttctttgattaggttatttcggaaaggatatagaaaggcaaatcaaacaaagaagagattttgctttgaacctgtttcccaacacaaatttctataataacaacaacgttttcataaattgtgatattgctttgcccattttattttgtgaaaataaataaatgctgccatatgtagttgttggaatagatatctcctgtcagacatgcagcaattactccaggggcagcaaatgatggcaaggaaaatggtcacatgagacacacaaagagatagttaggcccagagcaaaacttcaaaccactgatgcaacagatgcgttgtcagttcggttatgcattgttgatacaccagtggaacacaacataaagcatagaaagaagccattgaaaatcctgagatagagaagttacatgacgagagggaaccattttaaggttgggtagtttttgaggaaatggcttggattaagttgttggtggatgtcaattttaatggtcatttttagttttctttttaatctcaaaattgaaaactctaactcattactgtgattaaaaaaaaaacaaa

SEQ ID NO: 87289 - DNA, 1432 bp, Glycine max
  Clone ID: PAT_MRT3847_49832C.1
accttctctgttctctaccaagtcccctattacattacgattcacaattaatactcttttcatcatatacttcccctttataataaattctacgttaaatccaagctctatacaatatcactgttctgtcattaaagatcacgcttcataagcacaactctgcaccttgcctctcaccatcaagtcccctatttgctatgtgtctattttaaatcacaactaattctcctcgatcatctttcatttgtctagataatttcttagttagatcaaagtattcccggttaattatattagatctttcactcatctgcaagcatggccgttaagcacggaagaagctgctgttgctgcctctttggaatcttgtggaagattctggttgcactcatcgtcctcgttggcctcgtattcctcatattctggctggtggttcaaccccgctccttcaagttccaggtcacggaagcggacctaacccaatttgattactacaccaacaatcacactctccactacaacatggtgctcaacttcactgcacgcaaccccaacaagaagctcagcatatactacgacaaagttgaggcattagcattctacgaggatgccaggttcgccaattacgatgtcataactcacatgaactccttccgccagtacaagaagagcaccagccccatgagcgccgttttctcggggaagaaggtgttgatgctcaacagcgaacaagtctctaagttgaaccaagacaagagtgatggggtttatgacatctacgtgaagctcaacttcaggattcggttcaggctcggggactccatatccggtaacttcaagcccaaggtcaaatgtcacctcaaggttcccttcagtaaaagtggcacctttactctctttgagaccaccaaatgttctgtccattttgggggcctagatatttcctattaacatttgagagagggggcactatttataaactgtttatacaattgtagccggaagaaaagggaaggttatatatcttactcttttcagatgtacatatttttaaagatcaaatcatagtgagggactagcatgtagcatgtcctattcagaaccagtaatgtgtattgtcatcatgttaaatgccgtaaagtttatgtatgctattgccaaatgttaacaggctgattagtgtacattcccaaactgcaattgtaatctttatattttctttcaccgtcttgatggccttccacatctcgaattcagattgataacaattcacgtgttgatgcaaaatttggtatcgaacttggtaggtgcagctacaataaatctgtcacgtaaaggatgggtgccaattttaacattttttctcaatctttcgttttttccccgcccccaggggcacaaaaggtaaaaaagggggcccccttttgggggg

SEQ ID NO: 87290 - DNA, 315 bp, Glycine max
  Clone ID: PAT_MRT3847_49833C.1
cgggcattattttttttttttttttttttttggttttttgaggggaaacacaaacctttaattaaaaaattaagggggacaaaacaaaaaaccccacttttaaaaataattagggggggttaaggggagataaacatgataattaaaagggttgaccgagaagggcatacatgcatgcctgcatgcaaagggttaggggcccttaagtttggtgccatgagggaccatgtgaggggaacacttgccacacatttttttgttcccgtaagggcccgggggaacacacctgcacctcatacaaaatgttccgcaagc

SEQ ID NO: 87291 - DNA, 561 bp, Glycine max
  unsure (1)..(561): unsure at all n locations
  Clone ID: PAT_MRT3847_49834C.1
ccacgcgtccgtccacacgcatcgactcacattctttactgacttatgtatgagctaaggccattgccaatggagcaggacgatggataatatggaagataagagggaggagagtagggtcctttagggggtaccctatagggttggaatgaaggatactgcacataagactcttgtttgatcacttgtactctatggtattcactgccctgcctaggatcttggctaggatctcgggtattctgtcgggtttcctttctttagtctctttgggagttaggctggggaaaaggctaccaaaatgagcaccatttgaagtgagattgcatgaaaaaacaggataaaagacatggagaaactaatcggttcaatttcttcttactcttgttcttatgcgagacgatctgagagacgaatgaaagagaccctggacgatactcacaaaatctttttcaaatgctacttcaccagtcaacttcttcaagatgcatatactgaaccacagcttatatatcgggatctctattgngatcgcaaaanagggcggccgctctggcagga

SEQ ID NO: 87292 - DNA, 532 bp, Glycine max
  Clone ID: PAT_MRT3847_49835C.1
gttaccgaaacaatttttgtatttaaataatatcatattaatggagagtttaactcaatttacataggatgtaaaatttatttatattaaagtctacaaatactaccgaggaataaatatactcacagacattccattatttgatagtgcagaacctgagcttgattctcctactatcatctttagaactatttcattttgtttagaattgattggttttcttggaaatggcaactcaactaaagaattattgagatatgaaacaacttgtgtcatggaaggtctatcttctggcttctcttgtacacataataaaccaatttgaatgcatttaatgacttccctatgattgcaaaattcctttatattttggtctaatatgtttaatggcgtttgatccctccattggtcccaagcctaactcaggaggtcatcatgatccgaaaaaacagaacgagtattccttttttgcactatttatgctccaaaactataaactccaaaactaaaaacatctgatttttctgaaaat

SEQ ID NO: 87293 - DNA, 1722 bp, Glycine max
  Clone ID: PAT_MRT3847_49836C.1
attcgatcatgtatttcggggatcctctagagtcgaccggcggcaaacaaaggtgtattgatgagaatgaaacagcttgctcagaaataagagaggatccgaggtagagtcagcatgaagtggtaggcttcgatacatcgcagcagtcatataaaggcttattgattccattcataatctcttcttcaaacattattggccctccttcttgttgccagctattggtggttggcttgggctaatcctcaaacagaagttggcctagccaatgcacagaaactattttttaacatgcttagaagcatattccattcaccaatgtctttctttgactctacaccagctggaaggatcttgaatcgtgtaagttttcttgtcttttccttgctcctttgttttttttttaatctgtctctccatgtatggtgtacatttgacataatgggtgctggtgtatcccatcaggtttcaattgatcaaagtgttgttgtatcttgatattccttttagacttggagggtttgcttcatcaacaatacaacttattggcattgttgctgtaatgacaagatgttacatggcaaagttttgctcctagtagccccgttgtgtagcatgtgtttggggacgcagatatactacatggcttcctcaagggaattagtacgtatcgtgagcatccaaaaatctccaattatacatctttttggtgaatcaattgctggagcagccaccattagaggttttggacaagaaaaaaggttcatgaagaggaacctctatcttctggattgttttgcacgaccattcttctgtagtcttgcagctattgagtggctctgcctgcgcatggaattactttcaacctttgtttttgctttctgcctggtattacttgtcagccttccccatggaagtattgatcccagcatggctggacttgcagtaacatatggcctgaatttaaatgcacgtctatcacgatggatacttagcttttgcaaacttgaaaataaaatcatatccattgaaagaatttatcaatacagccaaattcctagtgaagcaccagcaattgttgaagattctcgtcctccatcctcatggcctgagaatgggacaatccaattaattgatctgaaggtacgttacaaggaaaatcttcccgtggtgcttcacggagtatcctgcacatttcctggtgggaagaagattggaatagttggtcgtactggcagtggcaaatctaccttgattcaagcattatttcgattggttgaaccggaggcagggagtatccttatagacaacattaatatttcatcaattggtcttcatgatcttagaagtcatttgagtatcataccacaagatccaaccttatttgaaggcaccattcgaggcaatcttgatcctcttgatgagcactctgataaagagatttgggaggcccttgataagtcacaacttggagattttgtattacttggatagctccatttagttaaaattacacagtattcgcttaatctgtaaatgtctataaagtgtgtttgtatgtgaggaaaaaataaatagcattgcatttgggttttaaatgtgtgtgtataataagagcttttaaatagagaaaatgggtactattaatgctacttagtaggagtaggagggtatgctctgcttgattgctttgagttatcacaggcccttgataagtcacaa

SEQ ID NO: 87294 - DNA, 699 bp, Glycine max
  unsure (1)..(699): unsure at all n locations
  Clone ID: PAT_MRT3847_49837C.1
ctcgagccgtgaatttagtctcagaattttgagaaagagttctcattcagtggtgttaggggacctaaaaaagttacggaatggcacatcaaaacttgggcaccaaattaacagcacttgtagtagatgacaataaaatcaaccgaaagattcatcaaaagctgttggagagtgttggaatgaaaaatcaaggagtggaaaatggccaagaagcagtggacattcattgccatggacaaagattggacctgattctcatggacatggatatgcccatcatgaatggcattgaggcaacaaaggaacttcgctcaatgggcattggtagcatgattgttggtgtatcatcacgctgtacggaagcagaaatacgaaaatttatggaagcgggactgaatgactaccatgagaaacccttgaacaattctaagcttagttcacttcttgataagatcaaccccagttttactcgtaattagtggaaatttcaaccgggtaatgtatgaaaaagcaaagaagaaaaaaacttaaccttacccgttccttgtttccaaattccatggctagtttttcctctctttttttctttttcttttggtgattctgtagttctttttttactatggtgaagtgtgtgactacgtannngnntaccaatgttacacaaaaataaagaannnannnnnnncataactcctg

SEQ ID NO: 87295 - DNA, 638 bp, Glycine max
  Clone ID: PAT_MRT3847_49838C.1
attgtcggttatgttttagctctacataaagagcaataactttttgataatctatgtgcgtgcttgcaattataaaattctcatcttatattttcatgtatttccatattttctatgttatcttttgatttgttattccatattaccacaaattggcaccatagcttttttcttgtctatgagaacagaaatatacatcaagaagggagacaaaaacaaatgttcctattgccatacccatgtttgatgacgaaaattataattttcaaaattaaatcggttgttaacctgatcaagacagttaggattacttgtattggaggtgtcattggagttgtacgtcgctgaagcttcctttcagggtgttcagagagggaggaacaaaaaggagattttacaatgaggaaggatccatgatattattatgcacaccttcataaatccaaggactcttaaaagtgattaatgatggatcatataaaatgtgatccatcaaagatatagttgatgttagggttataaatagaaattcttgatgtgaaacaaatctcccccacatgatcactctagataagagagagatcatgtgaaggggagggattacaagtttttttcaaaaaagggaaacatgaagatta

SEQ ID NO: 87296 - DNA, 211 bp, Glycine max
  Clone ID: PAT_MRT3847_49839C.1
ataaaaagtaaacaaagcaaggtctattgaacaacgaaagggttcagccataacaccttgcgccttccttcccaatatcagcactttcctaacaaaaaaaaaatgcgtgagtgaccgacttagctccaattagctcccccacacgggctttagggataaccaacggtttttggttatcaaaaaaccaatcactccttggaatgaaacacat

SEQ ID NO: 87297 - DNA, 555 bp, Glycine max
  Clone ID: PAT_MRT3847_4983C.1
gtttgaactgcggcattacaatgcctcttattggattaggcacttattccttcccaaatgataggaaggcaacagaacttgccgtccacaatgcccttgagatgggttataggcattttgacacagcaaaaatatatggttctgagccagcactgggcaaagccttaaatgaagcaatctgcgagggagaaatagagagagaaggcattttcttaacatccaaactgtgggggagtgatcaccatgatcctgtttctgcattgaaacaaactcttgagaatctgggcatggagtacctagacatgtacctagtgcattggcctgtcaagttgaagccatgggttaactaccctgtacctaatgaagatgactttgaaaagttggaccttgagaccacatgggcagggatggagaaatgcctagaaatggggttatgtaggtgcattggggttagcaatttctctagcaagaagattgagtgcctattggattatgcttctacacctccagctgtaaatcaggtggaaatgcatcccatgtggaggcaaggaaggc

SEQ ID NO: 87298 - DNA, 318 bp, Glycine max
  Clone ID: PAT_MRT3847_49840C.1
gggctgagctggttccaatccaacaacttccacggactactactattattatatactataatataaataaaggtcccctaaaatgggaaaatgcttttaccatttttttttcaaacccaactaattaaaaaggttgcttgtgatttgagtttaaagagaaggtagagtttttttggccatgcagctccaatttgattccctgttttttttttttaaatgtccattgggttcttggctttaaatggtggaatggtggggcgtttggaccctttcttggggaaaaaaccaaaataggcttcgttttaagctaatgaagca

SEQ ID NO: 87299 - DNA, 756 bp, Glycine max
  unsure (1)..(756): unsure at all n locations
  Clone ID: PAT_MRT3847_49841C.1
ccacgcgtccgtcttctttatttttggcgttaatttggttgtttcacttggagcattgtcaatgattggagaattcactttacagcatattcaacaattggaatttggaaagaatgaagaagaaaacaagtggccacctggcttaggccatttctccaaacaagccttttttgttcaatgcacagatttctacaaaagtgaatgcaacatgtattgcttggattgtatgaatggagccctttgttcagcctgtcttgcttgtcacaaagaacacaaagctattcagtttttgaaaggcgaggagatcttcataccatgatgccataagggtgtcggagatacagaaaattctggacataacaggggtccaaacttatattataacctgtgccaagattgtgttttatgaatgaaaggctcaacttaggcctgacaaaaggagtcaccaacacctgccaagtctgtctccaacatagaaaatggtccctcttcctgatgcaatacaatccaccttcctcttgagtgctgagagactcatctcctcttcatccctttttcatgaacctcgaagaaatcagtgcaagctgaaagttcatgaaatgtgtgttgacttcaatggtctgtctgcattggtttacactagttcgcacaagttgcacacacanctgtttggtttgtgttattgtgggcttgaattgtttcttgcacacacacacacacactagtttacaactatgatttattagttatttttta

SEQ ID NO: 87300 - DNA, 381 bp, Glycine max
  Clone ID: PAT_MRT3847_49842C.1
gcggaccagtccgacaacgaggacaatagcgggagagtacccccattatcgcgcaagaagttatggctgatgacagggccggtctctgtgacgagcatagtgatgatgaaacccgggaacctgcagggggacctgtaggcggacgccattgccggcgactcggtgctgtgctttctgatgtgggtcacggtcatgggcctgctgatccagctcctctcggaactgctctgggtgcgcactgggaagcaccttgccaagctctgccgagaggaataccctgcgggggctcgtagagtgctttggatcatggtatagatcactctcaatggctctgatattgaggaggatattgagagtgctattgctagtacgattgttagt

SEQ ID NO: 87301 - DNA, 457 bp, Glycine max
  Clone ID: PAT_MRT3847_49843C.1
tctctctctccctctctcttgtacagttgtgaaattctgttactattccaatataattgataatttgtttgcaggtatcatccctttctaggaaaagaataatgaagttcttagaatctgaaagttttaaataaagggttataaagactgctgtgctgatatcatatcttgtgcttcttctgtactttctctttaatgaattatgctataaatttttatgaaagacaatgcttctgagtttaataattggaaagcaatattgtatttcatcatatgacttacaattatacaacttcgggacatttctaaatgtctttgccaattgcattgttataaataataatttgttagaagttgccagcatctgttggggaaatgataaatataaatacaaaaagatcttagaatccaaagttttaaaattgaaaatgattttgaagataatgcctgagtttta

SEQ ID NO: 87302 - DNA, 414 bp, Glycine max
  Clone ID: PAT_MRT3847_49844C.1
accaggagatttacaacactcgtacaccctactcaaccaactgagctaaacccccttgttattaatattgtattacattatatatctattggtataaaccaattatcctaaaaaggcttaagtcattaggtaaaagattttgtattaacatctgtagtagacatcatcatgatcagtataaagcttacttttgctggacatgataaatgctctgttgatgaattatgttttttaatccctaaggattcactagaagaataaatgcaagcaagctaaagtactaaaagttctttagaattcccttttacttttaatgcaggatcgtgatgagaactacattatgttggtatcaagttgctctagaccatgcccatcaaatagaaaatactttcttttctttatatcttttacatg

SEQ ID NO: 87303 - DNA, 607 bp, Glycine max
  Clone ID: PAT_MRT3847_49845C.1
ttccctttttttttttttttttttttttttttttttttttttttttttttttttttttttttttttttttttctttttttttttttttaactttttaaatttaaaaaaacttaaaatttcccccaaaaaaaaagggtttgaaaccttttaaaaaaaaaaaggaaaaaaagttttccccttttttgaaaatttccattggaaccagggggggctcccaaaaaaaaaaaaattacgggaaactttggtggaaaaaaaactgattttaaaggtttgaaaaaatttttaaccgggtttaaaggtaaaaacagggacccatttcaaaaacctagccggccaaaattggggaaaaaccccttaaaaaagggaaaagggccctttttttttaagggtttaaaaaaaaaaaaaaggggggttttggaacttgaaatccccaaaattttggaattaaccccattaaggggggggcccacacaaacgggaaaaaaacctggtcctaaaccaaaaaaaagggggggtacaaaattgggggggaaaccaaaaattttaaaaaaaaggggggtttaattgaacaaagggggggtgggtcagaagaattaaaggggccctt

SEQ ID NO: 87304 - DNA, 416 bp, Glycine max
  Clone ID: PAT_MRT3847_49846C.1
ggcaccaaacccctcttacaaaaatgagagttcttgggggtttggaaacgagcttttttatattttttttatgagaggggccaacaaaattgtggaaatacattccccaacaaagggccttttccggggagaatcagggaacaactggaaccgcggagcaacctcgggagccttgtttgttctctcgggggggggcggaaaactttttgttttaatgggggtaatctctcaaggaagcggtaagaggtctttgaaattttgtccacctcagcattgaaagcggattttaatttgaaatttggggggcttaaggtgagagagaggtcttttttttgcgagggaatagagggctcatttacaaaaagaactgccgccgaggtcattcttgacatggaaaatacaaagtgcgccacaaa

SEQ ID NO: 87305 - DNA, 324 bp, Glycine max
  Clone ID: PAT_MRT3847_49847C.1
tttactcttccggccacggatccggttgttgtgagttgcgacaatggcactcctgctggtgtgcttaccaagcaagctatgagctacatggcacatatggttcacagtcgctgtgggggcgaaaaaaaatctatgcgcgaatggacacaccctatggtggataaggtggcaaggatggcgaaccttaaacaagatgtttgtggagctgaaagaggaatcactttctggatagccgcttacagttatttgcattagcatatcttatgagagggtcattaaatataacgatgaaaaattaccgcgccaggctcaagatgcaagtat

SEQ ID NO: 87306 - DNA, 199 bp, Glycine max
  unsure (1)..(199): unsure at all n locations
  Clone ID: PAT_MRT3847_49848C.1
acnaaaccctctctcncnaaaaacccaaacccttggcggcancgagacccgttgtgttctctcttctctctcttcttctttgtttnttcgnttncnctngcttnttngnncnttnagggtttgctcaacgcatcgatttggggctnaaacccgntcngaggcagattcggatttagggngtcccagtcnctatncngnc

SEQ ID NO: 87307 - DNA, 379 bp, Glycine max
  Clone ID: PAT_MRT3847_49849C.1
accaagagaggttggggtgctagtttctctaagccatccagtgccatcctcgtcgctgcaccgacacacgctctcgccgtcgccatgactgagcagatgacccttcatggcaccctcaagggccacaactgctgggtaacccagatcgctactaccccgcagttcccggacatgatcctctccgcctctcgagataagaccatcatcatgtggaaactgaccagggatgagaccaactatcgaattccacagcgtgctctgcggggtcactcccactttgttagtgatgtggttatctcctcagatggccagcttgccctctcaggctcctgggatggaaccctgctcctgtgggatctcacaactagcaccaccacta

SEQ ID NO: 87308 - DNA, 923 bp, Glycine max
  Clone ID: PAT_MRT3847_4984C.1
cttgtttattatcgtgaaaatattagagaagatacatgctgcaacagccattcgtatatagcatccttttatcaacaaagcctgtgccaaatctctctctctctctctctctcaagatctgaaatcactctgatggagcagagtaaggagaaaaatgctccttggttatcagtgccacagtttggggactgggatcagaagggacaagtgccggactactcgctagatttctctaaaattcgggaaacgaggaagcaaaacaagacaaatatttcaagggcaagtcttggtaacgaagaggagctcacggcttctgccactaacaatgcaaacactgtccacagtgatgagcaccagcacccccactacaaccaaaccaactctccaacttccaggaggagcttcctgagctacttcaactgttgcgtaaaagcttgattctcaagggaatctagaaccttttcgtgtctgcctaacctcatggacagggacaataattatggttttgcgcttggtgatcattacttcgcacttgttttttatttaggaaagcaaatgtttcatttaagccataatcttcaatagtgattctattacgcttccgtcttagtttgaaatttttgtatttaattagaggtataaagatggtaagcatgtaaatggcgcttaggacgtttgaacctgtaaaccagctccaagatacgatgaattaatccagcaaagtaatgctgttgaccttgaaatttcctttgctcttgttcctcgattaactaagcagtctggagttgaatgcttacaattaggttggacttgtaatggtcttcaattttttccttctttcagttttggtagcaatttattaagtgagctccaatggtaacctgcaatcacttttcatacagagataatcacgtttactgtta

SEQ ID NO: 87309 - DNA, 360 bp, Glycine max
  Clone ID: PAT_MRT3847_49850C.1
ggctcgagataaccaccatcattatgtatacggctcgtaaactaaccttcacatgaacaccagctagtacatgcactgatcccatgacaccaatgtcttgagcttctggtgcgcaccttattcagtccaatggcaggcactaatgccttcgacataggctggatctactcactgatatggacactgcagatcatcaagggaaagtgcaagaactagtataggattcagatactgcagacaggcaaaatgtctcataatgcatgatagacctgtgagataagacatcaattgctgaacttgagcatgaatctctgcaagcactgtcagcattctattatgacgcaaaggctatgatgtcaa

SEQ ID NO: 87310 - DNA, 298 bp, Glycine max
  unsure (1)..(298): unsure at all n locations
  Clone ID: PAT_MRT3847_49851C.1
cttctctcttgtgtactttgattccttgaaagatgagaaaatgaagattttgcttccttgactaanaaaaaaaaaaaaaaagaaaaaaaaaaaaaaaaaaaaaagaaaaaaaaaaaaatttaaaaaaaaaaaaaaaaaaaaaaaaaaaaaaaaaaaaaatttaaaaaaaaaaaaaaaaaaaagggggggccccccccctagggacctcccccccccggaatttatttccgacccggtcccggagggcgacccagtttcccttatagggggccgaataaaagctgggcgaaacaagggc

SEQ ID NO: 87311 - DNA, 659 bp, Glycine max
  Clone ID: PAT_MRT3847_49852C.1
cccggggtcgacccacgcgtccgggcaaattcgcagcatgtaattctgtaaagcggtctagcttgtgtttttggtaattttcaacatgggtggactttctatattgtttcctgggatacttacatggactaataatttcatctagctttattgatcttttttggcattgttatagacagttctatgttgtttgtttttttgactaaattgggttacaattttgtaacacggggagcttagtaaattcattaaccactggcatgagatcaaagcagcacctctagcaaggaagaatagttggcaactaaccatcattaaccttggactgagcttccattctcacttgttaaaggcccgagatggttttccctttgctggtcttattgatttacaaggtgctttgataaagaggtgtttgggtctaaaaactcttaatcaaagaagaaaatgtttcaccaaaagaaaatcaagggtatgtaatcattttgtgttggtgcctaatcaatcttgatatgaaataaaagggtacaaaattggaaatcggctgcttctcatgagactgaatagttattcttgaaggttgatgctactatcttctaaaaggtatattacattattgaagcttttaatttatatttttctctcaatgatttgattta

SEQ ID NO: 87312 - DNA, 332 bp, Glycine max
  Clone ID: PAT_MRT3847_49853C.1
ggaatctgcaccataacaaaatcagcaacaaatattcataaaaaaggggaaaattaaaaaagggaaagggaaagggaaagggatttctgttgaatgattaagaacctacccttttgtgcttattgggaataaaaaccccaacaaggtggagttaaaaaaatattacttggttccaaaaggggttgccgaacccttttaccaaccggaagtgaaaggaaagaaaaaaaatggttgaatttgattggttaaattggggagaaaaaaattaataacacttgctttgagagttggcattgaatttccctttaaagattccaaattttgtttgtgcc

SEQ ID NO: 87313 - DNA, 641 bp, Glycine max
  unsure (1)..(641): unsure at all n locations
  Clone ID: PAT_MRT3847_49854C.1
aaagggactagcaaccagagcacttcattattctggcattaccagcttagaggatgctatgagattggatcattgatcatgagaatgacattgaggctcgagagatgccattggtagatgtagacattgatatagagtccactgaatcattccctatcacagaagaaatgagaatgaaagcacagagtttaagggtacaagagcgcaaaaggaaagaggaggaagagaaaagattggagagagaacgggagaaggagaggattcaagctggtaagagactccttgaggctaagcgaattgcggaagaaaatgaaagaaaacggaatctagcattgaaaaaagcagaaaaagaagaagagaaaagagctagagaaaaagttctcaagaaaccagagcaggataagttaaatagaaggtataaacaaggattgcctttagaaggccaagcagctgtgaagatcttctgctattgaaatagaacaagaaaagaagtcaanagtctgtttataatacaacagcaaaagctgaacagttaagagaatgtctgaggaatctaagcgtaacctcagggtgaggatgccagagtcagaagggcctttcaacaattttagtctatgttggaaatgttgccaagaatccca

SEQ ID NO: 87314 - DNA, 118 bp, Glycine max
  Clone ID: PAT_MRT3847_49855C.1
cccactcgttcgcccactcgtccttccactcgttcgcccactcgtccggtaatatgctctgccttaccttatcttgttgaaatctttgaatatatcatggtatcatggtcctgctgtt

SEQ ID NO: 87315 - DNA, 326 bp, Glycine max
  Clone ID: PAT_MRT3847_49856C.1
tttctaatatctcttccactgtacaccttcaacctgcggtgctttatgatgctgggtgcaccaacctcaaatccatggctgtcttccccactaggaagaccaacaattacattacctccattgctagcaactgtggaagagtacaatgcatgcaggtgtggccaccaattgtcaagaagaatttcgagactctttcctacttgccagacctctatgatgcccaatttgcatatgaagtctaataccttctaatgaaagtatgtatacctttcttggaattcgtgttggagcacatttttttattcccgtgatcacaacacgtcacc

SEQ ID NO: 87316 - DNA, 1784 bp, Glycine max
  Clone ID: PAT_MRT3847_49857C.1
gatttgtagtttgttttgtgctttcgataaattttctgccaaggcaagaggggttttaagatcatagtgtgtgttttgcaacaatggctaagttctttgctgctatgatcttggcactcgattgacccaaagacagccagagccagagatcggccggtggagcgggagcgagccgggatggaagacaagaaggtgcttatcaacgggcttcgagcaagctctagtgtggtctgcaactatgagcaaggattatctaatcatactttctctccttctttccacggtgcttgcaactgcaagttcttcttcttcttcttcctccctctatcttgggaagggcttctcccatcgcaaattgtctcccagttatcacattcacaaaaccattgacgaatcctatgcagttatcttcgatgctggtagcacgggaagccgtgtacatgtctatcgttttaaccaacaattagatctccttcgcattggccaagaccttgagttgtttgtcaagactatgccaggtttaagtgcttacgctgagaatccacaagatgctgcagaatctcttattccacttttggaggaagcagaagctgctgttcctcaggagtttcaccccaggacgccagttaaacttggagcaactgcaggtttaaggcaattggaaggggatgcttctgataggatattgcaggcggtcagtgacatgctcaagaacagaagcacactgaacgttggggccgatgcagtttcagtgttgagtggaaaccaagaaggagcttatcaatgggtaacaattaactatctactgggaaacttgggaaagcattattcagaaactgttgcagtagttgatcttggaggtggatctgttcaaatggcttatgcagtctcagagacagatgctgcgaaggctccacgagcaccggacggagtggaatcatacataacggagatgttccttaggggaaagaaatattacctctatgtacacagttacttgcgatacggtatgctagcagctcgtgcagaggctttaaaggttcgtgattctgaaaatccttgtattttggctggctttgatgggtattacgtatatggaggagtgcagtataaggccaaagctcccccttctggctcaagcttcagccaatgcccaaattgttgttgttgaagcactccatgttaatgcaacatgctcttacaaggattgcactttcggagggatatggaatgggtggtgggggagctgggagaaaacaaactttttattgcctcatttttctttgaagttgccgatgagggctggtttttgttgatccaaacgcccccatgcccaaagttcgtcctgtgggattttgagaatgcagcaaaggttgcctgtaacacagaattaaaggatctcaaatccattttccctcgtgttaaggatggagacgttccttatatatgcttagatcttgtatacgaatatacattgctcgttgatggatttggcatagatccgcagcaagagattacgttggtgaggcaagttgagtatcaagattctctcgtggaagcagcatggccactaggcagtgccatagaagccatatcatcattacctaaatttgagaaattaatgtatttcatttaagctttaaaacgaggagccatatgtatgtgtggaatgaactccatcactcttaaataaaaatcgttttgttcctttttttctaaaaaaaaaaaaaaaaaaaaaaaaaaaaaaaagagaaaaaaaaaaaaaaaaaaaaaaaaaaaaaaaa

SEQ ID NO: 87317 - DNA, 313 bp, Glycine max
  unsure (1)..(313): unsure at all n locations
  Clone ID: PAT_MRT3847_49858C.1
gccaagccctatacaaccaaaccctaacacacacccatttgattcagtttccatggctagcctcaaggttgcatttttggctgcagtgctctgcatggttgtggtgagtgcacncatggcncatgcagctatcacgtgcgggcaggtgactagtagcctggcctattgcatcagcttcctccacaagggaggaacgtccgtcttcggtttgctgcatcggttgaagagtctgagtggtcgtctccagaccacctntcgtcgtgcgacggtgtgctcgtgcccaagtntggctgcgtcatatgttcgtttgttc

SEQ ID NO: 87318 - DNA, 411 bp, Glycine max
  Clone ID: PAT_MRT3847_49859C.1
cggctcgagcctgaattacagaatcaaatatggacaatatttaagaaatatgaaagctcaattgaagtcgaaatacagcaaagatctgttgaatattttgcattgagtagaaaagtctgcattgatcaaaaaggctgaagacactgaagtcgatacagcggaactaagtgctataaagttacgagctcagcagcaatcccaaacatcaaatgctttggttgtaacaggccaaagtcatgctaatggaactccacctgttggccaacttagccttgtaaaggtgcccagcatgagtagcaatgcggatgaggcagatcaaagattatcccaggaaaatgggactttgagtaaagtagattctcaacctccctctgcagatctccttggtgatctcttgggtccacttgctat

SEQ ID NO: 87319 - DNA, 762 bp, Glycine max
  Clone ID: PAT_MRT3847_4985C.1
tgactttgaagatggaagtgaccatgtaattgaatggtccaagagagtttctatcatcaagggaattgcaaaaggtattggttatttgcacaacaatgaagcaagcaagcctacaatagtacaccaaaacatttcagtagaaaaagttattctagaccatgaatttaaccccttgatcacagatgccggcctccctaagcttcttgcagatgatgttgtcttctcagctcttaaagcaagtgctgccatgggatatctagctcccgaataccttaccactggacgctttactgagaagagtgacatatatgcatttggggttattgtccttcaagttctatccggaaaggtattgatggggggtacaatccgggtggcagttgaagctttcagatttgaagattttgttgacacaaatctgaagggagattattctaaatctgaagccgcgattctttcaaagcttgcaattcagtgcactcttgaagtgccagagcaaagaccaactatggtggaggtgattcaagagctgaccatgcttcctaatccttcttcacattcttcataatctaccactttttctatgtgtataatgattgagacagtggagtacttgctaacatctcggctttctttttctttagcacagtcatgagtcatatataacatatcctttgccaaataattggttggttattctgcacgattcatagcgttgaaagatggtcttttactggcaataaatcggcaattcgaaggggg

SEQ ID NO: 87320 - DNA, 407 bp, Glycine max
  unsure (1)..(407): unsure at all n locations
  Clone ID: PAT_MRT3847_49860C.1
aaatttctttgcagccttggaatgctttcaggcctgatggagtaattatcttctcggacatccttacaccacttcctgcgtttggagttgattttgacatagaagaagtaaggggacctgttatacattcgcccattcgttctgaggaaggattaaaggttttacatccaattgacctggacaggcttaaatttgttggagattcactaaagatactgcgccaagaggttggtggtcatgcagctgttttgggttttgtgggagcaccttggacaatagcaacatatatagtggaagggggcaatagctgattacgttattttccaagtggagtctngggctcattgcatacaaatatttgattcatggngtggacaactaccacctgaaatgtgggaacgctggtc

SEQ ID NO: 87321 - DNA, 825 bp, Glycine max
  unsure (1)..(825): unsure at all n locations
  Clone ID: PAT_MRT3847_49861C.1
tcccggggtcgaacccacgcgtccggctaaaccctatttagcattatacatgagaagcttcctactgtatcgacttctactatttctattcttttgtcaacatatgctaaaattctgatgcacagtcaaccaccagaccctgaattacagaatcaaatatggacaatatttaagaaatatgaaagctcaattgaagtcgaaatacagcaaagatctgttgaatattttttgcattgagtagaaaaggtgcagctcctaatggatatattggccgaaatgcctaaattccctgaacgacagtctgcattgatcaaaaaggctgaagacagacatgaagtcgatacagcggaactaagtgctataaagttacgagctcagcagcaatcccaaacatcaaatgctttggttgtaacaggccaaagtcatgctaatggaactccacccggaccccacccagctgcgaatgacggttgcttcaggggacccaacactaacatttgagctgtgttggccaacttagccttgtaaaggtgcccagcatgagtagcaatgcggatgaggcagatcaaagattatcccaggaaaatgggactttgagtaaagtagattctcaacctccctctgcagatctccttggtgatctcttgggtccacttgctattgaaggccctcccggtatcagtgtccaccctcagccaagctccaattcaggattggaaggaactgtagttgaagccacggncatagtacctgctggagaacaggccaattctgtgcagccaattggaaatattgctgaaagaatttcatgctttgtgcatgaag

SEQ ID NO: 87322 - DNA, 350 bp, Glycine max
  Clone ID: PAT_MRT3847_49862C.1
gtcaacacaacagttgcccatcaccgtttatcctatcccagcaagaaccatgcactgcattttctgacaaattcaaccaatctgaattaaattcacattcacatcacgctgcattctttatttctccaaattttcaatttttttactagctaactaaatgaccagaagatgagtttaggacatattttgtatcattaaattccaacattatattacttttccttacttatctaatagtaattgtttttcaacaacttcatatcatattatattattccacaacctaggatccattcatttgagagttttaaagttcaacacgtacggttaagatacccccgccccccccc

SEQ ID NO: 87323 - DNA, 705 bp, Glycine max
  unsure (1)..(705): unsure at all n locations
  Clone ID: PAT_MRT3847_49863C.1
ccacgcgtccgaccggagaagctcagccgcagagataaggaaacgaaactccacataggaatcactttctttctttgctctcccccaacccaatggctacttccattaacagcagtgctctggggtggaaacattcatccttcttcgtacaatccaataatggcttcaacgttgcttcgcctcctttcaaaccaaagccgccacgctcctccaacttttctctctattgctctgccgcctcctcttcttctgatccactgttggttaaggctgctaggggagatcctgttagtcgtcctccagcatggatgatgcgccaggcaggaagccttggaaagctttcagaccagatggagtcattatcttctcagacatccttacaccacttcctgcatttggagttgattttgacatagaagaagtaaggggacctgttatacattcacccattcattctgaggaaggattaaaggttttgcatccaattgacctggacaggcttaaatttgttggagattcacttaagatactgcgccgagaggttggtgatcatgcagctgttttnggttttgtgggagctccttggacatagcacatatatagtggagggggttcancacgcacatatacaaccattaagagcatgtgtcacactgctccacatgtatttgaggacttttgctttctcatttgacacaggcaata

SEQ ID NO: 87324 - DNA, 1705 bp, Glycine max
  Clone ID: PAT_MRT3847_49864C.1
tgcacgccgtacgtaagctcggatttccccgcggttcacgatcagcctcaggtaaggaaacgaaacataggaatcgcttcctttgctctcccccaacccaatggctacttccattaacagcagtgctctggggtggaaacattcatccttcttcgtacaatccaataatggctttaacgtggcttcgcctcctttcaaaccaaagccgccacgctcctccaacttttctctctattgctctgccgcttcctcttcttctgatccactgttggttaaggctgctaggggggatcctgttagtcgtcctccagcatggatgatgcgccaggccggaaggtacatggctgtttacaaaaatcttgctgagaaatatccatccttccgagagaggtcagagacaactgatctcattgtggaaatttctttgcagccttggaatgctttcaggcctgatggagtaattatcttctcggacatccttacaccacttcctgcgtttggagttgattttgacatagaagaagtaaggggacctgttatacattcacccattcattctgaggaaggattaaaggttttacatccaattgacctggacaggcttaaatttgttggagattcactaaagatactgcgccaagaggttggtggtcatgcagctgttttgggttttgtgggagcaccttggacaatagcaacatatatagtggaagggggtacaacacgcacatatacaaccattaagagcatgtgccacactgccccacatgtattgaggactttgctttctcatttgacgcaggcaatagctgattacgttattttccaagtggagtctggggctcattgcatacaaatatttgattcatggggtggacaactaccacctgaaatgtgggaacgctggtcaaagccttatatcaaagagattgtaaatttggtcaagaaaaaatgccctggggtaccaattgttctttatataaacggaaatggtggtcttcttgagcgtatgaaagacaccggagttgatgttatagggctagactggacagtggatatggcagatggaagaagaagattgggtagtgggataggtgttcagggaaatgtggaccctgcctacttattctcccctcttgatgccctgactgaagaaattcagagggttgtgaggtgtgcgggacctagacggcatatccttaatctcggacatggtgttcttgttggcacacctgaagaagctgttgcacatttctttgaagtagctaggagcttgcagtttgacacactttttcaaaacaatactgcaaaaggccctaatcttgtaacttaagaacaaatgtcattagtgttgcttacttgcttcttgttttactttgtcttggagttagttcaagcccttctcgaaaggaagagtgtaggcttagtcctttattcttatgcttctatgaaatgatcaaaagtctgaggatgcacattgctgtaccggcttagatgaagttgtgattttacattctgctgtatttataattgattatgataaattaattggaggcttccttccattttggtaaaatcttcttaacttggggtggcaccctgtctttgtagtttgtactaatattttattttatttcaaagaattatttaatttaaaaaaaaaaaaaaaggacgaccgccgtgtagtaggggaatacccgggaat

SEQ ID NO: 87325 - DNA, 202 bp, Glycine max
  unsure (1)..(202): unsure at all n locations
  Clone ID: PAT_MRT3847_49865C.1
ttaaaccttcttttatattctgagtgtagctttaaaggccacttgcccgaatccccggtttgtcttntgtgacacaccactttttgtccgtcacaggatacagtggaacatttaccaaaccaatactaaaattttttgtgggaaagcagaacagagcaatggtttgtgagtattcctcatcgcaaactgctttatcatccga

SEQ ID NO: 87326 - DNA, 480 bp, Glycine max
  Clone ID: PAT_MRT3847_49866C.1
ctactgttgacatagacgcctactcatcacattgtcgtgcgcgtgatgatcccgatcggtcataactaaacactctacttcggcatatcccattggactcagaacgaagggaacacatcgggaaagagagcaccctggtcccccattagtggatgaccgcacaccgtggaaccaaccgggacccatcgacggctaccgtctcgggcttcaacaccacgaggcacacaccgaaaccctgtcgcgccacgacctcaaacccactgctattgccgattgcctcatcaggctcaacgccatcaaccattgtggttcaccgctcgcaactagaaacgacgacttgatcagatgctggagctacgggaactcttcacactgctgggatccacgtgctctagggatcactgacgaggcgtgtgactataggaaccgtgaaagggtaacagaccctgcggacattcgaggtgcataggacaacgacct

SEQ ID NO: 87327 - DNA, 605 bp, Glycine max
  unsure (1)..(605): unsure at all n locations
  Clone ID: PAT_MRT3847_49867C.1
aattcatacaaaaacattcatacaccttcnnnctcatttacaaatattttacaagtattagggctcttttctactaccaagatgcgtgattattcaagggaacctcacnnntggagaagagatcatttgttgtgacacattggcattgacggactgcaaaacatttctccttattaaatatgaactattcaaaagtcaagacatttcattttgtcagaatgcttaagtaagaatacatcttgaaggttggcaaaaaagatacttgggaggctaggagtatgtgtggaattgcatcattagtgagtacatcttactagattctgtacccgcgatttactttattgcttcatttatagggcttactgcgaagcaaatggatgaggtataccaaacaaaaagtttgttcagttacatactttatcacgtttcatcacattttaggactttattttttaaagcaatctacatcatgctcaaggatcataaaaaaatattccaaatgtgtaagtgacaagtgaaaaaaaaaaattggggagcgagaaaatgaaaaaaattgtggcagatcnnnccagattacatttagctattcagacctatctccactt

SEQ ID NO: 87328 - DNA, 316 bp, Glycine max
  Clone ID: PAT_MRT3847_49868C.1
cttcgctgaactcatgatgtcttcgggactcatctgcaacaattccatgagctgggtgacatttcacagcacgtacaatttcagttacttggtgaaaatcttgacacaccgtaacttaccaacgcggttggaaaaattcttaaaaaccataaaagtattttgtagagacaacgtttataatatcaagcacataataaggttctataacacactctacaacaaattaaaccacatcgcacaatcacttaacttaaaacacacgcgtaaaaattaccaccatactaaatcagacagcttactaacagtacacgcgttc

SEQ ID NO: 87329 - DNA, 1734 bp, Glycine max
  Clone ID: PAT_MRT3847_49869C.1
ggtccggaattcccaaaacgacccaccgtgtaaattcggctcgagaaaaaagaaatatcgtgtaaacattctccgctgtgaaagcttggcttctcttgcaccggcaacccttgatcgattgtttgttcgtgattatgatgtagttgtgtccattgtgcctcttcctcattcatcagttcttcctggatccacaggtctggttcattttggtcccccctcgtattcttttatgactccttggatgaaattggtattatattcaactgtagctagtgggcctctatcagttgttctgatgaaaggacagtgtctgcgcttccttcctgctccattggctggttgtgagaaagctctaatatggtcttgggatggttccacagtaggagggttgggagggaagcatgaaggaaatttagtaaagggaagtatactcctgcattgtttaaattcacttcttaagcattcagctgtgctggtgcagcccctaagtaggtttgaccttgatgaatctggaaaggtgattacaatggatatccctttgcccttaaagaattctgatggatcaaatacctatgttggaaaagacttaggattatgtgaaggggaaagttcaaaactgaattctctcctgactgatttggcaaacaagatggaactgtggacggttgggtatattcgcctactgaaattatataatggacgagaatcaaaccagttctcacctgaagaagagaagtatgaatgggttccgttgagtgttgaatttgggatgccactattcagtccaaagttgtgtaatgatatatgtcaaagggttgtttcatctgaattacttcaatctggctcatttgaaaaacaccatcatgcaatgcaaagtttaaggaaaaacttgcgtgacatttgtgctgagtaccaagcaacaggtcctgctgcaaagattctttaccagaaggagaaagctaaggaatcctctcgacaacttatgagttatgcaagtggaaggtggaatccgctcatggacccttcttctccaatttcaggggcctcaagtgaacatcaaaggttaaaactggcaaatcgacaacgctgccgaactgaagttttaagctttgatggcagcattcttagatcttatgctttaactcctgtttatgaagctgctacaaggcccattgaagaagctactcaagccaacacaataaaagctgaaacagatgagtgtgatagtaaagaagtaatccttcctggagtaaatcttatttttgacggttctgagttgcatccgtttgatataggtgcctgcctccaggcacgtcaacctatttctttaatagcagaggcaacagctggctcagcatctttagcaaccaaatagttctgcagttaacataggttacaccacttcgaagtgcatgaatggtaatgctactgtttggtttgttaccatcttcgaaattcttcgttgcccttatagttgggctctgattgaaggtaagtttcacattttccctgttgtaacactgttttagttgttaaaaactaccaaccttgtcgaagtgccaccagcaacctcttaagtctttgaaacaaaaatgtataatatgattccctaacagatttccagaacttgcaaataaaatttctgtttccaaggttattgcgttccgtttttaaaaatgtgaattcaggaaaaatatcgagcctgattaatctttttgcgacacgtccgttgca

SEQ ID NO: 87330 - DNA, 224 bp, Glycine max
  Clone ID: PAT_MRT3847_4986C.1
cggcgtacgagttccggaattgcccgcacgcgtcccgcctccgtcgaacttagcttactcatgacttcaagaggtggaaactcgcctgctgatcaaggcttctgctggacagttctatagacgttcttagcacaaggctctctctatgtgcaacacttcaccagacaatattaaatctgccactggttatgtaggaagctggtctcctcatggtactatcttat

SEQ ID NO: 87331 - DNA, 1608 bp, Glycine max
  Clone ID: PAT_MRT3847_49870C.1
ccaccgggtgcgagaagacgacagaaggggggagaaactagatggttgataagtactactataatagtataactaaggaaggagtaagggtgatggtggttctgatctgacttttggcggtgtgggagtcacgagagcagcaaggggaagtcacaagagtcacaagaatggagagaggttcgggcaagctgagcaggaagaaaagtggtggtggaaacggacaggttctagacggttctaatattatggagttggttggaaaccagcaagttttcaccaccttcgtggaccataagtttcacgagttagacacagacaaagatggcaaactctctgtcaaagagctccagcctgctgttgctgacataggagctgctcttggtttgcctgctcacggcactaatcctgattctgatcacatctattccgaggtgttgaatgaattcacacatgggaagcaggaaaacgtgagcaagagtgagttcaaagaggttctctcagacattcttttgggtatggctgctggactgaagcgtgatccaattgtgatacttcgcattgatggagaagatcttttggagtttgttaatggttcaggttatgaagctgaaatgaattccatattctctcagattgagtcccctaacagatcacttcatgatcatataattgaagctcttggcaagctcactgttgaacaaggaattcctcctacatcagattcttgggttttgagcaacattatggaacccgcactgctatctcaagctggctctgatttggataagtccgtttctcaagagacatttttggaggaatttaagatagtggcaatgagtgtggctaatcgtcttaaggagcaacctgtcatagttgctcacagtgagaacacctttgatggaagtggtgttaagagactattatccaacaagtttgaattggacaagattttgaactcagccatggagactatgccaaaagatcgaaatggaaagctttcaaaggagtatctaagggtggcactggacacggtggctccatctgctggtttacctcctgttggtgcaattgaagagatggacaaggttattggtgaagtctttaagatggtgaatgcagatgatgcgaaggtggtgaaagaagacgaattcaagaaactattaactgaaatactggggaacataatgttgcagttggagggaaatcccatatcagtttcttcaaattcggtagtacacgagccactagactcttcttctacacttctgcagccatcccctagtgaaacagcagcatagctgtgttgtttaagtatatgatgggtaaaagaaccgagcaatataataaaatttttattctatgtaaattattactggcataatttgtgttttgagctgtcaaatttaaatggtgttgtacttgagtcatcgttcaggctgtttgatcgtaacctaaaaagagtaagattaattattttactataatgcatacattatcaaaccattatggatattttcagatgtgatgtgattatatcctagctgctctatataatatgaagtaatattgatttatatcccaaaaaaaaaaaaaaaaaaaactcgagac

SEQ ID NO: 87332 - DNA, 300 bp, Glycine max
  unsure (1)..(300): unsure at all n locations
  Clone ID: PAT_MRT3847_49871C.1
gccgaaatgcttaaagagagttgtntagcgcctttaggtacccttatgtcgttttttcacaaccgaacggccgctttttgttttttttttttttttttttttttgggaataagtaaaaccccttttgtagttttgtgggaggaggacccttctgggggcttttgggggccgaacccttatgtagcatgatgggggccgtacctttatgtagatttttaacacctgtacccttttgtaggattatgagagccgggcccttttgttgcattgtgcaaggcgtccccttttttcaagatccct

SEQ ID NO: 87333 - DNA, 277 bp, Glycine max
  Clone ID: PAT_MRT3847_49872C.1
atgtaaaagaacaggatcataaccacatttctgggaattgttcttcctagatcatgtatgtggttctcataatggatatgaaatgtggacttctgggtgggcccatcacactttatggcatatgaggagtcttattgaccacgctaaacggcctacagtttacgatattctgtcgggaatatctctggatttagcaatcgctgtcgatactcttatgacacctctttctgcagcacaggctactgccagatgttctgacaatgccgaattctctgca

SEQ ID NO: 87334 - DNA, 393 bp, Glycine max
  Clone ID: PAT_MRT3847_49873C.1
acggctgcgagaagacgacagaaggggacacacagtgtgatgaagatgaaggtccttgttttcttcgttgctacaatgatggtagcatggcaatgccatgcttacgatatgttccctctccgaatgaacactgactatggggcccgtactccagaggtcacatgctcaagttgcaggcttgctgaggaagcacacaacatctttggctttgataccattcctgacgagtgcgttgaatcaacgaccgaatacatccatggcgaacaatctacatcagactccataacaggtaaccaacatgcttacttttatgccacagacctccaagtccatcccaaggacacattagagctcagtatacatggcaccgaactctctaatattccatactac

SEQ ID NO: 87335 - DNA, 242 bp, Glycine max
  unsure (1)..(242): unsure at all n locations
  Clone ID: PAT_MRT3847_49874C.1
tacggttgcgagaagacgacagaaggggggatagaaatggattattcatgcgtgaaagtgtggatagaaaagcaaaggtcacctcatcagcaaagttccattctattgttcatacttcatattacaaacaatgatttgcctcctttcacttgttaacgncagaaacctccaacttgcaattggaaaagaatgggtcgtcactctagacttggctacccaaaataataanctatgaaaacaaa

SEQ ID NO: 87336 - DNA, 567 bp, Glycine max
  Clone ID: PAT_MRT3847_49875C.1
ccccccccccccccccccccccccccccccccccccttttttaaaaaaaaaaaaggtgggaaaaacccttttacttgaaaaagttccttatggccaaggtttcaagacaagattaaaaacagttcctttaccctggtccccctttgatcaaaaaagcggggaaggttgaggcccattttcaaggccctaagcttttccaaaggataaggcctccaaaaaaggttccccaaacataataagttgcatacccctttttaagctttcaaccctttatgaaaaagtttttaacctttctttaagaagggaacataagtttaatatccctgccacactgtcacagaccctttggcgttatgttccaccttgaattcctttcacaaaaatttgtttatggaactgacccagctttcacagtcaggcttgctgttcattacagtttgggagaaaaatattttactgataaacaaaatcacccctttgggaggaaatacctttatgaagggccaaagaaaatgtctttgcgaaaaaaacacttcaggaaaaccctagtacccctcagttttgaaa

SEQ ID NO: 87337 - DNA, 169 bp, Glycine max
  Clone ID: PAT_MRT3847_49876C.1
acattactatgtgaagtgctctgcatccgcactccaagctgtacctgagatcaataagctctatccagtacatagcactaatgagatagagacattaattaccagtgcagtacgcttgctttgatatgcacacacacgttgagatacatggcatggaatcagtgacgtt

SEQ ID NO: 87338 - DNA, 314 bp, Glycine max
  unsure (1)..(314): unsure at all n locations
  Clone ID: PAT_MRT3847_49877C.1
aaantcgcanagcacacctacgnattctganagtgcngacttnctcaacaantcatcngnnatnacaannancaaacntagcnnngngctacaacaccatatangncatacgaccangnnaaacatngttgaantncgganntgaanngcttgnccctnanaatctcaacancatgagcngcaatntgncggagtcatgnnctaagactcatnncacgcganaggcnnctacntgccatcttcntcaccttatcnccggatnatcatcatngnacaagggnnnggancattggagatgnaantccngagtcctg

SEQ ID NO: 87339 - DNA, 714 bp, Glycine max
  Clone ID: PAT_MRT3847_49878C.1
agtccttaataagattgaactttatcaaaaaaagaaatgattaattgcacgatttctggttcatgtctttgaatttgacatgccaaaatcaacaattaattaatatcccagcgaattatttttaatccactaattgtgttttgatgatagtggcactcacttcctccatgtatggaaacaagtgtccagaacctggcacttcatggtaatgaatccagggaatattttgggcaatatagcgttgcaacataactgggacaagcttatcgtcatcgccttgccatagatgaacatggcctgtgctatctgggaaaggattattaatatcaaggggatcaaaatcccaacttccaaacccaactatggcgtcacgacaaatggattcagcttcaccttgttgctgcacctgtgactgttgttgtctgttaattaagaacttggaaacgattgataaatcttgattggagaaaacagcaggattgcgttgtacaacactagatgaaggaaaccactcctgagtaaaccaccaatatgttagccaaggaaagtagtgagcaactcttagtgcccattgatcatgtttgggttgcttgtagtaggcttttgtggtcatgttcaaaggaaggttatgccaccaataattcaccactggagtcattagtgtcgccccagcaagtctatgaggtatgaacttgaggcaaccccaaacctcgt

SEQ ID NO: 87340 - DNA, 253 bp, Glycine max
  Clone ID: PAT_MRT3847_49879C.1
cccacgcctccgaaaattaaccccctgaaaccctgtgggtaaaaaagggggttaacaaaggccctactataagacgggggaggatacaactaatttgtatttacataacattagtcaggcatgactagaaactaaatatgatggggatataaattgcaggtggtatggtatatcttgggaatctgctttacatggttgttaactgtacatactatgataaatgatggcagttaatgttgatcctgccttatgt

SEQ ID NO: 87341 - DNA, 470 bp, Glycine max
  Clone ID: PAT_MRT3847_4987C.1
aaaaaaaaaaaaaggggtttcaaggggaaaaaaaaaaaaaataaaaaagatttaaaaaaaaaaaacaaaaaaaaaaaaaaaaaaaaaaaaaaaaaataaaaaaaaaaaaaagggggcggccgttttaagggacccaattttccttctttttttttcccaggccatacctttttttggggggcccctaaattaatttctttggccgccgttttccaccgggggggttggaaaacccttggggttccccactttattccctttgcgaaacttccccttttccccccctggctttttaccaaaagggccccccccgttcccctttcccaccagttgcccaccctaattggcaattggccccccccctgtaccggccctttaaccgcggggggtgggggggttccccccagtttgcccgttacttttgcaagcgccttacccccctttcttttcgtttttttcctttctttttt

SEQ ID NO: 87342 - DNA, 295 bp, Glycine max
  unsure (1)..(295): unsure at all n locations
  Clone ID: PAT_MRT3847_49880C.1
gtcgcatgcacgcgtacgtaagctcggaattcggctcgagcnnttnttcgngnacaactactgacnangnnaactccaanngnaactatgcannctntcnaccncnngganngcnagcatcnacggccgactngcttactggctcnagcnnaatncanctgttttaatggngtgacgctcgccnannntatngtgacaattcgtgagccccngatcgtctnngagttncgatggcctgacgncgactnntgantgatngctgnatggtcattctgngtgcatngacccgnntgcg

SEQ ID NO: 87343 - DNA, 223 bp, Glycine max
  Clone ID: PAT_MRT3847_49881C.1
cggccgggccggccgcttcgccctacgcccagccgtccgccccctacaataaacctccgaagaacgagtcccactcccacagcggcggaagcggcggttcactgggctaagctgcgctggtgtttgggaaatgacgcgtttttcttttttgtgctgttggtttcgtttacctgcatgggaaacgcgtgtcgtgtgctttcaatgcgaattgggtgacgtggcc

SEQ ID NO: 87344 - DNA, 347 bp, Glycine max
  Clone ID: PAT_MRT3847_49882C.1
ggctcgagctgtttttggctgttcttcagccctgggagatgaccacactaagccattaccgcacgaggcccacgcccaactcttaaccgatggaacatctgctaatgctattattggaacggctaatgatcactttgacgccgggtgagccgctcgacaagcacagtgaggagcttgtcccactagcaacttgatatgacgcatgcacatgcgaacactccactacgaccgaagcatcattgcttgccggaccgactctggactatgcagcctggccctacccgaccgatggtgtcgcagcaacccatgcgagacggtcttctgaaccgactgtaccggacactctg

SEQ ID NO: 87345 - DNA, 168 bp, Glycine max
  unsure (1)..(168): unsure at all n locations
  Clone ID: PAT_MRT3847_49883C.1
gattccgcaacananagtagaaaanatggcgcggttgatcacagtggtgtggtaccgcggtggcggtgctactgtgcgccgcggcgggcgcgtcgtgggtggaggaggcggcgaacccgatacgaatggtggcgggggtggangcggangtngttcgggtnatannnc

SEQ ID NO: 87346 - DNA, 311 bp, Glycine max
  Clone ID: PAT_MRT3847_49884C.1
atcttcatcaacaaccataaaccatgaacgactttttaatatggagtgagcataaattttacacacttttttaaacattttttctaaattccatctaactcaacataataatttcttattttaacatcaattcactacttattcatttaaatataaaatcctttatttatttattccttaatccataattaattccatttcttcacaaaactctaccaatacacaccttattcttttacattttaaaaaaatttttacccccttttttcttctcactaattatttttccctattaaatttttaataaactt

SEQ ID NO: 87347 - DNA, 118 bp, Glycine max
  Clone ID: PAT_MRT3847_49885C.1
gcgccgccggattcccgtccccacgcgtcgttttctttcttgtctaggccctgagatcacattgaacagtgaaggctggggcttcagcagagggtacgaactacattttagaggaagg

SEQ ID NO: 87348 - DNA, 358 bp, Glycine max
  Clone ID: PAT_MRT3847_49886C.1
gggaaaccccgcaaaagaaatatcaacctttttcaaacagggaaaaaaaagaaacggcccttgaaaaaatactgcgccacaccctttacaccgggaacggaattttaaaaaaaacccccaaattgcccacctggggggcgcccacaatttccaatttgaagggaacacccccaacaaaaacccccgaaaagactactgctaaacccttcccaagggcgtataaaagaacactggtctttttcattccccccccccggaaaagggtcagctacacggcccccataggcacctacgtagacaaatgccccaaatcatgcaatctgtcaaaggaccgggcaaggaaaaaggcccaaacctt

SEQ ID NO: 87349 - DNA, 504 bp, Glycine max
  Clone ID: PAT_MRT3847_49887C.1
ctttttacttattacaccctatctttgttcttctctacattcttgttcaaataggggtagtctccaatggcttagttcatatataccctttaatatttctccttttaaaatgctttaatagaattcattatttttaattttctgctctctttaatttacttcacctaaccttactttctttaaaaattcaacatgacttttgaagttaagagtgattaaaactacttttttttttgtgaaaatagaggaactttgacaacatttaaccaaaagtatatgatctaaaatcacatttttaggataaccattcttagcattaacatggttaagttcaagtagatcaatattttatttttacatttttttacaaagagaaacacgttttatatcattagaatactccgaatctctaataaatgacattaattatatgctgcaataattttattgtctctagataaaaaagcaatatttctattatacatgcgaaaccaaaatgaataa

SEQ ID NO: 87350 - DNA, 694 bp, Glycine max
  Clone ID: PAT_MRT3847_49888C.1
caaagctctaatgggacgcgccactagggaaagttggtatgcttgtcaggtaccggtcttgttatttatttttgggttttttatttctattagtgtttgaagagaacagacacagaagtctctaattaactctacaaagtacaaacaccaaatcacatttattcaaccatacatcatataacaacaacaacaacaatactagaactagaagtgagaaattcaagacttttttttttccattttctttttgataagttcattttattttattttattttatttttttcaaggaaagaatgcaatgagcaatgcaaccaatgaaaagcatggatgcatgcgaatgatgtacagttgaagtattgcgaatttttacgcaggacatggggttgaatcaatttagattttcaacatggtccatgacatctttgtcaaggtgaaactggaagtaacaaggacatcaacaatcctaaatgtgtttggcagtagacgaagcagtgatgtaactcgattcatcttttgccccaatttttgcaagatggttacttccatacttcaacttgacttgatgaacttttttcgaaaaagcatgagcttagttcaatcctataatccaaggaatgataattctgatcaccaatacttcaacaacctttcatagggatgaatgactcgggcatactttaagctatgcatg

SEQ ID NO: 87351 - DNA, 1017 bp, Glycine max
  Clone ID: PAT_MRT3847_49889C.1
aatttcgggcggccacacgtccgctcgaagcttcaaagagggtttatgaagaaggaggttgtttcccgaacactatagaagtttgcagagtgagcaactgagcatatactgcatacgtaatggagttcccttcttcttcttcttcatcctccatcttctccccgcgcccatcagacgacaccgttttctacgccatataccctgactcacccaccgcaaccaccaccgtgacgctccagtccctccacctcaaaatcctcgaaaccctatctcccttcacccaagactacatatggcagcaccagcccttcgctctctccgtttcaactccgccgaacccctcctgcccctgcccctcctcctcccacctcccccacctccacggccacctccgcttcggcgacaacctcgacgacgagtggttcgccgtcttcctcctcttccaaatctcccaacgcttcccctccctctccattcgcctctgggactccgacggcgacttcctcctcatcgaggccgccttccacctcccccgctggctcaaccccgacagcgcgcaccaccgcctcttcctccgcgacggaagcctccacatcgtgccgcgtaaccgcctccccaacccctccctcattgactccctcaacttcatcgttaattcccctcacgaatccctcgcctccgacggaatccagcgcgccgtcagaaaacgcataagtaattaccccgaacaagctaggaagaacatgcatagggttagggttagggttccggtgtccgtggcgcaggttctgaagcacgagccgcggctaatttcccttgcagtggaagggttctacgatagagatatagacacgatgaagttcgcgtcgaggatggagaggtttgtggagagagggaaagcggaggagttggtgtgcgtttcggtgaagatgtcgagggcgatgtacgcacagctggtgcagcagaggtttcaggctcccaagtgttacccggggatgccggctcggagcgagaagg

SEQ ID NO: 87352 - DNA, 3352 bp, Glycine max
  Clone ID: PAT_MRT3847_4988C.1
gctcaacatctccacctcaaggtgaagttaggagtacagattctgaccgtgaaattcctattatgtctactttcacccgacaacatgctggtcttccagaagatattgcaattggttgaagatccgtgcacacatctttggatgggtctcatgtggctgaattcaagtaaatcaatggtgcaaatgatgaaggaaggattaataactcaacaaagaaccagtccctcgatgtggacggtcgcaacttctatgcgaaaagttataacctaaggtttccaattttcgaaaatggttatggtggctgttgtcgatgtcagtccccatattcatctgtggctattgaggcttgactatcttctaattcggcggttaatccgcttccttacaccaatctgcaattttgcctatagcttgatttactaccaactgcccatccgtctcgattgttgtttttgctgcagagaaagattgatggtggtgctattttttttttgtgtgtgtgaagtcaaagtcacccccaagcctcggagtagcatgtgttctgcaaaataacgacccagatacaggaacctaaacagtctacacccattctgtccctcaggctcgaatgcctctgtgccacacgtccggccggaactcagcctgatctgctcaagttgtctataggagaagctgttaattcaggtggaaatgatgacaagaactgtaattgaataagatttagtggaatggatgaaacccacgcgtccgattttcacgtagaagctgaaggttcttgtagctctacggaaattgctttggaggaatctggaatttgtccaactggaggctttgccttaaataattcttctgatccaactcaaagtagcacttttagttctgataactgctcatcatgcctaagtgagggtgataataatacaacctcgtcaaaccatgaaaatacagaatcctcaatcacatcggattcagaagatgttagccagcaatctgaagtaagaaataattcggattgtgtggaaactgtcttgtctcattgtcatgaagttgctgtagagaatagccagaatgcaagtggtgagggtttgacaagaaaatcaagttcactgattggtctgtccttggatggtacaagaaattatgcattggggaatcttgtggaaactgcccaaaattttgacaattgtttttccaccactaatgtgtgttctcaacttcaaagtatgcttccaccgttgtcaaaccaaaatatacattttccagtgtttcaagctccttcagcaatgggttatttccatcaaaatccagtttcatggccagcagctcccacaaatgggttgatacccttcccacactcaaatccctatttatttgctggccctcttggatatggcttaaatgaggacccacgcttcagcttgcggtatggagccttacagcaaccaacgtccttattcaaccctggtgttccagtttatcagccagttgccagagctaatgtcttaaatgcagaggagcggactcaagtttccaagccagcttctttgccagagcatcttaacggatctgttgcagaaatggtctttccagctggacctatttccaagagaccagcatcacatggagaagttaggcatgataattcttccaagccacttgagaataaaaatgatttttccttgtttcattttggtggacctgtagccctatcaactggatgtaaatcggcattcacttctttgaatggtgatactgttggcgatttttcctcaaaaagttcagcagatcatgtcgagaaggttcataattgcaataagaaagagactcccgccatggaggaatacaacttgtttgcagcaagtaataacctaaggttttcaattttttaaaatgataaggtgagaagtattaggtggctgttgtcgaatccagtccctatcttcacatatggtaatggaggtttgagtaccttgtaatttggtgaacaataagcttcctttcagcaatttccaatttagcctatagcttgattagttaattgttgcccaattgtctctattctttttattttttttggtgtagagaaagattgagagtgctggtattttaaagatttttttgtgaggtcataatccccctaaagtttcaatgaagcatttgttcttcataattctttttgttatactgaaactaaagcagtctttatagtgaaaagctgtattggagtttgagctgacattgtcattagtatgtatattgaattcaagttaagttctaggagatcaaaaggggaaagtatcagaaggttctttgagcatgctgaagaggccgaggaagaagaggatgatgattcagttgacaaggatggaaatgagcttgatggagaatgctcccgtccccaaaagcatgcaaaaagccctgaacttgctcgagaatttctgctagatgctgccactgttattttcaaagaacaggttgaaaaggctttcagagaagggacagcacgccaaaatgcacatagcatattcgtttgtcttgcactaaaactgctggaggatcgagtgcatgtagcatgcaaagaaatcattacgttggaaaagcagatgaagcttcttgaagaagaagaaaaggaaaaacgtgaagaagaagaacgcaaggagaggagaaggacaaaggaaagggagaaaaagcttagaaggaaggaaagactaaaaggaaaagaaaaagaaaagaagtgttcggaatcaaatgatgctcttggttctcctgaaatctcaaaggaagaattgtctgcagttgctgatatggagcaaaataatcctattagctgcaggagtttagttattgaagcaaatgaaactaatctattgggggatgattctcctaacatcgaagatgaagaattctctagtgagtgtaatactttgaaaccacatgacctctctcatgatgattgcggggaagaaatttcaaatacaaaagatgagatgggtcagtctacaattgaacaatcaatgctctcatcgaagcgatgtaaagaatttcaacttgatatgatggtccgaatgagctttaacagaaagttcagtacagcgtccatctcatccctcaactttccatcgtacgtgacccaaatcacctctactagtcacaatacacccttctctcctcctttcccacccattccaatggcgcgattagccagtcccacaatgcaatacggtcttctacttgtccccacaccccactgatagtcttctagccagaccccatcatctctttgagtgggctgtggggacaactgaaagtgatgataggttcccgctgattggcgtcagacatttgctgatgc

SEQ ID NO: 87353 - DNA, 424 bp, Glycine max
  Clone ID: PAT_MRT3847_49890C.1
gtgggggaagcttcaaagagggtttatgaagaaaggttgtttcccgaacactagagtctagagaagtttgcagagtgagcaactgagcatacgcaatggagttcccttcttcctcctccatcttctccccgcgcccatcagacgacaccgttttctacgccatataccccgactcccccaccacaacctccaccgccacgctccgctccctccacctcaaaattctcgaaaccctatctcccttcaccgaagactacatatggcagcaccaacccttcaccctctccgtttcaactcctccgaacccttcctgcccctgcccctcctcctcctcccacctcctccacctccacggccgcctccgcttcggcgacaacctcgaggacgagtggttcgccgtcttcctcctcttccgaatctcaca

SEQ ID NO: 87354 - DNA, 556 bp, Glycine max
  Clone ID: PAT_MRT3847_49891C.1
ggctcgagaggaaggaaaaatggagttgttcttctacgcggtgttcggcggtttgggagcggttgttgcagtgacggagctgagcaagagcaacaaggaccgaatcaacacctcttccgcattcaattccttcaagaacaactacctcatcgtctattccctcatgatggctggagattggctacaaggtccatatgtctactacctttacagtacatatggatatgggaagggagacataggacaactcttcattgctggttttgggtcttccatgctctttggaacaattgtcggatctctagctgacaaacaaggccggaagagggcttgtgtgacttactgcataacctacattttgagttgcatcaccaagcattctcctcattacaaagtcctgatgttgggccgtattttgggaggtattgccacttcacttctgttttcagcatttgaatcgtggcttgttgccgagcacttcaaggctatatttcttggaaatggtcttgttgctattttgtctgggctgtttggaaatgtacttgttgatacattg

SEQ ID NO: 87355 - DNA, 286 bp, Glycine max
  Clone ID: PAT_MRT3847_49892C.1
atatataagatttttttgactttttgggttcatgctgacgaaaccaagacacttgggtttaaaaaaatagtacgggggggtcaatccaaaaagtccggagcgggtcctagagattacacactggaaacattggggagtcaaaaggccttgacgatggacagagcaaaactggttcctgtgaaaaaaagtgctcccttcacaaagccacacaccatacgaccccgaagcacaaaaggtaaaacctcgggggccaaaggagggaacgtgcttcaattaatgggggagc

SEQ ID NO: 87356 - DNA, 221 bp, Glycine max
  unsure (1)..(221): unsure at all n locations
  Clone ID: PAT_MRT3847_49893C.1
ctggctctccaactctcggtctctctatcttttttcacaaaatattgatggngtttcgtgatcgtggttatactggtgtgatttttgcagtccatcatcacgtggggccgttggagcttgttgttgtaaaaagatcattttttcatcatgcttctctgcaaccctgacnagcacaccatctnacaaannnccccanctnatncacaaaatnnnangnatgg

SEQ ID NO: 87357 - DNA, 1933 bp, Glycine max
  Clone ID: PAT_MRT3847_49894C.1
cccacgcgtccgcccacgcgtccgtacggctgcgagaagacgacagaagggggatcagaaatcgtacagatacacacttggctgaggaaggtcggaaaagaaaatggagttgttcttctacgcggtgttcggcggtttgggagcggttgttgcagtgacggagctgagcaagagcaacaaggaccgaatcaacacctcttccgcattcaattccttcaagaacaactacctcctcgtctattccctcatgatggctggagattggctacaaggtccatatgtctactacctttacagtacatatggatatgggaaaggggacataggacaactcttcattgctggttttgggtcttccatgctctttggaacaattgtcggatctctagctgacaaacaaggccggaagagggcttgtgtgacttactgcataacctacattttgagttgcatcaccaagcattctcctcattacaaagtcctgatgttgggccgtattttgggaggtattgccacttcacttctgttttcagcatttgaatcgtggcttgttgccgagcacttcaagaggggctttgatcaacaatggctatcattaacattctcaaaggctatatttcttggaaatggtcttgttgctattttgtctgggctgtttggaaatgtacttgttgatacattggctcttggacctgtggccccctttgatgctgcttcatgttttcttgctattggtatggccatcatactatcttcatggtcagagaatttcggggatccttcagagaacaaggacttgcttacccaatttaggggtgctgctgtggccattgcttctgatgaaaagatagccttgctgggtgccatacagtctctctttgaaggttcaatgtacacctttgtgtttctatggactcctgcattgagcccaaatgatgaagagattccccatggttttatttttgcaacattcatgttggcttcaatgttgggaagctcgcttgcatcgaggttgatggcccgttcttcactccgagtagagagctatatgcagattgttttcgcagtttcttctgctgctctgatgctccccattttgaccactttcttggtagttccttctggagtgaaaggtggaagcatctcattctctggttgcattcagcttcttggcttctgtgcttttgagagttgtgttggcatattctggccatccattatgaagatgagatctcaatacattcctgaggaggccaggagcaccatcatgaactttttccgcattcctctcaacatttttgtgtgtgttgtgctgtacaatgttgatgcattccctatcactgttatgtttggcatgtgctcaattttccttttggtggcttgtatcttgcaaaggcgactgatggtgatttccgataagccaaaaacagaagattggcaattgaaggatagggatgccgagtcagaaccattgaacatttaactggcttttgcctgagttttgaggaggcaccgaacttagctacttaagtcttactaatgcagtttccgtctacatatgtgcacgatgcgatttgagtgaaggtaaacctgatgctcacaaagagaagggattgaaggaacaagcagaaaggacgagtggaacaatttttttaaagtgtttttggtataaatattgtagtgcattagatttctattgaggagaaatctccgttttggtagtactgatggtattcttttggggggggaggtgggggcattatctaagtttgtcccgttagggaatagtatatatgccaccataccatgtctttcgttgtcttttaattttgtaatgaaatcgcactccattcaattaatgcatcttttatttttatttcaaaaaaaaaaaaaaaaaaaaaaaaaaaaaaactcgagactagttctctctctc

SEQ ID NO: 87358 - DNA, 227 bp, Glycine max
  Clone ID: PAT_MRT3847_49895C.1
tcaaattctcgattggaattttatgaatctaggaacgaagggttacgattatggtaaggattgggaagccataagactaagagaacgagaggaagaacatgtcgattcaaaatgccagaagaggatttggtggacatcaaatttaggttgtatcatggttccgatatccgatccttcaggtattcctccgccgacaacggtcgatatgcctaatcaaaaggattgtc

SEQ ID NO: 87359 - DNA, 294 bp, Glycine max
  Clone ID: PAT_MRT3847_49896C.1
aatgagttagaccaaaatcacgggggccaattattattcagccgctcttccttcctcccccgaacactataatcatataatgcaaagctttagacgctgggttgagccaaaagccttcagatacgacgtgttcctgagcttcaggggctgggatacccgcttcagcttcaccggcttcctctacaagggcctcttcgaccacggattccgcaccttcatggacgaccgtgagatcgacaaaggctcccaaatcccccaaaccctccgcgaggcgatcgaggactctagggtttt

SEQ ID NO: 87360 - DNA, 313 bp, Glycine max
  Clone ID: PAT_MRT3847_49897C.1
ggctcgagggcacattccgcagacctcgacccgggcactgagacatgtcaacttctatatcctggagacaactatgaagaactggcctgtgcacagtctctctaatccagaatcgctctctgctcctgatctctcatgctcaagaacgtattcggcgtagaccggtagagactagtggacacgtacaacgcgcctgttctgcggctaaaagagcctgacacccataacagatgctgcgattgcacttcagctactgagtgcgctcgggctagcactgctacagccatcatgcaaaaggagacatctgaatcga

SEQ ID NO: 87361 - DNA, 212 bp, Glycine max
  Clone ID: PAT_MRT3847_49898C.1
ggaaaaggttcttcctgatcttccaatgagaatgtttcacaaggtttaaaagaagaggtacgagatgcaagattagaagttctagcaagcctaagacaagaaacagatgaagagcgcttgtcgtggaaagagctatctgcgttgcttagattagaatgtcgagagtacactccgttacttgcaatgattatggaatgtttagttcctaagag

SEQ ID NO: 87362 - DNA, 269 bp, Glycine max
  Clone ID: PAT_MRT3847_49899C.1
ggctcgagagccgatctatctctccctcacattggatactcatcacggcggccatggcaacaaagggggggtggcctcactgtgagcaatgtgcgcatgccccaccaacagcatattatcatcagaccagcggttcatattggcacctgtggcactatgtgccgcgacgaggcagggtcccatgcttgcaggtgcaccctgcaagatggcgctgtgtagccctcctgcactctggagaggacgcgtggacacactggggcccaggaccg

SEQ ID NO: 87363 - DNA, 671 bp, Glycine max
  Clone ID: PAT_MRT3847_4989C.1
cggacgcgtgggcgatagagcaggatcaatgagaagacacgatagagcaggattggctcgaagaaaaagaagaagcaaaagcaaccgaaacacacacagagagagaacaaaacgaagaagaagaagaacacagagagagagagagtgtgtgaaggtgatgacgatggacagagagaaggagagagagatagagctggagagtgcaatgtacacgaattgcttgttgttgggtctggatccggcgattatcggagtcggagcctccaacgcgactcctcgggtcgggcatttccgtcactcgaaccctaaattgggggaacagcttctctacttcatcctttcctctctcagaggtccaattcaatccgcgaaagatttcgataaggtctggccgattttcgattccgcgcagtcgcgtgattttcgtaaggttgtgcaagggattattagcgagcttgagtcgcagggcgcgcttccgaggagcaattcgagggtttcttcacttgctacatgctgtggacctaggtttgttgagcttctatggcaactttctttgcatgctttacgagaggttcatcgacggacatttactgctgacatatcttctaacccattgcctgcgccattgactgatgtaggcttttcacatgcggctactctacttgcaggtg

SEQ ID NO: 87364 - DNA, 337 bp, Glycine max
  Clone ID: PAT_MRT3847_498C.1
aaaattattctttttgggtgggggttttttttaggggatttttttttttttttatcgagattttttttctaggaaaggccaagaaacataatttaataacaatcatttctttttaaccgcatacacaagagttctataacaaaacgggctaacgggatgaaatgtccctgggctgggaacgggcttaagcccaaaaaccaggggtattttccggttgggggacaaaccttgtttcccaaaaaggccctaaagtggaaacacattttgctgaattttattggatggccggggggtcttataaccaaaagcaagctcaattaaaatatccaaccctttc

SEQ ID NO: 87365 - DNA, 428 bp, Glycine max
  Clone ID: PAT_MRT3847_49900C.1
ggttcacttacaaatgacaacctctcccccttttataggtttcaagggaaagttctagatacataaagaaagatttcatatacttcaagggaggattctacatacttctctcaactacttagttctacatgcttcttccaattaaatattacttctacttatctctacacttttctagaactttctttgaagtagtaacacaaatttaaatgggtctaaaacttgattaatgggttaaaccaagtttatattattcaacatagcaacattgagtttgcagcaactaataaaaccattacacactttacattagtacgttttagatatcagtttgtaatatggtaatcagagcttcaaagccgtgttaatggcttgtgatcctgaaaattatgctttgatgctgctgaacatggaagaacatgttcgtg

SEQ ID NO: 87366 - DNA, 605 bp, Glycine max
  Clone ID: PAT_MRT3847_49901C.1
ggcaattttctatattcttcttcatattcttcatcccgtggtggctgtggctgtggctgttgcaggtccttctccgaagcttcaaagttaactgagaaagatcctaaccctaacctaagcctccctccctcgttcccttaacggtctctgaataattgaagatttgtcgaagggatttgtttttgcttgtgtgctgtgttgaatgtgaaatttaagcattaatgtgttgggagctatgagattgcattgtttagcttgtggtgaaccttaattactgcgttggtgagaaaataaaatgccatctaattacttttcaaggctcgcagcttcgattcagagatcgattgcggggaaagaaggccgaatccgggactctgccgaagttctcattgggcaagggaagttgtggtttggtagttctaagttttttcattctgcgcatagctcatattgtgtggaagtgcagcttctagtttggcccgacgtagccttagcttcgagctctgaattaggtggcaaaaggagaacattgtctgtagttgacacgctgtctcggacattttcggttccgtcgggggcagggccttcgtttcaggtctgtggat

SEQ ID NO: 87367 - DNA, 526 bp, Glycine max
  Clone ID: PAT_MRT3847_49902C.1
gggggcccaaggggaaaccagggcttttttttatttatttcggaaaggcgggaggaaactaaaaaatccctttaaaaccggccccaacacccttggggaaggcaaaccccttcaaagggaacccctaacaaatttttctggaagggcacaaaatttttcgtaacaacacaagctaaaaaccctaggaggaaacaaaagaccttatgtccgcccaaaagggtttttaattaaaaacttggggggggaaaaaaaaaattaaaaaaataaagggcctcaaaaaaaacccattacaaccccccccatgaaaaacaagaaagcatcgttattttcaagggctaaatcgggtcatttcaaaacctgaaagggtgcaaggaaaaattcccaaaaagccccttaaaaaaagggggggccaagacccccccaaggggagggcccctaaaaaagggggggttttcttctgaaaaaaaccccttaatgggactaaaaaccatggagccccctttggcgggaacatgcaaattcaaaa

SEQ ID NO: 87368 - DNA, 337 bp, Glycine max
  unsure (1)..(337): unsure at all n locations
  Clone ID: PAT_MRT3847_49903C.1
accatcaggaaaaagaaaaatttattttctcaaagaagctcatgcaagattcaacagatgtgtccaggcaaaagggctcattctttgaaacgtaaaccccnatcaatcaaagggaggttcttttaaaattttccaaaaaaaacccttgagaaaagttattaagaatgctttttgaaatcaaaattacaggttttctttcaagtttaaaaaactttttaagggcccattggtttcaagggtggttaaccaaccaagccttctttttccggttgtggattagtttctttaagtccctggaactttttcttggttttggtacacccttttttgaaaactt

SEQ ID NO: 87369 - DNA, 824 bp, Glycine max
  Clone ID: PAT_MRT3847_49904C.1
aattcggctcgagcaaaaccctttgaggcttgatcttccttaaaccctacgcacgccttcgttgttgtcgtagactttggaattttttcattcccaggcggcgatggcggattcttcaagcaactcaaaggatcaccacaacacgcgcgtctaccacccttaccaggacctcaacgtccccatccagaagctctacaacctccccaccgcgccggagcacctcttcccggaagaagccgccaggacccaccgctcctggggcgacaacctccaatactacactggctccggctacctcgccggtgccttgatcggagccgccaggggcaccgtccagggcctccgtgaggctgagtccggcgactccctcaaaatccgactcaaccgagtcctcaactcggggggccacgcgggtcgcagactcgggaactcgctcggcgtggtgggcctcatcttcgcgggactcgagagtgggatgacctacttaaggggcaccgatgacctcgtcaacagcgccgtcgccggactcggcaccggaacgctctttagggccgccgccggaccccgatccgccgctattgccggcgccatcggcgggatcgccgccgccgccgcggtttccgggaagcaagctttgaaaagatacgttccgatctaggaaacaattaggttaacgaccatggggatggtggtacaaattagattaatattttggaattaattgtcttccttttttttttatcattatagtgtttgttgctattagtttcatattgcagttgtaatttgtaaaaccctctccataaattcatgtatttagtttt

SEQ ID NO: 87370 - DNA, 458 bp, Glycine max
  Clone ID: PAT_MRT3847_49905C.1
gtccggccataattgtagtaatcaaagaccaactccttggcttggagcatgcctatcacctctctactataaaaggttcgaaggacaattcctagcgcgagcttgggtccggggaaaaaccatggagagtattggggaggagcagcacgggttcttgtcggagaccgaccatgtttctcctacacgaagaccttgggagctgggcaataatggagggggaagcggactcgttgggactatgagtaaggctgcccggccgggaccggagctttttcatcggtgggatgataagaacattgtctgcgagaggaatagatggaagaagctcaacgcttggattgtggcacttagagcagtggaacccaacattacctagatggataaggtttatatcattaaggatggtatggagtacatccagcacttgcatgaacaagagaagaggatgcccgctgaga

SEQ ID NO: 87371 - DNA, 480 bp, Glycine max
  Clone ID: PAT_MRT3847_49906C.1
tcttctgggaagattgaagggaagaacgtgttctactggttccagaatcacaaggccagagagagacagaagcggcgtagaagggaaatggaggaaaataataataacaatatttctgcttcttcttctggtgaagggttgaaagagacaggttgtggagttaaagagacaaagaagtgggcatccacttcaaactgcagtggacatgcagaggaatctgctgcactggatatagcagaaaagggatctaatgggtggactcagtttgaggggaaagacagcatacaagttttgatgaggagaaacatagccgaaaaacaagctaagttgcaggaaattatggaaatgccttgtttccctcctgttactatggaagcatcaactcctacaacttcacacagaagaacaacgcattataacacacaacttttaacccctcaaaactataaataattaccatcttcagtcatcaacagagaa

SEQ ID NO: 87372 - DNA, 1492 bp, Glycine max
  Clone ID: PAT_MRT3847_49907C.1
cgagtagagctggcgcgagtttcattaatgtatccatgtctaccatcacctctaaatggtttggtgaagatgagaagaatgttcgcgctttattcacgctggccgccaaggtctccccaactattatatttgttgatgaggttgatagtatgctgggacagcggaccagagttggagagcatgaagccatgcgcaagataaagaatgagtttatgactcattgggatggacttatgacaaactccggggagcgcatccttgttcttgctgcaaccaataggccatttgacctcgatgaagcaataattaggagatttgaaaggagaattatggtagggatgccatctgtcgagaacagggaaaagattttgaggactcttttggcaaaagagaaggtggatgagaaacttgattttaaggaagtcgcaaccatgaccgaaggatatagcggaagtgatctcaagaacttgtgcacaactgctgcttacaggcctgttagagagttaattcagcaagagagactaaagactctggagaaaaagcagaaggatgctggaggacagaataacgatgtccaagaagctccggatacagaagatgaagttcaacatgataaagttattaccctttgacctttgaacatgcaggacttcaaagaggctaagagtcaggttgccgcaagctacgcagctgagggggcaggaatgaatgagttaaagcagtggaatgaattgtatggggaaggcggttcaaggaagcaacaacagttatcttatttcctataaaaaagttacggagggaagaacgactttgtggctgcatccttctagttactcttgctacatgagtggaagtatctggaggagaaaatgccctacgagacatccatggggcaatcaggagtttgccagtgatatacaatttgtgtatgatttccagtagaatctagttgcttcatatttaatactcgactaaatgtattggccacgtttggtactttgcccgtaggctgtcatgtgaatattgttgttgtagctaactgggcagcttatgtgagacccttagaaagctgcgttaacgaattgttcgaagtgcaatgaaagacaacggaatgacaaggggcgttaatgccatgacgagcgaagatggcgcaagtatgatcaatatatccaagtctaccggcacctccaaaagttttggtgaaggtgagaataatgttcgggcttgtttcacactgggccgcccaggtctccccaactattatatttgttgatgaggtggatagtatgctgcgacagcggaccagagttggagagcatgaagccatgcgcaagataaagaatgagtttatgactcattgggatggacttatgacactctccggggagcgcatccttggtcttgctgcaaccaataggccatttgacctcgatgaagcaataattaggagatttgaaaggagaattatggtagggatgccatctgtcgagaa

SEQ ID NO: 87373 - DNA, 383 bp, Glycine max
  Clone ID: PAT_MRT3847_49908C.1
tcgttctatttatccttattcatgtgcgtctgtcggtctccattcttgaataaacaaaaaccagatagaggaagaggagaagagaaccttgatgggagaaatcaaggaggagtgcgcgagccctgacaagaggaaggtggcactgtactcgagcggggagagcaaggcaaccgctagtgcgtgcgaaacggcgtcatcgcttggaagcatcagccccgaagtgtcgcatctcaggtgggggatgtggtacaagctccgagaactcgaagtcgccactaatgggttgtgcgaagagaacgtcaacggcgaaagtggctacggaagtgtgtaccgtggcttgtttcccgatggcaccaaggttgctggagacctggatctgattt

SEQ ID NO: 87374 - DNA, 478 bp, Glycine max
  Clone ID: PAT_MRT3847_49909C.1
tacaaaatgaaatcacacaaaggggatggagacattttgggggaaaatcattgctaattagtgggaaaacgaagttttctgtaggctaaaaaatggagagaatatatataattagtgaaaatttctgcatctctttagtctaataataagattcttattattccttaatagattaattatgatatctgactatttaaacacataaaatataaaataaagttcattaataataaataatataattatcttaaaatattagtgtaccttaattattactgaaacctattacaacaataaaaaaaaggttatacatgcagaattggtacacaggtaatgagtttaaaaattcgtagatgtgcaccaataagatgaaatgtgtttctgagtgtgacgctaagcattcttctttcttctgagaataaaagaaaaattctttgctaaagacaaaagtatacaatatacattcaaatttgatatc

SEQ ID NO: 87375 - DNA, 462 bp, Glycine max
  Clone ID: PAT_MRT3847_4990C.1
aacacaccattccccttatttcacatttcaatttatatgtcattgttacaggatttactttgcaatgggagcattgcaggtattggtgttggaaatacacaacgcatgaacacctcaaaagtgcactgcagatttgttcttataaaaattggattgatgatccacttgtgctgcagattatatatatcttgattcaggcaaatctacacttaattagcatagtcaaggcatcacaacaaaattgatatctttggtgaaacacattggtggttgatcctaaaaaatttcatgcagcctcttttcactgaataccgactcttgattttgtgcaatgtgtgttcacctttgaggtgtttttttttatgggacaatttatccacattaagctttctttacattcaagagtatgtattgctaggatttaaacgctgatcaggagaccaaatagcacatgagatgacc

SEQ ID NO: 87376 - DNA, 319 bp, Glycine max
  Clone ID: PAT_MRT3847_49910C.1
atagcattaaaggccacactgccacctgtcagattcgacttacggtgcgaaaccgggattggctatcacggtaaagggcctacgactctatctgtatactgaatgacatgtagaacctgcagtataatatggcctcattaagaggattatgcaacaatccaaatggaccgataacatctaacttgcggggacctaatgccaacggtggagttctagaacatgtattgcataacctgagctcacctccataagagagctttgggagcatgaccagtgcactgtatggccattcaccatagcgcatgagagctgcacagat

SEQ ID NO: 87377 - DNA, 410 bp, Glycine max
  Clone ID: PAT_MRT3847_49911C.1
tttttcatggggtaagggtctaaccctttttgttaaatgaaatctacctataaaatcaagctcacttgtacctgaaagttgtgcaccgcggtaatatcattctcctctcattgtatcaagagccatacacgagactatttcctgttcaaaaattgatgacctggggagcaatacgactactttgtctcataacccttcaatcaaatttttgctggtacgctatatgtgcctcaaaaaccaatactaactgtatctcaaaacttgatctaccccaatttgcatgtttcttccatcaagccctcgagttttaatgcaacggccatgaccccttaaagatatgctctacagaacttgtgatcattgcctatacatttccacacatgtacggtaactttaaacataacaggccg

SEQ ID NO: 87378 - DNA, 342 bp, Glycine max
  Clone ID: PAT_MRT3847_49912C.1
tgagggtaaaggcttttttatttttttttggcttcggaacattcattcaatgacattggtagcgtaaatacgtaatatacaagatgggatacattttatttatacaattattttgctggatatatcccaatggggaaacctatacaaaaaaccctcaaaaaggggggaaggaaaacccaaacaggcgaggaagagttttgatcccgcaccgcggtgaaaagaggaaccccaaattgtcgaagggggggcatcaatgcgaaaagggggccaaagcggaaaaggaaaaggaaagaatctcgtgattgaacaccgctaattagaagggggcaaaaaaaccccggg

SEQ ID NO: 87379 - DNA, 339 bp, Glycine max
  Clone ID: PAT_MRT3847_49913C.1
gaaaaaaaaaaaagaatattacttgccacatgaagcatgctcttggggagtaagaagattgaaaaggctctgattgtgtttgcaaagagaattgtgagcagtttttttcatctcaactaaccatgaagacagaatctcaaccccagcaactgaatgtaatttttcttccataccagctcctggccatatgaaccccatggtagacacagcaaggctatttgccaagcatggtgttggtgttaccattatcactacccctgctaatgatttgactttccagaaagccatatatagggatttcagttgtggaaaactgcatcaaaacacgtgtgattcaat

SEQ ID NO: 87380 - DNA, 205 bp, Glycine max
  unsure (1)..(205): unsure at all n locations
  Clone ID: PAT_MRT3847_49914C.1
acctctctttctctccaccaaaaagaaaatataanaaagcgagaatttcacatacacattagtctgcaagacgatgttcactgaaatgatggatacacatcatcaaccccgaaagaacagagaaaacgatgtgcaaaagataactgaagaaagagtagcaatagcagagccagcttcaccatccacttcgccttctcacgaattc

SEQ ID NO: 87381 - DNA, 767 bp, Glycine max
  Clone ID: PAT_MRT3847_49915C.1
gagcgccaagccaaagaaaagataatactaatactaacaataacaacccacgaagcttaggccttgcaaagtaagttcatttgactctcacaaaccttgcatccatccacacatggctggcatgaactctagcgtattggcctgtagctatgccatatctggtgcagcatgctccgagctcaatgggaaggtcacttccgtggcctctgttgcatcctctggctacaagttgccattgatcaaatgtgaggccagagttcccaaagccaaagaatctgaaggaaggagaggtgcccttgttctcttggcagctacccttttcatctctgcagcctccaattcttctgccaatgctgggatcattgatgattaccttgagaggagcaaggctaacaaggaattgaatgacaagaagaggttagctactactggagcaaactttgcaagagcatacaccgtggaattcggtagttgcaagttccctgagaacttcactggttgccaagatcttgccaaacaaaagaaagtgccattccttagtgacgatttggagcttgaatgcgaaggaaaggacaaatacaagtgcggttctaatgttttctggaaatggtgaaaggaggcaaccttttatgcccaactgcgaattattcgctttgcgatgtacctaactgcttgaatatataccatatttttctgcattgctttcagttattatattgttggtgttggattttagttgttgaagaaaatgtgtgaattaggcggct

SEQ ID NO: 87382 - DNA, 1228 bp, Glycine max
  Clone ID: PAT_MRT3847_49916C.1
agaaggtgggtgtgcatggattaaattagcagaactagatttcatttccaacactaccagatgatgttgtcgaggatggaggctgggaagaaggatggtgaagtgaatggcaatgagaaaaaggccatagggatggtggtgagtcctattcttttgcattctcttttaaatttaagttgtttaagggtaaattaacaatcaacttattattatgtgaccgcacgagggtaaatatggaataatttgtattataattgacatgatgccatgtgtttataaaaaaaactatttgacttatttgaaatttcaattctcaatttgactacactttttttcttctttttaaccccttttagttttaaatatttattttctttattatgtttgaacctcatgagattcatcttaatataatggttatttaaatgatgaaacatagataagtaatgtttctgttcctaaacttacaagataggtatgcactctatcgtgggtttctttctgttgtatctataccaatctcttattcagtgctgacatacacttttgttgcttgccttttaacactttctgttacattcatttcgttagttacccgactgatctttccaggagagcaagaattcactcagcgttacattggcatcaccaaaatttgcgtcctagagcagctgcatcatagctctaaaagaacccttttgtaatatgcattgttgcctagaaagtgaaactactatgaaattaacgttgtttcatgagttcttatcatgctggcctactgttgctaatctcactgtaaagaaatcaggaattaatgcatttttaaggaatttgtctttccatttacgaagtagtgaagttgaatcaagttaacaacatcgctagaagatagtaatagttaaacttcagaaactatcctcatacacattagtctggacaagttaattagttggagatgatagtatataagtagttagcctttcttcgatgcttcatatcgatggcaaattaatttgcattacagtttgtttaattctggtaatattatgtcttttgaggttgatttatattttcttcttgtacatgtatatgttaaagccatgttttgcattaatttcctttgagcactggtgaagatgctgttttgcttttgcgtgcaaaattcttcctgcttcctttcttttcatgacataatcttcttgattttgttccagcttcatttgttcta

SEQ ID NO: 87383 - DNA, 925 bp, Glycine max
  Clone ID: PAT_MRT3847_49917C.1
acggctgcgagaagacgacagaaggggaaagaagagaaaataataatatgaataacaacccacaaaacttgggtcttgcaaattaagttcattttcctccctttcactctcgtagacatcacaaaccttccctccattcatcccacgcatggctgccatgaactctagcgtattggcctgtagctatgccatatcaggtgcagcgtgttcggagctcaatgggaaggtcacttccgtggcctatgttgcatgctctggctacaagttgccattgatcaaagctgaggccagagttcctaaagccaaagaatctgaaggaggaaggagaggtgcccttgttctcttggcagctacccttttcacctctgcagcttccaattcttctgccaatgctgggatcattgaagattaccttgagaggagcaaggccaacaagataagtttatgtgctataggaattgaatgacaagaagaggttagctactactggagcaaactttgcaagagcatacaccgtggaattcggtagttgcaagttccctgagaacttcactggttgccaagatcttgccaaacaaaagaaagtgccattccttagtgacgacttggagcttgaatgtgaaggaaaggacaaatacaagtgcggttctaatgttttctggaaatggtgaaaggaggcaacattttatgcccaactgcgaacttttcgctttgcaatgtacctaactgcttgaatatatatcatatttttctgcattgatttattattatattgttgctgttggattttatttgttgaaaaaaatgtgtgcattaggcggctatttactctagattcgttgaaattacattttgcgatatgttttgatttcccaaattcatgttagcttttacatcattgcaaaatcatagaattggttgatga

SEQ ID NO: 87384 - DNA, 835 bp, Glycine max
  unsure (1)..(835): unsure at all n locations
  Clone ID: PAT_MRT3847_49918C.1
caaaatatgaatttggatttgatatttcagattgttaggttaaatgatttgtattttgaattatatcgtggtagcatcagagatggaaaaattggtatcaagtatatgattatgaaggaggtaacttattagtggaaaaccttgctcatagaacttgtttactttacagtaatatggatcaggtttgggaaaagtgacattgaaggtgttgtcatataaacttcctgcgctcttccacacatttttaattttcgtatccatgaggtggaaaagccctgtgtggtggaaaccttccctttggaatgtcaatctgattatatgacagttgcataatcacaatattattggattctattgtagattgcaatgctgaattttctctcacttcctgtaagtcacttattttcaaacttcactgtctatgttttcccaggatatagaattcgtgcaggttcttcatcgccagttcaccgaagagatgcagatcaccgttttggttctgattataataacatgccacgaagccgtggatatggtggtgggagagacccaggaagatatcgagacccttcaccctcgtatggtcgaggtagagtagggggcaggccaatgggtagagcttttgacgggcctggctttgcttctggacttgctagaggggaaggcaacaatcgaaataatgccaatgtgcgtcctagggagggagattggatttgtcctgatcccttgtgtaataatcttaactatgcaaggcgggaccattgtaacagctgtaataggtctcgtaatgcacctgctagaagtcctaggagggcttattctgcacctncaccac

SEQ ID NO: 87385 - DNA, 328 bp, Glycine max
  Clone ID: PAT_MRT3847_49919C.1
acccactccacgcttttgctttttcgtaccgcccacgcgtccgtgagaataacacatgaagaatctgttacagcttggacaacacatgagcgagctgcaacaactatgatggctgatgggtggccatactagaatgctaaggtgcatgagagaccagggactacactcccagacgatgaggaccatgctgtttagaatccaaccataaacaatatgacagcatatggtcttaatcctggtatggcaagatcttgacaattggacaccaaccctcacagcattggactgcaaactgcctggattcaagagccgaccacgctaacaccat

SEQ ID NO: 87386 - DNA, 354 bp, Glycine max
  Clone ID: PAT_MRT3847_4991C.1
actttttatgtcccaatagaaggactcggtggaaggaaaagttcactctgatgaaaaatcgggttatagatcgcacaatgctatctggactaggacacagtgggtagacggaaaaaccttcctatatgacataactggcgctggctcacagatccgaatagacgttcaaggaggtcatgatcgagaaacactcgagacgatggtgcccatgattgctacaaataattatatctgcagacaacagggttactgctaaagacaggaaacaacttgcggtagaattggacatctgaggatgttgaaaatacaaaagcgactcagttgaggaaataaatacctcattacataaggggg

SEQ ID NO: 87387 - DNA, 376 bp, Glycine max
  Clone ID: PAT_MRT3847_49920C.1
gaaatgcagattattggggtctagctactggttatgccagagcaggagcacccttggcacacttagctatctacagggcttgttgggactttccaattggcgattgcactgatgctgatatccctcaaggctttggacatggctatgcatgatggagtagatgacttaacctgattctcttgggctggccattcctctgttctcctatgtagatcaacgtgattcattagtaataggatcttattatgcaacttcctaaggggatcacagtgcggttgctctgccggaaattattgacctggcttttacaccgatacatatactgcaccatggatcattacagccggagctaccaccatagatagggcacttccag

SEQ ID NO: 87388 - DNA, 1503 bp, Glycine max
  Clone ID: PAT_MRT3847_49921C.1
ggtgatcgaaaagaaatatacagttgtattagaatcgagaaaagcgttaatctccgatggcttcgtccagggacaaggaaccagcgccgccacatcatcacccacctcttctgagcagcctcgtcgtccgcccctcccatacggatgccgccgcagccgccggtggtggtcgggctgccgatttcgagcccggcgaactccaccgcgatcctcctcccccttattcccgctccgatcgatatcccgatgaacctggatatagaattcgtgcaggttcctcatctccagttcaccgaagagatgcagatcgccgttttgcttctgattataataacttgtcacgaagccgtggttatggtggtgggagagatccaggaagatatcgagacccttcacctccgtatggacgaggtagagtagggggcaggccaatgggtagtggacttgctagaggggaaggcaacaatagaaataatcccaatgtgcgtcctagggagggagattggatttgtcctgatcccttgtgtaataatcttaactttgctaggcgggaccattgtaacagctgtaataggtctcgtaatgcacctgctagaagtcctcggaggtcttttcctgcacctccaccacttcatgctcctcctagacgctttcctggacctccgattgatcgctctcctgaaaggactttgaatggctatagatctcctcgtgggttggcaagagatggccctagagagtatggatctgctgctctgccgccactcaggcatgaaggcaggtttccagatccccatgtacgtagaggatttcattgaagatgcttacagggggagaaacaagtttgataggccacccccactggactgggataatagagatcgtggaagagatggcttctctgatgaaaggaaaggatttgaaaggaggccactgtcaccccctccacctcttttgccatcacttcctcaccatcgtggtggtcggtgggctcgagatgttagacagagaagccgctctccaataagaggtggcccaccaccaaaagaatatcgtcgggatacgttcatgcatcgtgcaagagatgataggcataggcatggaatgggacgagatagaattggaggaatgtattagctgcggatgtttaatgtactttgcgaaatgtattagcttcattagttgggatgaagaatttgagagattagttgctgaatcttcagaataggtcacaatgcattggaaaacttttgactttgtgcactcaaattgcgtggtttatgattttatcggtttgtttcaaaaaaaaaaaaaaaaaaaaaaaaaaaaaaaaaaaaaaaaaaaaaaaaaaaaaaaaaaaataaaaaaccacaaaaaaaaaactaaaataaccaaacacaaaaaacataaaccacacctaaaaaaagaacaaattcacattaaagaaaatcctattataacaaaagggggggccccccctttattgaatttgttccccccttt

SEQ ID NO: 87389 - DNA, 259 bp, Glycine max
  Clone ID: PAT_MRT3847_49922C.1
accaacctcatgaatttttataagctagaaaacaatgacgtactccaacttttcattaaaagcaaaaaaaaaaaaaaaaaaaggattatgcggatagatgaaaagaaggaaaagcaagaggtaataacttttcctcctttattccagatcagaaattaacccgagggaaccccggggggatcatgaaaataaaaatcactggctaaaggtgcatgctgggtggggattaacgcctatgtattgataagaccaggcaaac

SEQ ID NO: 87390 - DNA, 352 bp, Glycine max
  Clone ID: PAT_MRT3847_49923C.1
aaataaatatttaaaacattaataatattagttctgatcgctatcatcgtacaaacatcccataccaaaatgaaaaaaataatacaaagttacgaacgtagacaggttcaatgagttccaatgagtagatcataggtcatcgcctacttagggatgtcaattctagcatgatcagcccatttgggtaagtcggctacaggtagagctgggcatgcagctgagttcgtcctgagaaacctgcatcttcaaaacccgttacccacgaagctcgcccatacattagttacacaaaatgcaaaattaaatatggctaaattactcattagatccaaataatttcatgatttttacc

SEQ ID NO: 87391 - DNA, 587 bp, Glycine max
  Clone ID: PAT_MRT3847_49924C.1
gcctaagtctgtcctacacggatactcttgaaattgagacacacttttggtaaacttcttcacttaaaaccatgatgttcctagtcaaggtccagattaatctaacacttggccaatgtaacgtgttatacccaatgcacctcaccagaaaacacaacctcaggtaagaagctccgaaaagtgaaaagggaagcatcatcaagtgagaagccaaaaccagtgggcactcatgattattgttcctgagataagtgcaatatcatgagagtctaccatggcaagaccttcaaccaggttaaaatcaaacccgagatgactaggcaatacttttaaccaggttgaaatcaaacctgagatgatcagacattatctcgttgagttccttatttcatacaaacccatcaagcatggcagtgcaatacttaacacaaagaaccacccccagtgttccacgatgaggccaagtctaaatttggtataagtacaaaatggcgatatgcacaagacaaaaaaatatgtgacacaacaagttaaagaaaggagaaaaaaaaaagtgcattaaagtaaaaagaattgtcgagattaca

SEQ ID NO: 87392 - DNA, 352 bp, Glycine max
  Clone ID: PAT_MRT3847_49925C.1
ctgctctctgtctctctctctctctcttccatggaatacgctagacgccgacgcttgcactctctgcggccacgataaacgtcatcgcgaccagctgaggatacgccagatcactctctatactcagctacgtgagccccttactgtgacttcttctacgctccccggtcgccgacctatttatgctggtgctagcgactccgaagactgatcctagacgccggtcgccatatagctctctggtctgcgggccctactatgtcacttacattacctacattattgggtcgggtcctatcggatacattgagccgtactcggccaacacacgcggaccaggccgcatctacga

SEQ ID NO: 87393 - DNA, 1224 bp, Glycine max
  Clone ID: PAT_MRT3847_49926C.1
cccacgcgtccgggtcgcccttgcgtccggtgcttgtgaatctgccttcgaagagaatcagcccagcagcatttctagattcacgcttcttccactacactgcttccacttcctctctcttttctcttcgcaacaagccactctcatcccctacaatcacccatttgggcaacaccaaaccatcaaagagtttctcggttggtgcctcctcttctagggattctgttgtgactttgcttgattacggtgctggcaatgttcggagtgtcaggaatgcaatcagattcctcgggtttgacatcaaagatgtgcaaactccgcaagatattctgaatgcaagtcggttagtttttcctggtgttggagcatttgctgctgccatggaggtgttaagcaaaactggaatggatgaagcactatgttcatatattgacaaggatcgtccatttctgggcatttgtcttggacttcaactactttttgaatctagtgaggagaatggaccagtaaaaggtcttggcttaatacctggaactgttgggcgatttgactcatcaaatggttttagagtaccacatattggctggaatgctttacaaatcactgaggactcgggaattttggatgatgttggaaatcaccatgtctattttgtgcactcttatcgtgccatgccttcagatgacaacaatgagtggatatcctccaactgtgactatggtgacaaatttatagcatctattagaagaggaaatgtgcatgcagttcaattccatccagagaagagtggacatgttggcctctctattttgggaagattcttgaatccgaagtcaaacatggcaaagaagcctggggaaggcaaagcttcaaaacttgcaaaaagggtgattgcttgtctcgatgtgagaacaaatgataagggggaccttgttgtaaccaaaggagaccagtatgatgtaagagaacatacaaaagagaatgaggtaagaaatcttggcaagccagttgatcttgctggacagtactataaagatggagctgatgaggtcagctttctaaatattactggatttcgcgactttcctcttggtgatttaccgatgctgcaggtattgcgatacacatcagaaaatgtttttgtacccttaacagttgggggaggaattagagatttcacagattcaactgggaggtactattctagtttggaagttgcttctg

SEQ ID NO: 87394 - DNA, 485 bp, Glycine max
  Clone ID: PAT_MRT3847_49927C.1
ctacggctgcgagaagacgacagaaggggacacctggattgaaggttccttggcttcttcacactcacagcgtgccaccatcacgctacactaagagtgcaggaacatcctgtatgggttggaaagcagctgagaaactcattaggcactggaaaattctcagaggagataatgttatgataacaaggggcaaagataagggtgagaccgggattctaaagcgtgtcattcgctctcaaaatcgtgtcattgtagagagtaaaaacccggtaaagaagcatataaagcaagggcaaggtcatgaagggggcatctttacagtggaagccccactgcatgcctccaatgtgcaagttcttgacccagtgacagggtatgtcattgttcagatattgaactggtgattgcatctccaaacgggataacatcattaacatgtatgaaagtaagagttaccaacttttacttgtgcagcaagccttgca

SEQ ID NO: 87395 - DNA, 424 bp, Glycine max
  Clone ID: PAT_MRT3847_49928C.1
aaaaaaaaaaaaaaaaaatataaaaaaaaaaaatttaaaaaaaaaaaaaacaagaaaaaaaaaaaggaaacactaaaaatactgattttcactgatatattatgcaaggctccgatttaaaagctttctgttatatgcataatactttacttatttgtacgactcacaaatgctttgcattttttccccttctcagcatatctggctcgaagttattgttaaataacttgtacatcaatgacactcatgcatctagaagttctctgcgttcttaatttctgcttgccaatacactcctaatcaactttttgcacacccccttgacctatgcattaagcccttgaactttgcttaatactctccccatttcttgttcgctctcaaactccctatttcacttgcctttccctctttacccttcctt

SEQ ID NO: 87396 - DNA, 458 bp, Glycine max
  Clone ID: PAT_MRT3847_49929C.1
acggctgcgagaagacgacagaaggggctttgatttggacaattgataaactttcagacatatgaagttctttttagttccaatacacctcaacaccgaggtattacatatcttctcttctaggagttacaacaaacattggcataggcaaatatcaagggcgaacatctagtattgggataaggaaaaaaaatctatttacagtttcctcaaagatagggtttggaatgggattcaccatcagtcaacaaagttcatctccaaagtgggtatggagattttattatagtcagtggcccaatctatttctacattatgtatggatgtttttcttcttccttctaaccttcgggaagaattagaaaaaatgatgaatttcttttggtggggaagcaacaacaatcataataaaggtattcattggctaaattgaaaaagattatttgtgagaaaagaat

SEQ ID NO: 87397 - DNA, 277 bp, Glycine max
  Clone ID: PAT_MRT3847_4992C.1
ctgatatcagtgcacctcacacgcctctgttgtgtcatcctgtcaccgacattgttgcacctccgattgtaccatcttgtgaccgacgttgtcgcgcctccgttgtgagcccacaccgccaacgtcgtttgaattgtcactccaatttagaattgggattttcacaataacacgttttgacctcttgcttagaaagagaagtgcgctaagcgcaattccgattcgagagaggcttgcgctgagcgcgaattgtcgcactgagtgtcacaagtggact

SEQ ID NO: 87398 - DNA, 374 bp, Glycine max
  Clone ID: PAT_MRT3847_49930C.1
ggtcgacccacgcgtccggacctaggtcgcggcgacatggccaaacgtaccaagaaagtcgggatcgtcggtaaatacgggacccgctatggggcctccctccggaaaatggtgaagaaaattgaaatcagccagcacgccaagtacacttgctctttctgtggcaaaaccaagatgaagagacgagctgtggggatctggcactgtggttcctgcatgaagacagtggctggcggtgcctggacgtacaataccacttccgctgtcacggtaaagtccgccatcagaagactgaaggagttgaaagaccagtagacgctcctctactctttgagacatcactggcctataataaatgggttaatttatgtaac

SEQ ID NO: 87399 - DNA, 1475 bp, Glycine max
  Clone ID: PAT_MRT3847_49931C.1
ctcgagccgttgaagaattaagaagaaagtttttgtagttaatttttctccaaagggtatgcatgccacctcctcttgagtagtggaatattcataaaacgaagagcttaattgaactttctttcaacattttctaaagttttttcctaagatgtctatcatgtcactttttgtatggtacagaaggaaaaggaagcaattatcaaggaggggactacggaaatagaaatggaaggaactcgtgcaaaagagggaaccctaccaccgggatttcgatttcaccctactgatgaagaacttgtcacttgctatctcgtaaataagatatcagattctaattttacaggcagagcaataactgatgttgatctcaacaaatgtgagccatgggagcttccagggaaagcaaagatgggagaaaaagaatggtacttcttcagtctgagagaccgtaaatacccaacgggtgtgagaacaaatcgagcaactaacaccgggtattggaagaccacagggaaagacaaggagatcttcaacagtgaaacatcggagttgattggcatgaagaagactttagttttctacaaaggcagagctcccagaggagaaaaaagcaactgggtcatgcatgaataccgcattcactcaaaatccagctatagaactaacaggcaggatgaatgggtggtttgccgggtattcaagaagagcggtggtgcaaagaagtaccattcctccaaccatgcaagaacagtgaatccatacagcttggaaattggaccaagtatcatgccaccaccaatgatgcaactgggagatcctagtgctcatttcctttatggaagaaactacatgaacagtgctgagttagctgaacttgctagggttttaagagggggtggatcaaccagtagtgtcaacctcccaattcagtctcagttgagctaccctacatcatcatcagctggaggaggaggattcatcatttcagggctcaatttgaaccttggaggaggagcaacagccacaacacaacccattttaaggccaatgcaaccttctcctcctgtccatacaatggcccaagtacttgatgtgaattccagcatgatgacaaccagttctcttggtgctgagaataatgttggttatggaacagaagtgagtaacaatatgaattctcatgggaataggtatatgggcatggaccaccattgcatggatcttgacaactattggccttcctactaaattatgatgagagatttttatttagttaattaggcataatctattactatatatttagctttagttggatcagctaccataaaattgaagttctgctattttcttgtgtttcgaagttttatgccggaaaatgacgaccggtatggtattctagtgatcgtgtaccttttcaatccaataatattttaaatgtttgtttatcgattaaaaaaaaaaacgaaaaa

SEQ ID NO: 87400 - DNA, 427 bp, Glycine max
  Clone ID: PAT_MRT3847_49932C.1
acccagccagcgttgttgttttacacacttggtggttgcaaatagcattaccacaaagtggtgacggctccagatccgtgttagtcttgtacgaacgaggatcattggcacgattagtcaatgaagtcccatatccacgttcttgtgaagcacgttttcgagcggttatcaatgccatacttcctagcgactaatgactctaggcacatttttaatatctggcttagactaacggcgtggagaatgatgcaggctaccgtcttgtgattagcctttgagcattctatcatgcgattgatgagccatgcgtgatgccttctaacagccaaatgtgtatggtgcatccatattacaaacgaaaccagtctatctaccttgacaccattaatatggattcacttgcccggaaagccctggtcattgcaga

SEQ ID NO: 87401 - DNA, 437 bp, Glycine max
  unsure (1)..(437): unsure at all n locations
  Clone ID: PAT_MRT3847_49933C.1
gtcatttccatttagcgggactgtctttatttgaggatcaatttatttgtctcatttctgagcctagctttaagaggtaaaattactcatcggtttgttgtgtaggatatgtgacttgttgtatgcataggctgtatagacaccaacatccttttagatcttttgtccttttgatagtggtgaacaaacagctttaaggatcaaaggtataatgttttcatttcaaaaaaaaaaaaaaaaaaaaaaaaaaaaaaaaaaaaaaaaaaaaaaaaaaaaaaaaaaaaaaaaaaaaaaaaaaaaaaaaaaaaaaaaaaaaaaaaaaaaaaaaaaaaaaaaaaaaaaaaaaaaaaaaaaaaangggggggggccgttttaggggaccaaggttaacttcccggggtttgcaaagttaaagtttttttttggggcccccaaat

SEQ ID NO: 87402 - DNA, 255 bp, Glycine max
  Clone ID: PAT_MRT3847_49934C.1
aattcggctcgagatcgagccccggacactatctacgatggctttacgcctgggctatataacctgacaccggtgacacaaccatattagaagccataggcggcgacatggagagtctagatggagatagaggcactacctatcgtcgactcttgagcaccacgaaacaaaccaagaccatggatcgcagcgaacccggcgaggacgcccaagctcgcgcgccgatacgctcttgaatactccagactgcgaata

SEQ ID NO: 87403 - DNA, 1589 bp, Glycine max
  Clone ID: PAT_MRT3847_49935C.1
ggctcgagacttttgttcgtactgtccagcatttaccataatgctataattttaagaattttgataattctaattctatgatggtatgatatgattactgtcttgtcgggtccgataggaactttagccaatcagttttttgaatccaggaagctttcacaaccaaccttttccgatctttctctcaaaccggctcgcatttccagaaaaaccctgagcttgaagatggcccaagttgctcaaaacccttctcagcagcagaaagtcataataactaacaagtatggcaataaactagtgggcattttgcatgaatctggaaccaaagagattgttatcctatgccatggtcttcgatccactaaggaagacgatatcataaaaaatcttgctgctgctctagaaaatgcaggagtcagttcttttcgctttgacttcactggaaatggggaaagtgaaggttcatttgagtttggtcactattggagggaggttgatgatctgcatgatgtggttcaacactttcatggggcaaaccataaagttattgcaattattggacacagtaaaggaggtagtgtggtgcttctttatgcttctaaacatcatgacattaaaacagttgtcaacctctctggacgctcatgatctgaaggcaggacttgaagaacgccttggaaaagattatttggaaagaattatgaaggatggcttcattgatgtgatgcagtcaggaagtttttgattaccgtgtgactttataaagtttgatggatcgattagatacatacatgcatgaagcatgccataagattgataaagaagtgcagggtactcacagttcatggttcttcaggacccagttatccctgttggagatgcatctgagtttgccaagattataccaaaccaccaagctaattatcatagagggagctgatcattcatacactaatcatcaagatgaattagcctctgttgttgtgaaccgcataaaggaagccttggtccatttttctaatgatgtgtaattgtggtagaccttgcagttacgagccaattgaaattgcaacaggtgacaaaatttcagttgtggatgaacatgcctatgatgttctgcagcatgtttgagctcttctagtttttgcttataaaattggtgaatcttgcatcatgatgaaaataatggcgagagaaatatctgggagtatacaatgtcatttttaaattatcaattatgacaaatgcaatatgtaaacagttatctcatggtagcatatggtagccatagtggggggttattcccacattttaagggtctggggacacctcagtattatagaataagtgtaaggaaaccttatggtaaagactgtttagtcgtcacctgtttgatgaacatcttaaaaatgatgaaaatatttgtaagattgatttctagattgtgggtggcgtgaggatcccatcatactcacaaagcatgtgccatgagtccatgcttgttcaattcattgtcctctatatatcctgtgatacgaaaacatacaatatgaatgaaaattggtagtgatctattgtcatagtaaaaa

SEQ ID NO: 87404 - DNA, 512 bp, Glycine max
  Clone ID: PAT_MRT3847_49936C.1
cacggaaattttgtattacccacagttggctgatacgatctaaaagtcctcatcgaggacttgcatagcagccgtacgggtacctgaaaatgggggccaaaacagatgccaaagtgctataattctcagctttaattgaatcatacatcatgatgtaacaattttatgttacaggatctagaacaaccagatcttggtaccattctacaggttacaactactgatcaggcggagattggtaattatcatttaattagattggccaaatacttacgaccaaagatcctctcctttacaggatgggaaattctgagggccattatttagacttcctagatgcatcttttacagttgtatacttggcccttgaacattgactgctccggtttaggagacaaattagccacactcctgagctggtgctggttatatttttcgcgcctggagtggcgagaacagcctttcatatcatggcgctaatctgccagagcaaggacggttgttttaagctc

SEQ ID NO: 87405 - DNA, 462 bp, Glycine max
  Clone ID: PAT_MRT3847_49937C.1
ttttatttttttttttttttttttttttttgttttgttgtttttttttttttttcttttttaaaaaaaaaatttgctaaaattttcaaaagaagatgcccatggggggttaaaagggacaattgggtccttttgcatttacggggggaaaatggggtcccacaactccccagttttttaagaagggtttttgggggaaacggccagtttcaaaaaatttatggggaaagggggggaaacagggattttttgccccaaaagggtagggaccgaagaaaagcccgggggggggtttccattattttagaacccgggtttggggggccctttggggcgcttgggaggttttggtaagaaagcgccggacaaggagaattactttgctttttttcacccccgcccgagaaagggggtggggccccgcttggaggtaaaaaattgggggggggggccctgggtttta

SEQ ID NO: 87406 - DNA, 373 bp, Glycine max
  Clone ID: PAT_MRT3847_49938C.1
gggggggtgaaccaaattaaaattcaaaagtaacttataatgggccttacagaggaaagacagaaaattggccaagaagtccccgaaatcaatggagttgggtaaaacaaactattcaagtttttaaatgggtactatgggtcaaggccttcacaaaaattaaaacaattaaaggaaaaatctcttttccatgattggaatccatcataattttccccaatgaaaaacaagaaaaagaaaagtttcacttgaattaatacctaaccaatctcacattggcttgaatatttggccggtttttccattaaggggagggtggtatgaaaaagttctgttctgatccataaaaagacaaactttaaatcctcccaaa

SEQ ID NO: 87407 - DNA, 696 bp, Glycine max
  Clone ID: PAT_MRT3847_49939C.1
ccacgcgtccgattttatccttggttctagatatgaatatcgtctcagtaaatttggtacgtttaaaggtagatttaaatgtaattttggtctccctatttttcaaaatctgtaattttgatcctcctattttaaaatagagaaatttagttctcatattttttaaaatccataattttagtccatttattttaaaatagagatatttaatcctctagttatgtgaaatctacaattttggttcttccaataaatttgaaatgtgttggttggaaagaaattaacctgatgttgtccaaatttagtgacgtgacatagatttatttgtctaatctactcattgtcaacattaatatcttaaccatttaagccttgaagttttgcttttgggaacttagtgcatgtttgaataaccattttgaatatactttggggaagtgcttgtttgggtgacggttcaaacttagttttgggtgctgaacacacttttggaaaataacattctttgtatctcttattctgggacgtatttttgaaagggtgcaacagttatccaaacatgtacttattcattactttttggtcaagaagttattgcttgatgaagttatattttatgaattccctttccagggtcaagactcaagagtgcaatttggggaacaataattatgtttttgcattatgaaccttgct

SEQ ID NO: 87408 - DNA, 471 bp, Glycine max
  Clone ID: PAT_MRT3847_4993C.1
cggatgtctattctgtccccttctatttcaccaaatctcacacctatccttctacttattaaataataatccactttacacactaggtttttttttagcattattattattactataatataacgtttgaaattgaggtcattcatttctattctctcttgttgattagatctcattttctaattccatgtcggttctgtcgtgattttgtttgttgaccatgccattaattaaaggttctatatagaatttagatattagattagattctcttccaccacttcagtgagctgtttctggtacggactttggaggccaagatactagtattttactattttaagcattatgatgtatgcatcttaccctccactagttaactattttcccacttatattatattttaagtatagttatagttaaagtagttaataacatgcattttagttaccttaaaaaaaacatacatt

SEQ ID NO: 87409 - DNA, 631 bp, Glycine max
  Clone ID: PAT_MRT3847_49940C.1
gccagattggaaatattctctctaaatccaattaatgctgccattcacatttaacacctctggcagcatctagcattcattaattcattgagcttgtgactaagtttattaatcctttcactcctttcatatattaaaacccctcccattccattttatttccctctagttttcatcttctgatatatcaacttcaccagatcgtgcacttagaagttcatcactttatcatcaagaatgatgcaagactcaattgggatccctgcttgcttttcttcttcagcagagaagcagcatagccaccacgatcatgatcatggagctgtgacccgttctggtcagagcgtgtacatgtctgtgtatagaacaaaggttgctgatcactgccgtttgatcaccattacatggtgcaaaaacctcttgcttcatgggctttcggtgtcagtggaaggcccagaaggagaagaacagtactacacctgcaaggtcgagctgaagccatggtacttttggaggaaacaaggttccaagcgcttcatagtagatggcaaagccgttgacattttctgggaccttaaagctgcaaaatttaacggagaaacagaaccaacctcggagtactatgtggcag

SEQ ID NO: 87410 - DNA, 347 bp, Glycine max
  Clone ID: PAT_MRT3847_49941C.1
ccatgtcgtattcaaaaacattgggcttgaagccaagacttcaaattaaattcttcctggtccactcccaaaaatccttttatagaaactatcgggggtctagctcgaccaaaatcctaaatgaaagagatcctaaccttttgttatttaaatctgaagggaactatgatttcatagtaccacaggtgtcaccattacaaggtggggaccaagtcaccctttcaaggaacaaccgacagaactttcaatacaaccatgtcatttgaccggattgctaggaccactcactgacttacctctagtcctcctctacggcatttgccgccatcaggaatgttttaccatca

SEQ ID NO: 87411 - DNA, 181 bp, Glycine max
  Clone ID: PAT_MRT3847_49942C.1
ttcagatcgaacgaccgtattggacacccggtgtactacaacgactttggagaatttgaggacaaggagttgtacagcaagacgtttttggacgaggaaaagaggaacaagttcataaagtggaggattcaaccttttagaaacaactttagaaatttgtcaaccccttgcattggtgatt

SEQ ID NO: 87412 - DNA, 241 bp, Glycine max
  Clone ID: PAT_MRT3847_49943C.1
tcgccagagggggagttctcaattgctatacacttttccacggacttgctcagggagcctgccgatgggttgatctacttgcacccgacagctataggttcccaggttatgtactatacatgattccagaagagatatataatgttaattagacaccaatcataagtgataagaccttgatgaaaagaagatgataagaataggtgtttcaaggattatatgatatataaaatcctatata

SEQ ID NO: 87413 - DNA, 178 bp, Glycine max
  Clone ID: PAT_MRT3847_49944C.1
cataaaatgaccatttttcttcatgttattcttacgctgctgttcctacttccttgcttatttaataaaaaggacgggacccaatctcacaccatttttcatagaccaaacatatttccctatatttaattcctacttgttatacatacattattagaattattacattctttatata

SEQ ID NO: 87414 - DNA, 415 bp, Glycine max
  Clone ID: PAT_MRT3847_49945C.1
cacagccatagctgcatatcccacttttgctttggtgagggaatcctcactctctgacccctcctaggcacaacctctcaacaattttgaagctttgggcgctaatttgacccgcggagatctgtaccatcctgagaagttggtgacagctatcgcgcaagtagatgtcctcatatccacgctgggacacctgcacttcgccgatcagctcaagatcatcactgccattaaggaatccggcaatggtaacaggattttcccgtcggaatgcggtagcgacgcgcgacgcgcccatgccgtgagaccaacaacatctgcattagctatctcagccctaatacaaacgatcattgtagttcgacgcgtcccctatacgtacttgtcagcaactacttggctggatattttgttgccc

SEQ ID NO: 87415 - DNA, 572 bp, Glycine max
  Clone ID: PAT_MRT3847_49946C.1
gccatgcaaaggccttttatattataaataatagcacttgggaggaaataaccttagaactctaacaccaattcaaaactctatgtctcatacaattagtcaattagataattgcgaaaattaattatatttctcaaccaaatggggagcttctaccttgtgccacagaactagaattgatcataggactagtcctatctggttgaagtggtgatctttttggagaaggcctttctaccttcatagatgcatcaaatttgttctgatcacttacactttctccatggagtatcattggttttgtgtcataaatctccgatatgggatcactatccattgatggtggtgaaatctgaaccttatgatcacctttgaaagggtcatcttgaggactaatgcatgatgaagctgttcccaaatcttgaagcctgagatcatcactccaaatcagtggactctttccactaccactataggggcaattaggcctgttcttacccacaaacaaagtttcattgttattatttagagggcttaaagccatcaagttgtttggtcaccactggcataaa

SEQ ID NO: 87416 - DNA, 2148 bp, Glycine max
  Clone ID: PAT_MRT3847_49947C.1
ctcgagccgctcgagccgatttgattcttgtcttcctcgccactgttcccctgtctccataacaaaccaacactcaacctcactcactcgctcattcgctctcttcacaatttccagatctgaaatcaaaatcgaaatcgaaaccgaagagagagaaaacgtgaaaccgagagagagagagagagagatgagggaaccatcgtcggtgggattcgaaggcaacggcgtcgtttcttcgccgccgcaagctctcatcgagagactgaaagactacggccaagaagacgttttcgccctctggtacgagctctcccccgaggaacgcgagtttctcgtcaaggacattgagagtttagatctttcgagaattgaccggattattcgatgctcgctgcgatctcaaggactgccggcggcggccattgagccggtgccggagagcaatgtgtcgacggtggaggagagaagccaggaggatcgagagagatggttgaaaatgggattgaaagctatttcagatggcaaattagccgtgttgcttttatctggtggccaggggactcgacttggaagttcagatccaaaaggatgtttcaatattggacttccatctggaaaatcacgcagtgtgtcgacggtggaggagagaagccaagaggatcgagagagatggtggaaaatgggattgaaggccatttctgatggcaaattagctgtgttgcttttatctggtggccaggggactcgacttggaagttcagatccaaaaggatgtttcaatattggacttccatctggaaaatcactttttcaacttcaagctgagaggattttgtgtgcacagagactagctgctcaagctacaaatgagaattctgcttcttcagtgcaaatacactggtacatcatgaccagtccattcactgatgaggcaacacgcaaattctttgaaagtcataaattttttggtctcgaggcagaacaggttacctttttccagcaaggaacaatcccttgtgtttccaaggatggtagatttattatggagactccatacagggtagcaaaggctcctgatgggaatggtggagtgtattcagctctgaaatctaccaaattattggaggatatggcctcaaaaggaattaagtatattgattgctatggagttgacaatgcactagttcgagttgccgatccaacttttttaggttacttcattgataaaggtgttgctgctgctgcaaaagttgtccgcaaggcatatccacaagaaaaggttggtgtgtttgtaagacgaggtaaaggtggtcctcttactgtagtggaatacagtgagttggaccagtcactagcttctgcagtcaatcaagcaactggccgtcttcgtttttgttggagtaatgtctgcttacacatgttcactctggattttctgaatcaagtggcaaatggccttgaaaaagacagcatttatcatcttgcagagaagaaaataccttccatacatggatatacaatgggattaaaacttgaacagtttatatttgatgcatttccatatgctcctacaactgcactttttgaggtgttacgggaggaggaatttgcaccagtgaaaaatgcaaatggatccaatgttgacactccagacagtgcgaaactacttgttcttcgactccatactcgttgggtagttgctgcaggtggcttcttaacacattcagtgcccttatatgcaacaggtgttgaagtgtcaccactctgttcgtatgctggtgaaaacctggaacctatatgtcgaggaagaacatttcatgcaccttgtgagatctcattttagttccaccctgtttctgcagcttttttgagggagatctcagtcccatacatgttgccagattaatttgtgtatcccataattcacatgtatcaatgtatattatcttctccaatctgtttctgattggcttttggtttttggtttttcttttttggccactgatttgttttagtgttgctgaggaatgtacatgtatcataattttactgagcatttatttgcccatgcagactccaatatatcgccccattttcctttttcctaaaaaaaaaaaaaaaaaaaaaaaaaaaaaggctagttctctc

SEQ ID NO: 87417 - DNA, 580 bp, Glycine max
  Clone ID: PAT_MRT3847_49948C.1
accagtttatatttgatgcatttccatatgctcctacgactgcactttttgaggtgttacggtaggagtaatttgcaccagtgaaaaatgcaaatggatccaatgttgacactccagacagtgcgaaactacttgttcttcgactccatactcgttgggtagttgctgcaggtggcttcttaacacattcagtgcccttatatgcaacaggtgttgaagtgtcaccactctgttcgtatgctggtgaaaacctggaaccaatatgtcgaggaagaacatttcatgcaccttgtgagatctcgttctagttccaccctgtttgtgcggcttttttgtgacttacactacaatgagggagttctcagtcccatacatgttgcaagattactttgcgtatgccactcatcattcacagttatcaatgtatattatcttctccaatctgtttctgattggtttttggttttttcttttttggccactgatctgttttagtgtgctgaggaatgtacatgtatcataattttactgagcatttatttgcccatgcagactccaatatatcgccccattttccttt

SEQ ID NO: 87418 - DNA, 355 bp, Glycine max
  Clone ID: PAT_MRT3847_49949C.1
cccactcgtcctaccacacatcctatcaaaaattgtaccttgtctaaaatctacgaaacataagaatttatgatcaattatatataacgttctgaacatctattaacacacttatacttactcccacatttataataaacatcattaataccaattcatatcacattatcacattcactctaattatacaatatcatctctatcctacatatcacaattaatattaccattctcaaagaccaattcaataacaatccatcttcttccagtcacattacttattatatacaacctataaacctatatattctaaactacgctaatctactcaactacacacataccattcatatac

SEQ ID NO: 87419 - DNA, 243 bp, Glycine max
  Clone ID: PAT_MRT3847_4994C.1
attaacttgaacctttattttttgggcggggttggactttagaactgcacaaccgatacttcatctcaaaaaatgagaaacggaaaacaaaaatcacatttaatggatgctcttctccccccggggagcgctcttttcaataataactattaacatcaacgatcaaagcctacaattgtgggtgcactttttaatacaactgccctagctggggaatgttatcttctgaaaataaacaataac

SEQ ID NO: 87420 - DNA, 412 bp, Glycine max
  Clone ID: PAT_MRT3847_49950C.1
catcttggcaaaaggtgtgctgactgcacatgacacgtggatacctatacacaggggaccacttggaaccatctggtccagtcatggagctagactacttgactatggtccaacctccatctgaaccttacaagaggatgataaatgttcttaaggtcccctctctgtatgcttggatgcgagtgctcaccgggcaactgatgtctgcaacgcagtagcactatgtgcctactggatatatatcgcacaccctgagtcgttctccttggctgctcaaagagagcttggtggaaaaatcctgctgcgaatgctatctgaggagtacgtgctaactatgaccgtgcttggaagcgcctaactcatggatatcactcaagggctcatggactctcatagtgaccaagctcagata

SEQ ID NO: 87421 - DNA, 350 bp, Glycine max
  unsure (1)..(350): unsure at all n locations
  Clone ID: PAT_MRT3847_49951C.1
tcgagggaagtctagtactaagggtgcactctaaaactttnntgactatttctaaactggtattgtgcttnnttgtaatgtcttnnngtggtggcangnttgtgtgtttcactcttggtagcgtaggctcgtgtaaacttgtaagctgtatagtaaagtggtctaggtagtgnnttatttgttactaagcttggtcattattcacgaattggagagggtactttgtggtaccttgctaagggaacttggaaaatattgtattcgaattactttgcaagtcttgcatgtggtgcataagtattgtcataaggaactgaagtcttgtcaagtttggatatttatgctctggg

SEQ ID NO: 87422 - DNA, 628 bp, Glycine max
  Clone ID: PAT_MRT3847_49952C.1
gattcttatcaggctctactctactgcttaaccttctgctctagaaaattcagtggtgatacatggcttatggtactctctatgtagccaaccagccctgcagagcaaatgaggaaaggcatcctctgaattctctggcctccgcatctcattaagcttcctttccttttctagaaaatcttcacaggatgttgccattctgtacattgccttacacacctatgcagaatggaagcactgagaggatacagcaagggcgtgacatagacctaactgaatggtgacattaacggataaggacggattgaaaggaacttattgacgagctggtacggacggacagactgctcttttgatgttgttgacataagcgacaccgtgtggtgggactcaagcctattaccttgagagacactattcgaggctaaaaaccttttaggccgaggctagccagcggacacggacatcatctatgtggatgggatggaaaatgcagatgagtgtgaccgtagccctgccaagcttccttgcaaggacatgccgatcgactacatccaatgaaggatgagctatgcaggtatacagacactgctcaaagaagcacatcaaggcactatcttagacaggg

SEQ ID NO: 87423 - DNA, 1192 bp, Glycine max
  Clone ID: PAT_MRT3847_49953C.1
gcgcgccggactcggaaccatgtcagagaacaaaggatgatgtggaagagaagaagaagccttcagcacttgaagttgaaaccttgctgatcctcatcatgggaaccatttttcctcctcactctctctctccactcctcaacatcaaaccttcaccctcaagaattctcttggctccctctccccaacccaagtcaaattctctcttttgctccaaacccattgtttcaagtctcagaaagaaccaaacttcatctcccaaaccttcatcgggcacaagctggttggctcatgctcaacagggcctagcagctttggctatctccttggcactcaactttagcccagttttgtttaatggcaatgcattggcatctgagtttgatgtgcttaatgagggtccacccaaagattcttatgtgtttgatgatgcaggagtgcttagtagggtgaccaggtctgatttaaagcagttgttgtctgatttggaatcaaggaagaacttccgcatcaattttataactgttagaaaactcacgagcaaagctgatgcatttgagtatgctgaccaagtcttggagcgttggtacccttctgtagaagaagggaacaacaagggcattgtggtgcttgtcacgagtcagaaagaaggagcagtcactggtggcccggcttttgtcgaagctgtgggggaaaagatccttgatgctaccgtctcagagaacctcccagtattggctacggatgagaagtacaatgaagctatttttagcactgctaaacggctagcggctgccatagatgggcttccggatcctggtgggccaacagttaaagacaacaaacgtgagtctaacttcaaaaccaaggaagagacagaagagaagcgtggacaattcactcttgtagttggaggtttgttggtcattgcatttgttgttcctatggcacagtactatgcctatgtatccaaaaaataagataatataaatagatctgtttttcaaattctcactgttcaaattcagatgtataatgtgcagttgtaaccatgctcatgttacaattgagtttgagaaagctgaagaagaataagatgacagtttttgcttgtaaatgctattccaaagtatatgtatttgaccatttttaaaaaaaaaaaaaaaaaaaaaaaaaaaaaaaaaaaaaaaaa

SEQ ID NO: 87424 - DNA, 241 bp, Glycine max
  Clone ID: PAT_MRT3847_49954C.1
tgaaaatgcagttcgtagtatttctgttgcgcctttcagaggcggaaggcccattcgggtcattacatttccgaataccattgtgcatattgaaccagacatgacttcaaggtttcagctcttgcgtaccactaccaatggtgatcttgttcaaggaatagatctcgcactggctcaagttaatgtagcatgtgccactgttgacttgacatcaagctatactccgactccattggtggaa

SEQ ID NO: 87425 - DNA, 235 bp, Glycine max
  Clone ID: PAT_MRT3847_49955C.1
tacggctgcgagaagacgacagaagggggagtgctcgaggccgagctagctacctagcacccgcgcccaagtcacttcctccaaccctttctttatctcagtatctgtgctccaaccccacttgcttctctgcattttttttgatccttcttgtcctctggattctaatccatgcttcttaatcacttctcaatccattgctcctcgctacctggagtttgggccttgccataga

SEQ ID NO: 87426 - DNA, 137 bp, Glycine max
  Clone ID: PAT_MRT3847_49956C.1
ggtatgtagagatatctcgagttgaagagactaagaagacagctgcctacatgaaaggtgcagacctcttacttgatagcatcttggaaatgatgctagatagacaccactcaataatagaggctgttgcccacaag

SEQ ID NO: 87427 - DNA, 222 bp, Glycine max
  Clone ID: PAT_MRT3847_49957C.1
taaaagtgggtggaaaaatcttataggaggggataggagatgggcaagaataatggtgggttcttaaaaatgggttggtggatggtgttataaacagggtaagggccatggtaaaaacttattggtccaattaggttgtattatattaaaagaatggaagaggtttaaaggtatgctgtccttttggaatggattcttttggttaaattaaaatttggtttc

SEQ ID NO: 87428 - DNA, 1896 bp, Glycine max
  Clone ID: PAT_MRT3847_49958C.1
gattgtagaaagaattgtttgaaaaataaaaaatgggggagagaaataaatattaagataaaaaagggtagttgtgaaaaaaaagtggggagaagaaaaaccttttaattattttttttttttttaaatttttagaaggaaaaatattctttttttttttttttttaattattttttttttttttaatttttttttttttttttttttttttttttttgttttttttttttttttttttttttttttttttcgacaaaaaaaccacattttatttatcatgcattagacaataacagcagcaaaggtcctatcattctcaacattcaaacttacacaagttttcactaattcaataattctaaagggatatatcatatatatgaaatttattttcttcttttcactttcacaactagaaagagaactcagtccctcacagggaccatgtcatcattggtttgatagatttactcccccatacgaatgatgcatctgatggactcccctttcagcatgtaatcaaaagccttgttcatcacttcaaatggaactgtgtgacagttaggttatcaacatcacagaagactattcatgcccatgattcttttggcaaactctctaactgccccagagtggatgatacattcacaattcttggtgaatcagataattggaggagaggcataagggattctgtagtttttttagcgccatagtaatttatttgcaagcattcttcagctaactcgtatgtatgagttattccctttgtcccattatcttctggtatagccccacgattcatgatggctgtagtgattaaatcagtgtcatcaattacaactccaccaatccctgcattgttaatcagaatatcaagtttcccaaatttggatttgacaaaatctgccaaagaagctacatttgttgcatcagccacatccacctgatgaaacagtacaaggtgggatagacctgagtctttgagtgtttccagtgcttggagacccttcttctcatttcttgctgtgagcaacactttgattccagctgaagctaactgtctaactatctctaatccaattcctttatttgcacccgtcacaactgcatatctttctgttgcttctcccatcttctgtttcaactttcaagtcagcttctcaagagcttctccttcacttcaccctaatttctcgatcttaacctttcacaacaccttctctaccttcttttcttttaaacatgacaaaccaaacctcactttctgctcttccctgacctgcaatgggcgcaatctccacactctcctgtgaacacagggagggcatggtcacctggtttcagatgagtcacaccctcgcctacgctctccacaatccccgaagcttcatggccaaaaatgcgaggaaacaatggagtctggcccttcgcatcccagaagtaaacatcagtgtggcaaagagaggtgtagaggatcttcaaacggacttcaccggcttgcggtggcgcaacctccacttcttcaatcaccagcggcttcccagcctcccatgcaatcgcagctttgcacttgatggtctggccaacggtgctagacatggctcttagaacgaagatgaatgaatgatgagaagtgagtttttggacgtggtgaggaaagcgttgatttagggaggggtacgtatgggtgcgagagggaagaaggaaaatgcggaaaggtgagccagaaaaccgcgttacccgtggtatgccgttactcacggctgcgccacatcgagatcgaatggccgttgctcgctctttctgtgttctgtttcgtctacaattccgtcagtggtttttggtctctgccttccactcatgcccccttctgtcgtcttctcgcagccgta

SEQ ID NO: 87429 - DNA, 627 bp, Glycine max
  Clone ID: PAT_MRT3847_49959C.1
cgtaaattaagagtagaaatagaagtttggtttgtcatgtttaaaagaaaagaaggtagagaaggtgttgtgaaaggttaagatcgagaaattagggtgaagtgaaggagaagctcttgagaaggcatgttctgtcgggaatgattgtagctgacttgaaagttgaaactgaagatgggagaagcaacagaaagatatgcagttgtgacgggtgcaaataaaggaattggattagagatagttagacagttagcttcagctggaatcaaagtgttgctcacagcaagaaatgagaagaagggtctccaagcactggaaacactcaaagactcaggtctatcccaccttgtactgtttcatcaggtggatgtggctgatgcaacaaatgtagcttctttggcagattttgtcaaatccaaatttgggaaacttgatattctgattaacaatgcagggattggtggagttgtaattgatgacactgatttaatcactacagccatcatgaatcgtggggctataccagaagataatgggacaaagggaataactcatacatacgagttagctgaagaatgcttgcaaattaattactatggcgcttaaaaaactacagaatcccttatg

SEQ ID NO: 87430 - DNA, 111 bp, Glycine max
  Clone ID: PAT_MRT3847_4995C.1
cggctcgagtaaggttcctgtacaaatactgtacatcaaatatcaagcgtgacccttaatcattaaaattttagtcgtttacttgcataatgatagtggtttcttatcttt

SEQ ID NO: 87431 - DNA, 1561 bp, Glycine max
  Clone ID: PAT_MRT3847_49960C.1
cgacaaaaaaacgacattttatttatcatgcattagacaataacagcagcaaaggccctatcattctctacactcaaactcacaagttttcacaaattcaataatcctaaagggatatatatcatatatgaaatttattttcttcttttcacaaccagaaagagaactcagtcccccaacagggaccatgtcatgtcatcattggtctgatatagatttactcccccattcgaatgatgcatctgatggactcccctttcagcatgtaatcaaaagccttgttaatctctgagaatggaactgtgtgagtgatgaatttctccagttccaattcctgcacacaagaccacattaccaattaagatatcaatatcaatatgaacaagagttataagggagtgagatgaggtcgtgagttcaaatctcactactaacaattaacatttaacatttggcgaaaaaaaaaaaaacatcaatatatatgaatgaatgtccttatagagtgcacaattcaatcaatattgaagcttaccccattcatgtacttctcctcagtaagggaatctacatccgggtttgtagtttccgtcccatgtttccttggcaaactctctcgtttgcccaagagtcgatgagagattcgactgcattggtgaatcagataattggaggagaggcataagggattctgtagtttttttagcgccatagtaatttatttgcaagcattcttcagctaactcgtatgtatgagttattccctttgtcccattatcttctggtatagccccacgattcatgatggctgtagtgattaaatcagtgtcatcaattacaactccaccaatccctgcattgttaatcagaatatcaagtttcccaaatttggatttgacaaaatctgccaaagaagctacatttgttgcatcagccacatccacctgatgaaacagtacaaggtgggatagacctgagtctttgagtgtttccagtgcttggagacccttcttctcatttcttgctgtgagcaacactttgattccagctgaagctaactgtctaactatctctaatccaattcctttatttgcacccgtcacaactgcatatctttctgttgcttctcccatcttcagtttcaactttcaagtcagctacaataattcccgacccaacatgctccaatgcaactcttttaatattaaatatgaaaagacatatgcttctcaagagcttctccttcacttcaccctaatttctcgatcttaacctttcacaacaccttctctaccttctttttcctgtgtgcaatcttggccgtccacgtggcacaatcctcatcctccaccctcgacctggacgccttcttcctccctctcaagtccggctgtcgcggatccgtcgccgagtgcagcctcctcgccggcgacgacgccgagtttctgatggagtcggagagcaaccggcgcattctagcaggaaggagctacataagctacggtgcgctgaggaggaacactgtcccttgctcccgacgtggtgcttcctattacaattgccg

SEQ ID NO: 87432 - DNA, 304 bp, Glycine max
  Clone ID: PAT_MRT3847_49961C.1
ggctcgagctagaacagcttcacttaatcttcctcattactaaaacgagtctgttaagagagaaggtcatggagacaggtacagtgtccccggaggatatagactcagagggagagcaacttgatgagatatcagtcattatagggatatctattgtgaatttcgcgtcttccattttgggtacagacatcagggttcttacagacaccagacgatatcacatgcttaaagattcataatttcagataactgttttctgtatttgaaacttatataataagaagaatgcttgggattgctgatt

SEQ ID NO: 87433 - DNA, 141 bp, Glycine max
  unsure (1)..(141): unsure at all n locations
  Clone ID: PAT_MRT3847_49962C.1
tagcantgtgctagggttttnagnaacgaccgaagttgccgacagaagacgacnnatggtggctgncangagccagangccgaangtctccgacaagggnganancctncgntgaaattcgacggagaactcgncntctcc

SEQ ID NO: 87434 - DNA, 1212 bp, Glycine max
  Clone ID: PAT_MRT3847_49963C.1
taccttttttctctttacccctccagacaaaaaaacgacattgtttttattatgcattagacaacttctgttgcaaaggccctatcattctctacactcaaactcacaagttttcacaaattcaatattcctaaagggatttgtatcatatatgaaatttattttcttcttttcacaaccagaaagagaactcagtcccccaacagggaccatgtcatgtcatcattggtctgatatagatttactcccccgacaaaaaaaccacattttatttatcatgcattagacaataacagcagcaaaggtcctatcattctcaacattcaaacttacacaagttttcactaattcaataattctaaagggatatatcatatatatgaaatttattttcttcttttcactttcacaactagaaagagaactcagtccctcacagggaccatgtcatcattggtttgatagatttactcccccatacgaatgatgcatctgatggactcccctttcagcatgtaatcaaaagccttgttaatctcagagaatggaactgtgtgagtgatgaatttctccagttccaattccccattcatgtacttctccacaacagaaggaaggtcagtgcggggtttgtagtttccatagaaggtaccctttagagtcctctcattcaagaaattcactggatgagttttgaatgcatcatctttgtttggcactccaacaagtccagaagcaccccaaccattgtagagacattctcatgctcatcaacatggactcgatgctgccagtacattcaacagcacgatccacacccccatttgtcattgcagcaatcacctcttgtacaggtttgtcatgatcttttgggttcacaaattcattgaccccaaacttcttagcttcttcaaatatgctagaaactaaatcaaccccaatgattcttgatgcagcaacaatccaagccccttcagccccggcaagttcaacagctccaagtccaaaaatggccattgaagaaccaggttttggttcagcaacattgtgagtccccctgaagctaactgtacgacaaggtctaatccaattcctttatttgcacccgtcacaactgcatatctttctgttgcttctcccatcttctcaagagcttctccttcacttcaccctaatttctcgatcttaacctttcacaacaccttctctacc

SEQ ID NO: 87435 - DNA, 318 bp, Glycine max
  Clone ID: PAT_MRT3847_49964C.1
ctccaacaaatttttgtaacactgtgctaggatcattaactctgccagatttatatacccggcagctgcggacaaaacatcaaggaaagttttatgaatccactaccttaactgaacacgatctcacgcaactgacctaaccgctgactcttacaacacacaaaataacactggatatactcctatagcaatgattctacccaaacatggagctggctacaattgcacctgcactctaaataaagacacaaaacagactgactctgcaaacttttcacctatagagtgaatgcactaattattaatggcatctacaac

SEQ ID NO: 87436 - DNA, 403 bp, Glycine max
  Clone ID: PAT_MRT3847_49965C.1
ttcctagtccgccctctccctttttttttttttaataaataatcaataaatataacgcgtagggagtttataacatattatcataacaataaaagtggccattaaaaggaatattgttaatacttgggctgccacaaacaaaaaaatcgagaaaaaaaatgagaaattaaaaatcatcatcgcacgataatcatcataaaaaacaaagcgcggggcggggtaaatcatcatccgggggagcatcataaaacggcagcgcgttgaaatcaaacggcaagggaggtcgaaacaacaacaaaacgattttgtcttcgccgttgtcaacgacggaggaggaaaagtcgcatccactggggcagccttcaaggacaaaagggggagtgcgcgggtatttccgcgtaac

SEQ ID NO: 87437 - DNA, 517 bp, Glycine max
  Clone ID: PAT_MRT3847_49966C.1
tttgtttgaaaatgttgatgactttggaaaagggtttatctgaaggcttgctggtcatcacaacgagtagctcgcaaattcactattgccatcacaatgtcaataattaagctaccaattaaacccaactgtgaaacaaacaacttcaggaacacaagagttcttcattgcagattattctacttcagccaaatagtcgtcaatttcagctggtgtcaataccctgcaacatcattaacatgctattattaaatcacccagttaaacaatctaaatatataaggatggctttgaagtttgaagtctagattggtttagaatttagatgcagataacttgaaagtctcgttttagtgatgaaattctgttgtactttgaaatactctaaatttattatttattatttcagattggacaacccaaaaatcaactcaattagactgatgacagaaaccaggtcaagcaaactaggtatattttaagtatacggatatgcacctgaactttttatcagctc

SEQ ID NO: 87438 - DNA, 132 bp, Glycine max
  Clone ID: PAT_MRT3847_49967C.1
gatattcccagaccgcgagaggactgacagtggcacctacggctgtacagctatcagcaacatgggcagctactaggcctactacaccctcaatggtaatgacccgagtccggtgccctgctcctcgagtac

SEQ ID NO: 87439 - DNA, 363 bp, Glycine max
  unsure (1)..(363): unsure at all n locations
  Clone ID: PAT_MRT3847_49968C.1
tttttgcatatcaactttattttttttttacacacacttacatcgccgaatcttaatttttttttattctcccaccaaaaaaatttttgcagccctatccttaaaccaannccactttaacaacaaataaataaataaacaatgttctttttttaaaaaaaaatggaaatatcaaaaacccgacgaaacccctataattttaatactctgagacctgcactcttttactcggggtaaaaactacacaaacatcctggtcaacaaaataattccacaacgcaaaaggtgtcttaagtctccatttttattttaccgacctcaaacctgatggatccttgatcccaaccgccgtggctgtacaat

SEQ ID NO: 87440 - DNA, 472 bp, Glycine max
  Clone ID: PAT_MRT3847_49969C.1
tattttcttctcctacaggtatttttaaataagcttatgcaatcagacccaaattagaacataaaaccgaagagtgaaagtttccattaggaaaatgcatttcttttctttttttgtgatggatcaatggaaccgcttacttatgagggttattaattaattttttgattctatcgagcaggctttaaagcagctaccgagagaaaagatccaaatcgcgacgaaatttggcattacaaagatcgactcttctggaatgtttgttaagggtacaccagagtacgctcgctcatgttgtgaagccagcttgaaacgtcttggtgttgaatacattgatctctattaccagcacagagtggacttatctgtacctatagaagaaacagttaagcgtttcttcctctagaaaaacctatcaatgattttgatcatagtagtatgatgttaattattatctgcccttctgtcgtct

SEQ ID NO: 87441 - DNA, 1292 bp, Glycine max
  Clone ID: PAT_MRT3847_4996C.1
tgcatacacaagctagttatctgataattacaataatgggttccctccctcacgtagtagaggattgcatgggcttcctccaactctatagcgacggttccattttccgttccaacggcatagaattcaaagtttcacccattcaagacaactccataacctataaggattatctctttgacaaaagattcaacctttctcttcgcttctacaagccccaacaacaacacatagcactcagcaataagaaggtccctattgtgattttccttcacggtggaggcttttgcttcggttcgcgcacctggccccatattcacaactgttgcatgcgcctcgcgtcggggctccaagcggcggtggtttcgccggactaccgtctcgcgccggagcaccgtcttcctgctgcggtggacgacgccgtggaggcggtgaggtggctccagaggcagggcctgagcttgagggaggacgcgtggttgagtgggggcgttgactttgaccgcgtcttcgtcgtgggtgactcgtctggcgggaacattgcgcaccacctggcagttcggttggggtccggttcgagagagatggacccggttcgggtacgaggttacgtcttgtttgcgccgttttttggcggggaggttcggaccaagtccgaggaaggtccaccagagcacatgttgagccttgagttactagacagattttggaggctttcgatgcctgttggaaagagccgagaccacccattggcgaatccgttcggacctggaagcccaaatcttgaacaagagaagcttgatcctattttggtgatagtaggtggcaatgaattgctcaaggatagggcaaaaaattatgctacaaggttaaaagaattagacaaggacattaaatacgttgagtttgaggggtgcgagcatgggtttttcacgcatgattcattctcatcagaagttgcagaagaggtcatccaaatccttaaacgattcatgcttgcaaacttctagttagaaggcacgcacgcacctgaaaaaacaaattcaacagtagaaagacactcatagtgaaatgtaattaaggttaattaattagtctgtgtaattttagcccggtataagtagttcgtgggaatttataagtatatataaatgtcaatttcatggtgtgtacgtgtagcttttcattggagattgtagtcaagtatctttcttagctatttgtgctataacttttgaattgtatcagtaatttctcaagcgaaaaattcataataatagaattttaataag

SEQ ID NO: 87442 - DNA, 389 bp, Glycine max
  Clone ID: PAT_MRT3847_49970C.1
cacatggacccatgttctatctaggcatggaggtacgaatacttcaatgtctatggagggagagctacaaccatcacacgttcaactcacggtgaactctatgcagaggaggaaagtggtacatgtacattcaatggagatagacccatcttttacttcataagttgaacacagggaagagaagcatttcaaggaatggataacttggttgattcccttcttgtgtcatggccaatgatatagtgttcatcatcaccatgtatgtaaatgattgctccaagactttgggcacattgcattgacctgctcctgggacgcctttgctttgagcctttcgatgacaaacctttcctgcggccatcattaataacgctaatgaaaacgggggc

SEQ ID NO: 87443 - DNA, 240 bp, Glycine max
  Clone ID: PAT_MRT3847_49971C.1
gaaaaagaaaacaatcagatagcacggcgttgtaacggcaagtttattaatgtgaaaaaaattccagcctatcattaacacaaggaggttcaaacatgtttcttgatgtaactccatgtagagtaggcctttagatcttctttataaatggagtcatttgtttcttgagacgtcacttcaagaagatgagtcaagaacacgttcaccaccatagaaagtcatagataagagcttcaaggt

SEQ ID NO: 87444 - DNA, 738 bp, Glycine max
  unsure (1)..(738): unsure at all n locations
  Clone ID: PAT_MRT3847_49972C.1
cacgcgtccgtgtaaagttggaggcacttctttgtacctcgacatataaatcaaagaagttcaatgttagtgcagcagagaatttgattctcctcaatgccattttcgtcagaataaaatgattgtcaagtttatgctcatgatgaaggtcataatgaatctcctgctttcacaggaataggcttgaatgtcaataataagaacccaacaacatccttaaatacaattctaaaagggttctatacaggagcttaccaatttcaaagagaagaagttctagcagccttttttaacaaatttgagaaattttatgatttatttgtgaatcaaggtactgtgctattcaactccttagtttgaatattcttgttggtatcatctctgacatcatacctcaattcttctggttatcaatgtttgtgtaaacattttgtacctgtgtttattcctctatcttcctttctctgaaaaaactcatggatagataaaatcttttaacaatttgaatcaacttcttgaatgtatgcttcttgcacacccttgcgtatcaatcacattggaagtcacttgtaaacccattcttttatatctaaaatccatcaagctatatatagagatggaaattgtggaaatttatatttggnggaagtggagaaacttgcacaggaggaaagagggattataagtaatataactatagggcataggatgcaccaattatggatataattgaaaatg

SEQ ID NO: 87445 - DNA, 623 bp, Glycine max
  unsure (1)..(623): unsure at all n locations
  Clone ID: PAT_MRT3847_49973C.1
ataggatcggccggcccagtggccaccaacaaatcaggatgggggccatgttccgctccgaagagatgacgctgtgccagctgttcctgcagccggaggcggcctacacctccgtgtccgccctgggcgagctgggcatcgctcagttcagagacatgaacgaggacatgaacaacttcatgaggaagttcgtgagcgaggtgcggcgctgcgacgagctggagcggaagctgcgctacatcgaggaggaggtgaggcgcgacggcgtccccatcccggacctggacgagatgcccatggcgcccaacccgcgcgagatcatcgacctagaggcgcacctggagaagacggagacggagatgctggagctgagtcaaaacggcgtcaacctcaagtccaacttcaaggagctcaaggagatgaagtacgtgctggagaaggcgcagcacttcatggccgaggaatgtgatctgttcacagctgcgtcgacatttgtgtttcagcaagaggagtccgactctaaccgcgccctcattggaggcgatgagcgcggtcgcctggggttcgtcgccggggtgatcccgnaggaccgtgtgccgggcttcgagcgcatgctgtggagg

SEQ ID NO: 87446 - DNA, 463 bp, Glycine max
  Clone ID: PAT_MRT3847_49974C.1
ggtaagaaatcaaaataaaaattaattatatattaaacatctccaacatatttaattcttaacattatttaatatatcttctccactaaatataattggtagacatagacatcatgaagcctcattaacttcaacaggatctacgagccacaacttcattctcctctttgttataccgtcttgtcttccaatgccatctccacattggtatgtatatcgagccgttcgaccaaggtcaatcgcaacttgtatgacagatttggagagtgtagagcccataacttggcctttatttaagtactgccattctttatcaatcaaagtcttgaagtattgatggactttttcttctgaaagaccgttttcgtgcatgtagcttgcaattgaagttgagatttcacccatcttcatctcgtcctatagagtacaatacgcacaatgttagtcatgaagttgagaaatt

SEQ ID NO: 87447 - DNA, 332 bp, Glycine max
  Clone ID: PAT_MRT3847_49975C.1
cggacgcgtgcgagaaggcctgggcttactcgataagcataactggatgaggaagatggagagagagtgtagtatatcgcttctagcgaatcggcacagattatgacggcactagtgatatcgtacaagtggcatgcatagaggtacactaatgtaagcatattacgcgtattatatcctttctgcggcaaacccctttctcatgagacacactgtgttattttctctaacagcgtctaatctcatgcagtactagctagaatgatactatatgctcatttatctatgatatctaattagctggactgagttgatgctaaattttgcgttat

SEQ ID NO: 87448 - DNA, 1462 bp, Glycine max
  Clone ID: PAT_MRT3847_49976C.1
cccacgcgtccgtagcgagaagacgacagaagggtgaccgaggatgaaagaaggcaattggaagatgcactaaggttggagtcgacagacttgaacaatgagagtgatgaggtgatcattgggcatcgtcacagctgttatgaagaaagagaaattcctattgaagatggaaattgtaacaaaagtggagaaaataagcaagaaaagaaaggatggtttggtggatggaggaaaaaggattctaaacctgaagcatcaaagaagattgctccaccgagaagttctctctgcgtagaagaaaaggtgagtgatttattgggggattctccttcaagaaatcagagtaagccaggaagacattctgttgagatagctgtgaggggtgatgagtcacggaggagaaaagatgccaaagcttcttctgcaaatcctgatagcagaagtcgtcataaggatggaaatcgtgaaaatgaatataagaaagggttgagacctattctctggctttccccttactttccactaaaaactgaagaactcttgccattgcttgacattgttgcaagcaaagttaaagcaattcgacgtttaagagaactccttacaacgaaagttcccattggaagtttcgttgtaaggagttctcttaaacgaaacttccaatgggaacttttcctgttaaggttgccatcccttgggttcccaccatcagagtattggttacttttacaaagtttgaagaactagagccagtagacgaatttgcaacaccaccatcaagcccatctgcagctgagcaagagagccctgcagtgcctcacttctcggcatcgtcttggtttcaatggataaaggctccttatcgctctagtacatctgctccaggatccagcagtaggatagaaaatattgaagacccttttgcaattccatctgactatacttgggttactgctgaagcaaagaaaaagaagatgcaagagaacaagtctaagaaaggaaaaagaattaactgactagcccaccatgtaagagtgagtgagtggtcctccaaggagttgtgcgttgacaatttggggcttgtggcataaggaaaagacacattgtgattcttgcaatagttgctggagttttcaactttacaccaaagaatttgttgattgtgtttcaatatatgtggagaaaccattaactcaggatagttgcaatcacagcgagcaacttttatattcatgattgcagtttaaattcacctttgtttggttatataattctttcccatgattttattcatgtaaataaactgaagaatttgtttacttgctttgggggctttatcatggtacgttctattatatttcagcaatgatattgatgaaatttggtatcatttatcattgaccgggtgttgctaggtgcaccagccatattgtttgtgcaccaacacataaaatttaatttc

SEQ ID NO: 87449 - DNA, 2415 bp, Glycine max
  Clone ID: PAT_MRT3847_49977C.1
ggcgggaattgatgctacaaagtatggtcatagtcctgtgcacaaggccttagttttgaaggatcatggtgaactcaggaggatacttgctggcctcccacggcttcgtaacagcggccgagtttcgcactgaagcggtttcgattttagaggaagagaaggctgatgtcatcgcgtctgagattaaccagcgtgatgtgcctaaccatgatacccctcttcacttggctgtgaaattcggggatgaagtggccaccgagttgcttaaggttgctggggcaaatgggagtttgcagaatgagcagagttggagtgttcatcaggaagcttgttgcatcatcgaagaaggtatgggtaaccaattaaggaatcattaccaacctctaagataggcaaaatttttcggaagggtgactggattggtgattattacacgtaagaagttggccttatacttggaaagtatttggctatttaaaaaacttgggatatttgtcatcacatggatctctcctttatctatcaagtaaatttgaaagagggattcaactaggagtgcagacatgaccttggctggtttttgatggaatcaaaagtcagatttcagttcatgccattcttttccttggtgatggttcggaagatgggaaagtcccacctgggtcactctgcatgatctcacacaaggaaaaggaggtactcaatgctctagacgatgctggctttccagcaaatgatgaggaggttcagcaagaagtggttgcaatgtctaaaacaaatatatttaggcccgggattgatgttacacaggcagttctgttgcctcagttgacttggaggcgacaggagaaaacagaaatggtagggccttggaaagctaaggtctatgatatgcacaatgtagttgtgagcataaaatctagaggagttcctggagccatgacagatgatgaactcttttcttcttgcaatgaaaatgaaacagagagtgaagagctcaatgatattttgactgaggatgaaagaaggcaattggaagatgcactaaggttggagtcgacagacttgaacaatgagagtgatgaggtgatcattgggcatcgtcacagctgttatgaagaaagagaaattcctattgaagatggaaattgtaacaaaagtggagaaaataagcaagaaaagaaaggatggtttggtggatggaggaaaaaggattctaaacctgaagcatcaaagaagattgctccaccgagaagttctctctgcgtagaagaaaaggtgagtgatttattgggggattctccttcaagaaatcagagtaagccaggaagacattctgttgagatagctgtgaagggtgatgagtcacggaggagaaaagatgccaaagcttcttctgcaaattctgatagcagaagtcgtcacaaggatggaaatcgtgaaaatgaatataagaaagggttgagacctattctttggctttccccaaactttccactaaaaactgaagaactcttgccattgcttgacattgttgcaaacaaagttaaagcaattcgacgtttaagagaactccttacaacgaaacttccaatgggaacttttcctgttaaggttgccatccctgtggttcccaccatcagagtattggttacttttacaaagtttgaagaactagagccagtagacgaatttgcaacaccaccatcaagcccatctgcagctgagcaagagagccctgcagtgcctcacttctcggcatcgtcttggtttcaatggataaaggctccttatcgctctagtacatctgctccaggatccagcagtaggatagaaaatattgaagacccttttgcaattccatctgactatacttgggttactgctgaagcaaagaaaaagaagatgcaagagaagaacaagtcaaagaaaggaaaaagtcataactgattatgccacttcataagtaagctccacacttggaaggactttggttgtttagagaacttgggccatttgtctggaaattgaattcgaagctatctttcatgtaggagtgagtgagtgattctccaaggagttgtgcgttgaccatttggggcttgtggcataaggaaaagacacattgtgattcttgcaataattgctggagttttcaactttgcaccaaagaatttgttgattgtgtttcaatatatgtggaaaaccattatctcttgatagttgcaatcacagtgagcaacttttatattcatgattgcagtttaaattcacctatgtttggttatataattctttcccatgattttattcatgtaaataaattgaagaatttgtttactagctttgggggctttatcatagtacgttctattatattttcagtaatgatattgatgaaatttggtatcgttt

SEQ ID NO: 87450 - DNA, 398 bp, Glycine max
  Clone ID: PAT_MRT3847_49978C.1
aaaaaaaattcataaatttcataattagggatgatgcataattgaaagaaattaaattatttttaaattttataattagggttatgcataattgaaagaaattaaatcatttttggagaattataaatttcataacacacgctctgatatcacatgtaaaacttgaagggttttctagattatcaattatagaaaaccaatagaatcttgaaacttattattctcacaaacaatagataaacaaataatatagataaacaaataatgcgtacctctccggtgtaatttgatttccttggaagaggagagaaataagatttcacttccttagacttttttttgtctgcctctctctgttcgtgatgattataagtgagagagaacacttttctgtcccg

SEQ ID NO: 87451 - DNA, 128 bp, Glycine max
  Clone ID: PAT_MRT3847_49979C.1
ctagtaataggttttaatattacaagcagagatgcaaactgcagattagcgcgacctttatacaggagcgaccaattgccaaccatgaaaaagagaaaaaaaagaggcggccatgcgctgaacacacc

SEQ ID NO: 87452 - DNA, 393 bp, Glycine max
  unsure (1)..(393): unsure at all n locations
  Clone ID: PAT_MRT3847_4997C.1
tttgttatatttgtctagaaatatctgtgctttagcaaacaattcctttttttggaattattacatagttttgttctatcggcagggtatgatgtgtttctggggaatttccgtggttggggttctcgggaacattttatcaagaacatatcatcacgtcagtaagttcataaagggaatgtctatgaatatttctgaaaattttcagagagaacggaatgaaaagaatagggatggaaaagtatgtgtgtttgttttcccttaataatatgtttactcccaaataagggaacttattcccttccattcttttcccttctatcttcctcattgcctttcatccaataaaangngattnctggtngtttctaatctagctntctatcttatgct

SEQ ID NO: 87453 - DNA, 265 bp, Glycine max
  unsure (1)..(265): unsure at all n locations
  Clone ID: PAT_MRT3847_49980C.1
cgaatctgagaccgacgttctatgttaagaatctcaactcaagagatgtcgttgatcgagattatgatcatgttggaagaatgactgtccctaaattggcgcatacgcaacgaggagatttgtttctggatgatgagaagacgaagtattttgtttgtgggccggaggggtttatgggggatgtgaggnaggggttgagggattgggtgtaaatgacgagaggatcnagatggaagtttttgggacggggatgtngggttcgtna

SEQ ID NO: 87454 - DNA, 405 bp, Glycine max
  Clone ID: PAT_MRT3847_49981C.1
ccagaatttgcatcaggggcagcagttgctgatgcagctggtacaagagataatgcatttgaagagaatgagtctgagagggaaccgagcaagtccatttcaacgctgttagtggtggctggggcggcaggagcagctgatgaaggaccacgtgggtcaaaaaagtcatcagtcgtctcagtttcctgggctccagatgcagcagtagttgcttcggttggattattgtttacaggaaaagatcccgtaagagcagagatttgactaggattatcatttacatgaggagaggagtctctaggagcagatggtgctgaagtttccgcatctctttcactgtgtacagggctgcgagattcaccaacagcttcttcatagctaggaggagcacccatattttgctca

SEQ ID NO: 87455 - DNA, 361 bp, Glycine max
  unsure (1)..(361): unsure at all n locations
  Clone ID: PAT_MRT3847_49982C.1
cgccggtaagtgtaaacgccgcnccttacttcattttagtcaggctcaccagacttttagacgtgcggagttcgatgccatttgtcagattaagggaatttctgtggtgcccaactctccttcggatgggatacacattcaatcgtttgagtttcaaaacgacgaatttgacgtctttcggctgttggaaagggccgtgttagtgaaagcggcgtacgaactgatcgccgagggggacgggcatgagcaagtgatggccaaattggcatccgatccgagttcgtcgcttgcgcgcttcgacttcgccgatcagtcgtggtctctgctcgattcgccccatcaaaagaagcgcagcggcgat

SEQ ID NO: 87456 - DNA, 786 bp, Glycine max
  Clone ID: PAT_MRT3847_49983C.1
cggctcgtgcccgcttctctttctctctgtctctctctcgttctgtagccgttttcgtcaccatgagcgccaagaacctcaatttcgacgcagacacagctctggcgaaggatttcctttccaactttgcagatgccaatggcgaagccaaatacatgaacatcctgcaagatgttgcaaaccacaaaactcgagcagtccagatcgaccttgaggatttatttaattacaaagatctggacgaggaatttctgagccgtgttactgataacactcggaggtatattgggattttttccaatgcaattgatgaactcatgccggagcccactgaggacttcacagatgatgatcatgacatattgatgactcagagatctgatgaaggagtagaaggcaccgacggttccgatccacgtcagaagatgcctcctgaaatcaagcgttactatgaactttatattaaagcatcttcaaaaggacgaccctctacaattagggaggttaaagctttgaacattggtcagcttgtaagaatttctggtattgtgatacgatgttcagatgttagatgaaagtggctgtatacacatgcgaggattgtggatttgaaatttaccaggaagtaactgctcgggtcttcatgcccttgtttgaatgcccatcaaagcgctgtgatacaaacagaagaaaggggaatgttatccttcaacttagagcaccaaaatttttgagatttcaagaggccaaaattcaagaattagctgaacatgtccccaaaggcca

SEQ ID NO: 87457 - DNA, 1260 bp, Glycine max
  Clone ID: PAT_MRT3847_49984C.1
atcattattatatttttaattagaatgtgactctttttaacttgttcattggctcactcttagaatagtaattttgatccataagcaaattagacatgatatgctcatttacgttaatgataactgactattgctaactatgttttgctgtctaccttctcttccattcgggtgacacagtactgagatgcttactgggtaacactttattaagctcttaaaagaagggtggtcatggcctctagaattctttcaactctacattatgtgtgttcttcttctgcctcagccacaaaacgatgtttaggcctatatagtcattggcagagaagtataagtggaaaatctccattcattgtgtgcaaggatgctgatgttgatgcagccagctccagagttactggcttcaggttgctgtgtgcagacagttcaagccagtaactctggagctgggtggaaaatctccattcattgtgtgcaaggatgctgatgttgatgcagccgttgaggcttcacattttgctttattttttaatcaggggcaatgttgctgtgctggttctcgcacatttgtccatgaaagcatatatggtgaatttgttgaaaaggctaaagcccgtgctcttaaacgagtagttggagaccctttcaaaaatggggttgagcaaggtcctcagattgattctgtgcaattcgagaagatcatgaaatacataagatcaggcgttgaaagtggtgctcaactggaatctggtggtcaaagaattggctccaaaggctactacatccaacccactgttttctcaaatgttcaggacaacatgttgatagcaaaagatgagatatttggtccagtacaatctatcttgaaattcaaggatctagaggaagtgataagaagagccaatgcaacttcctatggcctggctgctggagttttactaaaaatatggacactgccaacaccttgatgcgagcattgcaagctggaacggtatggatcaactgctatgatgtctttgatgcagcaataccttttggtggatataagatgagtggtcaagggagagtaaggggaatctacagccttagaagctaccttcaagttaaagctgttgtcactgctttgaagaatcccgcatggctgtagttttcccactacctgagtgttcatgttcataatgtcttatctagaaaaaaaactacatctttcatggaacattcctaaggcattgaattagccaaagttattacacaact

SEQ ID NO: 87458 - DNA, 255 bp, Glycine max
  Clone ID: PAT_MRT3847_49985C.1
ggggggtttttacagcttactgaacatatcaaacagcggaccatttaggatgaacttgcgccgatataattaagatagcaaagcgaaactagaggggcatgctgaaacataacaaatccaggggccgtgagccacaatgagattctcgagatgtacacggattacatagatccaagctacaagtgtactaactacaatcttgaagagcaagccaaggcaataattgctccacgcatcaacaatgagatggattca

SEQ ID NO: 87459 - DNA, 1989 bp, Glycine max
  Clone ID: PAT_MRT3847_49986C.1
gctgtctaccttctcttccattcgggtgacacagtactgagatgcttactgggtaacactttattaagctcttaaaagaagggtggtaagaaaattaatttcacgaagatttgtatagttctagaaatctctgagggtaggattacaaagaaagggaagaaaaaaaaatcctcaacattaaagaatcttcatgcaggtcatggcctctagaattctttcaactctacattatgtgtgttcttcttctgcctcagccacaaaacgatgtttaggcctatatagtcattggcagagaagtataagtggaattgctgcgtctgttgttgctgatgtggagcctagcatagcaccagtgcaaattgatcaaagtcagcttctaattgatgggaaatttgttgatgcagcttctggaaaaacttttccaacttttgatcctaggactggagatgtaattgccaatgttgctgaaggagatgctgaagatgtaaatcgcgctgtccatgctgctcgcaaggcttttgatgagggaccatggccaaagatgacagcttatgaaagatcacgtataattttgcgctttgctgatttattggagaaacacaatgatgaagttgcagccatagaaacatgggatagtggcaagacttatgaacaggctgcaaatgttgaaatacccatggtagtacgattgttccgatattatgcaggttgggcggataaaattcacggtctaacagttccagctgatggaccataccatgtccaaactttgcatgaaccaattggtgtagcagggcagattgttccttggaatttcccacttcttattttttcatggaaggttgcacctgcattagcttgtggtaatacagttgtaatgaaaactgcagagcagacacccctttcagccctttatgtgtcaaagctatttcttgaggcaggacttcctcctggagttctgaatgttatctctggctttggtcctactgctggtgcagcactgtgtagtcatatggacgttgacaagcttgctttcacaggatccactagcactggtaaacgtgtacttgaactgtctgcacacagcaacctgaagccagtaactctggagctgggtggaaaatctccattcattgtgtgcaaggatgctgatgttgatgcagccgttgaggcttcacattttgctttattttttaatcaggggcaatgttgctgtgctggttctcgcacatttgtccatgaaagcatatatggtgaatttgttgaaaaggctaaagcccgtgctcttaaacgagtagttggagaccctttcaaaaatggggttgagcaaggtcctcagattgattctgtgcaattcgagaagatcatgaaatacataagatcaggcgttgaaagtggtgctcaactggaatctggtggtcaaagaattggctccaaaggctactacatccaacccactgttttctcaaatgttcaggacaacatgttgatagcaaaagatgagatatttggtccagtacaatctatcttgaaattcaaggatctagaggaagtgataagaagagccaatgcaacttcctatggcctggctgctggagtttttactaaaaatatggacactgccaacaccttgatgcgagcattgcaagctggaacggtatggatcaactgctatgatgtctttgatgcagcaataccttttggtggatataagatgagtggtcaagggagagtaaggggaatctacagccttagaagctaccttcaagttaaagctgttgtcactgctttgaagaatcccgcatggctgtagttttcccactacctgagtgttcatgttcataatgtcttatctagaaaaaaaactacatctttcatggaacattcctaaggcattgaattagccaaagttattacacaactaaagcttttctgtgccaatctttgctaactcaacttaccttctgttagaatatcacccttggtgtc

SEQ ID NO: 87460 - DNA, 1295 bp, Glycine max
  Clone ID: PAT_MRT3847_49987C.1
ggctcgagcggctcgagcacaaacaccaaatcaaacatggccaccacttttctttctctcctcttcctcatcttctctctcctcaccccagccctcatttcctcttcccctgtccaagaccctgaatttgtggcccaagaagttaacaggaaaatcaatgcttctgtagctagaaggaatttggggtacttgtcctgtgcgacagggaaccccattgacgattgttggaggtgtgacccgaactgggagaagaaccgccagaggctagcggattgtgcgattggtttcgggaaaaacgccatcggaggaaagaacggaaaaatctacgtggtgaccgattccggcgacgacgatccggtgacaccgaagccgggaaccctccggtacgcagttattcaagacgagcctctctggatcatcttcgcaagagacatggtgatcaagctgaaggaagagctcatcatgaactcattcaaaaccatcgatggaagaggcgctagcgtgcacattgcgggtggtccatgcataacgatacagtatgtaacaaacgttataatccatgggattaacattcatgattgtaagcaaggtgggaatgctatggtgcgggactcaccagcactacgggtagacatacgacatggtgtcgatctttaacgtatgggtgaatgctcaactgcatgatgggatcgatgctcatactataccaataatgactaatgtcaggagtatatcgccaaggcacatgtgcgatgagattcgctcatcatgaaccaaaacgtgaagatcccccagagagtgagtggcaggattggagctggaggtcagaaggggacttgttagtaaacggtgcctttttcacagcatcgggtgctggagcctcctctagctatgcaagggcttctagcttaagtgcaagaccatcttcccttgttggttccataacaacaggtgctggtgcactcagttgtaagaaaggttctccttgctgaaaaacaatgacttctcttctggctgattcattctttccaaaaaggaaaccaaaatatatacatatgttccaaaagaaaagggagggaaattgaaaaagaaaaggaatatatatatagtggatctttagctttgtatttacttttccttgcatttccatatatctccactctttttccctttttgggggtttcttagattgttttctgctgtttgtcttttcttttgtcaattttgagttgctcatgattccccaatcccactgatactcttggaacctagtcagttgaagaatctcgcctttt

SEQ ID NO: 87461 - DNA, 572 bp, Glycine max
  Clone ID: PAT_MRT3847_49988C.1
ttgatcttgatcaacctaactctgaatgagatctaaaacaaaaactttaagagtttttttactttaaatgaaaaagctatatgttggaccttttttattaatatgcgacttttttgtcaatatatgagactatttttgctttataaaaattaataacaaatactaatattttggttgtcagcctaatacttatattttagtagctttacccttaaaatgaacttaacatttacatataaatcatacacaaaacttttgtgcatgataaaatcaagagaggtaagtgcaattttccaatgaaaaaggtttaaattaatataattagcatttagcatcaatttcaatcaaatttagtggaattatttctatttttctctctttagaagcaagatagaatgattagggagaaagacttgcctggcgacatggtcagtggtatgagcagccacatctttcaaggaatgcttgtagcggttgtggtaggcttcgtctacacctaaattaaaagctctcctggttgaagcacacataccatttccaccatcacatgatagtctttgttagcattttta

SEQ ID NO: 87462 - DNA, 338 bp, Glycine max
  Clone ID: PAT_MRT3847_49989C.1
gttaacatcagcaacaatgctaagggatgggggctctccgtcacctaacatcagaaaaattgatgcatgtgacacaacacaccacaatccataataatcacattgttacatacataactcacccgcaaactctgtctaactaacactaattgtacgttttggctgttcgcacttttcaacattgcatgcaccctgtatgtacgtgatgttcccaaccttgtgactattgtgaatatgagtttcaacgacattggacattaattgtgatgctgcggagaactgtgtccatgattaaaactctagagtaaacccacactgcattccttgtcaggtgatcc

SEQ ID NO: 87463 - DNA, 639 bp, Glycine max
  unsure (1)..(639): unsure at all n locations
  Clone ID: PAT_MRT3847_4998C.1
agctagctagctcataattacaataatgggttccctccctcacgtagtagaggactgcatgggcttcctccaactttatagcgacggttccattttccgttccaacgacatagaattcaaagtttcacccattcaagacaactccataacctataaagattatctctttgacaagagattcaacctttctcttcgcttctacaagccccaacacgtagcacccatagacaataacaagaagcttcctattgtgatgttccttcacggtggaggcttttgcttcggttcgcgcacgtggccccatattcacaactgttgcatgcgcctcgcgtcggggctccaagcggtggtggtttcgccggactaccgtctggcgccggagcaccgtcttccggccgcagtagacgacgccgtggaggcggtgaggtggctccagaggcaggggctgagcttgaaggaggacgcgtggttgagtgggggcgttgactttgattgcgtgttcgtggtgggtgactcgtctggcgggaacattgcgcaccacctggcggttcggttggggtccggttcgagagagatggacccngttcgggtacgaggttacgtngtgtttgctccgttttttggcggggagggttcgga

SEQ ID NO: 87464 - DNA, 1400 bp, Glycine max
  Clone ID: PAT_MRT3847_49990C.1
gccacattttgaaagttggaatgctggtgttcttggcccaattacattaagtggtctcaatgaggggagaagggacttaacttgcacaagtggtcatacaaggttggtcttaaaggtgaagccttgaatcttcattctcttagtggaagttcctctgttgagtggcttcagggctttttagtttccagaagacagccattgacttggtacaaaactacctttgatgccccagctggagttgcaccattggctttagacatgggcagcatgggcaaaggtcaagtgtggataaatggacaaagtctgggccgctattggcctgcttacaaagcatccggttcttgtggttactgtaactatgctggaacttacaacgagaagaaatgtggaagtaactgtggccaggcttctcaaagatggtatcatgttcctcactcatggctgaagccaactggaaatttattggttgtgtttgaggaattgggtggggatccgaacgggatctttttggttagaagggatatagatagtgtatgtgctgatatctatgagtggcaaccaaatcttgtaagttatgacatgcaagcttctggcaaagtcagaagtcctgtgagaccaaaagcacatttgtcatgtggccctggacaaaaaatctcatcaatcaagtttgctagctttggcactccagtagggtcttgtggaaactaccgcgaaggaagttgtcatgctcacaagtcatatgatgctttccaaaagaattgtgttggccagagctggtgcacagtgacagtgtctcctgaaatttttggaggagatccttgtccaagtgtcatgaagaaactctcagtggaagccatttgcacctgatcattttcaatatctgaaaataagtggaataaagtttccatattgatttattctgcaattgaatacatggtgttttgggtcaaagtttacacttgtagaccaccactggcattaatttggctttaccaaggtgaaattgcaaatgaatacacaccatgtggttgaaagcctgctgggatgattgttgtggttttatgtgtatatatattggtgttgtggttgttatactgaagtggaggagagggtgaaaaagttacctgatgcacattgagacgacatcgattgagtccatgtgcaaaattggtttttgtttgtgtggaagtctctagcttcctgtgatgtaatgttataatattaccttgtagttgtaaggagaaagcaatttggcgctttcttataagaaaacaacccaatgtaataacataaggtatattaattcaatcatgttttgcttttaaaaaaaaaaaaaaaaaaaaaagaaaagcggccgctcgctggatccaggaatcgcgagctagtagaaagggcgtcca

SEQ ID NO: 87465 - DNA, 799 bp, Glycine max
  unsure (1)..(799): unsure at all n locations
  Clone ID: PAT_MRT3847_49991C.1
ggacacaccacactgtttccttacgcgaagaggactgtttatccgtacatcatttattcctcctcatctttgttctatttgtgcccaaccctcctcacccatttgtttccttccacacttaacacacttgcttctacttctacttcttccctcatggaggaattaatcatatctccttcttcatcttcctctttggtctctctttcccaagaaaacccaacaccaacccttcaacaaaaacttcaatttctcctccaaagccaacccgattggtgggtctacgccattttctggcaagcctcacacgacgacaatggcaacctctacttatccttcggagagggccatttccaaggcaccaaagaaacttccccaaaatcactaaccattcccacaaagaataagttcctgatgaaaacacccacaaacgataacatcaacgacgccgagtggttctacgtcatgtcgttgactcgcagcttcgcagtcaacaacaattcttcttcaaactccacttcttgttcttcttcttcttcactccctggcaagtcttttgctttaggctcggttctctggcaaaacaacaggcacgagcttcaattctacaactgcgagagatccaacgaagcgcacgtgcacgggatcgaaacgttaatttgcatcccgacacaaaacggggtcgtcgaaatgggatcctacgacaccatcaaacaaaactggaacctcgtacagcacgtgaagtctctcttccatacctctccagatccggntactatccaaatcctcgacgaccacacca

SEQ ID NO: 87466 - DNA, 189 bp, Glycine max
  unsure (1)..(189): unsure at all n locations
  Clone ID: PAT_MRT3847_49992C.1
tcttaaacacccatctttttcacccccgtgccatccttaacccttgaactcagcnntcttttagtgtgattctttaggttgccaggccgccacacggcacgtttcactcactttgtattgctctttttacatctctttctgtgccatgaactactccgttgtgagggaaggaatttgagacaaataacc

SEQ ID NO: 87467 - DNA, 460 bp, Glycine max
  Clone ID: PAT_MRT3847_49993C.1
atatgttcaggaagcaccaaagttaacaatttgtttttatagaaggcacttaataacaaaaaacaacaaagtgttattaaaaagtcccccccaaccaaaaagaggggaattgaaatttatgaactcaaaaaggggggaggaatccccccccccaaggaatgatccatatcacacaccgaaagagctgccccacgcacctctaacataattattaattagtatccccagcgcagaaccccacatttaaaacaagagggggatcatccataaatcaatcagaggccccccgtggaggcatcgaagcgaccaccaataaagcccccattgccatgcccctggaaaaagccaccataatttaaagcaggacccccccccgcagtagggggggcgccccctgagagttacccatcacccaacaaaaatgccacccacgggggcggggcctaaaaccgccccacgc

SEQ ID NO: 87468 - DNA, 702 bp, Glycine max
  Clone ID: PAT_MRT3847_49994C.1
cacgcgtccgcggacgcgtgggttctaacctcatcactcctcacacaacacacttgcctcttctacctccctccacttctagttcttcccacatggaggatttaatcatatctccttcttcgtcttcctctttggtctctctaccccatgaaaacccaacaccaacaccaacccttctacaaaaactccaattcctcctccaaagccaacccgattggtgggtctacgccattttctggcaagcctcacacgacgacaatggcaacctctacttatccttcggagagggccatttccaaggcaccaaagaaacttccccaaagtcactaaccattcccacaaagaagttcatgagagcccccacaaacgacaccaacaacatcaacgacgccgagtggttctacgtcgtgtcgttgactcgcaccttcgcagtcaacaataatgcttcttcttcttcttcttctctcccgggaaagtcttttgctttaggctcggttctctggctcaacaacatgcacgagctccaattctacaactgcgagagatcaaacgaggcgcaagtgcacgggatcgaaacgttgatctgcatcccgacacaaaatggcgtcggcgaaatgggatcctacgacaccatcaaacaaaactggaacctggtacaggacgttaagagtgtcttgataacccctgcagatccgggtgctg

SEQ ID NO: 87469 - DNA, 194 bp, Glycine max
  Clone ID: PAT_MRT3847_49995C.1
ctcgcctagagcagatgcgcctctccgctgcgagcactctcatatgatctgacttcgagctcgtctttctgataagcagagatagcaggtatcggatcatgggctgcagctctgaactgagagctccagaagaggaagaaggagatgagctgctgccccacatagaacgaatagaaggcagacaagctcacctg

SEQ ID NO: 87470 - DNA, 259 bp, Glycine max
  Clone ID: PAT_MRT3847_49996C.1
tgaattttaaataattacagatccaaatcatcaatatgcttgaattgaatgaatcccactccataaacttgcactttcccctcactcacatcattctcttcttcacatgtatcaaactctctaaagctcaatcctccatggagccagttcccacctacatcacccaccacagctgggagccttccgtcgccatcaccgtcggcgccataatcatcgccctcctcttaatgggaatcatctcaatctaccttcgccgctg

SEQ ID NO: 87471 - DNA, 225 bp, Glycine max
  Clone ID: PAT_MRT3847_49997C.1
ccacgcgtccgatctcacaggattggcccattcgatttaacgaccggttaagaaaacccacataattatcaaatcttcctcagaaacttgtgcaaggttggatgatctagggagtaggatgcgcacaatcaagtagtgcatgatgcggcattcgaatgccaatgaaccggcaagaagccttccggtcatatccacttggttggtgcaaaccatccggcgagcatc

SEQ ID NO: 87472 - DNA, 236 bp, Glycine max
  Clone ID: PAT_MRT3847_49998C.1
tacggctgcgagaagacgacagaaggggtattttattagtgacaaaatctcatcatggagaaattgccacgttcaatccgttttgatttgttacagataagaacagttaaggttagcaacatatcattggttacttccaagaaagacattgaagaattcttttcattctcaagggatattcgatatatcgagatgccaaaggaaaggggtcacacttaaggtggttatggttcatt

SEQ ID NO: 87473 - DNA, 744 bp, Glycine max
  Clone ID: PAT_MRT3847_49999C.1
accttctcctttactctatctctttctaactactatacattcgtttcgttggactggctccgactttcactctttacaaactatccaaacactaccaaccgtcaacatgaagttcctcggccttcttaacctcgctgctctggccagcgccgtccctactcctaccgtccaggaagtcggcaagactatcaacaagcgagctgccatcaccgacgctgccaacattggctacgccacagagaacggaggcaccacaggtggtgccggaggagctaccgtgactgtctcttccctcgccgagttcagcaaggctgccgagtccgacgagaagcaggtcatctacgtcaagggtcagatcaccggcaacaacaagatccgcgtcaagtctgacaagaccatcgtcggagcttccggtgcttctctcgacaacattggtctttacatcaacaagcagaagaacgtcatcgttcgtaacctcgccagcaagaacgtcgttgctgccaacggtgatgccatcggtatccagaagtccaccaacgtctgggtcgaccactgcgagctgtcctctgatttctccaaggacaaggacttctatgatggtcttcttgatgttacccacgcttctgactgggttacaatctccaacacttacttccacgaccaccacaaggctttctctggtcggtcactctgacagcaacgctgatgaggacactggtactctccacgtcacctacgccaaca

SEQ ID NO: 87474 - DNA, 529 bp, Glycine max
  Clone ID: PAT_MRT3847_4999C.1
ccattggcgaatccgttcggacctggaagcccaaatcttgaacaagtgaagcttgatcctattttggtaatagtaggtggcaatgaattgctcaaggatagggcaaaaaactatgcaacaaggttaaaaaaattagacaaggacattaaatacgttgagtttgaagggtgcgagcatgggtttttcacgcatgattcattctcatcagaagttacagaagaggtcatccaaatccttaaaggattcatgcttgcaaacttctagttaaaaaaattaaacagtagaaagatactgatagtgagatgtaattaaggttaattaattagtatatatatttttagcccggtaaaagtagtagttcgtgggaatgaagtatatatatatgtcaatttcatggtgtgtacgtgtaactaactagcctttcattggagattgtagtcaactatctttcttagctatttgtgctataacttttttaattgtatcagtaattttcaagcgaaaaaatcataataatagaattttaatt

SEQ ID NO: 87475 - DNA, 711 bp, Glycine max
  Clone ID: PAT_MRT3847_499C.1
caagactcaagtatctcagctagcttcactgtatagagtaaattccataactgagaatatccaagcaacaaatagagttggagctaggtgaaggagaagtggagaactcaccaccactggaaatgagaccaaggtgcggcggtgagtgcagacccaggtgtgcagcgtcgtggcgttgcggcgagtttgtggttttgtgcggcgagttgcaaacccaagtggcaggtgcacggcgaccaacgagttgcagaccaggtgcggtggcgagctgcggcgacgagttcgagcgtgaagaatgaagatgaagagaaggggtctttggctgcagcggcgagatttttagggatagtgccaattgccaaacactcagtctcaaacgcactgaagttctttttgggttgataataatgagacatcaaaacgatgtcatagaggtggtccaattttatttttttgtgtgcagagcccagtccgggtttgtaaaaccagccgggtcgccgggttccctcaaaaccggccaggtcatcctgggccacatgcatgaacggtccaatagcaaaatcggtttggttaggtcaccggattgctgttgaaccggtctgactggctggtttataacactgatttactgtggtgcatgaacgtaggaatagaataacttttgaataacttaggaagagagggtactgcaagatacttgtaatatgatag

SEQ ID NO: 87476 - DNA, 1261 bp, Glycine max
  Clone ID: PAT_MRT3847_49C.1
ggagggaatgtactaaacaccatagtgaggaaagcataatcaaatcaaccatggctacccttattgctcccatcaccttttcacctggtttagatgcagaagctcttagaaaagctttccaaggatgggggaccgatgagaaaaccgttattgcaatactgggtcatagaaatgttcatcagaggcaacaaatcagaaaggtttatgaggaaatttaccaagaggaccttataaagcccctggagtcctaatgattttggataatgtggtccaaacaaaacagagagctgtgtaccgttggatgctggaacctgcagatcgtgatgctgttttggccaatgttgccatcaagaatggcagcaaaggttaccacgtgattgtggaaattgcttgtgtgctttcagctgaagaggtcttggcagtgaagcgtgcctatcacaaccgttacaagagatctttggaagaagatgtagctactaataccactggtgacattcgccagctgttggttgggttggtgaccgcatataggtatggtggagatgagatcaatgcaaaattggccaaaactgaagctgatattcttcatgaatctatcaaggagaaaaagggcaaccatgaagaagccatcaggatccttactacaaggagcaagacccaacttctggcaactttcaaccgctacagagatgaccatggcgcttctataactaagaaattgttggataatgcatccactgactttcagaaggcattgcacactgctattagatgtatcaatgaccacaaaaagtactatgaaaaggttctgcgcaacgctctaaaaaatgttggaactgatgaggatgcactgacccgtgtggtggtctcaagggctgagaaggacctcagggacatcaaagagcgatattataagagaaacagtgttcaccttgaggatgcagtggccaaggaaatctcaggggactacaagaaattcatcctcactctgttggggaaggaagattgatgtgattgctctctagctaaggacatatcttatagtatttggttatgctggtttcttgtgctgtgatttggttaattttcctactttgagtatgcttttatgagtgctgtatctcactatctattatctttgttgtgagacagtgtgtacttctgttttaaattactgtttttgatgtatgattaatacaataaactttaaataaaaaagacgttgtagatattacaaaaggttatacttagatcaattttc

SEQ ID NO: 87477 - DNA, 427 bp, Glycine max
  Clone ID: PAT_MRT3847_4C.1
atttcccagtgtgcccgtgtgcctaaaaaacttaatcacttctttcagcttcacacactaataagtgataataataacacgattccattattctaaagcacaggtacacacgctatggcttctgcaactggctctggttcttcttctggcttcggatctccctgtggggcatgcaagtttctgcgaagaaagtgtgtcactgattgcatctttgcaccttacttttgctcagaacaaggagctgctaaattcgctgccattcataaggtgttcggtgctagcaacgtttccaagctgctcttgcgtataccagctcacggtcgttttgaggcaatactcacaattgcttatgaagctcaagctcgccttagagaccctgtttatggttgtgtctcccatattttcgccttgcaacaacaggtagcat

SEQ ID NO: 87478 - DNA, 367 bp, Glycine max
  Clone ID: PAT_MRT3847_50000C.1
ttttattatttttttgtgtatttgtggtttcatttatatttttggtctattatggtatctttatttttataaaatcctaaaaatctaattattttagtactcactaagttactcttataacgcatacctcccccgcacgaaacggcacgggggcggaaattaaccttagaaaaggcgagagatccaaaaaaaaataggaccagagggtctgaaaaaaaaaaaaaaaccatcttatggtgtcccccccccgcctttggggaaaaaaaaaaaactgcacaagagaacgccctccccccgcgagtatggggggcctccagttgggggccgaacaatcgcccaaaaaggaaaaaaaaacccccgggcgccc

SEQ ID NO: 87479 - DNA, 383 bp, Glycine max
  Clone ID: PAT_MRT3847_50001C.1
tttggttaattggagactgtgacaggccaatacgattcggtgtgatccccggtggatccataacaatatcgagaaccaatcaccatcacttacagccatcatgcattatagcacaaagtgaagatacaatatgccacatgaccactatcgaaagattgtggttcacagagcgtagacaaggcaggacataccgaactgcctggtgggagagatgcagcagaacggaatagaagaccgcaatcagcataatggatgccacacacagagccatttgaggaagcacgagggggacaaaatgactaatactgaatgggtgtgcatgatgatgagcaatagggagggggcaacacgggggaactgagctctggtgtggatggtcatct

SEQ ID NO: 87480 - DNA, 758 bp, Glycine max
  unsure (1)..(758): unsure at all n locations
  Clone ID: PAT_MRT3847_50002C.1
ccacgcgtccggcctctcctctctcgtgttctctgagacacactactcctaacacgggcatttgtatttatgctcaaacagttcggttcaaagtttatatttataacccttttgtttctcaccactaggagagtgacctgcgccaatttctaagtccaaggatgcaagatatccccttctgtagccttatagttttcttctttctaataggggcttctttggtttcccctttatatgatgggcccctatatgactccactgcctacactgagtgcaaagagaagccagaggaaccactttatggaggaggacttttcaagactgagcaacactctcgtcgtggcagcattgccaacaacagctatgtgccttcacttgttctgtataatctcactcagggcaccatttactctttttccgcatgggtgagagttaaagattcaagttcagctatgataaggaccactctggaaacggagaaagagacacatgattgcattgggacagtttcggccaagcatagatgctggtcatttctgaagggtggatttgttctgaattggccttcaaatttatccattatcttcttccagaacgctgatggtaaagatatcaatatagatgttgctagcccatcactccagccatttactaagcaacaatggagaatcaatcaacagtatataatcaacactcanagaaagcgtgccgtcactattcatgtgtcagatagtaacggaaaggagattggaaggagc

SEQ ID NO: 87481 - DNA, 329 bp, Glycine max
  Clone ID: PAT_MRT3847_50003C.1
acactaacacaaagacatggaactaagcaccatgttgtgcttgagtgcttgcggcgatcttcattgtgctcttcatggcactcatcaaaccttattagtgctacagacgccgtgacttgccactctcacatggctccatgggctggacttacatacgagaaacctttcaaatgtattctcaagatccaaatggcgtctttgccatcaacatacaacggtgcagatctttcactttcatgaacgacttcatgatggacaaacacacgaatctcacttacacacatcatgttcagttgcgccatctacgattggctctatgttcaagtccc

SEQ ID NO: 87482 - DNA, 304 bp, Glycine max
  unsure (1)..(304): unsure at all n locations
  Clone ID: PAT_MRT3847_50004C.1
ggacccatctggcctgcggtagcgcgaacgcaaagaaggaccaaggggccattctcaaaaggggagagggcgcccacaccagacggcacnagaccaccaagcaacaacaaccaaacaaaaagggggaggacgccacgcgggaccaaaaaccaagaaaaaggggcgcgcaaagaccagcgagcacgggaacccgccaaggaaaaacagacgaaaacacgcagacgcaccacagaacacgagaacgagaaaaagcaaagcagagcgaaaaccaggaacagaagcacaaccaagaggaaaaggaaac

SEQ ID NO: 87483 - DNA, 192 bp, Glycine max
  Clone ID: PAT_MRT3847_50005C.1
ccagtaagaacgaggaatattggggaaaacgtggggaagggcgagaacaagatgggaaacacacccattacaacactgttgggtaagtggctgaaacatagggttacgtacaaactttgacagaagcgttctagcggatacatatgttcaaaaataaattgccaggccctttttttaagggaagaaaacaca

SEQ ID NO: 87484 - DNA, 255 bp, Glycine max
  Clone ID: PAT_MRT3847_50006C.1
tggggggtgaacacgacggcttagagttagatagagtctcgcggagactcaaacccgcatctgtcattttcgagcttcatccatcaacagtgcgtccgcttatggtctgacctcgccacacgtttggatgacactaaacgactcctagctcatgctcatcataatcgtctattctccatacacccactcgccgccacttctaatctgggctccctgcacgttgctaagtttctcgtcagaacatcagtttacacc

SEQ ID NO: 87485 - DNA, 405 bp, Glycine max
  Clone ID: PAT_MRT3847_50007C.1
gccttcgtccttttttttttttttttgtcgttcaaaattcttttatttttattgttttaacaaacaaaactgcctttttttggaaaagggtttaacccaaataaaagtggagacccaacacaccatctaaacaaactcgcatacaaaagatcactggagggatacacagtgagaaatggattcttcggtaaaaccaggggccaaaatttttttttacgggaccaaaagttgggccctggtccacgggagcttttccctttcgccttcaaaattttgtggggttggtcgcaccccaacccatgaaacattttcttcgtcgagactgagcaatcccttcagacgattagagagagctcttaacggccgctcctcctagggtgactctcacttgcttgagattaacgc

SEQ ID NO: 87486 - DNA, 543 bp, Glycine max
  Clone ID: PAT_MRT3847_50008C.1
ttgcaaaggaagtaaaacaaggtcgaagagaaggccaatgggtttcattcataaccaagcttcaccctctcacatagggataagaactgtgggcgtggaaaaagcttgcagtttctccattgattcagatctttgcatctccatagttacttggaacatgaatggccaggtgcacccaattactaacacttatggttaatttcatttaattaatagatgttgctaaccagtgccttagacactatttaaggaactacaaaaagagaaaatatttttgtagaaaacataaaaaaaaattattgacaatataattttacatatttcaataatttttttaattttttaactaatatcctaattaaggacactagttattatcttaattaataaacttaaaactttgtgagaagttctcattttaattttttcatgttcatctatggaagttcatttgctgtgaattaggttacgtttgaagattttgctgaaatggttggcagtaaccgcgagttcgatcttctagctgttggcttgcaagaggct

SEQ ID NO: 87487 - DNA, 544 bp, Glycine max
  Clone ID: PAT_MRT3847_50009C.1
ggggtgtagtttagtgacatttgcagtagtagccagcaggacgaggaaaatgggtagtgtggccccaaggttccgcttcctcctggccactcccttccctcttctccgccgccggcaccaccaccaccaccgcaacctcttcctcctctccacccattccctccccttatcttccttctctttctctctcaaactcaaagcctcccaatcccaagcttccgcccctaacacctctccctgccctgagtggtcctcattcctctcccacatctcctccgccggctacctcccctccctccccgaccaagccttcaccgccgccgccgaacgtctctcctactccttcctccgcgacgccaccgcctgcctcgccttcgcacgtgaccgtcctaaccttctcaggttgctttctacgagagacattgcggcgctggttgagcacggctccccctttctcttccgcgacgccgacgactccgtcaggaagatgaagacctttctctccaacggtgacaccaatgtgttggacactgatagagcaaat

SEQ ID NO: 87488 - DNA, 455 bp, Glycine max
  Clone ID: PAT_MRT3847_5000C.1
cccacgcgtccgcagaattaaaatatttctttgagtcaagtcctttagcatcaggcagtgtaaaaaaatgggtttccgtataccaggtattattagacaggcatcattttctacagccaaagcaactcacaaggaacttgaagtcccaaaaggctatcttgcagtctatgttggagataagatgaagcggtttgtgattctggtatcatacttgaaccaaccttcatttcaagaattactgagtcaagcagaagaagagtttggatatgatcatccaacaggcagtctcacaattccttgcaaggagaatgagtttctaaacctcacttctcgcttgagtgagctatatatcatgctttaattgagactcaaacagattagttgagccaaatttgtacaagaaggaacttcttttattgtgatacttccaatttttttcttttataattcaactg

SEQ ID NO: 87489 - DNA, 279 bp, Glycine max
  Clone ID: PAT_MRT3847_50010C.1
gttgtatcagtaacttccatattccattaggaggggcagtgtaacagtatgactccataagtgcgtttgagctggatctctatttaatgagccagctgcattttttttagactgggctgacaaagaattgtctttcaaaattctggaccagcctgaagattatttcgtttccgagccaaactggctggtttgatgggataaaaactaccaaactcaccaagctttgtttccttcccccaagtgttaacgatatgtttttatattctaagttccataaat

SEQ ID NO: 87490 - DNA, 448 bp, Glycine max
  Clone ID: PAT_MRT3847_50011C.1
cccttctccccccccttgataaaactaaacacgctatcttatttagaataactcattaaattctcttatgttacaacaaacattcaactgttatggacatgtatacttataatctaatttgcccagaaattccacttatgataaattccggattactttagcaggcacaacttcttgaccataaaacaattttctactacctaagtgcttagtgaaaaacactggtagatttgttattttgaatacacaatctgaggcatgactgacacactgtgactttcctctcacatgtgaaacataatgagatgccacatcctgccaggataagcatatctatggggcatacatgatatccatggaaatttttagtaacactcggtgacagactaacactgatatcatctactggctttcactcttgcacatttaacactatgatgagcattct

SEQ ID NO: 87491 - DNA, 183 bp, Glycine max
  Clone ID: PAT_MRT3847_50012C.1
gctacacgaaggtgggatcattcgtcaatggagccagtgtggtgattatcttccatcccaacacggttaactcatgtggtggtgatcttgcgatcccattatgaccaaggcttctattagctcgaaacacactacatctttggccacagcactgtctcatcatcatgagatctgaattgactg

SEQ ID NO: 87492 - DNA, 611 bp, Glycine max
  Clone ID: PAT_MRT3847_50013C.1
caatccgaacatatgtattcattactcattagatatatccaacagccaaccctcactcaaccctttcacgactgaccttgaggctgccttggacctcacgcagtctagtcttgacgcctcatctcattgcgccccagtccacagccttatcatccacaccctcggtcttaacagagcctctagcacttggcggcggcgcacaggttcagagtaatatccgagttggcctggcaatccttgacctggctaccactaggagcgacaccactaccccaacagatgcggcggcaggtagggtcggagggcagcacgttcaaggtgtgaccggagaatgcatcgccaaagacgtcagacatgtcgtaccacacggtgctgccgtcgagagtataggcaaagttggtttgtgcgctgccgtcatagagaccgttcgcgtgggtggtgaccttcaacgcgatgccaccggaggcgggatcatggtgcagtggctccttgtacatacccttgggtgcgatggtgaccatggggccaacagagccaccaacagaccagaggtagacggggaagtcgcagtgattcacaacggcggcgttgccaacagcgctggccaatgg

SEQ ID NO: 87493 - DNA, 1384 bp, Glycine max
  Clone ID: PAT_MRT3847_50014C.1
tttttgaaagaccaaaaaattgtaatatacagtagttaaacgcgttacatgtacgaatattctctatcttgtattcttgtcctcattttttattttttatttttgagaatcttgccctcattttactcactcaggacaatttccagaatttaatttaaatctacaacttatgaaaaaatagggggaatatgacgtcatcaattatcggcgacatctccaagttcaccgtcgattagagcgatgggaagccgacgtggttgacgaagagtgtgatgagacactaaccgaatctccgtcacacaaaatgttagaaaggtatttcccaatatcatcgggtagaaagtccctaacggatttcgacccgacccgattcttctcgaagaacacgctgtacttttgcatcagcttagaagctatcgagtctttgatttcatcacgaaatttcgggtcggatacgacccacgaggcctgttttttacacgcttcatgaaacgcagcgtcgaacctcacgaaacaggcccttgcctgctccgccgtcaactccgccgcgggattttccggcaacgacgagaagacagcgctccacccgacgctctcgtacttagacgtgtactctctaactttcaattcatgcttcgccaaccactcttcgccgagaagaaaccctaggttcgatttgcgcacctttacgacgacgtattgcatgttattcgcgagaaacaggtacgagtgcgccacgtctttgtagagttccgctttgccgtcgagcttgcagagcacgacgagtatgatccacgcgattcgctccgatagctccgaagccggcgggttttcctcgcgcatcgggctgcggtagtaagactccggcaacggagattgcggcaaatcggcaattatatcgaccaacacgccgctgtaatcggcgaggaacgtgaggtagttcatcacgtagcgcgtgagagggtgaacaccaccgccagggaccggtttcttcgatgactctttctgaatcgcagtttcaaagtccgttagcatcgttctaacagcgtcgccgagtttcaccatcgacgtaacggtctgtgtgcgaatgttaaccgttgactcgaaggagaatatgaattcgatctgaggccagtagtcggagatcgcttcgtacaaatccagaatcctgaacatttttccggcgatttcttgcacttcgccaccatttccggaaatcccaaaagagatacggcgccgtctttggtgatttccgcgaaacatgattccgcgattctcttccccgaatccgaggcgaagacgtgatcgcagaggatcctttcgccgtggaacagagttccgacggatactttaactacctgtaaccagctcttgatcttcaacc

SEQ ID NO: 87494 - DNA, 955 bp, Glycine max
  Clone ID: PAT_MRT3847_50015C.1
acggctgcgagaagacgacagaaggggacacgaacttttataaacccttggcttcatttctttccaatctctcttaatacatatcactttcttcaccgttcgctctttctttctcccctacacaaaacatggctttgcccaatcagcaaaccgtcgattaccccagcttcaagcttgtcatcgtcggcgacggtggcacaggaaagacaaccttcgtgaagaggcatctcactggtgaattcgagaagaaatatgaaccgaccattggtgtggaggttcatccgttggattttttcacgaactgtggaaagattcgcttctattgttgggatactgctgggcaagagaagtttggtggcctcagagatggatattatatccatgggcaatgtgcgattatcatgtttgatgttactgcccgtctaacatacaaaaatgtccctacctggcaccgtgatctttgccgggtctgtgaaaacatcccaattgttctttgcggtaacaaggttgatgtcaagaataggcaagtgaaggcaaagcaggttactttccacaggaagaagaatttgcagtactatgagatatctgctaagagcaactacaattttgaaaagccatttttgtacttggccaggaaacttgcaggcgatgctaacttgcactttgtagaatctcctgcattggctccaccagaagttcaaattgatttagctgcacaacaacagcacgaggctgagcttcttgcagctgctagtcagccccttcctgacgacgatgatgatcaatttgagtaggaattgtgggtctgtggatcattttacttagttaatggtatttgtgtatgctacaatgtgtctttggggttgtattattgacatttttttacgtggatttgaggatttaaaattaatcattatgaggtgttttactcctaaaaaaaaaaaaaaaaaaggag

SEQ ID NO: 87495 - DNA, 378 bp, Glycine max
  Clone ID: PAT_MRT3847_50016C.1
tgaagatgccaaacgcgggtcctgcaaagtggagacagattgttggagatgccatgattgaggtatccaaattgactacgaccgacacaagcgtgtaattctctctcagcacagcacattgagatggttgagctgcagacatcatcgattttcgaggcctttcaccataagctggtacattctggcgagattcaagagacagttgtacggaagatttcacaagaggaatggcttacagcttggtcgacacaggtgcgtcctgcaacaaccctgtgggcggatcggtgtccagagctgtacgacacggtgcatgacagtggagtgtcaacagtagcaggtgatcttgtcacaggtgtgaacttgacaacccttggccat

SEQ ID NO: 87496 - DNA, 400 bp, Glycine max
  Clone ID: PAT_MRT3847_50017C.1
acatcttatgatagccctaaatcagggccaagcccaagctcaggccttatcccccaaccaaagggcagcactcaagactagaaacattgaaattcagattacagagcagagccttgacttctatctaaaataggggaacaaattgcggctcactaaacagcctaccgtgattaacaagtaaagataattatctggtctcttaagacgaacaaattttgtgaattgaaaaagaagatttcaaactcaccctataagagtttatttgtaaacctacaacaaatagtgccacctaacactgctctaaaaactaaaatatttgctcatctctgagaggcaatgtctcacagaaagaatgcacttttcttttgctaagaaacaaagcttcagactgactgctaga

SEQ ID NO: 87497 - DNA, 787 bp, Glycine max
  unsure (1)..(787): unsure at all n locations
  Clone ID: PAT_MRT3847_50018C.1
caaatctaaaatccccttttctccttaagtagttaaagttaattaagtcgtgtttccacgtaaacggcgttagaagcgcctctaattctattagggttttccaaatccatcgtcgttttcaacccttaacgacgccgtttcaagatgatgcccccgggactcgtttccaatctccaagaagtgcttctcaaccgaaaaggcgattccaattcgaattcgaattcaaataatgcagagcagcatgaacaatccagcgagaactcggagcctgttgaattcgacgcctcgaagccaattgtgttggtgacgaacagtgatggcgtcgaatcccctggcctcacgcacctcgttgaagctctcgttcaacaaggcctttacaatgtccacgtctgcgttcctcaatcggacaaatcggtttcggcgcactccgtaacgctccgagaaactattgaagctgcttctgccaaaattagtggcgccaccgcctttgagatttcaggaactcctgtggattgtgtttcgctagcgttatctggagcgttgttttcgtggtctaagcctatgctggttattagtgggattaaccgcggatcaaactgtggtcatcacatgttctactcaggggttgttgccggagctagggaagcgttgttatgtggtgtaccggcattatcaatatcattaaattggaagaaggatgaaagtcaggaaaacgatntcaaggatgctgtatcagtctgtttaccattaataaacacagctattagggatgttgaaaaagggaact

SEQ ID NO: 87498 - DNA, 800 bp, Glycine max
  Clone ID: PAT_MRT3847_50019C.1
agtacaagcccctatgggaaaaatatgttgaatactctcatcctctgttgcaacagtgtaacttccattgattttgaattgcatttaaattgatacttcaaaccttggtggaagattcagatacagggctaggctctgttgatggggtaggagaatatattattggccgtttgtaggtctggcaggcttggtgattcttaccagaaagtgaattcaggtcttgatttgtagtcagaaatgcttgtacaatttgaaaaggtcaagcatgtctggtggctttaacttggtgccttcattgaatccggatctacttctgtagcatatataattatacacgttcatttgtcaagtattagactgaatcagttcatagttttcaagtgtagtcaaggatgagatctgctgcaaacttcttattgttcattactgctccttgcaagaacagatgttctttcctgtgacattcatttgctgaaactttattctgctattcttgttgccatttttttaaaagtagttactgttatttagttctcaaattctcatgtatcacaaaactatagtttatttgttccactagcagaaattccagctgcatttgttgttatgtgtggggagaatagtcacatgcttgtgacaagtatgttacggatattttgtaccttatatctcaatagtccaaattattagtatctaagattattagttcaaggatgcatgcgtgttcagcatggtagttaaatgcttccttgttcacccaaaaaaaaaaaaatgcttccttgagttccttcttgcttatt

SEQ ID NO: 87499 - DNA, 269 bp, Glycine max
  Clone ID: PAT_MRT3847_5001C.1
gtcgtcgcttccatgactttcctcagacaggtttggcttcacggaaaccagttcagtgggacaattccacagaacattcgaaatctaacttccttgcaggagctcaacctcaatagcaatcaacttgttggtttgattccagattccttggcaaatatggaccttcagatactggtgttaaataataacgggttcatgggtccaataccaaagtttaaggctgacaaagtatcttatgattctaatttatttgatcattccaagcctgg

SEQ ID NO: 87500 - DNA, 1770 bp, Glycine max
  Clone ID: PAT_MRT3847_50020C.1
ctaaattgcaatcccccctcctccctgaatcggtccagctttttccgccctctctcccccccccccacctcgaacggggtggagtggttgacgaatttgtcacagggcacactcccacacaagccctgttctggctccttcctctctgccatgacgacgtcgtccggttccctaaagaacacgattcccccaggcctctcaactcccctccaagaagtgcttctcaacagaaaacgcccccaacaagaacccaacaacaatgccggaccctcttcctccaccgaggacgctcatcgccgacgattgctccagctcgagtcgctcaactccaagctcatcgtgctggtcaccaacagtgacagcattgagtcaccgggccttacattcctcgtcgaagccctcgtgcgtcagggcctctacgacgtccatgtctgcgttcctcaatcggacaaatcggcttcgggccactctgtcactcgcggagaaaccgtcgaagctgcttcggccaaaattagtggcgccaccgcctttgagatttcaggaactcctgtggattgtgtttcgctagcgttatctggagcgttgttttcgtggtctaagcctatgctggttattagtgggattaaccgcggatcaaactgtggtcatcacatgttctactcaggggttgttgccggagctagggaagcgttgttatgtggtgtaccggcattatcaatatcattaaattggaagaaggatgaaagtcaggaaaacgatttcaaggatgctgtatcagtctgtttaccattaataaacacagctattagggatgttgaaaagggaacttttcccaaaagctgccttttaaatgtagaaattccgacatctcctttgagtaacaagggcttcaaattaaccaagcaaagtatgtggagatccactccaaactggctagctgtttccaccagccgttatccaactggtcatttcttggccaatcaagggggccttggtcttcagtttgcacagcttggccgagatgcttctgcagctggtgcagctcgtcgattggctacacagaagaagaatttggagattattgaatcaatgggagctgcagggaaatctgatcccaacagggtgaagaagtatttcagactagagtttctggacaatcagcaggaggaagaagtagacgaagatctggattacagagcacttgaaagtggatatgttgcagtgactccgctgtctctttctcctcatattgagactgttattcaaatggcagcttctgattggatttctgctgtgcttcctggtgaacaataaatttagtatgattgtgtacatttgagatttatgatgattcttttttatttttttcttaaagcaaagatggagcagaagcggtagtcacacctattcaatagtggatttccacttgtactatttttctttttctatattttttgttcccttcttcattgtttcagttccttttggtgacttagttgtttctgatttgaagcaaatgcttcttgtaatttcttgggcatattttagaaaaatgccatttcgtctgtttgtaatatctattactagcaaaaacacgggagcagctgtaattttccgttgtttttttttttttttgaagatagttaagccctggattgatgatttcttatcctgactaaaatacattggttacaagttagttgccctattctgtttgggtgttattgtgaaaaatttacgttaaaatgaagaatgcacgttggaagagtt

SEQ ID NO: 87501 - DNA, 472 bp, Glycine max
  Clone ID: PAT_MRT3847_50021C.1
ttaatttttaaacatattttcacgttttactagggtttcatatgaatcacaatttcaatttttgggtttgggtttctctttactaccttttgtcgttctttaatttttttttttaaaaaaagacacattatcggcgaaaaaccagcgttacaatctagaaattgccagggagaactcccatcaacccctaccctgatccggggatatatgaattcatcttttaaaaaaagggagggaggactatagaaaaacccgtataacacaaaaagcatgtctcagaaaggtggaaccgacaagaaaaagggttcttaacaagcacatccacttgactgaggtagaaactgaccaccgccttttggggactttaaggccacatcaaccaagagtttttgttttgccgaagaaagggaaaccatccaggggggggtgtaggaaatcttcgaaacacgggctttataaaaacccaggccta

SEQ ID NO: 87502 - DNA, 470 bp, Glycine max
  Clone ID: PAT_MRT3847_50022C.1
gccccctcctttctctttcgttaattagggttttccatttccatcgtcgttttcaacccgtaacgacgtcgtttcaagatgatgccccctggattcgtttccaatctccaagaagtgcttctcaaccgaaaaggcgattccaattcgaattcaaatgcggagcaagaacaatccagcagcgagaactctgagcctgttgaattcgacgcgtcgaagccaattgtgttggtgacgaacggcgatggcgtcgattcccctggcctcacgcacctcgttgaagctctcgttcaacaaggcctctacaatgtccacgtctgcgttcctcaatcggacaaatcggtttccgggcactccgtaacgcttcgagaaactatagaagctgcttctgccaaaattaatggcgccaccgcctttgagatttctggaactcccgtggattgtgtttcgctagcgttatctggagcgttgtt

SEQ ID NO: 87503 - DNA, 1364 bp, Glycine max
  Clone ID: PAT_MRT3847_50023C.1
aaaaagacttaataactaattagatctcgaaatcgaaatcttacagactaaacaatggttaccaaataccaatcccagtttcattactctttattatttcaaatctaaaatccccttttctccttaagtagttaaagttaattaagtcgtgtttccacgtaaacggcgttagaagcgcctctaattctagtatcatcatcatcatcatcatctattctttctttctttctttcttcattttcagcgttttatcgccccctcctcttccttctaattctttctttctctttcgttaggtagggttttccaaatccatcgtcgttttcaacccttaacgacgccgtttcaagatgatgcccccgggactcgtttccaatctccaagaagtgcttctcaaccgaaaaggcgattccaattcgaattcgaattcaaataatgcagagcagcatgaacaatccagcgagaactcggagcctgttgaattcgacgcctcgaagccaattgtgttggtgacgaacagtgatggcgtcgaatcccctggcctcacgcacctcgttgaagctctcgttcaacaaggcctttacaatgtccacgtctgcgttcctcaatcgtgagtctatagtatataaaatgcaacactataacatctttttttcttctcgctctgttctgtctttgctaattgctagttcgtgaaattgttggttagggacaaatcagattcgtgactcaatgtaacgtgcagagaaactagatccgctcagtctgcagaagttatttagactagagttttcggacaatcagcaggaggaagaaatagacgaagatctggattacagagcacttgaaagtggatatgttgcagtgactccgctgtctctttctcctcatattgagactgatattcaaatggcagcttctgattggatttctgctgtgcttcctggtgaacaataaatttagtatgattgtgtacatttgagatttatgatgattcttttttctctttttttctaccttaaagcaaaaatggagcagaagcggtagtcacaccaattcaatagtggatttccacttgtactatttttctttttctacattattttgttccctttttcattgtttcagtccctttggtcacttagttatttctgatttgaagcaaatgcttcttgtaatttcttgggcatattttagaaaaatgccatttcgtctgtttgtatacttgggcatattattgattactaccaaaaacacgggagcagctgtaattttccgggtttttttgtttgtttgtttgaagatagttaaactttggattgatgttttcttatcctctgactaaaaaacattggttacaagtt

SEQ ID NO: 87504 - DNA, 396 bp, Glycine max
  Clone ID: PAT_MRT3847_50024C.1
cgcaaaaaaaaaaaacaatgaaagaaagaaagataaaaaccaaacataaaaatacaaagaaaaataaaataagaattaaaaaaaaaaatgaacttaaaaaaaaaagaataaaactataataaaaaaaaggggggggcccccacttgggggactatcaccccgggtaataaatttgggcccggtctttgtggggaccccagttttgcttatgaaggggagattaaaaggtgggggtaaaaatggaaaaatctgtttccggggtgaaatggttttccgttaacaattccaaaaaaaatacaacccgaaaaaataaagggaaaacctgggggggcctaaaggggaagcaaactcaatttaatggggtgcgcctaactgcccgttttccatgcggaaaac

SEQ ID NO: 87505 - DNA, 191 bp, Glycine max
  Clone ID: PAT_MRT3847_50025C.1
gaacgagacacatgtgttggaagagtcacaggagaatggggcaacaacgctgggcagtatcttgctgcggataacattgagagcgctataaagactaatgaaagcctcaatggacaccacaagaatgtcaagtgcatgtgtgctgaagtcacttgtacaaactagtatattgagcaagggtcggttgatct

SEQ ID NO: 87506 - DNA, 294 bp, Glycine max
  Clone ID: PAT_MRT3847_50026C.1
agctccgaaatccctcaagaaactaccttcacaaatgttgaacagacccagaagcctcttgaatcatgctaaagaacgactcctacacaaggtgaccaaccaaaaaccaattcaaaccatagacattgctgcccccaactccccacatatattcagtcaaaacagaaacgggctaatccacaaaaagtacatgcgccaaatgaatttaggtactactaatacaaacaactgacaacatgcatcttacaaacaatgacaacaagaacccaagcaagaatcgctgctaaccaaaca

SEQ ID NO: 87507 - DNA, 559 bp, Glycine max
  unsure (1)..(559): unsure at all n locations
  Clone ID: PAT_MRT3847_50027C.1
cccgtactctctctgtttctaaaccccctaaccaattctcgcactcgagaatttttccggaaaatctcaccctcatttctcagccaagagaaagactaacaaaaaaaacactcgaattccttcttaattctttcccgattcgaaggatagagaaagagaaaagaaaagaaaaaaagttaatggcatcactgggatctccgtcttcatcattctggtgctaccgctgcaaccgcatcgttagggttccacaaaacgacgccgttctcctctgcccagattgcaactccggcttcctagaagagctacaaacccctccccactcgcgccgatccacgcgcggtggcggcgggtcccccttcaacccggtaatcgtcctccgcaacgcgaacgacgtcgtctcgcccgaaacgcggaacttcgaactctactacaacgacgccgtttcaggttcctccggcccaagcactctccgccccttaccgcaaggagtaaccgagtttctcatgggctcgggcttcgacaatttactcgaccagctcgacgggcgccgngggggggc

SEQ ID NO: 87508 - DNA, 763 bp, Glycine max
  Clone ID: PAT_MRT3847_50028C.1
aaaaattaaaggctattattccagataaaattccagatggatacttcatgtcaaacatattctggatcagatttataccttttaatgctgaagacaaacagggaactacaatcaagtgtgagttacaactaataggaaagcagaaagtaaaaagttctgaaacaagagattatatattatagccatgtttcatagttgaagcctcgtttgtgttcaccttctaatgttagcgaacgatctctagcagcaggaagacaaggtagcttcacataaatatcatcctttacatcattaatggtacctttacacgagaaaatagatttgcttaaactaaagttagatccaacaccaccctttttgttcttccttggcaccttgtagttcttctcacttttggtacactccttgtatgccacaagaaaagggtcttcttgccatctaaagcccttttccttctcggacgtgcttcttcgaggaggttgtaatggacatggaggcagaggaatcttctcgttgtcttgaatttccaacattctccttgagttgctcaaatgggtaggagcaaatggtggtggtggtaagggagaacatgattttttattgattcctatgttgtttagagggaaatcactgttgggggtcttacaaaccccgggtttgtcttcccatgaaaagggtatgcttccatgtgaatgagacttcctatgactcatcttattaacatgaccaataagaagaaaaaaaatctcgagcgaatttcgag

SEQ ID NO: 87509 - DNA, 1350 bp, Glycine max
  Clone ID: PAT_MRT3847_50029C.1
cacaaaaactcactctctttctttttttattcctttatccctctctaaaggtttatctgacttaactgtaatgatggaaacacagctttttgctcagaggctaaaacaaaaagaaaagactaaaaaacaagaatttcgagtagtagcaaaaatcctttcaccatcctcggcaacctcactcgaatggaaactcatcatcatcatcagcaccaaaagaacacagaaaacgatgtacaaaagcaacaacctcaaattgaagaagaagtagcaccaccaccaccacagttaaggcaacaagaaaatacagaactagaccaaatagctttatcacctccacaatttacctcacccttccaccctctccgtggacattcccacactccccatctgagcgttcccacatgattccaaacggataagtccaaaaacccacctcagtcatcatctcttgcacttgagtaatctcctgctgaagacattttctgccatggacacttgctccctcacaaaggaagttcataagtccaagcctcgccgcctcgctcttcgaccaattccatggacagcttccccctccccatcagagagttattagaagatgataatcactccattaaagacactagtggcagcagcaacaatagcacctcagacagcaataacagcagcaaaagagaccaagacaacaacaacaacataggaaaaaaggtacaaggtaagtccaaattttctttttcattatttggattaaccaagggccacaaagggtaccaagataaggaagataaagtgaagcacaagaacaaggtgaggtttgatgtgatccatgcaataaaaaagtacttgagaatggtccagcctaggatgcttttcaaaggacaaagagagaaaattaggccccggggacagtgctattcttattcaggaaatgtaactccgaagaattataagctgcaggattggagaggacaatattcagcaccggcatcaatgaggacttctcctacaaacagtggtttattgattgcaaccacgcctcttcctcctgctagtgacagtaccatggaagagttgcaagcagccattcaagctgcaattgctcactgcaaaaattcaattgcaaaagaagagaatctcaagtgctgattttttgtgtttccctgcatatcttgtttcagagacaatcttgttcaagacatgtccgacacttaatgtgtacgtctctctcaatgaaccatgatctgccagcttgttgtgaaggactagttacttttactagatccaaattctgttggttaaaacgcaaaatcaagtgctgattcatggataggagaagatttttttttaaaa

SEQ ID NO: 87510 - DNA, 308 bp, Glycine max
  Clone ID: PAT_MRT3847_5002C.1
tgtgagaagcatgtaaaataacacagtgctctctccagggtaaaaatcatgaaataattcccaaaagtgcacataaacaagattatcagatcatgaaagcgttgggcgatctgcctgaacaaacacagaagaaacacatgagtccaaaacctcatacatgctacaaagggaagaaccctccctttccccccagagaaagacatggaatccaaaatcctccactataaaatatcactgacggcctcacttaccccatgtcgcactaacgaaacccatccccctgtgagacactgaagatcaagaacttt

SEQ ID NO: 87511 - DNA, 345 bp, Glycine max
  Clone ID: PAT_MRT3847_50030C.1
ggggggatcaaattcatttgaaagtccactttatacattcgtgggtaaaacagttaatgcaactgtcccaaagtaaaccaataaatcttttggttgaaatcaagtcattccaaattccagtttgtacaggcataaataaacattttaatctcatcaaaaagtttaaaaataaaactcttttattcacaaaaactttgctatatactggacattttatagggcaaactgaatgggattactataaacctgcgaatgtcacaatcaaggacttgcatttcctgggaggggaaaactcaacgatcaaataccaaagctttggtatcattaacaagattgttattcttg

SEQ ID NO: 87512 - DNA, 359 bp, Glycine max
  Clone ID: PAT_MRT3847_50031C.1
actaaataaggatagtgaggttacaactgaacgcaagagcttcgagcaaagctatgatttaacgaaaagctaaatgtatatcaacacatatatattaaattcatacggtatctacatacatcacatgttcctgacactaaacaaaataaaagcaccgccaccctatgcttacgcgtagacatacatagtgaacggctcagccttaatgtcattgctttctacaggatgggctaaggtacatggggtgggcgacgatttagatctagatgaacgacatcctcacggaaaggctagtaactatgtccaagcgtataatgaggcttttaacgaaagatgacgggctgatggtgatgagggat

SEQ ID NO: 87513 - DNA, 231 bp, Glycine max
  Clone ID: PAT_MRT3847_50032C.1
gctttcttgttttttttagttgaatacaaggacacgagggccgggtacgattggtattttcaaaatgccgatgggcccaaatatattcaccaccgacttagacctctgccgcgatatcaccgctgacatattccaatagactttggccaaaatgaatgagaaaaacagatacgttagccggaaaacatgtgacgtccagtgacagccgtggatggacgaggacgggaagaa

SEQ ID NO: 87514 - DNA, 419 bp, Glycine max
  Clone ID: PAT_MRT3847_50033C.1
tctaagcctcctcagtaccttatctgcacctataactcgcactttgttgatatgtaacaaatagatcgaaatcgcgatcgattgctgtgatcgatatgctggcgaagaccaggaaggattcggccgctgcgctaacccttgggggcggactacgccttcggtcccttctatgatgacgtgatgatgaaacacaggcttgtctcgcgcacctccacctccagaggggagccttccttgcttaagcttggaatgaaggtgacctctcctacgattcgaagtcgtggattacaagacacatgagctactgcgactgccataagctgactagagtcttcatacccgtgctgaccgccttaccatttgcaggtttgaactgcagagccatagggtgtgcaatcgtgctggacaacgggaacttg

SEQ ID NO: 87515 - DNA, 529 bp, Glycine max
  Clone ID: PAT_MRT3847_50034C.1
gcgatttttgataaacctttatcacaggttgccgcaccttaaaaccggcaacaaaaacaatcgactccttgatttcaagaattgctcaatttctgcctacttctttgtgtacgatgtaattatgggaatgaaaatcactctctgtgctggtcacagacttcttgaatcatgttatcttgcactcttagcttatttgctgaacactctactatttcatagaggacttcctgtcagatacaaacgaataatgggtctttctgaggtctctgctcaattgcaagtctcaggctgccgaaagtctggattagtgctcccactctcctatatggcataggacttcgtggatagacttttctatttctctccattctttcgctctcttcttctcactgatccagatggccgatcaaaggggaggtatttgacaaacactttggccgacgagcaaatgtttgctttggtaatttgctctggagacaacaagctcattgaaacacaattttacttgaaaaattggacatttgttgtt

SEQ ID NO: 87516 - DNA, 490 bp, Glycine max
  Clone ID: PAT_MRT3847_50035C.1
caccgaacacttgaggagtgttggtggtgtggcatcactaacattaatatggagaaggaaaagagacggagacggagcaatgttagtcaaaattgatagaaaggctaatgttgatgcattttaaaaaatttgaggacctaattgaagtcttttaaaatatggggacccaattgaacactaataaaacttgaggatcaaattgagcgataggccttttcaggttcaacgactgtgatcattgccgcatccagcaattcccttatgcctttgtcgctacttaactatttagaatctcacatgtcacaactcactagcttcatctctgcaatttatgacttaattttagtttatttattatttacgacatcaaagtcgttaattactttttattttattttatgactttgaagttgtaatgctttttttttcatgctattttattttcttttgttttcaagttttttagaaattgtaaataatttcatttatt

SEQ ID NO: 87517 - DNA, 669 bp, Glycine max
  Clone ID: PAT_MRT3847_50036C.1
tttgggagtaaatgtgaaagatttggaggcatagaagtttattaaattcaatcgatatttttcccatcgactttttctgtgctacttttgcagcgagagggtcagagtcacagatgaataagatgatattcagcaattccaatctcactacccagttacacattcacccctttaattaaagaaaaatccatgcttcctttcatttcatacacatgcgaactctttagtttactaaactaactagatcattctatttcctcatgaacaaaactagtagttcgttgtcaattttagcatctgaagtaatctggcttctcacttctcacaaaagaaaaaatatcttggttcctctcactctttgggaaatctagaattactcacaaaagctagatacccaactcttgcccgttaactactgcttgattacaactccttcaaaaatgccatcaggcctgaagttaggtgcgaagagtcttggatcaacaggtcccggaagactgaatgaaagtgtgaatggtccaggagagcataactgcctaattttcatctgaaaaacacgtgattgtttcgttatagtacttccaccagttaacacccctctgatctgaaccctcccatcagattcaatatcacaactgaactgacctgtgaaatctttcttgacccctg

SEQ ID NO: 87518 - DNA, 322 bp, Glycine max
  Clone ID: PAT_MRT3847_50037C.1
ctggacagtatgccactattggatggtcgtgaactagcccatcctaggctcctccagaaccacactaacatgattctgatgaaatgccacgctatggggcatgtgagcctccagctgggtatgacagtcgttatttaagacccacaactgatgaaacctgcaagggcagggctagtcatctgataaggaggcatttgatgctcccaggcaaccaatatttggtcctgcttccacagttgccatggtgcaacaacagcgccctcctgtgccggacatgtatgcacaagtacatggttaacactttgctaatcttatgccatat

SEQ ID NO: 87519 - DNA, 764 bp, Glycine max
  unsure (1)..(764): unsure at all n locations
  Clone ID: PAT_MRT3847_50038C.1
ggctcgagctaaaattatagggctaaggctatcaagttcaaaggcaatggaatttctcaggtgccctgtttctgcatttttattcccagcgttttgctttattattttctttatcttctttccttggaaagaacaaaactatgctacacacttccctcctcctttggtcctttccactattatcaaagacttaaacaaccacacaaatattataacctctccctctccctctccctctccctctccttcactacaaccaccacctctcctcccacttgagcttctttccaattttactcctgcaaatgaaagctacaataacactactgttttaagtagcactattatgaaatatccaagtttggagaaaatagaagaaggtttagcacgagcacgggcctcaattcaggaatctatccgatcaaggaactatacttcagccaacanantaaattttgtccccaaaggatccatttacctgaatccacncgcttttcatcaatttaaacaggantcattaaganatgtttgaanaaattcaaggtgttgggttgttatgaaganggaaaagcnaccattantgcatgatgggccagcaaatgatatatactccnttganggtcaattccttgatgaaatanacnacgaagctnagttgggaaccacttcanggctgaacatcctgatcaagcacaattttcttccttcccttcagcataccaatgtttgttcactatgtttacnagcctattccaaaagcattc

SEQ ID NO: 87520 - DNA, 732 bp, Glycine max
  unsure (1)..(732): unsure at all n locations
  Clone ID: PAT_MRT3847_50039C.1
atttcggatcgaggaaactgtatgggctaccactctcaaccaaagaaacaaaccggatatcctctaattgaaggaagagaattagaggttgatgcctcaatgccagttgaaaagattaaatctgcttctaataagcgttacatagtggtgcgtaggaagctgaggcatggggaggtttaccagcttgcaccattcatgttgcaatctgatatgccttttaggacaactaacaacagaaagttgaagactaggagtgtgaagattgtggtgactgcagaagaattggaatcgctgtttagcggatcaaagaggttccaaatccgacgtagaattgcaggtgtcaggagaagttttggtttgagagggtgccaaaaatggttaccttctttgcccactattcaagaggtgcataactattaaatggtgggaaggatgctatttaagcattcctatcatcagtcgtgcaatgaattttatttgtagtttttgtggattttcagaaagatgctaggttgtatttgctcagaaaataaaggatgtttacctgctcaattttttaattatagcagcagggagaagaaaagaaaaaagaaaaagtttctccatgtacatccttttttgctttctactggtttaagagttttcattcatactgtaggagtagtgaatgctgactgttcatgttcttggatgattggatgaacaatgagaatatgttnatttgttcattca

SEQ ID NO: 87521 - DNA, 437 bp, Glycine max
  Clone ID: PAT_MRT3847_5003C.1
ctcctttttttttttttttttttttttttttttttttttttttttttttttttttttgaggggggtaaattttttaaaaattctaagggcatcctctagggtaggtctcctaaaaaaaggggggattcctattcaaccccggagctggcctagcaattttccattatactcttgcttttggagtcctccctaaaaaatttgccagggggggagccccacccaaatggccaatttcggtttttcacgtttatagaaaaacctccccctccccgcgaggtctttcaccccccccactgggttggcccactaaccctggggggctaacaatgtcagaaaacccggaaaccacgaattcttcttgggcccccaaaccccttttgactgctcgctaggaaacccgtgactggaaaagaaagtgtcccctttacctttgtaca

SEQ ID NO: 87522 - DNA, 291 bp, Glycine max
  Clone ID: PAT_MRT3847_50040C.1
gaaaagacgacagaaaggggcacatgtgactttcatgatcgatataactcgaaacggtgtggtgaaaatgaaggtgcttgtaaactaccatgctacaattttggtagcatggcaatctcatgcgtacaatatgttatctattcaaatcaacactacctatcttatccttacttcgcaagtgaaatgctcaactaactatcttactgtcttaacacacaacatttttaacttttagaccattcctcactacaacaagcaagctacaatggaatacatccactttttacaata

SEQ ID NO: 87523 - DNA, 536 bp, Glycine max
  unsure (1)..(536): unsure at all n locations
  Clone ID: PAT_MRT3847_50041C.1
ggctcgagttttttttttaaaataacaaactgaataagaccagttaatgaagctaacagactaatggctggctacacatagttataacataataagaaccgccataaccaatcccagtaggaaaacataattcagagaccaacaatttcaaggaacatacatgtaatgtaactgaacaaatgagaacacaaccaacaaacattgtgaaaatggcaagaatgcattaccattcttacaaaataaaagatcattgaaagctggtactggagatatcatcaatgtttgcccaccttctgaaggcacatggcatcaaattcctaccagccaaaaatccaaacttgttcctcaacatagacaatctgttgttgttgttgttgttgctgctgctgctattactgcttgaaagagcatcatcaaccaaggacacttgtgtcgtgtcgatcggaggaaacgctctgctactttcctgaggcccaacatcactaccacttncattccaagctcaattcagtactgtaatcatactaagcaccaga

SEQ ID NO: 87524 - DNA, 595 bp, Glycine max
  Clone ID: PAT_MRT3847_50042C.1
tttggattaggatacaggaatacatatttgtaggattatactgttacaaaattcaacttgtctgacctttattagcattattttctggttaactatgatgcttctgcctgtatctgcggcatggaacttcaaacttttccaaagaaatgtcactgtgatcatttatccaaaattctaccccagacaatgttgcaccttggaacaggagcagccgaaggacaaccacaaccagcacaagaagcaatttgcagattggtttgatggaaaattggagaagaaacagaaagaaaggagggaacaaagaaagtacggatgcaggacatgtctggattcttgatgatttccaaatagaaataaatcatctagggtccaccatccaaacttctggagtatgaaagaaaaattggaaatagttaagaaaatgccatggtgggggctaaatgtcagaaaatgctttgtattaggaaattagtttcaaaactgctacatcttagaattagtttggaaaagtgcagtattgaaactgggttgacaaatcctttcttcattcattcactgtgtatttctcaaagattttcatttcagtaataaatct

SEQ ID NO: 87525 - DNA, 289 bp, Glycine max
  Clone ID: PAT_MRT3847_50043C.1
aacccacacttacaccgcctacaaatggggacaccgacctgatagctgccgctagcatgtgcagggggggacccttaatccctgccaaatgcacatcatggaaatgatacaaggccgccgctatgacgattatgatgatcacgaccacgatgacattctcaagaccatgcggggatgacttaactccgttatgaggaacgagggaatagacgaagactatgaataggaaggacgcgtgcagaagtgctgcacacaaatgagcgagctgagaagccccaaatgccgatgc

SEQ ID NO: 87526 - DNA, 347 bp, Glycine max
  Clone ID: PAT_MRT3847_50044C.1
aaaaaaaaaagggacctccctttattacaaaaaaacaaatttcggggaccccctgcaagggtttttgaccccttttttttttgacccgggggttcctcctagggggcccctttttttttatcccgtttggcgaacaaattttttactcactagggttgaccatttgcaggggtgtcccccaaaaaaagcccccggttttgtaccttatgccggaaatagaaaaacggcctttgcaaatggggccaacccctttttgggggccccctttttttggggaatggaggcaaccaaattataaattccaactttttaaaacgccggttttttcctccctttagcaaatgggg

SEQ ID NO: 87527 - DNA, 271 bp, Glycine max
  Clone ID: PAT_MRT3847_50045C.1
acggacccgaagacgacagaagacggcggaaggatgcatacttaattttattatagaaaggcccatgtcacctggccaccttgaaccattgggccccgttcaaataacaacccatcatactgttttatttactgccaatgtattatcttatggcatatcacttactacacacgacccaacacagcacagcagatatattatccagtacaaaattcgttgcgcatactgattggaacagacaggttgataatgcattccacacttcttatta

SEQ ID NO: 87528 - DNA, 390 bp, Glycine max
  Clone ID: PAT_MRT3847_50046C.1
gccaaagataacaacagatgcacattatgaaccactttagttttttgattcttaaaaaaagaaaatgtggggggcaccaatatatcctaggctggggctgagactgcggcgatcattacacctgaagattctagtgcatggtgggatatcaaagtctggaaaacgtcatgcaaaacctgatgatccgaatccatgtggagaaaaaccgttgcatgtcgaagatcctttgttccaagccacaaaacacttgaagctgctgtaaaagaactcacctgattcattggagacacactttctctcttttgaattatatattagaaaacataggatgctgtttgcactacacgctgagaagcaattactgaggttggatgctgaacacccttatac

SEQ ID NO: 87529 - DNA, 513 bp, Glycine max
  Clone ID: PAT_MRT3847_50047C.1
ggcaagtgttagttccaacacacacaccacttgtaaaaccctgcacatcccacagacaaccaaataacatttgctttatgactggctggcagtgctggtcatgtatttgaaccccttgacttatgaagcaagtggggtgtgcctcctcctattgaggaatggttctgcaagcaatgtttcttctacttcagttggaccttcttatcaagctcaaagaaatgccatgtcatccgaaagcaagtttattttacatacttggactagataaccattgtaagaactaaatttgtacttaagttaatgcaggacactatttccaacctagtcgatccagctaacttaaatccatctcatcgtacatgccaatagattggagcaactcatttggttggaagaccacttcacatagtaatttgccaataacatgtgaaaaattcttgctaagcctaatgctaagatgatgtacacggttctttcctagtactttcaactagcttactatctattgtaatt

SEQ ID NO: 87530 - DNA, 1778 bp, Glycine max
  Clone ID: PAT_MRT3847_50048C.1
gaatgcatgggcgatggaggcggagatgaggccggcaggggtggcagcgccgttgtcggtgagcttgttgtaggcgatgccggagcctgagccggcgaacacgaagatgaaggttgagatgaactcagccaaagccgccttcaacgtgtcggggtgagtcgcctcttcaggccttccgacggcgatgtttctgatcggcatcttcttcaattgacgctgacgattatgatgagatcaagtgaacaccgatcactcactgaaatcacgcgatttctcatttcatttttcacacttcaacaatggcgaaaaccttcaaatacatcatcctcggtggaggagtttccgctggttatgcggcgagggagtttgccaaacagggcgttaagccaggggagttggctatcatttcgaaagaagcggtagcaccttatgaacgtcctgctctgagcaaggcttacctttttccagagtcccctgctagacttcctgggttccatgtctgtgttggaagtggaggagaaaggttgcttcctgagtggtacacagagaaagggatagagttaattcttagcacagaaatagtaaaggtagaccttgctgcaaaatctctgatcagtgctggaggagaaacattcagttatcagattttgattgttgcaactggctcaacagttataaggctgacagatttcggtgtagaaggagctgatgcgaaaaacatcttttatttgagggaggttgacgatgctgacaaattgtacgcagcaatcaaggcaaagaagaatgggaaagctgtggttgttgggggaggatacattggtctggagcttagtgcagtgttgaaactcaacaatattgatgttaccatggtctacccggagccttggtgtatgccacgactttttacggctggtatagctgaattctatgagggatattacgcaaataagggtgtaaatatcattaaaggaactgttgctgttggattcacttctaattctgatggagaggtaaaagaagtcaaactaaaggatggcagggtcctggaagctgatattgttgttgttggtgttggaggaaggcctcaaacagtcttagtcaaagggcaggttgaagaggagaagggtggaatcaagaccgatgctttcttcaaaactaatctctccgatgtatatgctgttggtgatgttgctactttccctttgaaattatacggtgaattgagaagagttgaacatgttgatcattctcgcaaatcggctgaacaggctgtgaaggccatcaaggcagctgaggaaggaaaaacagttgaggagtatgattaccttccatacttctattcccgttcattcgatctgtcttggcaattctatggcgacaatgtcggcgacacagtgctattcggagacaacaatcctgcgtcttcaaagccaaagtttgggacatactggattaaagacgggaaagttgtcggggtctttctggaaggtggaactcctgaagaaaaccaggctattgctaaagttgctaaggtccagcctccggttgcggatgtaaatcaacttgctaaggaaggcctttcctttgctagtaaaatataatggttttatttgggaaggataaaaatgcttggtggtttgcatagattgtatctgacaggctttattttactctggtttatgcattactgtgttttttcgtttgatgtggttgcaagggatattatataatatatatatatgttttgccgtatctattcaaaaaaaaaaaaaaaaaag

SEQ ID NO: 87531 - DNA, 260 bp, Glycine max
  Clone ID: PAT_MRT3847_50049C.1
ataatgactaacgcctacgaatctcagctcacgcttctcctaatcgacgactctaccgtgcgatcatcctgcatgctgctcagacgcgcggatgactcctacgtcgtcagctacctgagtaccagtcgcgatgctgtgcggtatcagcaccgtgcagctcgaacgcaagcccgtcgagctgcagatcagggataccactagacaggagcgagtcaggactatggcatgcagtaactacagcggcactcatggaattatta

SEQ ID NO: 87532 - DNA, 258 bp, Glycine max
  Clone ID: PAT_MRT3847_5004C.1
ttttgatgggaatagcccaccaatttggtttgctcataaatgtaacaaagataaagagtttgtatacataaattccacgacaacattgatatttcttggttaccacttctcagatgaatgaaatggagacatggttttcataatttgattaactgaattaattacaatattattaacaaaaaaaaaaaaaaagggcgcccgccgattactggcctcgccgcccggggattaattccgggccgggaacttgcaggggta

SEQ ID NO: 87533 - DNA, 1224 bp, Glycine max
  Clone ID: PAT_MRT3847_50050C.1
cccactcgtccgcccacgcgtccgatttcagtgagtgatcggtgttcgcttgatctcatcataatcgtcagcgtcaattgaagaagatgccgatcagaaacatcgccgtcggaaggcctgaagaggcgactcaccccgacacgttgaaggcggctttggctgagttcatctcaaccttcatcttcgtgttcgccggctcaggctccggcatcgcctacaacaagctcaccgacaacggcgccgccacccctgccggcctcatctccgcctccatcgcccatgcattcgccctcttcgtcgccgtctccgtcggcgccaacatctccggcggccacgtcaaccccgccgtcaccttcggtgccttcgtcggcggcaacatcaccttcctccgcggcatcgtctacgtcatcgcccagctcctcggctccatcgtcgcctccctcctcctggccttcgtcaccgcctccactgttccagcattcggactctccgctggagttggagttggcaacgccttggtgttggagatcgtgatgaccttcggtctggtgtacacggtctacgcaactgccattgaccccaagaagggtaatttgggaattattgctcccatcgccattggtttcattgtcggcgctaacattttgttgggtggggccttctctggagcggccatgaaccccgctgtgacatttgggcctgctgtcgtgagctggacctggaccaaccactggatctactgggccgggcctctcatcggtggtggaatcgctggccttgtttacgaggttgtctttatcagccacacccacgagcagcttcccaccgctgactactagaggggggaaaatgaaaataaaaaaaaaaattgtgtattattgaatttctctggaatcttcttctgtgtatggttttccttccttgtgttttcttcctaattcactttcgagggttgtacttgttcctttcgtcttaaatcgttggatggttgatgatcatgaagttctctttaaagttaaattattatcatcaaccatccaaggatttaagacgaaaggaacaagtacaaccctcgaaagtgaattaggaagaaaacacaaggaaggttgatgatcatgaagttctctttaaagttaaattattatcattttgtgcatgctctctctctctcacttggtccacaacaattgaattgaatgtagtatcattattcgggtctaaaaa

SEQ ID NO: 87534 - DNA, 758 bp, Glycine max
  Clone ID: PAT_MRT3847_50051C.1
gtggtttcagtgagtgatcggtgttcacttgatccttcataagtcgtcatcatcatcatcatcatcaccgttgattgaagaagatgccgatcagaaacatcgccatcggaaggcctgaagaggctactcaccccgacacgttgaaggcggggttggctgagttcatctccaccttgatcttcgtgttcgccggttcaggttccggcatcgcctacaacaagctcaccgacaacggcgccgccactcccgccggcctcatctccgcttccatcgcccatgctttcgccctgggcggcaacatcaccttactccgcggcatcgtctacgtcatcgcccagctcctcggctccatcgtggcctccctcctcctcgccttcgtcactgcctcccctgttccagcattcgggctttccgctggagtcggagttggcaacgctttggtgttggagatcgtgatgaccttcggtttggtgtacacagtctacgccactgccgttgaccccaagaagggcaatttgggaattattgctcccatcgccattggtttcattgttggcgctaacattttgttgggtggggccttctccggagcagccatgaaccctgctgtgacatttgggcctgctgtcgtgagctggacctggaccaaccactggatctactgggccggccctctcatcggaggtggaattgctgggcttattacgaggttgtcttcatcagccacacccacgagcagcttcccagcactgactact

SEQ ID NO: 87535 - DNA, 282 bp, Glycine max
  unsure (1)..(282): unsure at all n locations
  Clone ID: PAT_MRT3847_50052C.1
nccacgcgtacggtgacgcttatgttcatttttttatattagctaatgtgacatcgaatgcgggggcgctttacgaaggacgtatgcccccattattactgcgctatatctaattatgttcacaacagcctcattgactcactatgtgcaatagatatgctatcaaaatctaggtgtagggatgcacagattactactttgataaggttgtcatcattagtttaaatcttcttctgcttaatcatgaattaacacttgatgtagttgttttaaatacattaa

SEQ ID NO: 87536 - DNA, 348 bp, Glycine max
  Clone ID: PAT_MRT3847_50053C.1
agggaacagcgaagcagagagtgatttcagtgagtgatcggtgttcacttgatctcatcagaatcgtcagcgtcaattgaacaagatgccgatcagagatatcgtcgtcggaaggcctgaagaggcgactcatcccgacacgttgaatgcggctttggctgatttcatcgtcaaccttcagcttcgtgttcgccggctcaagctccggcatcgcctacattaagctcaccgatcacggcgctgtcatccctgccgggctcatctctgcctcaatcgcccatgcattcgccctcttcgtcgccgtctccgtcggtgccaacatcttcggcggccacgtcatacccgccg

SEQ ID NO: 87537 - DNA, 235 bp, Glycine max
  Clone ID: PAT_MRT3847_50054C.1
gaatcactctcatgccagcgcacactggtccacaggctactgtcagatcttatgcaaaggcggaatccttggcatgagctggaattggaacgtactcgccgttcgttccgacggtcaacgcaacacaggaaataaggcatgacccacgcgttgagtatgcgctgccaattagagaattaccacacctcaaataattgtcttaacgacgtgtgaagtgtgtgttattctaaacaaa

SEQ ID NO: 87538 - DNA, 235 bp, Glycine max
  Clone ID: PAT_MRT3847_50055C.1
cagtatgaattttacaatcttccttttaaaatggtagacattttaaaggggaatcatttattcttggcctgttcggatagggtaacagacaattgtgtagcgatatgttgtgttgcaattcttgttgagttagcttaaatattgccaatggcttaggttttcagattttggttgatatgattttctaagatgtgagtttaatggtatgtttggttggagaaaacacgggtcataa

SEQ ID NO: 87539 - DNA, 400 bp, Glycine max
  Clone ID: PAT_MRT3847_50056C.1
cggccggaatcccggtcgagcacgcgtccgcccacgcgttcgcccacgcgtccgaattcacattcatcaaagagagagatggtgaacgtggcgcaattgcataaacaggtgcagagtgggaatgtgaatgttgatgccaacggggaactcatgtatgtcaaggtcatgaccgatgaacagttggaaactctgaggaagcaaatagcagtttatggcaccatttgtgagcagcttattgagatgcactgaacactttcagctcaacaggatcttgcaggggttatattgggaaacatatactgtgacccattgatgacatctggtgggcacaaaataacatcaagacatatgtggacacctacacctgtgcagcttcaaattcttgaacgtatatttgatc

SEQ ID NO: 87540 - DNA, 380 bp, Glycine max
  unsure (1)..(380): unsure at all n locations
  Clone ID: PAT_MRT3847_50057C.1
nacccacgcgtccgaaaaaagttataaaataacattgtaaactgatgttgcagtgccacgactttttacggctggtatagctgaattctatgagggatattacgcaaataagggtgtaaatatcattaaaggaactgttgctgttggattcacttctaattctgatggagaggtatggttgcatgtgatcttggaaccctgtcatggtagggcattttaaagttccttaatcaaactcatcatgactttcatccatcattcaggtaaaagaagtcaaactaaaggatggcagggtcctggaagctgatattgttgttgttggtgttggaggaaggcctcaaacagtcttagtcacagggctggttgatgaggagaagggt

SEQ ID NO: 87541 - DNA, 1160 bp, Glycine max
  Clone ID: PAT_MRT3847_50058C.1
ggttttgggccggaattcccgggtcgacccacgcgtccggtggtttcagtgagtgatcggtgttcacttgatccttcataagtcgtcatcatcatcatcatcatcaccgttgattgaagaagatgccgatcagaaacatcgccatcggaaggcctgaagaggctactcaccccgacacgttgaaggcggggttggctgagttcatctccaccttgatcttcgtgttcgccggttcaggttccggcatcgcctacaacaagctcaccgacaacggcgccgccactcccgccggcctcatctccgcttccatcgcccatgctttcgccctcttcgtcgccgtctccgtcggcgccaacatctccggcggccacgtcaaccccgccgtcaccttcggcgccttcgtgggcggcaacatcaccttactccgcggcatcgtctacgtcatcgcccagctcctcggctccatcgtggcctccctcctcctcgccttcgtcactgcctcccctgttccagcattcgggctttccgctggagtcggagttgggcaacgctttggtgttggagatcgtgatgacccttcggtttggtgtacacagtctacgcaactgccattgaccccaagaagggtaatttgggaattattgctcccatcgccattggtttcattgtcggcgctaacattttgttgggtggggccttctctggagcggccatgaaccccgctgtgacatttgggcctgctgtcgtgagctggacctggaccaaccactggatctactgggccgggcctctcatcggtggtggaatcgctggccttgtttacgaggttgtctttatcagccacacccacgagcagcttcccaccactgactactagagggggggaaatgaaaataaaaaaaaaaaaattgtgtattattgaatttctctggaatcttcttctgtgtatggttttccttccttgtgttttcttcctaattcactttcgagggttgtacttgttcctttcgtcttaaatccttggatggttgatgatcatgaagttctctttaaagttaaattattatcattttgtgcatgctctctctctctcacttggtccacaacaattgaattgaatgtagtatcattattcgggtctggttggttgtaccatttcc

SEQ ID NO: 87542 - DNA, 323 bp, Glycine max
  Clone ID: PAT_MRT3847_50059C.1
atgggggggttttttttaacttttttttcttttctcctccctggaggcatgaacacaaatggaactcgctgctttattaccaaaaatcattggaaacacaacaaccggggccaacacaaaaatgccacaataaatagaaaagccatcttcccccaccatattaatccatgaacaaataaattaaagagatcaccaaaaatgggcgggccttttcacattcacttggcatttacattacaaaactttttctcctgctgggaattggccgccacttgaacacaaaaagaccaggactggccagatggccctccaaccaatagaat

SEQ ID NO: 87543 - DNA, 405 bp, Glycine max
  Clone ID: PAT_MRT3847_5005C.1
gggaaaagtaaaaaaaaaaagatttggtccggaaaagacaaattcctttgatcccccccaaacatttttggtccctcggggggttttttttttttttttttaaaggctaaaaaggccagagtttaaaacatttcacacttcgggcattctgtttaagcaattttaaacctttttggaacttaggggagttttttgcgacttattattatccttataaactcatttaagtttttaaagcccttcccattttttttcccccccattaccatttttttacaagcccttagggtggaactttccccttgggttttgagaacttgggacaatttctttggactgatttttccatcgcccttcaaaataaacccttggaaagcacttttggtctctcgttttttcaccctt

SEQ ID NO: 87544 - DNA, 588 bp, Glycine max
  Clone ID: PAT_MRT3847_50060C.1
ggtggtttcagtgagtgatcggtgttcacttgatccttcataagtcgtcatcatcatcatcatcatcaccgttgattgaagaagatgccgatcagaaacatcgccatcggaaggcctgaagaggctactcaccccgacacgttgaaggcggggttggctgagttcatctccaccttgatcttcgtgttcgccggttcaggttccggcatcgcctacaacaagctcaccgacaacggcgccgccactcccgccggcctcatctccgcttccatcgcccatgctttcgccctcttcgtcgccgtctccgtcggcgccaacatctccggcggccacgtcaaccccgccgtcaccttcggcgccttcgtgggcggctacatcaccttactccgcggcatcgtctacgtcatcggccatctcctcggctccatcgtggcctacctcctccttgccttcttcactgtcgtccctgttccagcattcagtctatccgctggagtcagagtttgcaactctttggtgttggatatcttgatgaccttcagtttagggtacacattctattctactgtcggtcgatctcatataggc

SEQ ID NO: 87545 - DNA, 490 bp, Glycine max
  Clone ID: PAT_MRT3847_50061C.1
ctctcgcgttcgcccacgcgtccgcccacgcgtgcggtgatcggcgttcgcttgatctcattataatcggcagcgtcaattgaagaagatgccgatcagaaacatcgccgtctgaaggcctgaagaggcgactcaccccgacacgctgaaggcggctttggctgagttcatcgtaaccttcatcttcgtgttcgtcgtctcaggctccggcatcgactacaacaagctcaccgacaacggcgcctacacccctgccggcctcatctccgcctccatcgcccatgcattcgccctcttcgtcgccgtctccgacggcgccaacatctacggaggtcacgtcaaccccgacgtcaccttcggtgccttcgacggcggcaacatcaccttcctccgcggcatcgtctacgtcatcggccagctgctcggctccatcggagcctccctcctcctggccttccgcaccgccttcactgttccagcattcggactc

SEQ ID NO: 87546 - DNA, 454 bp, Glycine max
  Clone ID: PAT_MRT3847_50062C.1
ccctacacttaacctggattcttttaaacctgccgccttttttttatttttttcttgaggaaattaaaccttttaagggaccaaattccattccaaaccttttttaattaccacctaggtatattttccagggattttcagggaacccattatttttaatggggtttaaaaatttaaaaaccagcacactttttttttattcctaatggacaaagtaaagcaggcccattatatttataatacctttacaccaccaccaccatttttccaaagctaaacaaactattttttgttctaaaaaaaatgaaactattggtctatctgttctaaaacacaggctaacccctgaaccaatctaactatttaagttgtatcatccaggtagtactaacccttactgggttttcaacaaaccgtgcatgcaaatacctcggcctttgagagcagatcaaac

SEQ ID NO: 87547 - DNA, 467 bp, Glycine max
  Clone ID: PAT_MRT3847_50063C.1
gtgatttcagtgagtgatcggtgttcgcttgatctcatcataatcgtcagcgtcaattgaagaagatgccgatcagaaacatcgccgtcggaaggcctgaagaggcgactcaccccgacacgttgaaggcgggtttggctgagttcatctcaaccttcatcttcgtgttcgccggctgaggctccggcatcgactacaacaagctcaccgacaacggcgccgacacccttgtcggactgatctccgactgcatcgcccatgcattcgacctcttcgtcgccgtctccgacggcgccaacatctacggcggccacgtgaaccccgccgtcaccttaggtgccttcgtcagcggcatcatctactatctgcagggcatcgtctacgtcatcgaacagctcctcggctacagtcgggccatgctcctcctggccttcgtgaccgacttcactgttccagcattcggactc

SEQ ID NO: 87548 - DNA, 282 bp, Glycine max
  Clone ID: PAT_MRT3847_50064C.1
cagagttccagttaacctctctcacctacctattactttgattattcactactcatcaccggtacagtgataatctcaaccggccccattcacttccttatatcactctactattttcactacttgttctcatcattaaaaatacattcaagttctcattcccatatcatattaactctaaaaaactctcattcatataacattatcacattacatactaatgcaacctactatcaattcaacaacccaaattatattgcaacgatatttactgatacattt

SEQ ID NO: 87549 - DNA, 277 bp, Glycine max
  Clone ID: PAT_MRT3847_50065C.1
ctgtgaccttattttactaacttctcatatagtacacacctgggtggggaagaacatgggttcgatttctttctagaaactaccacttttaatgtggggtggtaacaaacacacgatgctgatcacggtggtttgaattaatttacactattacgagggacttcttgtttcttaaaagccagttcctaagctttaggagggttgaacaaaacacctcctttttccttaaataactttgaaccttgcgccccaaatttggttaactacaaaaaaaaca

SEQ ID NO: 87550 - DNA, 167 bp, Glycine max
  Clone ID: PAT_MRT3847_50066C.1
aatggaaacataacgaataccagcctttcagcgaccgaggttaaggggaatcctcaatactacattggaccagggctagaaaccagaaaattgctttttttccctgacacaaacatcctccagggttctcccaaatacgcgccgacatgcaaaatgccatggcctac

SEQ ID NO: 87551 - DNA, 224 bp, Glycine max
  unsure (1)..(224): unsure at all n locations
  Clone ID: PAT_MRT3847_50067C.1
gtttcacatcatgttaattgcttttgagagggtgaactatgatagcttccaaaatgtatttntatatttatttcgtggagaacaaaggccagttaccatatgatgatgatatgaaccgtgagttttgcaacatgtcattggctatctcgccaaatgccaatattgaaaagatgttagctgacttcactcatttatttaataaagaggtttacattggacatgac

SEQ ID NO: 87552 - DNA, 217 bp, Glycine max
  Clone ID: PAT_MRT3847_50068C.1
ccttcgcgttcggaaaatgctggatcctctgcatgatctggaacttgtgtcctcttgcgcttgtacggttgtataacccactaaaggaaatcacgcatgaccctgttgttgagcatgctctgcctattcgacaatttccacacctctttcaattgtcgcactgatgtgagaagtgtgtgtgcttttaaaaacaaatcacgttacatactatgaaact

SEQ ID NO: 87553 - DNA, 375 bp, Glycine max
  Clone ID: PAT_MRT3847_50069C.1
ggggcccaacaaggcccattttttattttccaaaaaaaggggagcattaaacatggttaagcccttttattatatgctggacacattttatttgggacaacccccccttaaaaacgtttcctgaaacctgaaaacattgggcaaaaaaaaacatttccaaacatatttgattaaagggtggcaatttcaaaacattttttaaaaaaaaaaaggtttttattcagttttttaaaaacaaaaaaaaaatttttttttttttgaaaaaaaagggggaaaacaaaaatttttttgggtcccaccctcccgggaaaaccaaaaaaaaagagccttaagataacctcccaaaaaataacagtttttggagttggtctgaaa

SEQ ID NO: 87554 - DNA, 325 bp, Glycine max
  Clone ID: PAT_MRT3847_5006C.1
aatgagcgaccccaattctggttctgatgttatgaccttgaaatgcacggctgatcttgtatatgggggctatgtccttaatgggaacaaaatttggtgaactaatgagccaattgctcaatctttagttgtttatgctaaaccagacataactgctgggtcaaaaggcattactgtatccatcattgataagggattgcctggatccaatactgcccaaaatttggatcaacttgggatgccaggaagtgatacatgtgagcttgtctttgagaattgctttgtcccaaacgaaaatattcttggcatagaatggaaaggagta

SEQ ID NO: 87555 - DNA, 359 bp, Glycine max
  Clone ID: PAT_MRT3847_50070C.1
gtcattcatgctattcaccctcttcgtaatacagactgataaatctttgcataaagtcgcgcagaatagaggtatatgaagtttgatacaaactttgaatgatgattcagaaaagctgcaatgagatgaaccgccgctagattgcattggggagtgattttgggaacgggtttgactaggatttccatcgaggatggggagagaccaggggtgagggtctttccattagacggatgagtgctcaggacctagcgatgtcagttggcacagactccttatggggtaaccaattccatggcgaaaacgtttttgcgcaaatggacctgccccttggacaatatgctggcaacttttctggc

SEQ ID NO: 87556 - DNA, 438 bp, Glycine max
  Clone ID: PAT_MRT3847_50071C.1
cttaaacttttttgataataacaaaaaatatacaaaggataaatgaatgacaattatggagaacacatggctaaagggcaaacacaatgatacaacttacagatgaactggaaagacaacaaagcaatgaaacgagagatccctaaaaacacagaaaaaacagtcaccctagtataaaaagagccttaacaaaatgtaaagcagagcatggtctctacaataaaagtacatagcagcacaaaatgccctatatataaaaacctacaaacccaagaacatacaccaaggcataggggcttaagagggcatataaagcctactggctaacgaaaacaaaaggaggaaaatttgcgataatatataaaaccaaccaataaaaaatggcagaacacatgggaaagaacaacccttttcaaaggaagcacataaccaatactg

SEQ ID NO: 87557 - DNA, 487 bp, Glycine max
  Clone ID: PAT_MRT3847_50072C.1
cgtcggtcctctgaaaaccgttgttatttttaaaatgatggcatttttgtaaataaaataaatattttaaagacggtttttatgaaaaccaccttcgtgaaactataatccacagacggttttttcacaaaaccactgttgatatcaagtattcaaagacgatggtttcgaaaaccgtctttgaataaagacccctttttatttttacctcttctagtttggtttccgccgcgtgaaagaaaatgtggctgatgagattctaggtcattctcctctacccctccctccaatccttccaccccgtcgaagccatccactgctccatcgtgcctcttcttctgctccatcgtgttgcttcttcattgtgagatcgagaagcctcaaacctgacaaaaccgacaatggcggccatgactccacgtgcggaaagggtaggtggggctagtggatgaaaggaccactcgcgatagcatcctctgtttcttct

SEQ ID NO: 87558 - DNA, 228 bp, Glycine max
  Clone ID: PAT_MRT3847_50073C.1
gtgggttaaagatcaatccagcccaacagtcgattttctacattcaaaggggatcactaccaccatcatagcgtattatcatgagaatcccacggtggatttgcattatttttaactctggttttatgttgtacgagtaaaggccggtaagtcatgctcatggtggatttttgtgcaactgggaccagcggaatacgatgatgtggtggtggcgagaatgaagtatgg

SEQ ID NO: 87559 - DNA, 278 bp, Glycine max
  Clone ID: PAT_MRT3847_50074C.1
agcaacttcacctgctccaacttcgagacatcaaatgatcatagtatttgaatgccatgtctgattgtctggctcattaagcatgcagacaaggataagacatgtgatagttttcctatgagtaactgtttctgccaattgattgtcaacattaccagatctgctatgcactcacagttgaactcagcaatgatgttgcacggatctctgaaacgtaattatgtatacatggtcacccacaaatggtgttcagacaagaattgagacagatccagcag

SEQ ID NO: 87560 - DNA, 1076 bp, Glycine max
  Clone ID: PAT_MRT3847_50075C.1
cagaaagggaaaaagaggccattcgcaggtttggtctatgatcatcacagacctctactttctctgtaccgttagcgaacgcatagtttcggcgctgcgatttcgaaatccgatttcgatcgcattcgattttcgtggattcatagctgattggatgtgagcatttcaggtttcttcagaatcattctatttgagcattgcaatgaagttgtagaagataatccatacacaacagatactcagaattcaacaatgaagcgttatgtttatattgatgatgatgaatcatctcacgatatttactgtgataatcgtatatcaaacagaaaatatactgtattaaactttcttccaaaaaatttatgggacgaggtcagccgggtcatgaatcagtactttttgctgatagcttgcctgcagttatggcctctcattactccagtaaatcctgtcagtacatggggtcctcttatctttatttttgctgtctctgcatcaaaagaggcgtgggatgattacaatagatatctttcagacaagaaagcaaatgagaaggaagtctgggttgtcaagaagggcatcaagaaacatatccaagcccaggatgttcatgtaggtaacatagtatggctacgtgaaaatgatgaagtgccttgtgaccttgttttgattggcacctctgatcctcaaggagtttgctatatagagacagctgcgctggatggtgaaactgatctaaagacacgggtcataccttctgcttgcatgggaatcgatgttgatctattgcacaaaattaagggtgtaattgagtgtccctatccagataaagacatcaggagatttgatgcaaacatgcggctggttcccccatttattgataatgatatatgccctttaaccattaaaaacaccattcttcagtcatgttacttgagaaacactgagtgggcatgtggagtggctgtgtatacaggcaatgaaaccaaaatgggcatgtgtagaggtataccagaaccaaagctcactgctatggatgctatgattgacaagttgactggtgctatatttatatt

SEQ ID NO: 87561 - DNA, 872 bp, Glycine max
  unsure (1)..(872): unsure at all n locations
  Clone ID: PAT_MRT3847_50076C.1
aatctgtacttcatgaatgcttacttacctttttacaaataatatgtgatcacgatctttttgtggaaatgcctggaagggacccttcagataggaactacctttcttctgtactaatacaagaactctttgtaacttgggatcatgaagatttgtctctaagagcaaaggcagcaagaattttggtagtgctcttgtgcaaacatgagtttgatgtgagataccagaagcctgaagataaattgtatattgctcagctatatttcccacttgttggacagatattagatgaaatgcctgttttctacaaccttaattctgttgaaaagcgggaagtttcaatagtaattttgcaaatagttcgaaaccttgatgatgcatcacttgtactcggaattcggctcgaggcaaagcattgctcggactagattgtttttcaagctcatggaggaatgcttgcttttatttgagcacaaaaaacatgctgatggcatgttacttggctccagctctcgcaacccagtaggggaggcacctgcttccccaaagtactctgacagactttctcctgcaatcaacaattatctgtctgaggcctcaaggcaggaagtcaggcctcaaggaacaccagataatggttatttatggcagagagtaaattcccagttaagctcccctagccagccatattccttgagagaggctctagctcaagcacagtcttccaggattggagcttctgctcaagcacttcgagaatctttacatccacttttgaggcagaaattggaactttgggaggaaaatttgagtgcctntgtcagtcttcaggttttggaggtgactgaaaaattctccatgatggcagcatc

SEQ ID NO: 87562 - DNA, 292 bp, Glycine max
  unsure (1)..(292): unsure at all n locations
  Clone ID: PAT_MRT3847_50077C.1
nnngagttttttttttgttttttactttttcagtttttcaaattcggttttttttttcctacaattattatcaacaaggtcatggtgggttataaagtggaagaccattttgcccaagacaaagacaccctaatcagaaatcttctatgggaaaccatatttggggcccgtgttgtgggagaaatcccccccttactgaccaagctgttcgaaaagcggggggggttcaaaaaaaaagggggcaacacgtgaccccccctgactaaccagagggggcgtgccaacagctccc

SEQ ID NO: 87563 - DNA, 228 bp, Glycine max
  Clone ID: PAT_MRT3847_50078C.1
attaaaaaactagacaccgtccagtaatttcaactcatattaagccatgcgaccaatcaaaacagcaaggacgtttaggcgcgggccagaaactatctctgaaaatctctatctttgcatcagccctagaccaagaatctcttgagaatacgcgtgacgatggtacccataacggtttaaatatagaaccctaacgctctggaagactacaagggcacttcatatatt

SEQ ID NO: 87564 - DNA, 301 bp, Glycine max
  Clone ID: PAT_MRT3847_50079C.1
ggggctggcccagggaaaacacccacccctttataccccaaccgggcttttgggaaagagtaaaaaaggggggaagggttcccaccctccaccccaaaaggccccccgcggggggggaaaaaacccagggggggccctttctggaaacagggggaggccccccttttttggttaacacaacaaagaacccgggttcacccccggggtgggctcccccccggcaaaaaaagtcaaaaggggaaaaaaaagagggcgagcctcccctctggggcatacaaccctttggggcggggaccgtgaa

SEQ ID NO: 87565 - DNA, 226 bp, Glycine max
  unsure (1)..(226): unsure at all n locations
  Clone ID: PAT_MRT3847_5007C.1
ctcagacgttcgactgctgcgtgacctacagcaagctgaaccttcgtggactgttgtacgtgtatgttgtgctaagatgggagcaggcgccgatcatatgtatgttgtgattaagtcgttagcgggacgctacacaagccagaatgctctgctcatgtantatactctggggtgcaagttagaccctgatctggtgaagggtgggatttacttagattaccacagg

SEQ ID NO: 87566 - DNA, 450 bp, Glycine max
  Clone ID: PAT_MRT3847_50080C.1
ccctaatcttaatctcaaacaccaccatgcaatgcccccttcgctcgctcaaaaccatacatagatagcctttttgattcagaaagctacgatgtccgttgaagccagacgacttgccgttttgtgcgcccacctcaacccgacccgcttactaccggaccctccctctagtccacgggtttctcttacgggttcggcctgtgcttctgattctgatacccaaaaccacactttgcaaaacgattgcgttttctgcaagattatccgtgaccaatcaccagctgtcaagctttatgaagatgacatgtgcctctgcatattggatacaagtccactgagtcatgggcactctctcattatcccaaaatctcatttcccttcactggatgccactcctccatcagtggtagctgcaatgtgttcaaaagtgcccttcattagcaatgcaat

SEQ ID NO: 87567 - DNA, 439 bp, Glycine max
  Clone ID: PAT_MRT3847_50081C.1
ttggttttttcccttttatttttttttttttatgtggttttttttaaggttgttgcgtttttacccctgtgacacagagatataaagttaatttggattggaaggtcacgaccataggccaagatttttgaagtaacacaaatacaaaatgtttgtgtaggaaaaaaagacttatgcatacattgcgcaaagtggacgaaaattgagagcgctacatcttaggtacatttacattagcgggcacatgcgcacaagaatcggataacactacgttcttaaatgaggccagcgaaaatgatataacatagatatgtgtgaaaccaaaagtgtgatccaacacagctttggcataaaactctttataagaaaaatctttattgggggaagcagagcacattttatgaccaaacatcgcaagtaataggtgttgcaaaaattt

SEQ ID NO: 87568 - DNA, 568 bp, Glycine max
  unsure (1)..(568): unsure at all n locations
  Clone ID: PAT_MRT3847_50082C.1
ggggcacataaaattgctcatatttgtaaagaatgaaattttggcaccccattgagcaattacatgagctcagtatctgcttaaatgattgaaagaatggcaattctttggtgcaataaaagtttccagagccaaggtaggcccttatattcttcaatttaaatcatcttttcaagagctttagtacatctccaacaagatgcagtgatccagtgacaagaacctgaagtcttggggaaggatggtctttaacacagtcccgcagccattttattgtcaatggcaatgaaggaattactgcactgcgtgccagatagttatgagaatggcagccacttgaagcatcatcgtaaagaaattcatgagggggtaagatctccttgttatctatcttgaaatccttttcaagcaaaggggtcatttttttcccgggcgtaatcttctcccagattctttggaggttaaattgccatgatagnnntatgccatggagatcannnnnnaataactgatgcaccagnagtaaccttactatactttgacatatttgggacaaaaagtgctcttg

SEQ ID NO: 87569 - DNA, 443 bp, Glycine max
  Clone ID: PAT_MRT3847_50083C.1
gggggttttttttttttttttctcctttttaaaacaaaatatttacttttcatcaaaaaaatgcacattttttgtctcatcaaagcctctaaaagaaaaagaaaaaagccaaatctatttttattggttactctttttagacattatgttccaacattgggcaaccatccaattcctttgagtgcctcggagaatttgagaagggtgggcctccccctccctaattttatctggcctgtggagaatttcaaggcctgcatgcggcacaacttaccctccatgtcctctttttcctcttcctgaccatactcactatttttaacctcacctttcttgttccctctcttggagggggtctccttcaaaatctttttgaactctggctgatattgttcccaaagcatgaccattctcttcctcccatttgggtggggccccccccc

SEQ ID NO: 87570 - DNA, 194 bp, Glycine max
  Clone ID: PAT_MRT3847_50084C.1
actcagagcgacccgtccgtccacacgtctgcacctgacaaagacttttctcttcatgcgcgaagcctgcgacaagagcgtgacatgaacatatcgtgcgcctgcctattatgacgatctcaacacactatttgatgaatgcagataccaatgtctggttcttcaacatcactatatgcaaaagcccatacttt

SEQ ID NO: 87571 - DNA, 705 bp, Glycine max
  Clone ID: PAT_MRT3847_50085C.1
agtcattgcaaaatgaaaaggagtgagtgagtaggcctggtttggttatatatttggagagagagagagagagagagaataaaaatgctcggaggatcaggtggcgagaggaacagtagtgtataccgagagtgcttgagaaatcatgcagccagcctaggaagctacgccacggacgggtgcggcgagtacacggtggacggcgcggggggactacaatgcgccgcgtgcgggtgccaccgcaacttccaccggaaagtgaagtacctggcggcggctgaaagccctcccacggagtatgggggcagcaacagcaagaagcggttcaggtctaagttcacggaagatcaaaaggagaagatgctagggtttgcggagaagcttggttggaagcttcagaggagggatcttgatgatgagatagagaggttttgccgaagcgttggggtgagtaggcaagtcttcaaagtttggatgcataaccataagaactcttcctcctcctcttctaccgccgccaatgtctcctccctcacccagtaattcactctctcctcttgtaattgtttctcattaattatcactttcatctttttagattgactagtttacttcaatattgtaagaagtcaatgaaatcacttaattgtcaggattatgtatgctatcactatctatttataacctataaagtttctgaacctc

SEQ ID NO: 87572 - DNA, 321 bp, Glycine max
  Clone ID: PAT_MRT3847_50086C.1
cgttcctatggtaaggaaacagaccagcaagaaagataactccctctttaagccaaagatttgtacactaatgtaaggtcaatcttttacctagcaaactaataaaacgatctccattgaggacaggttaatcattttattctatccatgataagagttgactaggtgacaattctcccaaaggacacaaccccgagggcgtctgaaaaaaaaaaaaaactgccacattgacacccatttctaaacaaagatgatccatcacgtcatatactaaacattttctagcataagccgatgttgcgacttacatcaaacgcttaa

SEQ ID NO: 87573 - DNA, 361 bp, Glycine max
  Clone ID: PAT_MRT3847_50087C.1
gccggtttcgagcgtctcgaagacaagcgccttgtgcaacaacgatacaccctcacctctgagaagaccgacgacatgagcaaactggctctcggagcgaaactcgaccgtgctctatctcgccgtatgtctggccaggacgctaccttccgccctaagattatcaatgagaagaaagtggaagcataggcgacaggtttcgtcacagagtgcgacatgcagacattgttgttacagcaaaagcagatcacgacattttctcttttagaagtaagcaggatatccatacattatcgacagccgcagttacggcgaatataccacgtacgctgctgtcatgccgatagcgctacagcttttg

SEQ ID NO: 87574 - DNA, 800 bp, Glycine max
  Clone ID: PAT_MRT3847_50088C.1
taaatttgtattttacacactatatagaaaaaaatagttatttttttataatattttaatgtttcgcaggattaacaggcgaaagcactacctctgaagttccaaccaagtaactctggtaaaattttaaccatagttggttcattcttcgcacttaagctacaacaaacaaaaaagaagtaagttcaaaactagagaacgtgagcggcactgttctttctttgtttattgttcttgttcttcattcacaccccattctctctctcaaacgttcaaaccctgaaacctttctatctttttcttttgattattatttggtgagactgagacgtgtttgttttttctcggagcttttgattactttaacattttggtttgctggtaatattccttgttcgtcttcagttgttacacttttggcccctttttaggtttcggtgattttccggagacccaggttggaattcgcaagatctaaggttttctggatttgagtgttgcgaaagtagagattttgttgggttttggggatgaagattgaggtggggttgggaggggtgtggaatgaggatgagaaagcgacagtggtggaggttctgggtcgtggagcgttcgattacttggtggcgaattcggtttcgaacgagaatctgttaatggcgttcgggtgtggcgagaatatgcagaacaagctctcggatctcgtggagcgacccaactcgtcgaacttcaggtggaactacgcgatcttctggcaaatttcgcagtccaagtatggggattgggttttggggtgggag

SEQ ID NO: 87575 - DNA, 340 bp, Glycine max
  unsure (1)..(340): unsure at all n locations
  Clone ID: PAT_MRT3847_50089C.1
tttgggcttccanccttgtgttttcccactttgggctgggaccccaatcctactttntatttttctttcttcatatccttaaacacggtgcactgattatctctgtgtatgcatcttattatatgataatgattgaattgattaatgctttcaaatatcagtggtgtaggcctttgaccgttacccttgnggggcagcaacttgtgttattactcttcgtttgtntttctcacgatcttcttttgcttccggtgtattggttcttgtctcccatctnatgttctaacctttnttctcttctgattaggaccttctctcctctcctntggtttttactttt

SEQ ID NO: 87576 - DNA, 500 bp, Glycine max
  Clone ID: PAT_MRT3847_5008C.1
tgccaggtgcctgtcaccaacaaccaaaggcaacgaatagcacacaacaaccaactgcaacgtagacaacacaacaaccaacgccaacgcatccaacacaacaaccaaaggcaacgaatacaacacaacaaccaactacaacgcaaacaacacaacaaccaaccccaacgcatccaacacaacaaccaacggcaacgccatccaacacaacaaccaactccaacgcagacgacaacacaacaaccaacggcaacgcatccaacacaacaaccaacgccaacgcattcaaccaaacaaacaacgccaacgcagtcaacacaacaaccaaatacaacgcatacaacaaaacaaacaacgccaacgacaacgcacccaacacaacaaccaaacgcaacgcaaacaacaacaaaaaccgtcccaccggcggttacagcaacggcacagagccccaaggttttgctgcccccatcacaacactcagcgcaggtgctgaaacgggt

SEQ ID NO: 87577 - DNA, 226 bp, Glycine max
  Clone ID: PAT_MRT3847_50090C.1
ctccttattctttctgtgatttaagaaagcagaggagaagggggaacaaagagaagctagcaagcatggattgttgtgtgtgtacaactatgccattgatattgaggcctccgaggaatacaatatgtggggcttgttatgaggagttaggagcataatcaacatgatgagcaatgtcgaaagtgagaaagtaaaagcaatggctattccaaatccaaacagttct

SEQ ID NO: 87578 - DNA, 922 bp, Glycine max
  unsure (1)..(922): unsure at all n locations
  Clone ID: PAT_MRT3847_50091C.1
gcgcatggtttgttgtnncgattntnngtatattgngtgttnnnntgaaattaggcatggtgatgattgtttattgtcatctgatgattcatttgatgaatacatannntnntactcattnngaatgcctattgttnnntcgttatagtgtgnngtcttttttttattttttgtgtttttttaatatttggagagtgcagagctcgacgtggaggtggcggtgatgagagtgacaattttttgtgatgagattctctatgattgtatttcaagcacttttgagctactactgtctttctctcttatattgcattcctggatagtttaattcaaggcatcgtcgacggtctccgattcctggacccttttagtctgaagctctactgatttatgaattatagtttgattggatggtgtaaacatctcgtaaataccactattttggataaaaaatagttgaagaatatctcttatttgatggaatagagagaaatctaatgtatttatatgagataagtaaagatgttaaaatagacatgattgaaaatatgtgagaatagtataatgttggcttcgaaattttcaatttttctctaccaagccattcaatttcttccaaacacaattcctgccactcccaagtcttctggagaactcggttttatgaattttcctactttctttgtcttaagtttctggctgatctgggctgtatatatcttcccaactgaaataattggaagaaagtattatcaaatttgcattggttttttcgccgctgtggtaatgacgatattttattgtagttaacggatgttggattcttaatttgttttctaatattgttttggttatggttagataagtaacaaaacttgtttatgttctctccgaaaaaaaaaaaaaaaaaaaaaaaaaaaaa

SEQ ID NO: 87579 - DNA, 529 bp, Glycine max
  Clone ID: PAT_MRT3847_50092C.1
ggctcgagaactgtagcaacgccttgaggagcttcaacatttacctgcaaactggtgaagtgctggaagagagtcataaaattgagattgatctagatgagattctaaaactagagaaaattatttgggcccatcgtctgagagccacttggctaaaacatggggatagaaatataagttttttcaccaaaaagcctcacatagacagaaactaaactccacagacaaaatcacgaatgaagaaggaatgctgatcaaagatgaggaagacatataagttgttattttagagttttttgaagacttattcatgacgtctattcctcaagatactgacttagttgcacaactggttggagggaggataataaatgatttaagaaatgtgttgaatggtgatttcacaaaggaagaggcgtttgaagctctgaaccaaatgcatcctttgaaggcccctagtctagatgggacccctgctgttttctaccataaggtttagcccctgatcggaggagatgtcacttgaact

SEQ ID NO: 87580 - DNA, 1294 bp, Glycine max
  Clone ID: PAT_MRT3847_50093C.1
ttcaaaaattgcctatgatggttggcaaaatatcgggcacaccattccaccatggcagccattgcaatgtcattttacaacattggtcaaaatccgtaaaaaaataaagttctggaggtgtttggggttgggaaaggagaggaatgatacgatgttcttataattgcagctttgttagtttcctgttctctttaagcctcaataattgatagttttatttttagtaagctcttaggaagaacttttaaaagggaagtagaagttcagattgatgtgttgtactgcatcttatttattaaggatctgaactataagcaatcaaggtgttcaattgaaattggaagagaatcactattcacctcacacagagtaaaatgtagatctgtacatgtattcatactgaggtttttttcatagctatttatgttccaccctgaagtgaaataaaattgtttttcacacattgcctaagatggttggcaacgcatcacacgccgttacgaagcttcgagttcagagggtcgacacatcatagcattgaaccaacggcggcggaaaccaccgttcgacgccgatctttttccaccgtttcttcaaagtgtaaaagaaagtcatggcaatgaaccatgccaggtctattagacacattcttaccaccaaagaggtagttggggttgcatgccaacgaactttcgccaccggtaaagcaaagaaaggatctaaagggggtgcagctgctgatgcacccaaagcatcaactcttagcaaggaagtcaagtcaagtacagttgtaggtgccaacattctcaaggaaggaactgatccaaaaatccagcctgattcagaataccctgactggttgtggcatctgcttgataaatgccctgcacttagtgaattgcgtaggaggaatattgatacactatcttatgaagatctaaaacgttttgttaagctggatacccgagcaaggatcaaggagaataactctgtcaaggcaaagaactgattcaattgtcaaatggagaaattagggggatggagggcttgaaataacagtgtggagtttttccatttcttttattatttgatggttctcagtcttgctgggattcctttgagtaattagcatacatgtatgcaaattaagcggaacaaaagccaaagaattgcatggtttaacacttgtttcttttctttcgattacttttctgtctgtttttttccctgggatacttggtagattaaatatgattgcctttgttgattgaaaaaaaaaaaaaaaaaaaaaaaa

SEQ ID NO: 87581 - DNA, 1881 bp, Glycine max
  Clone ID: PAT_MRT3847_50094C.1
gctactgagggtacagccattggaatctctgctgtatttgtcttttcagtaatgttgaacttcggcccctgctatgattggatgggtgaaattggggccccttctttctgaagaggagttccgttttattgtgctctcacctataattgagctttttggctcccgcgaccgagttgctcgtgttggacttccgtcccaggctgaccccttaggggattgatgatcagcacaagttgttgatgagcaggtttaccctcatgttgcaactgggttctctgatacatctgcttttctgagggaacttactctcaagtccatgctaattctggctccaaagctgtctcaaaggaccttttcaggatcattattaaagcatatgtcaaagttacaggttgatgaagaaccagctatacgaacaaatactaccatcttattgggaaatattgcaagccacttaaatgaagggacaagaaaaagagtgttgataaatgcatttacagtccgtgctttacgtgatacctttccccctgctagaggagcaggcattatggctttatgtgcaaccagttcctactatgacatcacagaaattgctactcggattcttcctaatgttgttgtactcacaattgatcttgatagtgatgtgcgatctaaggcatttcaagctgttgatcaatttttgcagatggcgaagcaacattatgaaaagacaaatacagcagaggctactgagggtacagccattggaatctcttcacttccaggaaatgcaggtttacttggatgggctatgagctccttgactcttaagggtaaaccttctgatcatgctccagttgcttctgtcagttctagtgcacgtactccaacatcttccaatgccagcccagctgtagatgctccttcaacagcacctgttcgtgttagctccacaccagattttgctgaacaccttgtccctacatccccaacgtcaacagatggctggggggaactagagaatggactaggtgaaaatgacaaggatgggtgggatgatctggaaccacttgaagaaataaagccaactccagctcttgtaaacattcaagcagctcaaaggaggccagtttctcaacctgtttcacagataaaacaagcctcaagtttgctatccaaaagtacgccaaagttgagcaaggatgaagatggtgatttgtggggttccatagcagctcctgctccaaaatcatcaaaacctttaagtttgaagtcaactgtaactgacgatgatgatccttgggcttccattgctgctcctgcacccactactaaggccaagcccttatcagctggtagaggaaggggtgctaaacttgctgctccaaagttaggtgctcagcggataaaccggacaacatcatccgggatgtaaacggaattgccactttccagagaacgaaaggaacaaggaaatattgaatctgtacgttgccttttaattctggtggctggtgatcatgttaaattacatttgtcctttctattagcataatttggtttgtaaattcttttaagtgccatttttatttcaagggaaatcttaagggcagcaatagttgaattattccagggcaacaaggctatggtgtaattagtttcatattgttataggagagtttttggtcgaattatttccttaaacctgttctatactcaatggttctagtactgtacacttgtttgtgtaattagtggtgcagtaattaagcatataaacgtcaagtgacgactgagagctttttaaaggcaagaacatcttataaccctgatttatttggttattgtgaatgataaataactaattgcaattggtcacattgtaacaaaaaaaaaaac

SEQ ID NO: 87582 - DNA, 394 bp, Glycine max
  Clone ID: PAT_MRT3847_50095C.1
gccacgcatccgttcatactgggtgtatgcacattcggggatcaaatcaactgccgagaggcatgggctactatatacaaggacctagttacagatgccgacagcgtgataccaaaggctcttgattccttcaagagtgtcgaaaacgtcaagggaaatggacgaccaagagccatcaagaagatcactttccttgaagatggataaaccaagtgtgtgctgcgcaagatttacagcatatatgaggctaactggggatacagctactacgcacttggtgatactgcattgccagacacagtggaaacaatcacattatactactaaacgcttgctggacccaatggatagtctgctgagaagctcactgtcacatacgaaacaagaaggagat

SEQ ID NO: 87583 - DNA, 938 bp, Glycine max
  Clone ID: PAT_MRT3847_50096C.1
ccacgcgtccgggaggaggaggaggaggaggaaattcgacaaaattgactttgacttccaagattttgatatccctcctaccaaaggtaaaaatggcaagggtgggaataatggtaaaaacaataatgacaagggtcatggtagcaataatggcaatgtgggccaccacatgggccccatgggtcagatgggcccaatggttcagagaggtccaatgaatcagatgggcccaatggaccatatgaggaatatgaacatcaatatgccggcggtgcaaggattaccggcagccacggccgcagcagcgatgaacggtggttactaccaagggatgcagatgcagatgcaacaacctaacccttacaacatgcagcagcagcaacaacaacagcaactaatggccatgatgatgaaccaacaacaacagcaacaacagcaagcaaacatgaacatgtacccaccacacatgatgtatggaaggccacacccacaccaacaccaacatccatctatgaactactttccacccccaccaatgccctcacaccccatggcggatcctatcacacacgttttcagtgatgagaacactgagagctgcagtatcatgtaaattattattattagtggtgactagtagtttgttttaattaggtttttccatttgtttgtagtcttattttattttgggggttcattaaattttgtcctagtgctagaaaaatgtgcaacattttaggactatttagggatatcatgtgatgtttgttttactttggtccggtctcacatggccctttaattttctcaaatttaaatggagtcatgcgtcctgtaaaattcaatgctctagattctgttggctttactattggccaaatatgttcttttcacacatgttggtcacaatattcaatacttaagttcaatttcaaaaa

SEQ ID NO: 87584 - DNA, 483 bp, Glycine max
  unsure (1)..(483): unsure at all n locations
  Clone ID: PAT_MRT3847_50097C.1
aacactccttaacacacattccaatagaagtcatacagtagtctgagcttacatggctaaacatgtttcagaacgtaccagaacctaccctaaccttcacgcaaattcacgcgaaccaaagagatctactgcttcatagtgattaaacgtaatgaaactataagatagcctcctaagccatacagggccctaccgggtctcttgagagctttagcgagcttcatcgaagtaacaggcatcctcctatcgcgctcaaggggggttacagcatggcaaatcacgttcaataagattatctaaaaaactcctctgaactcctcgggaatcataccaatgatactctttgagcctcttcttgtcgcttacctacgaatagcaagtaatgggaggtctcgagagtcgtcacaaggaacctctatgagccttttagngcctctctgtctcaaactttccccaacttttccaaggtttgacattgtcgga

SEQ ID NO: 87585 - DNA, 823 bp, Glycine max
  Clone ID: PAT_MRT3847_50098C.1
ctttctgatctttcagaattaccttctcaaggtcaatatccactgcgatggctgtgaagagaaagtaaagaaaatcctgcagaaaattgatggggtgtattctgtgaacatagatgcggagcgagggaaggtgatggtgtcagggcatgtagatccagctaaactgctaaaaaagctaaagaggtcagggaagcatgccgaactttggggtggccagagaggcatgatgtacaaccaaaactaccccacctaccctcagttcaagaacatgcacatagataacaccaaagggggcagcaaggacaacaagtctcagaatcacaaaggtggtgctcagaaaggaggtggtggtggtggtggtggtggtggtggtggtcaactagcacacttccaaaatgctaatggagggtcaaaagtaccccccaagaatcagaaatctgtcaacttcaacttatcagaggatgaacttgatgagagtgattttgatgaatttgatgatgactatgatgagtttgaagatgatttggaagaagaggaggaagaggaagagtatggtaatggttatggacatggtggtcatggtcatggtcatggtcatggccatgggcagcaggggcaggggcatcctatgcaacataacaagatgatggctatgatgggccaggtggggaatgggcgtgggccacatgggatgaatgggcctgctatgaacggccataaagggaatgggggtgtcaattatgggggtgtcaagaagggtgaggtcattgatctgcctatacaaataaagggcaaaggtggaaacttcaacgagggtaaaaaa

SEQ ID NO: 87586 - DNA, 2320 bp, Glycine max
  Clone ID: PAT_MRT3847_50099C.1
ttacagagcacacaattgaagttgaacttaagtattgaatattgtgaccaacatgtgtgaaaagaacatatttggccaatagtaaagccaacagaatctagagcattgaattttacagggagcatggctccatttaatttgagcaaattaaaggccatgtgaaagagtctgtcatcgccttgcactggcagcagcatgtcctactcatcgggttgtttcaagcaggaccggaccaaaataaaacaaacagcacatgatatccctaatagtcctaaaatgttgcacatttttctagcactaggacaaaatttaatgaaccccccaaataaaagaaagaagactacaaacaaatagtagaaaaacctaattaaaacaaactagtcaccactaataaataatttacatgatactgcagctctcagtgttctcatcactgaaaacgtgcgtgataggatccgccattgggtgtgaaggcattggtgggggtggaaagtagttcatagatgggtcttggtgtgggtgtggccttccatacatcatgtgtggtgggtacacgttcatgtttgcttgcatttgttgttgttgttgttgtttcatcatcatggccattagttgctgttgttgttgctgctgctgcatgttgtaagggttaggttgttgcatctgcatctgcatcccttggtagtaaccaccgttcatcgctgctgcggccgtggctgccggtaatccttgcaccgccggcatattgatgttcatattcctcatatggtccattgggcccatctgattcattggacctctctgaaccattgggcccatctgacccatggggcccatgtggtggcccacattgccattattgctaccatgacccttgtcattattgtttttaccattattcccacccttgccatttttacctttggtaggagggatatcaaaatcttggaagtcaaagtcaattttgtcgaatttacctccatctttctttcctttgttgttgtttttattcttgcttgttgttgtgtcggctgaacctccacctccgcctcccttcttgttcttttttcctaagcctaggaaccgaactaggaagccaccaccatttttgcctttggagttctttttcttgttaccattgttatgattattatctccacccttttgctttccacctttgttcttttgaccaccatctccattgccctttatttcatttttaccctcgctgaagctgaagtttccacctttgcccttcatttgtataggcagatcaatgacctcacccttcttgacacccccattccctttatggccgttcatggcaggcccattcatcattccaccaggcccatgtggcccacgcccgttccccatctgggccatcatagccatcatcttgttatgttgcataggatgcccctgctgcccatggccatgaccatgaccatgaccatactcttcctcttcatcctcttcatcaaaatcatcttcaaactcatcatagtcatcatcaaattcatcaaaatcactctcatcaagttcatcttcagataagttgaagtcgacagatttctgattcttggggggtacttttgaccctccattagcactttggaagtgtgctagttgaccaccacctttctgagcaccacccttgtgattctgagacttattgtccttgctaccccctttggtgttatctatgtgcaagttcttgaactgagggtaggtggggtagttttggttgtacatcatgcctctctggccaccccaaagttcggcatgcttccctgacctcttcagcttttttatcagtttagctggatctacatgccctgacaccatcaccttccctcgctccgcatctatgttcacagaatacaccccatcaattttctgcaggattttctttactttctgttcacagccatcgcagtggatattgaccttgagaaggcaattctgacttttcatcatgtcttgtttactcatccttgctatccgctggttcacgcacacagcttagagatgtgagttaagtagagaacaaacagcgagagactagagtgtagaggatagagaattgtttgtttttttagagagagtaaactaaagggtattgttggtacgcattggacacttcaatatttgttcctttgctcaagtatccgtactgttttaggctcactctcacacgtacaacaaagtcacatttttagagagaaagagataagagtgaagagagaaggtgattgcggaagatgcaaggtaataaacagcttggaactaggatagcttcttctctatgacacttaac

SEQ ID NO: 87587 - DNA, 126 bp, Glycine max
  Clone ID: PAT_MRT3847_5009C.1
gggttgtagctgaaaaaaggttcaacattagcaactgaatttccactacaattaacacgggaaacaaatgctattcattctacaaattttacttacccaaaaaagcaccccaaggggaaaccacat

SEQ ID NO: 87588 - DNA, 294 bp, Glycine max
  Clone ID: PAT_MRT3847_500C.1
ggaacacttcagaatattatcgatcattacctaagactaagaaccgctgatagtcatggcaggacaccaagacgcgttggtcctacaaacaccaacagtgttagcgaatcttgagggaaagtggtgtaaacaactatttacgaacggatggtaattgaataaaaatatgggaattaccaacgatgatagacttaacttaacttctcagagcttaatcaattgtatgagaaatgggcgggcggtgtacaggatacaagcttatgtacgcgcgcatacgacggggttcatgttcta

SEQ ID NO: 87589 - DNA, 549 bp, Glycine max
  Clone ID: PAT_MRT3847_50100C.1
catggaaaagttccctggacagtacaggtttgacccctaacgactatgcatgccttaggggctattactcctacattcaactagtccagaagaagaccatcaaaaaaggtgaaagacagcatgtggttgatatcactggcattgttgtagatagttacacgacgcagaagcaatcaaatggacataggacatgtagagtttcaagcttgcagactgagaagattgaaacaacaacaatgccacgtcaatgtcgggcatgagaacagcaatggtttattggccagttatgctcaccatggtgaccatagcagctgtgtgtgtctgtgtggctttgctcttcaaaagctcacctagagtttactatgtgttccagcccttcaactgggaatcattggagtatggggcaatgtaatgctgtatataaggtgttttaatttctgctgtatagagtataatggtgaggtcaccataatgatattgatgtataaatatttgtacaatatgagacgaatgggctttcaaatcttaaatagtaaataatttataaaa

SEQ ID NO: 87590 - DNA, 453 bp, Glycine max
  Clone ID: PAT_MRT3847_50101C.1
ctaaaccttagctactagctggtgcagtgtcatacctgaaggaacaactattcagtgtttgtaacttgtgctcattccaatggcgtgtctttcttttccccagtttctcttacttcataggtaccacatgacttggtcctattgtttcacttcttttaacacagtacaacttgggaaactcggtcctgggtgtaaatggggtcatgtggcaatggctaggaaaaaggcctctctagactctgctatagaagaagagcttagtgacaatgaatccttggtagaaaagaagacaactaggtcatctaaaactaagaaggagacgactaggacaaggaagaaaacaaaagatgagtctcctggagatacagatagcgcctccattgaaggaagcacagctgcctctagtgataattccaagaaaactcaaaggactcggaaaaaggatgcatctag

SEQ ID NO: 87591 - DNA, 362 bp, Glycine max
  Clone ID: PAT_MRT3847_50102C.1
ggttttccaaactaaaataatgatccatttgattaatttatatttaagcaactttctaaatcaatatttatattgaaagcaaattagcaattataatattttagatttgcagcatgtaatctaatcaaccagcattctaaaaaattttatcctttgggtgttgaaggatagcccaatagagccgttaataaatgggcccgcccgtttggataacagggtgagaaaatcaaccgacccaatgttgcatgcatcaagcagaagccagagatgatgacatcgaatacaagacagttgtgtttgagtgaacgagcctttcccttggtgccctccaacacaaggaattctgcatcatcattgactcc

SEQ ID NO: 87592 - DNA, 453 bp, Glycine max
  Clone ID: PAT_MRT3847_50103C.1
gcggccgcgccttttactttttttcagactgcacacactatccaactatgaaccgaaagcctaaacacattgagttctctctcaaattcatcaccttacagtctcgccataaattgtgatttcacagatatcacttcattgaccactgcgtggctaagttggagactgggattccgcggacgcgcctgctaatgatcaaaaatgggttcagccgtcggatactcctataacgaggaaacgctggagccgaggggatgggacccaatctcaggctgacactattgcccaccgtaacgtgtacagcgagcatctttattcatggctaagaagattgttccacatctcgaaaggggccggcttacggttcacagatagggtgcctggactgcaatggaggacctaaaaattctcagtgttactacccaggaggtaggctgcatgacatgggggcaa

SEQ ID NO: 87593 - DNA, 790 bp, Glycine max
  Clone ID: PAT_MRT3847_50104C.1
tacggctgcgagagacgacagaagggtttcatcttctgattctgattatttttttctttattttgttcagatggagaaggtgagaatggagattgatgaaaagaggaagaggcaagcgaggaggttcatcgaggctattgaagttggagtgatgaagaagctgaaggcgaaggaagaggaaatagagaaaatcggaaaactgaattgggcgttggaagagaaagtgaagcatctttgcatggagaatcaggtgtggcgcaacttagcggaagcgaacgaagccacggcaaatgctctacgctgcaatttggagcaagttttggcgcagtgtggcggaatcgcggcggaggaagaccgcggcggcgcaaccgtgtgcggcggcgcggagatggacgacgcggagtcctgctgcgggagcacagaggaggactgcgaaggaaagaaagtggggtggcgcacgttagcggggtgcgcaggggtgaaggataaggacgaggggggtgagagtagtaatggtaatgggagaatgtgcaggaattgtgggaaggaagagtcgtgcgtgctgattttgccgtgccggcatctgtgtttgtgtactgcgtgtgggtcttcactccacatttgtcctatatgtaaatccttcaagactgctagtgtccatgttaacatgtcctaatttttggataaaataggactatctaggaccctaatcaaaaaatcatctctcatctcaacacaatctccaaaagaaaaatatatcaattttttataaattggcagatgataaaaa

SEQ ID NO: 87594 - DNA, 261 bp, Glycine max
  unsure (1)..(261): unsure at all n locations
  Clone ID: PAT_MRT3847_50105C.1
tgatgcagatcttcgtcaagaccctcaccggcaagaccatcacccttgaggtggaaagctctgacaccatcgacaacgttcaaggccaagatccaggacaaggaaggaatccccccggaccagcaangtctcttttcgcngganagcagcttgtggaggcgtaccttgctgactacaacttcanaaggagngtatttcactcgtcttcgtctngtggnggcntaaggancttcgnnaaaacccnngcgacagacannncnt

SEQ ID NO: 87595 - DNA, 245 bp, Glycine max
  Clone ID: PAT_MRT3847_50106C.1
cgcaaactatatagaacacccatttgttatctttccttcaagaggacacttgcttacatcccatacacaggcttacacaaagaggcactgcaggccaagccacactagcgtacatataagtcatcacctataacaactcctgagctctgtaacaatgtattaaacgtaaaaaaagatcataatgtaactcaaagggctgagtaatcataaatgcccaacccacgctgtaggaaacaagctggata

SEQ ID NO: 87596 - DNA, 568 bp, Glycine max
  Clone ID: PAT_MRT3847_50107C.1
ggacacttttcttcttgggttgcaaagacacacaaagaaacattgatctcagtcctcactagtaacgcaactcatgctctgcgtctccgattcatgcgttaagccccttccgctgaagaagaaaaaccctttctctttatttgttcaacatcaatggcttcctcgtgccgcggctattccaaggcccaaatgtgcttcttcaagattctccgcataatttcatccaccccaccctccaaacaacaacaaccctttccaaccaaaggcgtcggcatcgatttgaatctcagattccgttccgtcacagagaccgaagaatccgaatcttctagaagcgacaacgacaacgcctccgccactgctcaaaccaacagcaacgaagggtttccagagaagagcgttgaagtttcggagaaactggacaacaacaacaacaacaacaccactaacgaagttaacaatcacgcggaaacggcgtcgtttaagggacgcgatggtaattgctttgatttgcttatcgaagcggcgagggtggtgtccgggagggaggagtctgactcggaggaac

SEQ ID NO: 87597 - DNA, 1271 bp, Glycine max
  unsure (1)..(1271): unsure at all n locations
  Clone ID: PAT_MRT3847_50108C.1
ggctcgaggttcaggttttatcatctttccctgttgtctttgcccccaccaaacaagagagaaatggaagcagcatgggccacaattctgactctgatactgatactcgctctgatatgtgcatggaaggtgctgatctggttatggttgaggccaaagagactagaaaagctgctaagagagcaaggccttcaagggaatccatacacactttttgttggagactccaaggagtttctgaagatgagaaaggaagccttatccaaacccatgaatctctctgatgacataataccacgtgtttcttcctatgaacaacatagtgtcaacaaacatggtaagaattcttttatctggttaggaccaataccaagagtgaccatcttagatccggagcaaattaaagatgtatttaacaagatctatgacttcccaaagcctaatatgaatccacttgtcaagttactagcgactggactagcaggctatgaaggagaaaagtggagtaagcacagaaggataatcaaccctgcttttaatttacatcaattggtcttacatgaccgtgctgcaagtgcagccgatgaaaatggaaatgaggaagaagagttatatgggcgatttaataattctggatctggatcaatcaataccagcttatctgcctctgcatcaagtgctagcttgacaaatgggtctgcacctgtgtatccggcagccgttacgcaacgaagtggtggtgaaacttggtttgaagtagggcaatttaagacgtataccccaacagctgatgacattggacatgtccttaaattcgagtgtactgtagttgatgcagagaccaaacttactgtagggcatgtaaacactctactaacttcccgtgtcattcctgctccctcgcctagcccgcgccgactgatacctgttgatgggatgggacatttggatgctgatgggcgtataacatcttcaggaacttttactgttctatcatacaacatattatctgatgcatatgcctcaaatgatctatacaattactgccctacgtgggctctttcctggccatatcgtaggcaaaatttgttacgagaaatagttggttaccgtgctgatattatttgtcttcaggaggttcaaagtgatcattatgaagattttttttctcctgaactagacaaacatggctattatggnttttacaaaaggaaaacaaatgaggtttacaatgggaaacattaatacaattgatgggtgtgcaacatttt

SEQ ID NO: 87598 - DNA, 195 bp, Glycine max
  unsure (1)..(195): unsure at all n locations
  Clone ID: PAT_MRT3847_50109C.1
gaaagttcaaatggatcagcccgtgttgatcanccatctagagagacccagattacagttagtnacaattgggaggtagtgaatgggagtatttctagttctgtttggacaacagtaaatggaggtagtgaacaggaaatgcattacatgactaatgccaatgcttcnaacattgtgaaggacgattttganaat

SEQ ID NO: 87599 - DNA, 257 bp, Glycine max
  unsure (1)..(257): unsure at all n locations
  Clone ID: PAT_MRT3847_5010C.1
cnccaggatggctgttctcaacgagccaaaaccttacccagaaccaaaactntttccaactattgctgcaaacnccactaccctncttctgnaagcnactcccaattcgcgccagagcattcnagtgnaatgaantnnnggtntgctcaaagctatgatcattgcatgcgaganctatccagtgangttaaaantcagtaccccaanagcnataatcagtttacganagagttattctacaccaaccaaacctnaat

SEQ ID NO: 87600 - DNA, 521 bp, Glycine max
  Clone ID: PAT_MRT3847_50110C.1
acaatatctttttttttttttttttttttttttttttttttttttttttttttttttttttttttttttttttttttttttttttaacgggttaatttcccatttttaagttattccgatattgggccccataaactggttaaaaaaaaaaatggaaggccttaactggggcccttttttgttaaaaagcaaaattggcccaaatgggtgggttttgggcttccgcctaatccaccccccctttggttattaaaaaagttgggggggcttttgggggataaagggcacaacccttttccgcataatttactaaaacagggatctcattatgggtaattctagaaaaaccgcccataaaagccatggttaaccatgggtttttaaaaaaacgttttttaaaaaaacctatatttacgggtggggaaataggcgcaagattgggaaaaaccccaattgggccgcttttagaagataaaaagatttccttaacttccgaaacccaaaaaattggggggggggga

SEQ ID NO: 87601 - DNA, 224 bp, Glycine max
  Clone ID: PAT_MRT3847_50111C.1
cgggccggaaattcccgggggggacccactctgtcctcccacgcgtcgcggacacacatagggacggcgcgctgagatgacgacggaaggctgcatgctgggatatgacgatagatcgctctattcttgtgctcaggctggataaacaatacgctgagacaattgattgcattacaggaattggagctaactaccatttaccaggaccccctattctgtgatat

SEQ ID NO: 87602 - DNA, 438 bp, Glycine max
  Clone ID: PAT_MRT3847_50112C.1
agcgcagtatcacataagtcagatgtctacagttatggaatggtggtcctggaaatggttggaatgaaaactaatattaaggctgaagtaagccgctcaagtgaaatatattttcctcaatggatttacaattgtattgaatcagatcaagaacttggtctgcaaaatataagaaatgaaagtgatgacaaaatggtgagaaagatgataatagtgggcttatggtgtatacaaaccaacccttcaacccgaccggccattagtaaagtggtggaaatgctagacagtgaagttgagttattacaaattccacctaaaccttgtttatcttcctattcaacctctccagttcatttgtcatgtgagacatcgtaatttacgagagtactggtatgtagtctacgttgcagtatattgcatttattactagtatatttg

SEQ ID NO: 87603 - DNA, 194 bp, Glycine max
  Clone ID: PAT_MRT3847_50113C.1
ttcttttttttacacatgcattctcctttccctctattcaagaatttcagagaacatatatatcattttcaacccccaaagaaggcgagaaggttttttccagttgccaaactcccccttttcaggtgattttcttgctaaatagggcacttttccggcattttaaaaaagaaaaaaaactatttggaaacttt

SEQ ID NO: 87604 - DNA, 936 bp, Glycine max
  Clone ID: PAT_MRT3847_50114C.1
caactatcacaacaataaccccgcctctctctttctctctctctgttcacaatcttcaccaaaacctcacccaccctttactctctctattattctttaacaagttcgttacttcgtttccacaataaaaaagaaaaaaaaaaaaactctacctcgccgggtattcttcaaatggccaatactcaccgctgccgatgaagatctccggcgactccacccgccctctgcgtccattcccgccggccattgcagccccctcgccggactccgatctccagccgctccggagggccacccgccgccatccccgaactccgtccacccgcctgaggcgcgccggaggacacaccggaaaacggagcaggcccgaaacccccttgttcaagtggaagatccacgacggcgtcagggagaggagcgtcggcggcgatccgctcgaggaggtcggccggaagaaggaggcgccgccccatgcctccgtgtcggcgaggaagctcgccgccgggatgtggcggatgcagctgccggaagaggcggcgggtgatagtggaaggcgaaggggttcgagaaagatcggtgaagatcgtttgggagttcagcatggaattggccatgtagaccaccaatttctcagccatcatagtggcatgatgcatggttctgctatgatgaatgcatcacaaagtccccgttccatttctgggactaaggatggacacttttgtgagctcaagccttctttccagttatcgagtactgcaatggagggggcgacaaagtgggatcctgtttgtttaaaaacatcagacgaggtgcagcatatctacagccaaatgaaacttcttgaccaaaaggttagcactgtttctgctgtttcagctcttgaagccgaactagagcaggctcgtgtgcagattcaggagcttgagactgaac

SEQ ID NO: 87605 - DNA, 366 bp, Glycine max
  Clone ID: PAT_MRT3847_50115C.1
ttataattctttttatgcagacatcgccaataactcatctaatcaatttcaacttcacaatatatatatgtcattgatacaatggttacatggatcactcagcatcctgcttctaactgcacattccatatcatgatttctagacatacacattagccataaggatattttacatatagtacatgcctattctctagaggaatcagctgaaaataccgcaataaaccacacatacagtgaaacacatcggttttgcaacatacatacatatcacgcatgatatctcttcaagcctgtagaatatctggattgattcccatttgtaatcatgttttactaatgtacacacctctacacgtgatgaat

SEQ ID NO: 87606 - DNA, 565 bp, Glycine max
  unsure (1)..(565): unsure at all n locations
  Clone ID: PAT_MRT3847_50116C.1
ggctcgagcaagatcgcaatgggtgctacaggaatgctaaatggaccgtggagattgtggagaattccaatattataaggttgaagagttgttatgggaaatacttaacagcctcaaatatgccattcatattgagaggtacaggaaaaaaagtgttgcaaacattgcctactaggttaaattcttcggtggaatgggaacctattagagaaggggttcaagtgaggctaaggacacgttatggtcaatatttgcgtggtaatggagggttgccaccttggaggaacaccattacccatgatgtcccacatagaacagcaacagctaattggatttatgggatgtggatattgtaaaattttcgcccaaaaccacaggtcttataaccaagaccagggcctatacctattcccccacccattcattttttgattccaactccaacaaatctttcaccttgctcttctccttcatcatcaccattaatttcaaagatggattccctggtcaagattgatctcaggtctaacacaacatctgagtccgaagattcantagaatgttt

SEQ ID NO: 87607 - DNA, 359 bp, Glycine max
  Clone ID: PAT_MRT3847_50117C.1
aatgctggggtcctttcttttatgacaagtaaaaaacccaaatcaaattattttactacccctcctaaaaaaaattggattaataaaatttatttcttaccccaccccttacctagaaatgaaaggcaagccaaaacaaattttattgccttgcgtaatgatttaatcttccaaacccacctttttaatctaaccttccggtccaacaaaaccatgccaacccaacctgaaatgggagataagcctcccccgccaaaaaaaaaagggagggaataaaacatgccaaaccaaaaaacaaattattttttttattggcttgcttgaagttaatctacccccctgccctgacagaaagtcta

SEQ ID NO: 87608 - DNA, 288 bp, Glycine max
  Clone ID: PAT_MRT3847_50118C.1
ggctcgaggttaagtttcatgggactgatattttatattacttgttcactcctttaaccttaatacttggaaaaggagatcatcctcctatatgccacattgtagactgtcttcatctttaatgactgaagacagtggggtctcaatgggaggtattgtagaagttaaatgtcctcagataccctacatacaggacagcatgattcctctctgatttgtttttaaactcagggtctcagtggaaggcatatcagcataggatgggctgtacagactattgctctcgtc

SEQ ID NO: 87609 - DNA, 418 bp, Glycine max
  Clone ID: PAT_MRT3847_50119C.1
gatgtttacccagctgcatttagcacttcaacaagggacctatttttttcacctcacacgccaaatccgcggaggggtaaacagaggaagggcggactttctacaacgtatataactcctttgtggattacgagaaaaagggtaccactgactcctttaccagatacaccaactttaacacaactttgtcagctttgacttaagctttatcactcaatggctgcttcgtaaataaatgggtgcagccgtgtaacttttataaataaaagactttgaacgtaaggaccgcactaccgatgcctgacatataacataaattgccggagaggtcgattctgccccggagtcttctattgaaattactgccttctgcttcgaaaattgttgagatgaagctggttatgaaggcttccgatta

SEQ ID NO: 87610 - DNA, 477 bp, Glycine max
  Clone ID: PAT_MRT3847_5011C.1
ttgggggggggggggggaaaagaaagaaatgggcaggagggcgtatggaacgggggccaatgggatgagtggagccgaatggtacctaccaggtacgcgcactagagcctgaggaaagagaacgagaaaagggagggacactaacagacgctaaaagagacagctgcctaatcgtaccggggggtaggggttggtgtgacaatagtgggttaagattagttgcttgaccaatacaggtaggcatagttaggtcggcttaaggtttaataaaacaacttaatgcagtcattggcgtagataagttgaccaccttatttcgagcgagcaacaccagtgggtgttgggtttatggtgggccaggggtacatagagtgggtactaggctagaactacttggattatgcgagatgcccgtaacaataatattacggcgcctacttaatgggggggataaaaggaactgttgttcagcgaggt

SEQ ID NO: 87611 - DNA, 243 bp, Glycine max
  Clone ID: PAT_MRT3847_50120C.1
tggagaatttgagaatgttagtaggaccagcagatacctgcactatgctgtacttggaacctggattttgtttgacttctgcatggtattgtgtagtctatggtgtagatgaagggtacataattgatacttgaacatgtatagttctaatatagagagattcgatttatattactaatttgctaaaggtaactgaatccagaatttcagaaaataaatgttatctatatcagcatgttcagt

SEQ ID NO: 87612 - DNA, 309 bp, Glycine max
  Clone ID: PAT_MRT3847_50121C.1
cgcctgtgagaaaaccacagaaaggggcctacacattgcaagtcattatgaaatgattctttatacaatttatcatttgcacctttagctttgggggctcattataacttggactaatatgtattaattcagttataatcttttattgataatatttcagatcttcatgtgaaaagcatcgtattaaataaataatcatatcttagatattattaaaatatacaatgttcaatactcattattgcgcaatatctcatacagtcagatcttttatatcagttgggttggttcatctgaaataacatctaa

SEQ ID NO: 87613 - DNA, 105 bp, Glycine max
  Clone ID: PAT_MRT3847_50122C.1
gcataactgtatagagctgtgtgccattaagacaaaccatagggccttaacaagaaagaaactagtcaaaccgagaccaataaaccgcaccaataaagggacaac

SEQ ID NO: 87614 - DNA, 1941 bp, Glycine max
  Clone ID: PAT_MRT3847_50123C.1
tgataagagtgttgagagtttcaatgggaaaaaactcactcctacaggctctaggtattttggtggttccatatcagggcaaagtgattgtgaaagagatccaaagcagtttggctcctcagttgtcaatatgagaaaagatgtcagaagtgagattgatgtgcttccacaagtaagtacaagtaaggagcaggcatcaatgtctgtcagaagcatatcgactagagaaaatatccacaccttactaaggcaagccaaggtgactccgaatcgggagtttcaagattgtcatgtatcaaagtttaacagattacaacaaggtgagacttgcttacagctggagtgtggagtggagtcccgatccaatgacattggagataatggttgtcttgttgaatctgcaagggagacagacaagggaaatgcccctacagcaaaccaaactagtccagctgatgcaatcaatgacactgaacatcatgataccaggatgggcagtccgatacagaggggaaacttaaatgaaagtgacaatgcttccaagatctccatggtagaaaatttgtcgacagtgagaatttcgccagatgatgttgttggaataataggtcaaaaacatttctggaaagcaagaagagcaattgccaatcaacagagagtgtttgctgtccaagtgtttgagttgcatagactgataaaggtccaacagctaattgctggatcaccagatattttgcttgaagatggcgcttttctgggaaagtctcctccaaagggatctactcccaaaaaacttgcacttgaatatgttgtaaaacctcggcaacaaaaccttaagcgcaaagatgattctgaaaagctaaatcataaaatggaatgttctgcagagaatgcggttggcaaaacatctctttcatctgtgaaagacggtagccacctttcaaaatgcacccctttccctggaaatcagcaccagacaaatgtggctgctgacagtgggatgggtccctggtgtttcaatcagtcaccacctgggcacccgtggctaattcctgttatgactccttctgaaggacttgtctacaagccatatccggggcctggattcacagggaccggttgtggaggaggatgcgggacgctgcgagaagacgacagaaggggttctttcatgaatcctggttatggaatcccaacttctcatcaaggagttggggctccaccagacactcatcctggcagtcatggttacctccctccatatggcatgccagttatgaattcatcaatgtcagagtcagttgttgaacaggggaaccaattctctgcactaggttctcacgggcataatggtcatttacccggaggagggaaagccaatcataacacaaacaacaaaagctcttgtaatttaccagttcagagaaatggagcaatatcgcatgtcctgaaacatcagacatctaaggattttgagttgcaggagacttcagccagtagtcctagtgaaatggcacagggattaagcactgggcaagttgcagaaggaagagatgttcttcctcttttccctatggttccagcagaaccagagtctgttcctcagtctcttgaaactggacagcatacgcgagtgatcaaagtcgtgcctcataaccgaagatctgcaactgcatcagcagctagaattttccaatcaattcaagaagggagaaaacagaatgactcagtgtagtgatggttcaagtagtttgtctagttcctgtactttcttggagtatgtcatgtaacgagctgttgtattttataatttttgttttggtttttgaccttgttacatacagcacattggtatgtagatatatctggcatatcaaaactggtcaaaatgtaacattattttatggtatcatgttgtttccctacataagtgttcgtttt

SEQ ID NO: 87615 - DNA, 345 bp, Glycine max
  Clone ID: PAT_MRT3847_50124C.1
agggatgattatgcttaattatttggtgttgactttgggaacatttttaggagattaagaccgtggaactcgtgaagccaactgggtgggttgatctatccttgtctggagctgatcctaggtaagtatagggttctttctgtatccagtttttgttggtttaagtttgtatccagtttttgttgtttggaagcctggatttttgttttcaaccaaattttgtgtgcatgttttggtagatttctagcatagagtgaaaatgaattagtatacttttcttcatttttttctataaaaaattagtgatgttcatattaatcgaatgatttgctttcattggaaaag

SEQ ID NO: 87616 - DNA, 544 bp, Glycine max
  Clone ID: PAT_MRT3847_50125C.1
ggctcgagcttggtaagatggttaaatgttttgatttttttctttcactgaactttggcaaaatgacaaagcttctcgtttggaggactgataagcctcaagatgatatgcctcagacaccaaactcacaagttacaattgtatcacgagaccatccacgtgggggcaattattagttgtaagttgtaacatgctgatgcagcatatcagttactgtatgtctcttcagatgtgatgagatatatggttacttaatgtttagtttctctgtgtcccggttaagttttcgtttctatagaagatagaagctttagttggttaattattgaagtgaagttgtatcctcatgatgctttctctttcacttagggtgtatatatgaaagttgtaattaaactcttgtaacagtatgtaatggtcaattaatacgtagttttaattagttgaggcattgcaagttgcaactcaaacaaattaaggatatatatattcagaattgtgattaggaattaatttcctggcgagtcccgccaagcaaacaata

SEQ ID NO: 87617 - DNA, 218 bp, Glycine max
  Clone ID: PAT_MRT3847_50126C.1
agggtctatgcatgtgctatgaaccaaatatgaacatctacaattgtttttttcaaagttttggacacacggaagcttttcaccccagaatcgaatgaaatgtattgtatccgtcctcgatgtgcaaggatatttacaataatgactgtaagacagcggcatttaatttgttgacgtcaaaatgtttttgagctgatgggataggatgcttcctcggg

SEQ ID NO: 87618 - DNA, 379 bp, Glycine max
  Clone ID: PAT_MRT3847_50127C.1
ttgcctgaataggataggatcactacaatactatctccctttgaaatactcaacgcatcagtacaagactcgaatttgaaaagctgaaacaactcgtaccatctgatccatgcatagaaaagactatgtacttactaatccatgcatggaacaatcctgtaccagatgattgccatgtaatgattgctcaataacatatgttaccctttatatattataaacttttattgcacaaattacaagatgaaactctattgtgatgagaaactttttttgcataaattaaggaactttgatgagatgaacttacatctaacttggtcatctttgcagagctctctagcaagagtggtttttccggaaccaccaatcccggaaa

SEQ ID NO: 87619 - DNA, 331 bp, Glycine max
  Clone ID: PAT_MRT3847_50128C.1
ggcctccgaggccactaaaccctaatataaaaaatgaatttcggctccttaaaacctcaaaaaacccggatgtgtctctagggcccacagggctggctaattttcctcaggcctggccggaacccggggcctggactgcagttcgccaactctctgatctactttgaaagcaccttacccgtgtcataaacatacccatgtacaagagccagactgggatcaagcccacaacagagactgtggaccagggaatactggtaccctgccagtccccctggatcacgcccctgttacccgtctagaaaccagggactaatgattacaggcctgt

SEQ ID NO: 87620 - DNA, 203 bp, Glycine max
  Clone ID: PAT_MRT3847_50129C.1
tatgggtatcgttagactatgacaacagacggggacaattggaagactacgcctgaatgctacgggtacgataagacaacagttggagagacctaatgtctgtcgcgtctacccgctgagtttaagcatatcaatagcgcccgttataaaagatccaagcttacatactcatgactgctacatctataactattatatattac

SEQ ID NO: 87621 - DNA, 392 bp, Glycine max
  Clone ID: PAT_MRT3847_5012C.1
cattgagcttcgagatgcccctgaagaacaccctgtacttattaccgaggcacccttcactcccacggccgacagagagaaaatgacccaaaccatgtttgagactttcaatgagcctgccatgtatgatgcaattcaagctgacttgtctctgtatgccactggaagaactccatgtattgagcttgattctggtgatggagggagccacacagactccatatatgaaggtgatgctcttcctcatgcaaatctacgggtgtaccttgctgaccgggattcaacggagtacttggcgctaactcctactgcgagaggatactccttcagcacctctggtgaaaaggaaatagctcgtgacgtgaaggataaattggcgtatgcggcccttg

SEQ ID NO: 87622 - DNA, 291 bp, Glycine max
  unsure (1)..(291): unsure at all n locations
  Clone ID: PAT_MRT3847_50130C.1
gtcgcangcacgcgtacgtaagctcggaattcggctcgagnggnaaggtaagnannttgtttntcntacnagagtngntcctnttccantagctnatacnggctgatnctntgtggtgttaagaatgnaattctgngtnctaacgccactaaccctagngctgnngcgacttccttgaganctntaagngtctcanntatctgggtgatgngtgtcccnttgcantnntgaacnagnangnaatagtnatctcacctcannaaancgggttactntgtgcntgngtgtggt

SEQ ID NO: 87623 - DNA, 502 bp, Glycine max
  Clone ID: PAT_MRT3847_50131C.1
gtagaattcctttcctattcaaattcaatcatggattcaagagcagttcaaactcatgcgcatgaacatcaccatatttcccacaatgttgggtcacacgaagtgccacgtggtgaagaacaccaccaccatgaccatgagaagaagtcggttcttaagaaagtcaagcaaaaggctaagaaaattaaggacacaatcacaaagcatggccatcatcatgaccatgatcatgaacgtggtcatgggtattactacgatgatcaacatatccctgatgatcatgacttgggtgaggaagatgagatggatgaatacccagaagtccatggagcaccgatttatgacagtgcacctgttagaggtgcagcaccaggacatgccaatactttagggaggcctggagttaattttggaggccaacagtatgggagtagaacctattcatgagctaggtcatagtgttctcaactctggataataaagagtcactgcccactagaca

SEQ ID NO: 87624 - DNA, 228 bp, Glycine max
  Clone ID: PAT_MRT3847_50132C.1
gtgaatctcaaaaaggagtacaagggcattttctggcaagaagagatcattccattcttccaaagtgccacctttccaaaagaatgcacttctgtccaaaaattctacattgaactctccaagcactgtcaaagagaagcttggtgctgttgatccctatttcaccaagcttgcatatgccatggtgactctgattgaagctctggatgagcttacttgcaccacatc

SEQ ID NO: 87625 - DNA, 226 bp, Glycine max
  Clone ID: PAT_MRT3847_50133C.1
gatctatcgcattgaatcatatgatgtgacatcaattccagcatgcattcccatgtatcttatgtctagactgatcaagtcattggcattcaattggctgatatctatataaggatctgataaaatattcggacggtgtgtatgtttcctcaacgcaccactcaaggaatagtttcatcaggagacatgccgcatgattaaagcactccacaagtatgattgcttg

SEQ ID NO: 87626 - DNA, 203 bp, Glycine max
  Clone ID: PAT_MRT3847_50134C.1
gaatgcaccggtgaaatgatcggattgcggtgactacagcgggtcgcttctcgagacgtcgagagaatgtcactgaaccttatcatttataggatgcccaaagtgaagcctaaatacaagcggccgctctataggatccaaggttacgaacgcgtgcaagcgacgtgatacctcttctatagagttgcataacttcaatttaa

SEQ ID NO: 87627 - DNA, 277 bp, Glycine max
  Clone ID: PAT_MRT3847_50135C.1
acttctgatttatttggtaaaaaccagaaccccggcaacccgaaaccctaaaggaacgtgaacgggggccacaaaaacaaaaaaagcggagcaggtcccgagggggggaggaagaaacaaaccttggtagctcccgggggggggggggccatcaccaccacgagggagaccacgggcggggccgccgaaaaaaagagaaggaacaacaccgaccctgggggcggggggaacacgggaacggaaacggaaaacaccagcggccccgccaacgggaaga

SEQ ID NO: 87628 - DNA, 203 bp, Glycine max
  Clone ID: PAT_MRT3847_50136C.1
aaaagggaaataaaagaaatggaaaaaggtggcaaatccggaacaaccggctcaatggctccctgttcaaaagctgcaatgcctctccaaaacctgaattccccaatcctcccaaatcacttggaagagaaatccatgacctgaaaattgaaatgctgaaagagcgtttcacgaggaaaaaaatgtaactctgcgctatcaca

SEQ ID NO: 87629 - DNA, 610 bp, Glycine max
  unsure (1)..(610): unsure at all n locations
  Clone ID: PAT_MRT3847_50137C.1
ggctcgagtaaaaagagaggaaaaaaaaaagcctacaccaccctcttcttccctattcccttctacttctggcgccatttgcagcttcaaaactccatctttatttttcttctctccttccattattagaaacaccctcatggaatcagcagcaacagcattgaacaacatcatcaacaacaacaacactgttcctgcagtgtcgccaccaccaccaccaccaccatcctcagagcctcagccaatgaacatgaatgtcaacatgaacatgaacgtggtcaacaccacagaaggaacaacaccaacaccaaccccaacaacaatggttcccccaacaacaatggttgttcctgcagtgccagctccaacaacgacaacattagcagtagcaacaacaacaccagggagtttggatttgtttgggaagaagaagagagggaggcctagaaagtatgatgcagatgggaacctgagagtgagtgcaagaccaacaccaacaccaccatcgggttttactttgtccacaccttctgagtactcttcttccaaaagagagcgcggcanacactacaacacaactntngccaacaacagctaccaacaacaactc

SEQ ID NO: 87630 - DNA, 343 bp, Glycine max
  Clone ID: PAT_MRT3847_50138C.1
tgtgtctcaacaacaaatcgaaatttccctggtcggatggggcacatggaaggccagatatatcttgcttccccctatactgctgcagcatctgcactaactggtttcgtaactgatcccagggagttcttgtagatcagctaaaatgggtagaaagcagtttctacctaattggaaaaataataaaataaaaaaaagctcaaagaacttttatgccggaaccagaattatgtattttaaagtcaagtagttagcttgtaagcgtagagcatgttattagtgtgttacaacttggcagcaatccacataatttttacaattacaactattggaaagttaagat

SEQ ID NO: 87631 - DNA, 567 bp, Glycine max
  Clone ID: PAT_MRT3847_50139C.1
ggctcgagctctggagtccaaagggtgctttcaaggttcatggaaatgcctgaagtgagacaaagcagaaagatgttgaatcaggagagctttttgaggcaaatgatcaccaaaggccaacagcagttgacaagacaaaggaatgaaaacaggaagaaagagatgaccaatcttatgcttcaatacctgaccgctggaaaggttgttggcaatcctagcttggtggatttgaatgatctctcatggttgattgatcagaacctcaatgaaatagaaaagaagatcaccatgctccaaatccaagaagtggtgataccagtgattgaaaatgaaggacacatgaatcatgttcaagggctggagagcaacatggacaccaagaaaaagcaacattgatccatggaatttatcaatggtgccattggggatgggatgttatgtctccttaaaaaaattatgttcttttaagtgtttcagttgtctttcccattttaatcagcaatgcttagttttattgtctttctttgaaaccgccaatgaatacaatatccgtatgtcatagtttgc

SEQ ID NO: 87632 - DNA, 274 bp, Glycine max
  Clone ID: PAT_MRT3847_5013C.1
caaacacaaatggctcatagaatttgcattagtcattttggttatgctgctattgtttctgggctgattttgggaaactcaatgcgtcgtcgtattacaccgtggttgtggattgtggaggcactggaacacgtgtgaatgtgtatgagtggatggtaggggtaaagggaataagcaaagggaatttgccagtgttgcttcactcctatcctgataatgcaaccaggagtagttcactttggaaaagttattgtgaatatcactgtatgcaaac

SEQ ID NO: 87633 - DNA, 325 bp, Glycine max
  Clone ID: PAT_MRT3847_50140C.1
tttgatttagtgtgatgaaaatgaaggacctaggagtgttcattgatacagcgctggtagcatgacaaggccatgcatacgatatgggccctggatagggggagcactgactatggtgcccatgctagggaggtgaaatgctcaagatggaagctggctgtggaagcacacaacagggctgggttcatgaccatccctgcagagagcgttggatgaacaacggatgacatccatggggtacagtatcaagcagactacagctcagcctaccaacgggcggactttaatgcgagagaccttgaattatataccgagggcacatttg

SEQ ID NO: 87634 - DNA, 245 bp, Glycine max
  Clone ID: PAT_MRT3847_50141C.1
ctcgcgtatagattctgcgaaacatcggacgaggacaaggaggcgtagggcgatgccggcttcatggctcagcgagtgcagtaactgacatgcgcagatcatttgaagttagagacatggcagcagaggcactctctggagtggttatggtggcaaaaaataggaagaggtatgtgcaggatgaccaaaacattgctcttcttctgcaattgctggatccaggggaaggcaattcaggtaccaac

SEQ ID NO: 87635 - DNA, 673 bp, Glycine max
  Clone ID: PAT_MRT3847_50142C.1
ctctattatcggtctggtacacaagtgtaagtgtataaaggcaccttgggctgggccattcctggcacaactaccacaaagtgtcacattccatataattcggtcgtctgtggcactaaagctagactaatttatccggcggtacacgtaccacgactagttatagcaagagtttgtgtgggcgaaattcctggagtattccatatcgctctgaccttctacagcgactacgatgacgagggtgcccccaccaacagggttttccgaccgacctgggacctgagcaaggtcacccccgaatgcatcgcgcgcttcaaggacaataaccccataggtaacatcaaagtcttcatgagcatcggggaccgcgggacccaacaccccttcaaacccttaaacaacaaatcctggatcgacaacgccaccgatgccctcacgcacctcatcatgaacgaacactacgacctgcacgtggactgcatcgacgtgctgtacaagcacatggatgcctcccccggtgactttatcgactgcgtgtgacagctcataaggaacctcaaaagagagggcgtactgagcgacgcttgtatttatcactcgttagctctgaacaaaaatattatccctagtgagtacagcgctgagtccttcttggatgactgggtccactacc

SEQ ID NO: 87636 - DNA, 308 bp, Glycine max
  Clone ID: PAT_MRT3847_50143C.1
tttctattttctataatctgtatctttagaagctttgcttcttaatatctatgtcatgtttatttgtgtcctctcaaccctccttcaaacagattccgttccagggtgaggctagaaaaggccagccaaatttaaagtcaaaaactggaaaaatgactcaaggttctctgcttttaaaatggaaagcacttttctaatttgttatttcaggctccattggcattgctagcttggtttggatgtagcttaatttgaaaatgctatattctgatgaacattgtaaatagctgacaggtgaactcaatttg

SEQ ID NO: 87637 - DNA, 225 bp, Glycine max
  Clone ID: PAT_MRT3847_50144C.1
atgacagaatcatgtgatatgccagaagaacttgaaacccacatctacataggttggaagagggcacaagaatatgatgatgagtgcacttggtcttctcaccgttcttggagtttccgggaagagagcacgagaagcagtagagggcacgacaagcgaaatcgacggaggttgaaagcaatagaggacatgagaagcggaatcaacggagattggaagcaataa

SEQ ID NO: 87638 - DNA, 315 bp, Glycine max
  Clone ID: PAT_MRT3847_50145C.1
cacacatccgtaaaagagtccgacgagaagggaagcgactgggaaaatctgaactgtcatttccagaacatcctgagaaaatgaagaacgttagcttgttcgctatcattcgtttttgcggcctcagcagcgggggttgttccgccaacgaccgtcagatgctcatccttgatggaggtacgaatcaagatttgcttcacaaaacttttttcgcccgctttataattccccggtggcggtgtcaaattctcagccatctttaacgcaactgttcccttcaccgtgatggtaacactcatcccaaactactgtggg

SEQ ID NO: 87639 - DNA, 467 bp, Glycine max
  Clone ID: PAT_MRT3847_50146C.1
tagtaacttggatctctaaacggccgcttttttttttttttttttttttttttttttatcagttgcaagttctgctgtattttgacttactaatcagtaatttcatttctacagatgggcaatgtttggttttgctgtagggttgctaacagagtatgcaacaggttcagactttgttgatcaagtgaagatccttctatcgaattttgggatagtagacttggaatgaatacatcaatataagatactgtcaatattttcttgttgctgtccttggtgtaaacaatgtttagtcatttgttctgtaattcatttatatcatacaagctttctcttcacattgatgacatctcaagaatgtgattttcctttcccattatgctggactccctcgagattgaaaaatttcatgcgcatcccttctgtcgtcttctcgcagccgtacggacgcgtgggcggacgcgtgg

SEQ ID NO: 87640 - DNA, 230 bp, Glycine max
  Clone ID: PAT_MRT3847_50147C.1
tcttccacgcgagcgaagggaggctgcccgcggttcgatgggaatggagctacaacgcgtctaggggggctaatccccctcaagaggggcacaaacggcactacgccattggggggccacgggctcctactgctgatttgcatactgaccgggtgcacactcctctgtaatgagctggattatgacttatacgcgttcaggcatgacccaaccgcacagaagcttagccc

SEQ ID NO: 87641 - DNA, 825 bp, Glycine max
  Clone ID: PAT_MRT3847_50148C.1
ggctcggaaaaataaaaatctcacgcgggttagttcgtgagcatcaggagaaaaagaaaaaacaaacaaaaaaagaagaaaaaaaatgtctatggcatgttcaatcccatgcatcaaaatcccaacacgttcctcttccccatcttgcacttcatccagttcatcctattctttgcggttctcttcttctaagcctcacaacagtgtcaccataaggaattctcaagctgaagggcctataagaaggccagtggcacccccaataagagaaccatcatcatcatcaagtgctccacagcttcagaagccaacacttccttctcagcctccatcaccatcctcttcaccccctcagaagccagctactgttgttggggatgataagaatgtcattacattggagtttcagaggcaaaaggctaaggagttgcaggagtacttcaaacagaagaagcttgatgaagcagatcagggtcctttctttggtttcattgggaaaaacgagattagcaatggaagatgggcaatgtttggttttgctgttgggtgctaacagagtatgcaacaggttcggactttgttgatcaagtgaagatccttctatcgaattttgggatagtagatttggaatgaacacatcaatataagatactgtcaacattttcttgttgctgtccttggtgtaaacaatgtttagtcatttgttctgtaattcatttatatcatacaagctttctcttcacattgatgacatctcaagaatgtgattttcctttccaaaaaaaaaaaaaaaaaaaaaaaaccaaaagcggccgctctagagga

SEQ ID NO: 87642 - DNA, 1245 bp, Glycine max
  unsure (1)..(1245): unsure at all n locations
  Clone ID: PAT_MRT3847_50149C.1
tcctctagagcggccgctctgggttttttttttttttttttttttcaaacagnagcaagttctgctgtattttgacttactaatcagtaatttcatttctacgtcgcccacgcgtagttagcatcagaaaaagaaaaaacaaaagaagaaggccgattgtccaccgaccctccgattttccgacgaaacgaaaaaaatgtctgtggcatcttcattcccatgcatcaaaatcccagcttgttcctcctctccatcatgcacagcacttccaaatcaacttcatcctattctttgaggttttcttcttccaagcctcacagtgtcactataaggaattctcaagctgaagggcctataagaaggcccgtggcaccgccaataagagaaccatcatcatcatcatcagaagccagtgcccctcagcttcagaagccaacacttccttctcagcctccaccatccccttcacccccacagaagccagctactgttgttggagatgataagaacgtcattacgttggagtttcagaggcaaaaggctaaggagttgcaggaatacttcaaacagaagaagcttgaacaagcagatcagggtcctttctttggtttcatcgggaaaaatgagattagcaatggaagatgggcaatgtttggttttgctgtagggttgctaacagagtatgcaacaggttcagactttgttgatcaagtgaagatccttctatcgaattttgggatagtagatttggaatgaatacatcaatataagatactgtcaatattttcttgttgctgtccttggtgtaaacaatgtttagtcatttgttctgtaattcatttatatcatacaagctttctcttcacattgatgacatctcaagaatgtgattttcctttcccattatgctggactccctcgagattgaaaaatttcatgcgcattacaattttatagttaatacattagatagcagatcaaatatgtaagattgtcataaattaattaataactatccagctatttcttttttcttttctgactgcataccagcttttttgttaaggtactgcattgttcttgctccggaaaagttggtcgttagatcagtgtaaactaggttgaaaatatgcctagatatctgtagtttgaaaatggataattttatttttatcccttctgtcgtcttcctccagccctaccgacccctgggccgacccctgggtccacccgggaattccggac

SEQ ID NO: 87643 - DNA, 424 bp, Glycine max
  Clone ID: PAT_MRT3847_5014C.1
tattaacaccgatacatttgacaggaaacacccattctccaacgcttgccatgattcatggtctatgctgattcacacgggatctttatttctcaattttgacacgcttgcgtctccatttacagacattgctgttgatccacttgtatggcgtggatcgagcacacctgatttcacatgcgaaatcactgaataaactgaagaatggcctattgattcttttgatgaatggagaaaagccaaaaacttgaccaattttatactgcatcaacattcttttggaggttatgttgctgccaaatatgctctcaagcaccctgcacatgcacaacacttgattctggttgcatctgctggattctcatctgaatcagatgcaacatctgagtggatacacaagtttcgagcaacatggagagatgct

SEQ ID NO: 87644 - DNA, 556 bp, Glycine max
  Clone ID: PAT_MRT3847_50150C.1
ccacgcgtccggcagatttcacctccctgggattgttgggccgcgcccttgttaacgttctctgtgttttaccgggaatgatcattcctaccatgggggccctgatttatgctatcgctgaggaaccatggatgttcttgtttgttgatctaaagttgatgtttaccttgctcttcaaaataggtctacgtttagtgctccgttaaatattagcggagaatgtgtggagcagaagcataaagccgaagacctttattgaatctttgccacatgaatgcctctttgacatccttagaaagctgcctgcaggccaagatatggagtgtggtgtgcttctgtatccaagctccttgcttatgcttgtgagcaatatttgcaatactgatatccacagctactgaaggactggatatgaaaaccatgaaattagtgaccaaggatacctatccccaaacttggaaggaaagaaggggacagatggtaaacttgctgccattgccgttgggacagccctctgaagaggggtggggaagcttacaattcgtggatgccattc

SEQ ID NO: 87645 - DNA, 426 bp, Glycine max
  Clone ID: PAT_MRT3847_50151C.1
gggacagagcaaacttcagggcctaatttgttaaaagggcggggcaacttggcacaggcgaactcaggggctcaattcaattcaattcaattcataacaaatcctttccccccccttccccccttaggcccccagaaattaaagattaattcttccccagcaaaaaaaacctttccaaaccccaaaactcatttcccctccataaaaattctaaatttctggggccccgtaaactttttttatttttttaggccataataattccaaagaatttttatttatttccctatttgattcaatggctcccaaaatcgatctcagcccccgtaaaagggaataaacctatcctaccatcccctccaaaaaaaccttttaaaaatcaagagtcccacagggccaaaaactaaaaggggccaagtattttgg

SEQ ID NO: 87646 - DNA, 442 bp, Glycine max
  unsure (1)..(442): unsure at all n locations
  Clone ID: PAT_MRT3847_50152C.1
aataaaaaaanaaaaattaataatttaatttaataaaataattaacaatcggaatttttaaaactcaacaggtttacataaacttttttattttttccgtcccaaaaaaaaaaatacccatggttaaggggggggaccttttggatggggagagattaaaaaaaagttttttcccagccctttttatgaaaaggggcctttcgggccccccccagggttaacaaaaaccggcatttggaaatggttggacattacccaaaacatcccccctcatatacatttggggtaaatcctcctaaggcccgaaaatctttttattcctccaaggggacccccccccaaaacctaccaaagttggggtccgggataattagggaactccctgcttgtttttgttacggccgggggaacaatcttttacggttttttaaaacctcccagg

SEQ ID NO: 87647 - DNA, 178 bp, Glycine max
  Clone ID: PAT_MRT3847_50153C.1
tgcggcggatgatcaattgtgctaccacaacaagattgacagccacaaaggacccttactgaatccttcctcaagttattcctatagatcagctcaactatttctatctattcatacgggtttcaggatacctattgccactgtgctggcgtcacgatcaccttatttccattcgttt

SEQ ID NO: 87648 - DNA, 252 bp, Glycine max
  unsure (1)..(252): unsure at all n locations
  Clone ID: PAT_MRT3847_50154C.1
aatacgagcngccgctttttttttttttttttttttttttttttgggaaaggggcantcatattaaacaatnaaaacccaaggtagatataatccagctacaaggcaaaattcattctcatggaataacccaaaatgaaatgcataaaatctatgaatcttgcaactcattgagaaacatgctgcacaactctgtgttctagcataaaactgtgaccagcctgactatgttaaactggttaagcccctttgt

SEQ ID NO: 87649 - DNA, 526 bp, Glycine max
  unsure (1)..(526): unsure at all n locations
  Clone ID: PAT_MRT3847_50155C.1
cttttcttgggggccttcgccgccccaaccggggatgtcctaagcggtgtctccggcgtctccggcctcacccaggccggcagcctgaccaagacctactcttccactgagaagacgaccaccatcatcaagaacgagaccgtctacagcgtcgtcagcactctgtacaccaacgtccagcagtacaccagctccatcaacaagaccgtcgaggccgtccccgcccagccgtctgaggaggacaagaagaaggccctgatcgagatcaaggccgacatcaagtcgatcgcctctctcatcgtcgacgcctccgtcaagattggcaagattgaggtctccgccgacgttgacgtctccgccattatctccctcgtcgtcaagctcgtcttcgagatcgtcgccaccctccagcacgtcgtcgccatcctcggtggcaccatcaccgtcctcctcggctccgtcctcaccctcctcgtcaacgccatctatgccctactcgtcgccctccaggacatnctcggtgacg

SEQ ID NO: 87650 - DNA, 446 bp, Glycine max
  Clone ID: PAT_MRT3847_50156C.1
agaattaaaaatactttccaaagcttggtcatgcaaatgccaaaatcaacaattgtttcatatctacattgtgaaaaaaatattcgccacttaaagacaataatttggtgggcccaatgatccaacgctttatcctcaacatacagctttgagttggaatttatttggacgaattacatacttttggactagagaactaatttaaaccccttttcaattttcacacttatttttcatttaataagttcagatgccgcattccttatatatatgtatatatatctatctatatatatatatatatgcaaaagaaagaccaatatccatgtggcgcctataaaaattgtaatttacggttataaaccctctatctgaaaacactgggttattttttgtcatcaacatcaatttccaggaaacgacattttgcccatttttgtccctct

SEQ ID NO: 87651 - DNA, 122 bp, Glycine max
  Clone ID: PAT_MRT3847_50157C.1
gtaccttgaaactttatctatcactcaatggactcgagccgggcatgaatacttcacacgtactatcggcaaacttaaaagtggaaacataaaaagcccgttacacctgcagggcctagaac

SEQ ID NO: 87652 - DNA, 460 bp, Glycine max
  Clone ID: PAT_MRT3847_50158C.1
ctcctttgctgcaacatctcaaatgcacatagcacctatggtccaaagcttctacccttcttcatacccttcttcatactcttctccctcaaaactaatcatcacacccttttaaaaaaattcaacagctttacttcatgcagacaacgttaacaacaccaaacccgcaggaacattcacaaaagaatactacatcaacatcatcttaagcagcagcaacaacaacctcggaagcaattccaatccctcacaacctccaacatcacccaaaacaccaaacaacaaaagcatgaaaattctaataatagcctccgctgtggccgcatcgttgtttctattattatcattcatcatcggatacttaatcttccgatacgtaagaagaggttccgctgcggaagatagcagcaaccctgaaccttcgagcacgcgctgccgcaacttttctttgacggagata

SEQ ID NO: 87653 - DNA, 788 bp, Glycine max
  Clone ID: PAT_MRT3847_50159C.1
gcgaatcacacaccaaacttctgaaaataatggaaatttcaaagcatactaatcggtcttatgaagattttgatccgctgtttatgtggcgtagagaagagggtcgtgacacccttgaacttcaccttccaggttttaggagagaccaaataagaattcagataaaccatgttggtttattggtaataagcggggagcgtcattttgaaggaaacagatggaaacgtttcaagaaagaattcgaaatcccatcatattgcaatgacgatgcaatccatggcaacatgatgcagagcattctttcggtggtgatgccaaagaaaagtcctcaaattagccaagaggagcaagaacacaagaaagagagaagggcaaataaaaaagaagacaccgaagaagcctcaaccaaagagggaatagctgaagaagatataggtcatgcagaagagtatcaccagtttgaagaaaattataattatgtgagacagttgccacaggaaacgactagagaagttgctctcaaattcatgcttgtgatggttctgatattggtcatagcaagttaccttgcagatgtaagcaaaagcctcatggctcaaggtgcttcatattttcacaattagaccaggatggttccggcggtttaattaatgtggttatgtaaaaattaatgatgtgaacaaggagaaagtgaaagttgttgtgtcataataatttatttgacggaattgaagtttcgccaggccgatcgatgccttgtttaatttacttttgaaatggatatatcc

SEQ ID NO: 87654 - DNA, 260 bp, Glycine max
  Clone ID: PAT_MRT3847_5015C.1
gccgaaacgtggatgatgcagaccaaccttatgagtggggcgtatttttcgctaactggctatgacgatttcgttgaagaccttagctcgtaagactatcaccttcactgcttaacgctttgataccagttacaacatactgtccaaaacgctagacagggtggctattcttacggatcaacagcgcataatgtttatccgtaacaggtgccagactgtataactatccgcgaatacaacatgcaaaaggagtgcacact

SEQ ID NO: 87655 - DNA, 367 bp, Glycine max
  Clone ID: PAT_MRT3847_50160C.1
gggcatttaacatattacaggccataacattgagaaaatacccagcaaagatgtcgctggccacttgggtttgctttgtaggagcacttcaaagctctattgttgcaatcttcgcagaacgccaccaccctcatgcttggtcccttggttgggatacacgactctttgctcctgcttacgcgggaatagttacatctggagttcagtattacatacaaggcatggtctcaaaaattatgggcccagttattgtgactgcttttaatcccctgcgtatgatcattgttacggccttggcctgcatcatcttatccgagcaactcttccttggaagtattattggagcagtagttgtggttcttgggct

SEQ ID NO: 87656 - DNA, 281 bp, Glycine max
  Clone ID: PAT_MRT3847_50161C.1
ctcgaaaccaaatcctccataaaacaaagcatcgtcaaacagtgattcaaaggtgttttccttacaatgactaccactacccaccccctgccccattctacaaccctttctatctacaaaaatttttcttttttctagcccacattttcctgttcttcgcctccctcctttttctctatgtcaccattcttacctgtctttgcttctttcaccaaacagccacccccttcaatcccttcattttcttcatcttttctttgccataccttaataccattttt

SEQ ID NO: 87657 - DNA, 482 bp, Glycine max
  Clone ID: PAT_MRT3847_50162C.1
tgggttttgccttgttgctttgcctgctcgtgtctttgcggctcgctcctgtcctagtctcgtttctcttttttaatccttgtctggtgccttctgggcccgtgtttgtctttaccggtcttcttttcttggtagttttcgtggtttggcggggtcgggctttcccgggatatgcttcgggggatcttggtttttctgccctctgtgtctggcttcccggtgtgggacctgcggacctgccccgggttcggggttctgctcttctgttggctcccggctgcgtggcctgacaggtttaccctttttcccgtgctctttgccgcggcgatgcctcgtgtcttggtgtgcacctgggctgatccttgctgggtcttcctcctttcgccctctggtgcctcctctatccccgtggctttctttgccgcaggggtccttgccttggtctaactctagccgaggcttagcttgggtctctctctggg

SEQ ID NO: 87658 - DNA, 277 bp, Glycine max
  Clone ID: PAT_MRT3847_50163C.1
attttatttgaggtatgccattttgaagactgagagattaaaatataatttggttgcttttggttctgaacaaataatgagttcttttatttgaggtatgccattttgaagactgagacgttggagttttatcctagaggagaaaggaatctttgggaaagtcagtattttatatagcaaaaatatgaacctcaaactgaatcctctaaaggccccatacaatgaagtagacattggtggaaacatttacacccagtcagcttgaagagtttcaaat

SEQ ID NO: 87659 - DNA, 719 bp, Glycine max
  Clone ID: PAT_MRT3847_50164C.1
ccacgcgtccgtacggctgcgagaagacgacagaagggtcattttctttttcacttaatttctatcttttttttattttcaaaactcctacattgttttcccccctttaaattagggctaggttgttggatcttgcttcttggtatcgttttattttttctttatatatttattcggttttcggtggacatcgatagacgactagtcaaccaagagcctcgtcaattgaactccgaaagaaacatatttttatgggctgagaaattgttgttttttacggctatgatgggttgagaccattttgctcgtaatcttaatgaaagtagaaaaaccgtttgaaccacgaatcttatgttttgtaattaatcatgttgactacgcgagggatctgcatttgcagctcttgacgagcaatggattttgtttaaattttagctttgagaaatttccagcaatattaagcaggagagtttggtccaatttttattttgttttgcattacctctcgtgaagttgatttctttttttattttacaaaattgaatgagaccaatacagtaacaatagtctctgtaaagttctaactgataagggtcttgaagttgattttctaatttatttggtaaggtgttgcgggttttgcttgctatttgccctgaggggcaagatttgccccctgctttgttgtcctaaaatgtccttacctataatatgaagcg

SEQ ID NO: 87660 - DNA, 223 bp, Glycine max
  Clone ID: PAT_MRT3847_50165C.1
catatacaacacaaaactatctttttcttacacttttgtaactgctttttctatggtctactcggaggggggcgagggcgctcaacatacaacaccttttgatcttaaataaatcaccccttacttcacaccatattcctctcctataatagcctatttacatatattacataccataaatatatccttcctattttggcacctctgattaaattataccact

SEQ ID NO: 87661 - DNA, 1867 bp, Glycine max
  Clone ID: PAT_MRT3847_50166C.1
agggttgtggtgttcattctagttgaaccctcggggctccttatcctctccaattcatccgccgtgttgctcaagaacatgaactaatccagcagtctcaggccagagaggtcggtgagcattccccgcacgctggctttaatctttgattttcctccaaaaggggaaccctctccttcaccaaagggtcctaaaactccatcacttcatcaaagtgatcaataattgtaaggttttaattaaattgtggttgcaattacaaattggagcccatttcagcttttggggtggtcaaattaaggctcagaaccctccaaatgttgtggctcctgtggtggttacaaattgcaatttaaaacctcagactagacccaagtagcatgaaaattatttttctctgtttcgtgtaaaggctattgtattgcaaaagttgttaaaaaagtccaaagttattggtttgtgggcatttaattcgagaaaccggttcagtggttcatcggcgatgacgctaccatgagtagtagggaggagggtatgaacaaacataagaagaataagaataaaattaacaacgatgttgttgttgatgttgatgttggtgaaggtgatgtcatagaaggtgtagagttttatagcaacggggatttttatgagggagagtttcatggaggaaggtgtagtgggagtggagtgtaccactattttgagagtgggaggtatgagggggaatgggtggatgggaagtatgatgggtatggaatagagagttgggctagggggagtaaatataaggggtgttataagcaaggtttgaggcatgggtttggggtgtataagttttacactggggattcctatgctggtgagtggtgtaatgggcagagtcatggggtgggggtgcaggcttgctctgatgggagttgctatgttggggagtttaagtttggggtcaagcatggacttggatgttaccatttcagaaacggagataggtatgctggaaagtactttggagataaaatacatggctttggtgtctaccactttgccaatggccactattacgaaggttcatggcacgaaggtcgtaggcaaggttatggcatgtatatgtttcgaaatggtgatggaagatgtggtgaatgggatgctggcaacctcaaactctctctaccaccacaaaatgatgctatcattcgcacagttcaggctgctaggaaaacagctgaaaatgctataaatcttccccggaaggatgaccacgtgaacaaggcagtaattgctgcaaacagggctgccactgctgctagagttgctgcagtgaaagctgttcagaaccaaatgggtggaaaattttgcgatattgatgtctgagtttaggtgttagctagcttttgtttgaaaattgtaaatttttactagtagtaccagttttaagtacttggaagatgctaccccggtgaggaaaagctcattggaggttgaagagtatgttctgatgtttgtttcacaacacaacatgtacataaacccatgtatatcaatgaaaagatgcattttcaaaaattttcttgattaaaggtttttcaaaggaacgtggttgggggatcaaaggggctaagtgggggtggctgcattgttgtggaaaccaaagtgaaaaaacttgcatgcttgatccctctaaataaaggctattataaatgctaccttcactttttggcctagagaatgctactatcctgtatgagatgtcattctaaatttgattagcacgaggattggctcttctttttggtgaaggaatccatgttaggattgtaataatagtattttctattccatcctcttaagattgtgatatatagtc

SEQ ID NO: 87662 - DNA, 373 bp, Glycine max
  Clone ID: PAT_MRT3847_50167C.1
tttcggccgcccttccattactttggggctaggggtaatttgccaagacatgcctttgattccatcaacttcagataaatatacatatctctctaatagaggaaaaagacataatattcttggcatccaggaaatttgatcccacttgtttggaacaacaatttaactcgaattgatctaagactcattaatcgggcattctgcagtcctttttaaccctccgtccacccattgatgctacttaatctgatcatggacttcgcaaaagccccataaaaagcccttcttgagggggcaaacctttgaacccgaattttagtgtctggggtggccagccaaacttggtcagaagaaaacaagcctttctgttgga

SEQ ID NO: 87663 - DNA, 245 bp, Glycine max
  unsure (1)..(245): unsure at all n locations
  Clone ID: PAT_MRT3847_50168C.1
cgcagacgcattgantgagagagagaagaggaccggaaagatgcgtcgtgggttgatttccatttacacgttcaantctccttcgaccctttcaatggcatctatccacagccacagccacnancacacctcctcccgatnacgccaccgttcggnaaacgctcctctccttcaacaatgactggaagcgcgccctcgagttcttcaactgggtagaagagtcccaattcccagttccatcactc

SEQ ID NO: 87664 - DNA, 394 bp, Glycine max
  Clone ID: PAT_MRT3847_50169C.1
aaatttagtcagcaatgcggttaagtttacacatgaaggcaaagttggaataaacctttatgtcgttccagaaccaccttttgccaaagcagaaggccatcaaaagatgatcacagaacagtcaacaaattcagcaaatggggtgaaggaagagaaacgtgcatcaacgccgcgaagcagcagcgatcaaaattgtcttgatggtcagaaacacaatgaccatcctagccaaaatcatgcattcaatgatgaatgtagatcttcagttaaaagtgaatgctcaatgaatggagatactgacgagcaaacgcattcaactgaaactgtgtggatacgttgagatgtatatgacacaggaatcggaatacctggaaaggctatacctactttattt

SEQ ID NO: 87665 - DNA, 775 bp, Glycine max
  Clone ID: PAT_MRT3847_5016C.1
cgacagaggcatccatgtcgagtcaactgcttctctctaccctctctctgttgccaagattttgagaaaactcggggagattgagaaacccggtcttgtcatccttggtaaacaggccattgatgacgattgcaatcaaacaggccagatgatagcaggactcctcaactggcctcaaggcacttttgcttctaagtaggtggtccttgacaaagagaaacaggttgccacagttgacagagaggttgacgatggtattgaaaccgtgtgtctaaacttaccagcagtaataacgtaagtttgattcttttaagtctgctgcatcaaccctatctatattcttaagaagctttgcccttttgcactttctctctttggtatatatgtatcacaccgcatggtggtggcctaagatggatttaatttccttttctctgtttttattttccactttcttttcatttcattcataacttaagttcaaattaactcattggatcgtgaagcaacctataatactgtctaaaccactcagtcagaaaagctttctctttgaatgatattgccagtttgttttgcttggtgtgattataaaaacaaaggaaaacatcatgttaaatgtataatgaagtactggattgtagttttcattttatttttacatcgttttgtgtgaggacatttaaaatcaaaagtgtggtagaatctggtttttaatgctatgtttttggtttaatagttacttgagattgaaggaaataatattttcatgact

SEQ ID NO: 87666 - DNA, 797 bp, Glycine max
  Clone ID: PAT_MRT3847_50170C.1
atttagatataaataaaaaagcaagaaaagattggtgcattatagaaatccctttagactttagtttagtgttgcataatataattagccatcatcaccatgaaacctctctctaagctcttaaacaagctttgtgggaaaatgataatgctattagcatcccttctaatagagcttatcattctcattcagaagctaagggaatcacgtcccatcagcacccgccaatacatcaaactcatcgagaagaagaaccccacaatttgctacaccaaaagatttaacttgaaggcagagcacgctacagagtgcagggtatgcttgtccgaattcgagcaaggggagaagctgaggaagctcaaatgccaacacacgtttcatagggattgtttggacaagtggttgcaacagtactgggctacgtgcccactttgtcggaaacaggtgttgcctgatgatgttgtgttcaagcaccgtcagcatcagaatcaaccagaggctgcttctaatgggaatcatgacaatcttctctatcttttttcagcatttcgtggtggcaacacttaatttgaacagataacaaccctctctcaatcaccttcaacatatatatatatatatatatatagtagtttagtactatatagctaaaacaaaaccacctaattgttttttatttttagaagaaaaaggattaatttgttattcttcctttactaggattcctcggaagaatattactatggatgtacaccatatatatagttacagatattgaaagattgatgttaactttg

SEQ ID NO: 87667 - DNA, 591 bp, Glycine max
  Clone ID: PAT_MRT3847_50171C.1
ggtgaaagcaattcaaagaaaacaacacattctgaggctggtggaatgaaatcaggcaaaggaaaaccttatccttctcaacaaccagatcatgatactggcgaaaacagaaggcttacaacatcacatgtcagatgaaaatctcttccttctgagccaacaactgcagtggaaacatcaaaaaggggcatacacgaacaatttccttagaatcaggaattcgcggtggtggttcatggcgtgtgcatccaaatctacccgattatgatgatttgagagcccgtcttttagctctagtgcaaagatatgaaacaaaaagcttcactagcaccagttagagatagaacttgatattccctggatgagagcatctttagatactatcaaaggaactgatatctcttatattagtagttatataggattgaagatccttctctttgtcctgtctcagcatatgtagacatttaagatagtttctatgattcattatctatatatcatgtgtaggattcaaatcacattattgtatagcttaatgatgtcagattatagggtcaccctcagggactagttcctatatgtgtacat

SEQ ID NO: 87668 - DNA, 519 bp, Glycine max
  Clone ID: PAT_MRT3847_50172C.1
ttcccttgtcatgctaagcgcgctaaaactgcgcttagcggtggatgcgcactgagcccacagggtccgcttagcgcgactactccttttagcacttcaagattttagcctcttttgacttgaaattgtacagattttctcattaattcacatgggagatactctaaggacaactattcaaacaaaacaagatttatatataaattcctacaaaagaactataaattgaggaattatacaagttttagaaaatgttttctatacaaaagttagtcatatacgacgactaacagatttactcagaaaaatggcattgattatagagaggaggcattttaaccggtctcacgaaaggattctttcaggattatcatgacattagtagcccattatgacttgaagctacatcagatggatgtgaaaattggttttcttaaaggagatttagaagagaatgtttatatggatcaaccaatggggttttcaattgatggaaaggaacatatggtgtgcaaatta

SEQ ID NO: 87669 - DNA, 1344 bp, Glycine max
  Clone ID: PAT_MRT3847_50173C.1
ccacaatttggtatgctagggtttcggctcgatgcagcgcttagtggcgcagaaaaataaaacctaatttaccaaattcagacacagagattctcattcctcaagatcttctcatttcttgtctcaaattaatcctcaaacttgcctctctctgtctctctacaatgtgctccatttcctcactccaccaaaaccatgtctaaggatattgctaacatgaaggactcttggtttttcgacaataactttaatggtctgtcagatgagatttttgatgatgtcatcaacttttttgatttcccgatggaagacgtgtatgcttatggtgtggaagaagactgggatgctcgaagacgatgccttgaatgccgtcgatttgatgtgggatgatcaattaaaatgccttgaagacccgcgtgttgatgtttatacagcatcatcagctgggttgtgtgccaaaactcaaaatgaaaagccccaataaaacagctggcaaaagctcctgggaaatgatatggaaagaataatcccgctgggaaagtcacttggaccagtatatggaaagaccattactcaccctaaagccacatccaatggaaggtttttgaaagtagcagttcgtcctcagttgagaattccaccttcgatcgacctgtcatcccagtgaagcgggctcgtagtaaacgtcagcgtccttcaaacttcagtcctctattttcaattcctctcatcgttaatttgccggctgtgcgaaaagatcaaaggacagcagcctctgactcagcttttggaacaaatgttgctgggaatctatcaaacaaagtaaaaaagcagaagaaaaaggatttgtccctgctatcagatgttgagatgacgagatcctcatcacctgagtcaggttcccccagaaaatgcatgcattgtgaggtgacaaaaaccccacaatggagagagggacctatgggtcccaaaacactgtgcaatgcttgtggtgttcgatacaggtctggccgcctctttcctgaaaaccggccggcagctagcccgacttttgtagcatcgctgcactcaaactgccacaagaaggttgtggagatgagaagcagagtcatccaggagcctgttaggtgttctatgttggcttcatcaaatctccatggaaattctgtaggataatttttatgtttgattacatttgaggaagaaacggtagtcttaaacaggatccttcttgtttgttgttttcattatagtctaatgttatattgcttagcattatttgtttaattaatgtaaattgattggtgaaataaaaaggtagtagcaggttagtgcttgcccagg

SEQ ID NO: 87670 - DNA, 376 bp, Glycine max
  Clone ID: PAT_MRT3847_50174C.1
tatatgcagtacctgtacctcataatgtaaaaccttatccttaagtttttattaaattcatagatacaacacatacacaataaattccatgtatcaaaccgaaagaaccgttcgttcactttactgatcgagactccatttcaggaagcaccagcgcatgtggaaagtaatcaaattccattttttgctcatcttaattacgggcgtggtagaattaaactaattatatattattatggcgatgatattagcgacaaaatcgaaaaactggaacaaaaaatgtggcaatctctcatggtttttgtacgcaccgaaagcttgtgattatgcatccacagcatgaattatcatataaattggctgcgcaaattttgct

SEQ ID NO: 87671 - DNA, 853 bp, Glycine max
  Clone ID: PAT_MRT3847_50175C.1
tgaaaatttggtgtgaaagatacggactactattatcgaaagggaaataaatatttattgagaggaggatgagggtttccgatagtagcagtgcttagtggcgcagaaaaataaacctaatttaccaaattcagacacagattctcattcctcaagatcttcttcttatttcttgtctcaaattaatcctcaaactttcctctctgtgtctctctaacaatgtgctccatttcctcactccaccaaaatcatgtctaaggatattgctaacatgaaggactcttggtttttcgacaataactttaatggtctctcagacgagatttttgatgatgtcattaacttttttgatttcccgctggaagacgtggaagctaatggcgtcgaagaagactgggatgctcaattaaaatgccttgaagacccgcgtgttgatgtttatacagcatcatcagctgggttgtgtgccaaaactcaaaatgaaaagccccaacttggaatgaagttctctgcttctggaaatgggatttccccaataaaacagctgggaaaagctactggaccagtatatggaaagaccattactcaccagaatgtcacttccaatggaaaagatttgcatcaattaacctacacctacagcccagtttcggtttttgaaagcagcagttcgttcagttgagaattccaactttgatcgtgtcatcccagtaaagcgggcttgtaaaacgagcggccttcaagcttcagtcctctatttctccctttcatccttaattcgtgagtattctgttcacaggtatggcgtgtaagaatggagagtgggatatcttttaactgcctaaattatttt

SEQ ID NO: 87672 - DNA, 1071 bp, Glycine max
  Clone ID: PAT_MRT3847_50176C.1
gatttcttcttaacatagtatatttataataaatcagttacagaaacatagtttatgatgtactatatttcacattttaattaatatttcgactacacgcctaaacagcactactagtagacggtgttagatctagtgtgtacagacaatcaaacaaacctttcttcgaacaccttctctgcatcgagcgcgccttttactttgaactcgggagtggagggagcagagaacaccaacaccatgtttggctccgctcaaccttcttcttctcccttcggcaccccttcttctacccctgcttttggcaccccttcttcgacccctgcttttggcaccccttcttcgaccccagcattcggtaccccttccttcgctaccccttcttctacccctgcattcggtaccccttcttctacccctgccttcggttcttccctcttttccacacccttctcttctcaacagcaacaacaccaactcccacaacaacagcagcaacaaactcctctgtttcaacaacaacaaacttcttctgctttcggctttcagaattccctcgcactcgcagcaccgcaaccctcgctcttcccaaatgctcaattgaccactcagatggctaacgttgcacctgttcctttctccctcgccgatcgcgatgttcagactattgttgatgcatataaggatgatcctgggaaccccaagtacgcatttaagcatttgttgttcagtgtaacagaaccgcagtttagagtgaagcctgccggtgtatcagatatcatgtgggcggaggcaatggggaagcttgagggtatggaaagtgctgatagagaacgtctgtggccacaacttgttcagggttttaaggatctttcacaacgccttaagatacaagatgaagtcattgtttctgatgcagagagattgcgtataacccaaagcaacgtttaaatgctccaaagacattttcaagctgatactcttccttggattataagactgaaacgaaaagaacaaattgtccagcgacgttttttagcagtgatgagaatagtggaggcattagaagaa

SEQ ID NO: 87673 - DNA, 387 bp, Glycine max
  Clone ID: PAT_MRT3847_50177C.1
gctgctgttgatgttggaactttgagagacccccagcacgacaatgagcgagttaaggaccctaagtggctgattgttattggtgtctgcactcacttgggttgcgtgcctgttgccaacgctggtgattatggtggttactattgcccatgtcatggctctcactatgacgcatctggtcgcatcaggagaggacctgctcctctcaaccttgaagtcccaccctatgaaatcaaggatgatggaattgttgttgtaggataaaccaatttttagacaattgtagtaaattgcacatgaacaccaaatattcatatcttgcttttattttctcggaaataaccgtgttttcatatatgaccgttgggatttaattaatacaaaaaa

SEQ ID NO: 87674 - DNA, 328 bp, Glycine max
  unsure (1)..(328): unsure at all n locations
  Clone ID: PAT_MRT3847_50178C.1
aaagaggggggaananaanaaaccggnncaggcggatagcgccacagaggnagccaacaaaaacgccgctggcggnnaaagngangacannaaaaagcaacaggaaaacacaaacgccaacggagaagacaagggnagacaggagcgcagnggggggaacgaagggggaacgaagaaaaaaaacggaaatttttttttttttaatgatgagaaaaatagaaatgatggaattttttttgtctatggtattagaggggatagggaaaaacatgggaattttttttgctatgtcggagaaaatggtagggaaaatgggaaaatggagggc

SEQ ID NO: 87675 - DNA, 352 bp, Glycine max
  Clone ID: PAT_MRT3847_50179C.1
tttcattttacagcctcagactaccgcaagggaagtgggaacgatagagaaaatgctggatagactctcatgccccgactgcctgatacacagggcgctgccagagcttgagactaagcataccactccggatgatccggaacgtgggatttctgtcgctcgttccagaggatgaaggaccataggaaaggaggcatgaccctatacgagagtgcgcactgaaccatagaagaattccacgcctcagctaatgagtaccactaccaatggagagtgtgttctcggaaaagatctcgcaatggttaaagttaatgtagcatgtgctgctgatggcttgacatcaagttacact

SEQ ID NO: 87676 - DNA, 483 bp, Glycine max
  Clone ID: PAT_MRT3847_5017C.1
gagtttgtggacacacccaacgtttatgattgataacttgcaaaccttactgtacaaaaggatattagaagtctataaatcttccctttacatatgccacatacctgtaaccaaaaaattttacatcaaatatgttaaacaacataatttatatccttaattttggcagacttaacctctaattggattgaaaatcatttaaattaaggggaaattatggtacttaattttgactgcccaacctttcaaaggattgaaaataacttaaattagtggaaaatattgcacaggaaatttagtcccaaatgagggaaactgtctttggctggaggggcatctaaatcttgcatttttggccgtgagccctcgttaaatactcatgccttttaaaatttccgctagaccgaaaagaacaaaatggcttggaaactaataatttatttatgaaaaggcattctaaaaaatttacactattatgaaacc

SEQ ID NO: 87677 - DNA, 203 bp, Glycine max
  Clone ID: PAT_MRT3847_50180C.1
ctttccttttttttttttttttttgtttgatatcctttttgcatgactttgattggatagctcgtgcatatgttgtgaagcttctgaagcatctaaaatagtaattaaaagtgttacccgccagccatgattaagagaagttcgcaagtctttgctgatcgatcatggtagaaggtgaaatcggtggcactcttagagaggaa

SEQ ID NO: 87678 - DNA, 1170 bp, Glycine max
  Clone ID: PAT_MRT3847_50181C.1
gtcggctggttctgccactccgcccttctcgtcccatacttctcgtggaagatctcccacggcaagcaccacaaggccaccggccacatggagcgcgacatggtcttcgttcccaagacacgcgaggtatacgctacccgtgtcggcaaggcggtccacgagatctccgagctggctgaagagacccccatctacaccctgctccactccatcgtccagcagctcggtggatggcccatgtacctcgtcgcgaacgtcaccggccacaacaaccacgaccgccagatcgagggtaagggcaagggcaagaagaatggcgtctttggcggtgtcaaccacttcaacccctccagccccctgtacgagaagcgcgacgagcacctcatcctgctctctgatctcggtatcggtcttactgtcgctgctctcactgtcatcggcaagacctacggcttcaacaacctgctcgtctggtacatcctcccctacctctgggtcaaccactggcttgtgatgatcaccttcttgcaacacaccgaccccaccctcccccactacgacgccgacacctggacctacactcgtggtgccgctgctaccatcgaccgtgagtttggcttcatcggacgtcatctcctccacggtatcgtcgagacccacgttcttcaccactacatctccaccatccccttctaccacgccgacgaggccaccgaggccatcaagcccgtcatgggccgtcactaccgctctgacaccaaggatggtaccgtcggtttcctcaaggctttgtggaagagtgcacgttggtgccagtgggtcgagcccagcgttggtgccgagggtgagggtaagggtgttctattcttccgtaaccacaacggtctcggtacgccaccccagaagctcgatgctccaggagccaagaaggcttccaagatggaggtcggccctgagagcgacaacgagtaagcgacgattacgactgtttatgttttagagcggattattctgccacggcgttcgggagccgcccgacgaggctaggcactttgcttctcggtgtggcgcatggactagacgggccagtcaaacatgagcctggtgtagtttgtagatttgttgtagcagacccttgagggttcgaacaagttcaaaagttcatcatcc

SEQ ID NO: 87679 - DNA, 662 bp, Glycine max
  Clone ID: PAT_MRT3847_50182C.1
ggctgggaacattttttctcattgtattatgtcaaatttatcagttttcagagcatttgcagtagcaacaccaaatgtatctagagaatgaaaacctcatgaagaactactcgggatcactattttttgccccttaatgttacaagagttacttctgcacctttgaaaatgaaaagatgcctgtctgattatatgcactgtcccaattcttcccgtcaaaatgcctgatttcaacgtgtgtcaaggttcccgggtcaacacacctaaatgtaactgcaaccccatctgggtttgagcgtgggcaatagaatgaggttatgccacagattttacagaatgtgtgctttgcagtgtgagtgccgaaagtgtaagttgtaagaaacttctcagaatctcccaaaagctcaaaattgttagcaggtacaatgaaatgagtattggctctcatgtagcaggttgagcagttgcaatcccatgccacaacactcgaaggagcaaccactttccaccttacactcttacagtgacagcctccagtatgcaccactttttcaacatccatttcagggttgtaaacaaccaatgatcataaatgaaatgctggcttctggagtcacaggctcctgtcaacttatttgcagggtggccggctcgcaatcacc

SEQ ID NO: 87680 - DNA, 329 bp, Glycine max
  Clone ID: PAT_MRT3847_50183C.1
gcaagaataccaaagagttcaagcaggtggaagcagagattaggcctcaggagaggttcatctaagaaagataagaataagaataatgaggggtttcagcagactagagttgatgatgagaaagggttctgttctggacaaggagacaagactgctagctaagacaatatgggaaatgttaatttcatgaaggtggtgtgtaaggtttaattaggagcaagtggtgaaaatctataggagcagcattaatttctcaaggaggggatgacattctataatatctaaagacattaattgatagaattttggggcgctgacttcctttttca

SEQ ID NO: 87681 - DNA, 924 bp, Glycine max
  unsure (1)..(924): unsure at all n locations
  Clone ID: PAT_MRT3847_50184C.1
cgctgccgcgtcgtagctgggatttggctcgagctttgttctccgctaggttcgtcattcacttgcattgcacgccgccacctctgcggcttcgctgtagtcaatgaaccagaggtccctctgtaaaaagggtttattgtgttttggtgacacattgaagctgagatagaaagagggatggagggttcgcgacggctacggggacattctataggagttttcagtgaagggattggtttagttttatttcgctggtcgactcttctaacggctgttgagaatgaatggggtggccacgagtcccgtgtcaaagccgatcaacttgccagtgacattctttcctggttcactcaatccaaagagccactttatattgatgacttagaagacatactggatcaaggtatgctttctctcaatgtagaggtggaggatggcagcattgaagaggtagctgaaaaactaatggttatgcacgaagaattcttagaagacaattttagttctttcgaaaatctcaggaaagccaatcttgagcatgctgctcgtcctcctgtaccacagattgtaaatgatgatgaagacgatacagatgaagatgttggtaatgatgaaaacatgattgtggatgataattcttcaaacatgaatccggagacttcaacatctgttgcaaacacgaattcagtgaacaggtcagttaatggacctctgccaaaggtttcaggtgaagcagatgatggatgggttgtagtttcaaacagaagaatgagggtagaaaaaattagataaatatatttaaatttttgttttatgatgtgctgntgnctttctctgttttcttgagcttcttgatgtactacaaaccttcttgaaggggtgtaactatgtatacgaattttttgttttactcatttttagtct

SEQ ID NO: 87682 - DNA, 471 bp, Glycine max
  Clone ID: PAT_MRT3847_50185C.1
ggtgctgctgtgtacatagaatgcagctcaaagactcagcaggttcttatttttcattgcttatagctagacaaggttttagataccatcaaagcaagttgcactagaagggtcttaatacaatataaaatgataccaaacatcttcagcttttggaatagttggttttaagtattacaagggaattgttatagcaggagatgtgccaattattgtttaaatattaactgcattagattttacaaaaccgatatgcccacagcattttttatgcaacttttaacagatatttgtacatgcttaaacggtagaatagcggttcatcaaatttccttgatcatttcacctaacaaagtatcaatcaagaataaaatatatacagttaaaacatcctgtttaacgcagattgtatagtaaccattgcactttagtcattttgctgcagatgtcagaccactcttgtaaattatt

SEQ ID NO: 87683 - DNA, 765 bp, Glycine max
  unsure (1)..(765): unsure at all n locations
  Clone ID: PAT_MRT3847_50186C.1
gttcttaagcattgaaatttgtcttgtagggtggctatgttgatttatgccgtggtgtttggaggatccagggatctcttgctgtgtctaggggaattggagatagacacctagaaacaatgggtgacagcagagcctgagaccaaagttctcagaattgaacctgaacatgacttgttaatcttagcttcagatggattatgggataaggtatagaacttgaccatttcacttcaatgttaatagtgtctttttaagtattttttaatattgttgctcatgcattggactgagtcactaaacaagtttgtttctcattctcatttcaggttagtaatcaggaagcagtagatactgctcgttcttttctcgtaggcaacaacaaatcacaaccattgctgctggcttgtaaaaagcttgtagatttgtctgtttcacgaggctctttggatgacacaagtgttatgctaatcaaattggagcactatatttaaagttaccttagtacaacagaaggggaggtagtgcataaggttttagattattgcagttgagatcgcattgaggttaagattgcgttgcagtttgcgactgtgaacagccttggtggtgcctgatggataagagtagctgattcttttctgtatatataaatctgactacattattggaatttttttgtacccgcatagggagagggggatattaacantaacatttagtaattatttttttcattgaatatgtatgctatgagcagcatac

SEQ ID NO: 87684 - DNA, 700 bp, Glycine max
  Clone ID: PAT_MRT3847_50187C.1
gatcacaagggcttcaagggaagatgaaagggacagaattgagaactgggggtggctatgttgatttatgccgtggtgtttggaggatccagggatctcttgctgtgtctaggggaattggagatagacacctgaaacaatgggtgacagcagagcctgagaccaaagttctcagaattgaacctgaacatgacttgttaatcttagcttcagatggattatgggataaggttagtaatcaggaagcagtagatactgctcgttcttttctcgtaggcaacaacaaatcacaaccattgctgctggcttgtaaaaagcttgtagatttgtctgtttcacgaggctctttggatgacacaagtgttatgctaatcaaattggagcactatatttaaagttaccttagtacaacagaaggggaggtagtgcataaggttttagattattgcagttgagatcgcattgaggttaagattgcgttgcagtttgcgactttgaacagccttggtggtgcctgatggataagagtagctgattcttttctgtatatataaatctgactacattattggaatttttttgtacccgcataggggagagggggatattaacaataacatttagtaattatttttttcattgaataatttatgtaatgagcagcatacaattaattaatttatacattatttatttagtt

SEQ ID NO: 87685 - DNA, 1714 bp, Glycine max
  Clone ID: PAT_MRT3847_50188C.1
cctcgagccgagccgaatcggctcgagctcaaacacacaagccaaacccaaacacaacaacacaaagaaaaaaagagcacaaacagaccaattccaacggttgaattttttggctgaagacaccccaccgacgttagtcaaataaaacatgtcttgctccgtcgcggtttccaattcgccggtgttctctccttcttcttccctcttctgctcgaagccctccatcatctcttcttcgccggaatccctctccctctctctctcgcatctcaaaccttccaactcttctacgacgtcgtcttgttcttcgccctctgctgctgcttcttcatcttcttctccttcttctccgtttcgacttcgccttcccaagcctcccaccgcgttctccgcttcttcttctgcttcgtctacctctccgaactgcaccgttttgaagaggaagcgacccgctaggttggacatacccgtttcctccctcacctttgcggttccgcccacgccctccgtggcggcgcgtgacgtggttgaggctgaggaagatgggtttggggtgtactgcaagagaggcaggagggagtacatggaggatcgttacaccgctggggataatcttcgcggagaacacaaactggctttttttggcatatttgatgggcacggtggtgcaaaagctgctgaatttgctgcaaataacttgcaaaagaatgtgttagatgaagttattgtgagagatgaagatgatgttgaggaggcagtgaagcgtgggtacctgaacaccgattcggattttctaaaggaggatcttcatggtggctcttgctgtgtgacagcattgattaggaatggtaacctcattgtgtccaacgcaggtgattgccgtgctgtcattaacagagggggtggtggtgaggctctaacatctgatcacaggccttcaagggaagatgaaagggacagaattgagagcctgggtggctatgtcgatttatgccgcggtgtttggaggatccagggatctctggctgtgtcaaggggaattggagatagacacctgaaacaatgggtgacagcagaacctgagaccaaagttctccgaattgaacctgaacatgacttgttaattttagcttcagatggattatgggataaggttggtaatcaggaagcagtagatattgctcgttcttttctcgtaggcaacaacaaatcacaaccattgctgcaggcttgtaaaaagcttgtagatttgtctgtttcacgaggctctttggatgatacaagtgtcatgctaatcaaattggagcactatatttaaagttaccttagtacaactaaggtttcaagattattgcagttgagatcgcattgaggtcaagattgcgttgcagtttgtgatttttgaacaaccttggtggtgcctgatgatggatagagagtagctgattcttttctgtatatataaatctgactaccttattggaattttttgtacccgcgtaggggagggatattaacaataacatttagtaattatttttttcatagaataatttatgtaataagcataaagttaattaatttatacattatttatttagtaattcatttattttttacactgaagttttctaatttgtgatggattacagtttcccttttaagtacataaatgcaaaagttgttgtagaatgattcaatcaatgaatctctc

SEQ ID NO: 87686 - DNA, 563 bp, Glycine max
  Clone ID: PAT_MRT3847_50189C.1
acatacaaatgaactggacttgaattactcatatgaggaacgagaaacgcatttatacaatcttgtacaagctaaattcaatcataactactactaatagctagagacagttgtaactaccaactgactgagctgtattaaagctgtactgtgatatttcgggtgaattttttcgtaggagttcagattgaacctagtttcatacgatacgagcaggccaaatattgcccaagagttggttcaaattgaacacctatgtcaaacatttttttttatgaaaggcaaaattgtagctacctctgaataaaaactaggatcatgaaacagtacgtacttagtatctattacaaacaacagcgcctaggtaaacgtactccgtttagggaacaaggcacaaaatttgatggaaggctaccactatactactaggtgaacaacctttgtgcgacatggtgtcaaaggctgaaactgggatgacaaggttgataccatgtactggggcaacactttgtttaacatcccacgctgctttttcttcgacggggcaacgggctttaaccata

SEQ ID NO: 87687 - DNA, 1925 bp, Glycine max
  Clone ID: PAT_MRT3847_5018C.1
gtttatttggcatggcatgagcaatagcaaaccaataaagaagctttgctaagtggcgacaatgattacaaccccttcttctgttctcttattactttcttcatcatcacgaggcagaagaaaataaacctaaactttggaacccagatgatgtcttcggattctgttcttcctctccccgaaaatcccatcattgtggggtttggtggggttggagtggattttctggcagtagtgccatcttttcctaaacctgattccaagattcgaaccactgaattcacgttccaaggtggtggaaataatggaaatactatgacatgtgctgcccggttgggcttaaagccaagaataatttctaaggtttcaaatgatggtccgggtaagactatgctggaggaactagaagctgaaggggtggatacctctttttttgtggtctcgaaggaagggacttcaccatttagctacgtcattgttgacaaccaaacgaaaacaaggacttgtatattcactccaggatatcctgaaatggtccctcaagatctttcacgagccaatttgttatctgcactggatggagcaagaatggtctattttgatgcaaggatgcctgacaatgctcttgtcatcgctcaagaggcatttcaccagaatatatctatcttaattgatgcggaaaggcctagggaaggattgaatgacctcctgagtttggctgattatgttgtatgttcagaaaaatttccacaggcctggacagaggcatcatccattccaagagcactagtttcaattattttaagattgccaagacttaaatttgcgattgtaactttgggaaaagatggctgcataatgcttgagaaatgtgtggatgatgagggttctcacatagaagaaatggatgtagacagctgttttgtatcattaacaacgagaaaggaagatagcacagccatgccaacttgcataccctcacctgttacaaaattaagagccgaagggatagaagaatctgtgtgtgggaggttatattatgggacatctgaaaagattccaccatcagagcttgagctcgcagatccataccgcaacccacggcatcctttactgagtagagtctaaattgttcatcaaaatttccagtgtagtatgcaagaaacaaggcttcagcatacaaattgtgctgttgaatcccagtttataattaatcatttagcccaaatgattgtatttttatgtttttagtagctaattgtataatttgagtgtgatagatttgtaggacaacatgttagttgttgggaaaaattacccaaattttctttgaatcagattttgtaaaaggctaaataaatgttgaataacaacaaacacagttgataagagagttcagccaattatacatatgttttatggtttgtgaagataaaaaaactaacctctgtatattaattatattttttgttctctcccattctatattagatgccgcaggaccaataaaaaaaccgtgtaaaattaaatattgatgtacattgcttatatgggtataagttggaccgttgtcgcttaccctttggtctgtgttgcagcttttgaggattgaggaggaactgggttttgcggctgtttatgctggtgccaaattcagagccccagtggaaccctattgattgtttagcccaagatcattaagcaacatttgaataagattctattgatgactgcatggcgcatgtattttttgcgaaaattaaacttggctactatcaagagaacataggtttttcgagcgtggaattttgaagcgagaaaatagggcagtagccaataaatgtgtttatggtttggcttgttataacaattatcatgtgtagtacaaattttggatgaattacgtttaaattgattttcctgcc

SEQ ID NO: 87688 - DNA, 1989 bp, Glycine max
  Clone ID: PAT_MRT3847_50190C.1
ggacagatagtcaaaagataatatcaaataaaatggggcgggggtagcaaacatcaaagaggctgtcctcccaatcacaaataattccaaaggtgacggcaatggcaaaaaacaccatacctgtgcttaagacactactaacaaaacacactctcaggtgatattcattcggcgcctgaaagttccacaaatgaggcaaggctacccaccttgcttatcagtttgaacaaaacaaaacaacaagcaatagttatcatcaatctggtaagtaaccaagtaggcacaggtttctgctacattttattacaaagctgacaaaaaaaaaacaagtgcattaaagtgaccaatgagcagattcatatgccctggactgttctagatccatataatgcctcctgccctgttgggacaggtccagctcaccatgaagttggctattgagaggctgtgaaatctgaccgagacctagatcagggaccacctcgggcgaacagttaccagaatcaatgcccttgaaaaaccacgaggtatttggaagttgatggattgatgcaccatgagatgatgcagcaagttgtgtcaagggtgtcccgttgaaatttatcatgttactcaacccaagacttggtgctgtgtttctagaaccccatgtttgatttgacagaagagagagagcacagctcgtgtcggtgaccccaatgtaactttcccctggaggatgtcccgggctggcgaagcttgtcccacccaccgaaccttgcaagaaaaggtcagatgatgtctctgagttgccattccagctaagtgtggaggtttgatttccaggagctagctcagatgatctagctgggggttctggatccccctgtttgctttggctgtggagtcagtgccctccgcgaggtgctgccccccctctatcttcccccgcgggcgtggcccggcccgcggaacctgggcggaaccgccggctcgtgcggggcttgctccgacgttctctccggcctcccgggccccctcggcgtcgtcgtttccgttcctcattcccggtcggatggcgtccggttgagaagaaaaaagaaaaaaagaaaaaagagagggtacaatctgtctctcgtagctggcttggctccattattcttggtttttggacagacaagggtgtgtttggttctctgactacactcactcactccttctctcttctctctcagtgtacctgactctgccaccttccctacccttccaccccctcttttgtcttccactttactctcccattacaactcctttcatgaacttctatttccaacttcaaccacctctttctctctcacttaactttcccttatcaaaacaaaccacaatgaataataatactaacgataacaatacactctagacacctcaccttatcactccatcacctatggcttcagacgcaaaactctcatcttctgagtccctcaacggtttgaaattcggccaaaaaatctattttgaggatgtgggttttgctactcccgctacctctcttacttcttctgctactactgctaccactgttacttcttcttcttcttcctcttcaagaaaaggaagaggtggttctgttcaaccagctcaacctccaaggtgtcaagttgaagggtgcgaagtagatctgagtaatgcaaaaacttactattctagacacaaagtttgtggcatgcactctaaatcccctacagtcattgtaggctggtcttcaacaaaggttttgtcaacagtgtagcaggtttcatcagcttcctgagtttgatcaaggaaaaagaagttgccgcaggcgactagctggccataatgaacgtcggagaaagcccccacccagctccctcttgacctctcgctatgctagactttcttcatctgcttttgatcatagtggcagagggggcaactttctgatggaattggcttcatacccaaaacttagtctgagaaattcac

SEQ ID NO: 87689 - DNA, 514 bp, Glycine max
  Clone ID: PAT_MRT3847_50191C.1
tttgatctgttccttctttccctagatttttgatttgtgctttgtggtgcattcgttgattgcaacctttttggttttggtatgcggtggggtattgcctaggtttgaagggtgatttggattttaggctaatgcttgatctggaatgcatgtgcattgttcatcagctattcagtaacaaagtgaagttgaagaggttcataaagtattttgagtgtttagattaggttattttatattcaaaacaagttatagtaaagatttcagtgagagtgcatgtttaatttgtatttgtttttagggaagaattgttcttttgttttttaatttctcagttaggattttgattataggctcttttgaaggaaaagtgaagtaatccaatcctaaacacgcgtgaagcttttgaaataaaggttttttttttcttcttcttctttcaattaatccaaaccaagcgagccattagaaatttagtaatatcctcgagtcctgaagttttggggaacaaaga

SEQ ID NO: 87690 - DNA, 143 bp, Glycine max
  Clone ID: PAT_MRT3847_50192C.1
gcacgtacgcgcacgcttcggctcgagctagcactcatcgtagtttcgcagcatagtacacggagctcgaagagctggtaaacagtcgcttcatggctgaccgagctctctgtagtaaatcacgatcggttcaaacggataga

SEQ ID NO: 87691 - DNA, 623 bp, Glycine max
  unsure (1)..(623): unsure at all n locations
  Clone ID: PAT_MRT3847_50193C.1
tgccaagattacaccaaaggtattgcaggtttgggcaaggatactgtgtgcaattccgaattcccgccttgtgggtaaatgtaaaaccttttttgcagtgacaagtgtgcgaaaagagaattccttttcaccactagaagcagttagggttaaaaaccactaccggttggatctttttggccccttttttntttttttaacccgggatcctatttgcgaaccccttttttttttgggggggcaaaaaaattggggaaaaaaattttccaaatgggggggaaacaaaacaaaacaggggggaattttttttaaaccgggggggggagtccctgggggggaccaaaatgggggggggggaaaaaaaacccccccccccccaccgggggggggggggagggttttttttaaaaaaagggggtggggggggggacttttttttttcgcccaaaaaaaaaaaaaaaaaaaatttttgtggttgtgggtttngggggggggggttttttttttttccccccccccccaaaaggggagggggagggggggggggaaaaaatttttgtttcccccccccccttttttttgggggggggggaaaaaaaaaaattttatttgggggggggggg

SEQ ID NO: 87692 - DNA, 336 bp, Glycine max
  Clone ID: PAT_MRT3847_50194C.1
aaaccgggcaaacccaatatggttttaacttttaacaggagcaaaacctcggggcttgtttgctataaccaagtctagagataaaaaatgggttgtaaaaaacatgtcatgtttaaccacctattcctttttttttttctttgcaacaaacaatataacttatgaagggggttttcccaaaaaccattcatccaacccacgttttttccgtttgtaaaaaaagccccactttttttttaaccattcataaagcaaaaccggggaaccttatgttgccgggggcaagccaaataaaccccaagtttgcttttccaaaaggtccctggaaaaataaaa

SEQ ID NO: 87693 - DNA, 252 bp, Glycine max
  Clone ID: PAT_MRT3847_50195C.1
agggcaaggagagatacccacgcaagaaacatgagtgtatcattgactgcgatgaccttcaatctccatgatgatgacccacaagacagccctaattcctgggagaagagaacggatatttttataaggggtttttaccagttactcacccatcattctttgtaccccacaaggagtgaaagcgcaattggattttctctcacaaggctccgcccgctatcatcaatttgggatatcccggaaagggcccca

SEQ ID NO: 87694 - DNA, 350 bp, Glycine max
  Clone ID: PAT_MRT3847_50196C.1
ggggaccaaaagccaaactggtcctaggggaggggttattgggccccccctcggcatgacaggaaaagaagggaaccaaaatttcaaaaaacaaagcattatgggcttattacagccaaagctaaaaggggtttgccccaaaaaaaaaagcaggaatcacccgcggtttgggggatttcgaaaaaaaaagcaaaaaacccccctcacttaggcggaaggtacaaaaaaaaactcaaaaatgcccccaaaacaaatgtttattacccccaaaggtaagggacttgccccaaaaatcaccaaaagtttcgggaaaaagggggaaacatgcacgttttaaaaaaactttaaaa

SEQ ID NO: 87695 - DNA, 467 bp, Glycine max
  Clone ID: PAT_MRT3847_50197C.1
aaaaacggggggaaaatgttccccaaaaaaaattttcccctttggccggggggaaaattttaaaaaacaaaacaaaaaacgtcccgggtaaaccaaattaccccccttagtccctacgttaaacatgaccaaaatttttttgtaaaatacaccctcgggggaaggggctcaaggtttttaaaaaccaaacaatgttttttactaaaccggaaatgcctttgattaccccctttaaaactcacataaatcccctgaaaaaccgggagaagaataaaattaggggctgttttgccatttttggggggactgcttggaggggtggctttgcgaaccccccaagggtgcttcccggggattttgggggtgatgttccaaaaaaacgcccctctgaaattggaaaaaattagggcccccagggggcccaaaatgcttggaaggctgttgctgctgttgctccctttgccaaa

SEQ ID NO: 87696 - DNA, 474 bp, Glycine max
  unsure (1)..(474): unsure at all n locations
  Clone ID: PAT_MRT3847_50198C.1
atagtattgttgatatatcatcacacattnttttagtaccaacgtctttataacaacgcctcatattattatcctctaaagtcgtataattgcatatgaatctttgcactctattgaagttttcttgtcttattctggaaactgttgtcaacgtgacatcttgatgacaactttcacacaattgggctttttcaatagttcaaatgctttgtttatatctgtcaatgggacctcatgggtgaatagttcttgaagagggaattcctctttctggcatttgttagctacgatggacaggtcagatatggcttttagccccccaaaaacagaacctttcaaagttctaccatacataatggaagtaagaccaaacgggataataggttctgttcctgtaccaattgctattgttttacctgttcccacttttgtggcttccacagattcagtaagtaaaggggcaactccactcgt

SEQ ID NO: 87697 - DNA, 329 bp, Glycine max
  Clone ID: PAT_MRT3847_50199C.1
cccacgcgtccgcccacgcgtccgcccacgcgtccgacaatttccaaccatcacgaaaagtctttcccgttcttgatcaggatctcaattttcttccttatgaagactatgagtctgagtcaccggacaatgagacagatgttgaaagctcaccaggttttctagtgaagaaaaagagggcacccagtgatcttgtagcaaaaatttctttatcagatttggtgaagtactttggtatgccaattgtagaagcatcaagaaatctaaatgttgtgcttactgttctaaagagaaagtgcacagaatttgggattcctcgcttgcctcat

SEQ ID NO: 87698 - DNA, 743 bp, Glycine max
  Clone ID: PAT_MRT3847_5019C.1
aacagtagacagagtagatacccttgaggatggggtagcaaagagacagaaagtaacatctcaagttgagccacctttgcctgatgaagttgatgatgattgggaggactcaaaggctgcaaaaagtagtgataacagcaaagcaagatcagcaagcagtagagataaccagaagcggcaagagggttttgaggaagaagtagttcaggatccacaatcagcacatctgagtagcatcagacagcaccctgatgaaattgagccgggattttataaaagagagcatgatgcaaagcaagaacctgaaagaaatcgcatgatgcttaaaggcagagagagatcatacccttacaaggaccggcatcctagctcagctcctcagttacacgcaaatacagatggatttgatggacaaaaagaaagggacaattctgaaatggattgggcacggagagatgatgatctctataacagaagggttagaaatgatgaacctagaaagagggatagggctaaggttcgagaaaatgagagaaacgacaaagaagatagccttcattctagaaaacagttggataatggtagctacagggttttgtatgaaaaagatgttgggtccagagattcaagacatagggaaagagacgagggcttgaggattaggtacgaagcagtggaggattaccgtggcaagaggaggaaggatgaggaatatcttaagagggagcatattgacaaagaag

SEQ ID NO: 87699 - DNA, 723 bp, Glycine max
  Clone ID: PAT_MRT3847_501C.1
aattcggctcgagcaaaatagtaagaatcagaatttgaggaaccctcgtctcatcgaagcaaattcttcaacggggacacacaaacagagaaaaaggaacaagtgaagaaacaaagcaaaccagtactaaccatcaagcagaagaaagaaaaataaaaaaaaaaataagacgaagaaaaaaaaaagaccgaagaaaattaaagtgaagcacaagtgagatttaattgtactattgtatcctctgacggttctcggtcctcccctcaccgcactctcccgcggatccaccgtaagccggaggataccaccgcacaccagatcctttcctctctctgtctctcacgatgaacgatttcgatggcctcttaaccaccgatttcgggttcaaaccccaaggcaaatcggcaccaatggcagcatccaaatcctcctcctcctccaacaacaacaaaacttcctctctcaacttcgatttaggttcccgatccgctcgtggcgcctccaattcctccgtcaacgccgccgccacttccctcgacgatctcttcggcgactcctcctccgtctttcgcgcctccgccgatttccgttccaagcccgtcaacgacggaccggtcttcgacaaaccggtctacgacgaagacattttcgacggcgttccgggtctcaagagctcctccaaggtcttctacgacgacgttttcgcttctggagggagcgccg

SEQ ID NO: 87700 - DNA, 252 bp, Glycine max
  Clone ID: PAT_MRT3847_50200C.1
acaccaacaagacacccctccagtgagggtatttctcttaacaacccttatccacaaaaaagaacaaaatgctcaaataccaaagcttcttacgaaggaaaacactcctgcacattacctaaacaaaggtttttttgaatcaccacctttacaattcatatcttctaaaattaacagataaaaacgaagcctttgcctcaaaatgagataactttcatttacccctttttaaagtcaccctcaccgaaccct

SEQ ID NO: 87701 - DNA, 140 bp, Glycine max
  Clone ID: PAT_MRT3847_50201C.1
ggctcgagaaacggctctcaaaacgctgattgcagtttttgcacgactgcatccataacacggggcggtgagcgagccatgggggacaaagaacttaaggggggactaaagaacagatcaagacaactagagcagacaaa

SEQ ID NO: 87702 - DNA, 253 bp, Glycine max
  Clone ID: PAT_MRT3847_50202C.1
ggacttgcaaaaagacccaccaacttcttgcagcgctgagacacaagctgaggacatgatgcataggcaagcaacaataacggctactgctgctaggacttatgctgcaggggtattcctagtcactacacactgcacttcagattattctttcaagcctactaaagctgacactacgactaaggtgttttacccgaacatgaagagcatgggtagcatgtgcctatgaatgctgaaggagcagtggatccct

SEQ ID NO: 87703 - DNA, 253 bp, Glycine max
  unsure (1)..(253): unsure at all n locations
  Clone ID: PAT_MRT3847_50203C.1
gctttatcacgtggaagtaaagaatttggaagaagaggngatctctcctgcctctgccaggctggctgaggcaggagagatctggtctgagttgcttagccgaggagagatacagagattttgggatgnaaagcttattgaaganaaaaatcgtggttttgnatgttgagaggctntatcanctggaagtaaanaatttggaanaagaggagatcnatcaggatncgatatctgctgggtatttaanagaaag

SEQ ID NO: 87704 - DNA, 170 bp, Glycine max
  Clone ID: PAT_MRT3847_50204C.1
gatccaaatcaactctgaagttactcttaccgctagcagatcctgcacaggctctgaatgttcctgttgttcctttaggggcaatgttagcagcagcttatcctctttcttctcgtccaccatatgtattctcatggttaaatactttgatttctgctgaggacatgatg

SEQ ID NO: 87705 - DNA, 524 bp, Glycine max
  Clone ID: PAT_MRT3847_50205C.1
gtgtaacggtgctgccaacgtgatcgaagtggatcttcataagttgacgagggagttcctggtaaagctttgggtcgatgatatcaaaatgagaaaccccaggtggttttccgctacatatgctctccccaggagacctaaacgacgtcccgttttgaagcaaccccctatcagtcaatcgctcactgactttttcgatccacagtctccccaagaggccaaggtagcaccactgcttgccaggtctaacttgctaattacaagagatatcgagtgggcaaatcttgtactaggctttgaacagaaattgatggaagttggagtacttcacaggcaatggcatctttggaggagaatctatgatttgtacttggggaataagcaatttgctgtggttgagaatcctggcttatggaattggacattcacattgtaagatattaatggtgaggtacttgcacaaatagatcgtgattggaggagatttggctttgagattttactgatgctggtcaatatgtgat

SEQ ID NO: 87706 - DNA, 554 bp, Glycine max
  Clone ID: PAT_MRT3847_50206C.1
ttgatccccagctccaaagattggctttgttagtccaattaaagacgtggaaagtcagtcccaaattgacccttcaagagaaagctgtacctgaagctcttgctatatcactagataatgactccttctcaagacacggggggctggggactacccttttttgttgccgaagagtaaatttgatttgacagacagtgtaatttggttatcgactgccaatgtagtccctgaagccattttctgccaagtagcttttaaaaattgaaggtgttttaagctaataccaatgttgactctgtttccatactcttgatagctgcagtggggtccatttattcatgtaacaaaatcaaaattttaactctgctatttttgcctgttgttgattccttttgctggatggcaagggaatgagataattattcctatgttattgctttgtttgttgggtaaaagtagattaagatgcatttttattccttgtactctcatcagagtttcattttgctccctatgaaaattaaagcacagctactgggacatttgatctttgt

SEQ ID NO: 87707 - DNA, 2337 bp, Glycine max
  Clone ID: PAT_MRT3847_50207C.1
ccgagtacggctgcgagaagacgacagaaggggagcacagaagtgaaatacttttctgataccggctacaatgattccaaaccaattggatttgattttttgttgggaaccgatttttgcgcacccctaaattgtaaaattgtatttctttgaacatcagtccttggtgctgcaattttggtcgaagatgaagaattggtcgaaggagggttggaggtggctatctaagattgattttcacggaaatgttgcttcgaaggtgatcgtgactcgccgatttggaagcggcgttaacggtggaaaggaaaatgaaatggatgttcacaagttgacgagggagttcctggtaaagctttgggttgatgatagaaaaatgagaaaccctacggatccggttaaatcattcggaggttatggtgaccccaggtggttttccgctacatctgctgtccccaggagacctaaacgacgtgccgttttgaagcagccccctattagtcaatctgtctctgacttttttgatccgcagtctcccgaagaggccaaggtagcaccgctgcttgccaggtccaacttgctaattaccagagatatcgagtgggcaaatcttgtactaggctttgaacaggaaaatcgatatgccattgtagatgcttgctaccctcagtcgcccgtaggttttattcgtgaacagagcaacatcattgccagacagttgcttcgtcttaggcggccatttgttgcatacataactgatgccttggggaacgagctctttagggttcgcagacccttttggtggataacaagctcaatttatgcagaaattgatggtaaggaagttggagtagttcacaggcgatggcatctttggaggagaatctatgatttgtacttggggaataagcaatttgctgtggttgagaatcctggcttatggaattggacattcacattgaaagatattaatggtgaggtacttgctcaaatagatcgtgattggaggggttttggctttgagattttgactgatgctggtcagtatgtgattcgatttgggagttctgatcccagctccaagattggccttgctagtgcaattgaagacctggaagtcagtcgcaaactgacccttgcagagagagctgtaactgtagctcttgctatatcactagataatgactacttctcaagacacgggggctggggactacccttctttgttgccgaagagtaaatttgatttgacagacagtgtaatctggttatcgactgccaatgtagtccctgaagccattctctgccaagtagcttttaaaaattgaaggtgttctaagctaataccaatgttgactctgtttccatactcttgatagctgcagtggggtccatttattcatgtaacaaaatcaaaattttaactctgctatttttgcctgttgttgattccttttgctggatggcaagggaatgagatcattattcgtattttgcaccagggatgatggggggtttcaattgacaaggcatgtggtggggactcatgggtacatggcacctgagtacattgagaatggtttgattactccaaagatggatgtttttgcgtttggggttgtgcttttggagcttctttcggggagagaagctgttgttggtggagaccagaatggatctggggagaagatgctgtcggcaactgtgaatcacgtgcttgaaggagagaatgttagagagaaacttagaggtttcatggatccaaatttgagagatgaatatcccttggaactggcttattccatggccgaacttgccaaactctgtgttgctcgtgacctcaatgcaaggccacagatttctgaagctttcatgattttgtctaagattcaatcctccacgttggattgggatccgtctgacgagcttgaacggtctagatctgttggccaaatctctgatagcagcagatagatagatgatgagcttggcattatggtatttctcaattgcttcgatggaataagagattcttttttaatcttgtaactgctgagttttcttttggcctcttttttaatcctctactacaaattaaagtccacacttacacatgtaaacatgttattctttaagaaaagtagtgatcctaaaactgatattgcatcattcgtgaatgatatcaaatgcaattactgaaaataattcggctaggcctagatgctaggatttcaacttgtatgctttctacttttcgtgtacaattcttttgatgttttacttcagtgtaatgtaataacctgtgaaatgaaatagtggaagatgaactttagccaatat

SEQ ID NO: 87708 - DNA, 348 bp, Glycine max
  Clone ID: PAT_MRT3847_50208C.1
gtggccatatggaaagatgtcacatgcctcacataaacactagttagttgtaacatactggagattagctttttgtagtctataatagtgaaaattttgaagttaaactcaaaagggagaatttgaatatgtataacattgtatgcactaatgtgtggtttatgtgtcgagaacaacagggtttggtaccccttgctggttccaacgacgagtcatggtgccaaggtcttgatggtcttgcctctcgctcggctgcatactaccagcaaggtgcccgtttcgccaaatggtgagtgctaacttccccccctttgtggtggcagcaaaatcattttcataattccatgc

SEQ ID NO: 87709 - DNA, 142 bp, Glycine max
  Clone ID: PAT_MRT3847_50209C.1
acgttcacacttactataacgcttccaccgtatttaacatgatcatcaataatgaaattactgttacttttttatatgaggaggataacatccttgcctttacttacatacatccacaagctcttatatatataactattta

SEQ ID NO: 87710 - DNA, 302 bp, Glycine max
  Clone ID: PAT_MRT3847_5020C.1
ttaagcatttactcctattgacacggtcaagacatgttcccgcaccctctactgtaacacattatctcactatggggtggggatcgtaggagactcgagatgtaccaaatatgcgctgatacgctttgcgaagcatatgcggctcaccggagttctatagtagagagacacctgaaactaatatttgcggtgaggggggtggtgcttaatcgtcgaatattactcatccactaatttggcgtactggtacaattggcagtaaaacagctgttgactactgagttcacactgaatggactggt

SEQ ID NO: 87711 - DNA, 153 bp, Glycine max
  unsure (1)..(153): unsure at all n locations
  Clone ID: PAT_MRT3847_50210C.1
ttgagatctgtagcctgcaaaccgatgcctgctgatgaaagtgnctccatacagatgcattttagtccccgagccttgatgccattcatgttagctgaagatgnttcccgctagtcaatactgatgttagctgatgccttgacattggtgtca

SEQ ID NO: 87712 - DNA, 1610 bp, Glycine max
  unsure (1)..(1610): unsure at all n locations
  Clone ID: PAT_MRT3847_50211C.1
ccacgcgtccccgggaaacctcacacacatcacaaccttcaaaacaatactatccccacaaacaatctcaacgaaagatctaaagactaaaactaacataattattataaaagtcgtaggtcactgacagtgagtgcagggaaagtgtgattgctccgaaaccgaaaccacgaagcagtcgcaaacatgaccgaaaagaagcggaaggagagggacgaaggtaaccgccgaagactgaagccgaagaagaagtcaaacactcaatggaagaagactggccctcgtttgccctcatctctgcaaaaacatattgaccgtttaaaccctaccacttccttcgacagcgccgattccgatgacgacaatgacgtttacgagtacgaggaagaacgggccgaagaggagtccaagaaaaacaagcgttacgactctgcttccgtcgacgatgaccttgctcaagatattgaggatgagaatgtgcaatctgatgatgaaagtgaggatgatgattacaccgggacaaagaggaatgaaaatgctccaagtgacgattctggagaggaagacgatgataggcatgcaaggatgctacaagcaattactggcatgccgagtgaggcttttgaagagaataagaagaaaaagaaggtgatgaaggacactgttataccagagctatatccagagtctgaatataatcctagtcgtgatgttgtggatggtgacggacgcattagcatagaagacctactgaatcctcttcgtgaaaaatctggttatggaaaacttaggaagagatatcaacaaattgagaagaatgctaaaattattcatgtgccactttcaaaggcagttcaagctaaggtagagaggaaggcagcatatgaaatatcaaagaaagatgtcaccaagtggcagcatattattcagagaaatagagaggccccaactattttctttgatgaaaatgtaaatttagggttttcaactgtaggagcaatagcttctgaatttgaacccagaactgaatttgagaagaaaatggctgctctagtttatgatgaggaagttatggaagctcataaaaaggatggttctaagcttcttgaaatgaacaaggtctctattgaagatgagaaggataggcaaaatcggattgctaaaatgcggagccttctttttcgtcatgaaatgaaggcaaagcatattaaaaagatcaagtctagaacatttcatcgtttgttgaagaaagataaattaaaggcagaagcttctcagatacaaatggaccctgaagctgctaaagaatatgccatgaaacaagagcgtcaaagggctgaggaacgcatgacgctgaaacacaaaaaccataatccgtgggctgcacgtattatccagcgtggtttacataaccaagatgaaggaactcgtgctgctatacatgaacaacttcaaaggcatgctgaattgactagaaaaatgaagtctatgaagggtagcagcagtagcagtgaagatagcagtgatgaggatgangatgacaactctgctggttctgatcagatagggattacagattttgggaaagctaagaaaacagtgaaagtgtg

SEQ ID NO: 87713 - DNA, 212 bp, Glycine max
  Clone ID: PAT_MRT3847_50212C.1
caaaaacaaacaataaagcaggctgatgcggcgcaccattagcataacataatggaggtgagccggacatcgcatattttccagtccacaaagaacccatcatctacatctgattcttaactctaaatatatcggaccacccttgaaatggaatatcaaactggatgcttattcatatgcatacaccactcgagaatgcaaccgtgatgatg

SEQ ID NO: 87714 - DNA, 186 bp, Glycine max
  Clone ID: PAT_MRT3847_50213C.1
atggattccatgacttgccgacaaccaaagcccgacggtgttgaggctaccgtagaacttcctatggtatcaagtatacctacagcgcatttggggcggtggtgggtacgtctggacggagcctccggaggtgctcgagagtggccggaaacggaaaagagtctgcagcagaaggaggaagagtag

SEQ ID NO: 87715 - DNA, 252 bp, Glycine max
  Clone ID: PAT_MRT3847_50214C.1
gggaaccttgtatgtgcatgggagaggtccaaaccaccagggcaggtcacttggccagacatattcttgtagaaaaagaatgggaccgacctcacacaaggtcactctcttccagtgtgtagagtgagatatgctgaaaaaggatcagagatagcgacaaaatcttctgaaagttacgaaaaagatgcttataaagctggagaaggaagcaaagcgaacagctcagagccttgtgtgatgggagatgagaag

SEQ ID NO: 87716 - DNA, 300 bp, Glycine max
  Clone ID: PAT_MRT3847_50215C.1
agggaaagcagggacgccggcaggaaccggaacggaagacccgggccgacccacgcttacggtaaaaacgacaaaccgcgaccacaggcggccggaccagaaaaccggaaacaaaagcaaaagccccaagaaaacaagaaacacacaaaacaggacaaccacaccgcggacgaaaccagaagggaaagaaaaacacaccaagcgcgggccacagacccagagaaacaaaaacccagccacacgaagcaaaaaagccgaacaccccccgaggggagaaaagaccacgcgacagaggaaaac

SEQ ID NO: 87717 - DNA, 1013 bp, Glycine max
  Clone ID: PAT_MRT3847_50216C.1
aattcggctcgagccaaaccaatgaacctaaggaagaagaaaaggaggttgaagaagaagaagaacaacaacaacaacaacaagaactagaacaagaagaggtggttgaagaagagctagaacaagaagaggtgattgaagagtctggtttgacctatgacaaattcatgatccaaccttcacttgaaagttgcaccaatgattatgtcctgccggattcagatggtgatgacacactggaagctacatggagggctatcatggagggacaagggaaaacaatgaaaccacagctgaagaagagtgacacatggggtgcaaggattgccaaggcagagccatttcatcgcaatggggagggtggtggtggtgatgatgaccctgtggcttgggcacagaaggagctcaaaaagtctgacactttcaatgatagagcctccttgagaagggacaaatccatgagtccagaggaattgaatcgcagggcagaagccttcattaagaagatcaacaatcaaatgaagctgcagaggctggagtcttaccagcgtttcagggaaatggtaaaccgtggtgtttgatgtgaccgatttctcttttcaccagtcacagtgaaaatttagcaaaatgatgagaatctctgggagtatattaaccattttggaggacttgctgtgtacatatttttgctgctgagactgtgtgaagaggccaaggcaagtatcagacatggtgtacttttttcccttgtcaagtttcttgtgacatagtaggcataagttagtttctccccaatctgttgtgctctttctttgatcaagatctttgctctacatgcatgcatgttctactaaactattcagaagtctagtctttcttatattgcataatgtttatattgattatgtagtttgaaccctagatagcattatgaggggattatttaaatcgaatgtataatttctgctattctatatagacctcactatttaccagacaaaaaattgagcttt

SEQ ID NO: 87718 - DNA, 902 bp, Glycine max
  Clone ID: PAT_MRT3847_50217C.1
cccttatcagttaaagctaaatagaacctcaaaatcgacaaaagacgtgggtccggtcttcatgttatctgacttttttccatctctctctctctcttccatgcttctttcccattacataactctttctctctctctgtgatcttatctccttttaattattcactcacccctttacactggttgatgcaaaaaaacatggtaccctctattgttggttgttgctgacactcttcatagtcgcaaagtaggtgactagcagtagcatgtgagtgaaggagcctgcagtttttttttatcgtactgtactatgtttgttatgtaatggtatcatggtaagctgaccaaagtgacggatttgttccatcactgccttcagggaaagaagttaactcatagcaggtccatacaaacatgatgactccaaacttgaacttggaacctgaaaatcattcagaaggcagcagccaagtggcttcaaatgtatcctttcatgaagcatctcatgatcttaaaaagggcagcaccaccacttcctcctgtctcacaaaggatgaaactgatccaggttctattacccttgacttgacactcaacttcaataattccggtgatggcgagttgaaaggctcaagtgatgctagcagtgaagttggagctgaagctcctgcttcagcatcagcaactccaagggttttctcttgtaactactgcaggaggaagttctatagctctcaggcattagggggtcatcaaaatgcacacaaaagggagaggacgatggctaagcgcgcaatgcgaatggggatgttcactgagaggtttacaagcttggcatctctacctcttcatggttcacctttcaggtctcttggccttgaagctcattctgcaatgcaccg

SEQ ID NO: 87719 - DNA, 607 bp, Glycine max
  unsure (1)..(607): unsure at all n locations
  Clone ID: PAT_MRT3847_50218C.1
ctacccctttacactggttgatgcaaaaaacatggtaccctctattgttggttgttgctgacactcttcactagtcgcaaagtaggtgactagcagtagcatgtgagtgaaggagcctgcagtttttttttatcgtactgtactatgtttgttatggaaagaagttaactcatagcaggtccatacaaacatgatgactccaaacttgaacttggaacctgaaaatcattcagaaggcagcagccaagtggcttcaaatgtatcctttcatgaagcatctcatgatcttaaaaagggcagcaccaccacttcctcctgtctcacaaaggatgaaactgatccaggttctattacccttgacttgacactcaactttaattccggtgatggcgagttgaaaggctcaagtgatgctagcagtgaagttggagctgaagctcctgcttcagcatcagcaacttccaagggttttttcttgtaactactgcaggaggaagttctatagctctcaggcattanngtggtcatcaaaatgctcacaaaagggagaggacaatggctaagcgtgcaatgcgaagggggatgttcactgagaggtatacaagct

SEQ ID NO: 87720 - DNA, 436 bp, Glycine max
  Clone ID: PAT_MRT3847_50219C.1
cacacacatacgaattcacaatatacatgataggattcttgggggagatataatgagggatagagagagagatgagagaagagacgggagagagaacattcagagaggactgttccagagactgagacttagagagagagatgatgagagagagggtgtgtgaactactgtgaggactacagggagaggtaacctgagagttatctctatcgtgagatatgttcctagacagggctccagaggaacctgccgtcgagcctatgctcaccaagtttccccccactggtagaacagatgggagatcacagccttcttcttgacgatgttctcagaggaggttcccgaggcggagctctgggaccacctctagaaccgcttggatatgagagaggttttggtatacatacttatgttcaaacagaggaggagatatgga

SEQ ID NO: 87721 - DNA, 241 bp, Glycine max
  Clone ID: PAT_MRT3847_5021C.1
catcggaaaggatgtacaagcgatgaactcagaggttggagaagacgcactattatctgccgacctgctgcatttgtactgcttggagaagatcgccaggaaacatgtcggccacggagcatgccatccacgctttcatcttccgatctcctacatcttgcttggactttcgcttctgatcttcccttgctagcttgtacaccatattcctgcatatactcttgatcacttctacagtcag

SEQ ID NO: 87722 - DNA, 1747 bp, Glycine max
  Clone ID: PAT_MRT3847_50220C.1
cccttatcagttaaagctaaatagaacctcaaaatcgacaaaagacgtggttcatgtcttcatgttatctgacttttttccatctctctctctctcttccatgcttctttcccattacataactctttctctctctctgtgatcttatctccttttaattattcactcacccctttacactggttgatgcaaaaaaacatggtaccctctattgttggttgttgctgacactcttcatagtcgcaaagtaggtgactagcagtagcatgtgagtgaaggagcctgcagttttttttttatcgtactgtactatgtttgttatgtaatggtatcatggtaagctgaccaaagtgacggatttgttccatcactgccttcagggaaagaagttaactcatagcaggtccatacaaacatgatgactccaaacttgaacttggtacctcctaatcattcagaaggcactgttattccggttattcagaaatcaaatggttaagagtagcatgtgattaaagtggaccgcaagctcttttttcagtatcaccaaactcaggttttttttctaggatctaatgcacaaggaagttctatagctctcaggcattaggtggtcatcaaaatgctcacaaaagggagaggacaatggctaagcgtgcaatgcgaatggggatgttcactgagaggtatacaagcttggcatctctacctcttcatggttcacctttcaggtctcttggccttgaagctcattctgcaatgcaccgaagacacgtgccgtcctccgcggcagcactgagggctcctgatatgagagctgctgcaaaatttgagagaaaccaatttggatcactggttttcgtggaagatgatgatgttggattcttttggccctggcagtttcagacaggtagaccaacaaggagctggtgttaatgtaggacatgctcaaagttcaaatgctagtttaattccaatggtgcctcctccaccacaagcttctacatctcctgatctcacattgaagctttaagtttaaggcttaagaatgatgatacatacacaagcaaaggcctcacaaagtaataaataagtggctaagaactgactcatccattgctttgcattcagccaaaattttctcaaccactcattttcattgtgagggatttaattatcagagtttttatgtgtgtatgtatcacttctcttgagattttttagtctttgatttcattctcttcagacatgaaattattaattaatagggcgtgcattgtacagtgagatgtgtatttccaatggcgattttagcttattttaatgttcaaagttattatgctagtttagctccaatggtgcctcctccaccacaagcttctgcatctcctgatctcacattgaagctttaagtttaaggcttaagaaaatgacgatacatacacaagcaaaggccttcacaaagtaataaataagtggctaagaactgactcatccgttgctttgcatccagccaaatttcctcaaccactcatttttattgtgaggggtttaattatcagagtttttatgtgtatgtatcgaccacttctcttgagattttttagtctttgatttcattctcttcagacatgaaattattaattaatagggcgtgcaatgtacagtgagatgtgtatttccaatggcgacttgaacttattttaatctcacattattaatggtatcttttacttaattgttgatg

SEQ ID NO: 87723 - DNA, 427 bp, Glycine max
  Clone ID: PAT_MRT3847_50221C.1
ccacgcgtccgtctggtgtgctgacgcggccagaacagggaaagagagctgaattgctcatgtaccattccaccaagagtggggatgaaaagacaagcctcaatgattatgtgaccagtatgaaggaaggtcagagtgacatctactacttcacatcgtgaatgctagaaggctgttgagaacagtccattcttatagatgttgaagaagaaggtatacgagggggtctatatggttgctgcctttgcctaatatgctgttggtcagctcaaggaatcagagggcaagaaggtggactatgcctccaagcaatggctgctgtttgacttgaggggtgaggacaggagtatgctagaagagttgatagagaagagtgacaacgtcttctgcgtgatcaaggatgctttgggtgacgacgctgataagg

SEQ ID NO: 87724 - DNA, 517 bp, Glycine max
  Clone ID: PAT_MRT3847_50222C.1
ccacgcgtccgatgtgcaagatacctacccagattgtgttactaatgaattgggactgacgctaacaatgacctcctaattttgaagacatgagttgtgatacggtgatgggcagatccacctacagtcttgaagatgacccgtgcttctaacaggctgggtatgcaattctatgacctatgacagagcccggctctagtgggtgccataaactacaggcgtgagaaggcgttcctttctacagtctaggatgcttgtattgacacctgaggagctcttaccgggctagcttcagaaaatttcatatcttcacggcgtgcaattataccagccttgttagggtgttacttcttttatagaggcattacattcacatatgagagggcactgggcatgacaaatgacttcagtagtaaacctgtgatcactagagaccaatatctagattgctagatcgttcaatttttttgccaaaactaacacccaaactacgtggctatattaggtaactaaacat

SEQ ID NO: 87725 - DNA, 371 bp, Glycine max
  unsure (1)..(371): unsure at all n locations
  Clone ID: PAT_MRT3847_50223C.1
atctntctttcttttttctctaatctttcctatctcgtgagaactgttttttttttatcttacccattcccacaaccatcctccaacatctttcatttcctctcctcttctttcttaaaatatattccattcacaaactacaattattgttcctccacacaatccctattcatgaaattttttcctattgaccattcatttccctccatattatccctttaaaccacccaaaatttcattcattacaaaatttttccacccaaatataaatagcaaatttaaaccatttcccttcatttaatttaactaaccaatttaacccctcctctaacccatttaccaataatttttcctttcaattttatttcccc

SEQ ID NO: 87726 - DNA, 782 bp, Glycine max
  Clone ID: PAT_MRT3847_50224C.1
agctgggttaatgaccagatcagttttcataacactgggatcattctcatatgataccatatatatatataattggatgtgatttttcacgtcttgaccgaagcaaataattcttttcttgcacatttttgggctgttggacgggataaatcacgttaccagatcatttccaaacacacaaactaactgattaataaacttctaagcagttactagctacaaatataattgttagttgcaatgcgaagtgttgtcaaccgtcaaaaaatgaagtcactaagttgcgtacgcttgcctttatggccatcgggttttaaaatgtatgcactttcttccacattcgcattcaaacaattcattctgtgccaggtgaaatggtcttcacagcatatagaaccccacataattgcaagcccggctcctttccatgttgcagtatacatatcatagaacttttcaaaggctttatcaaagcaataatgacaaaccaagagatccttgatgtcagtgaccttgcatgttgacttgcagcatttaaccagacgtttaagcttgtgtgaataatatttttgatgggaagggtgtgttcttatatgctcaatcaagtggcctgccccatcacaaaggacaatactacaatcaaggcatgttgccaaatttgatgatctgcgacacacgttacagtttgcagctaacaagtctttaccaatctggtggcatcttctatacaggggaagaagatcctttggaatggaactagatctattacttccatcagtggc

SEQ ID NO: 87727 - DNA, 255 bp, Glycine max
  unsure (1)..(255): unsure at all n locations
  Clone ID: PAT_MRT3847_50225C.1
gggggggggactaacattatttgacgcaagaaatatggttattaccatnnnttaacaaaatacaaatgttcagtttgtttaatgaaaataaaatacatgatgaaaattcataatatttattgagggaaacagggaaaaggacaacaagcaatttttttatacagcaacttgaatccatggtttcacaaaattgtagaacaaacaaaatttgggtatttattgtctggatgtttccagttgaattttactgataaa

SEQ ID NO: 87728 - DNA, 598 bp, Glycine max
  unsure (1)..(598): unsure at all n locations
  Clone ID: PAT_MRT3847_50226C.1
tttaaaattcataatttcccttgcttttgatagcgcctttatgaaacgcaaggtttgaggaatttttcgaagggaaaagatcacaaaatttgctcgcttgtagcaaaaagattccaaaaaatggttgtcacaaaatacagacaagctgttatagtcaagaatgcctgaaatgatcccagccactgtacaaaataaccagttccaattgtgcttatgatagctgctatagttccagcacaatttgagattccatgtagaattcctgcatactgaggagcaatatcttgaatgttgagcataaagccagcctggctgaaagaactcaggctcaaggcaatagtcatgagtgtagcagcaacagcaggtgtattggcataattcaagcagagcaaggtcactgccggcccgatgaatccaattgtctgcatgaacttccggacaaatattgtagggtaccctgcattgattaagaagtctgatgcaacaccggctagannncctgacatagccattgtggcccacggaaccgcgctaaaccaagctgcttgcttcaagttaacattatatacgcttttgaaataaaccggcatccatgaca

SEQ ID NO: 87729 - DNA, 629 bp, Glycine max
  Clone ID: PAT_MRT3847_50227C.1
ggctcgagctggtttaggtttgaagttggtgattattctacaagtgattctggttatttttctggtatttctctggagttttcgttgccgcaccagatctagaaggagacgttaccggtgaattgaaagagaccttgcagtttacctggcattaaactgtgggtttgatgtttgttatggtacaaggtgcttcagtactatattaatttataaacagccgtggctagatcaacaatgcacctatttcttcttcatttctgtccttttatgaacgtccttcaattagtcaatgatcatcattataaaaactagagcaggctattggagcacaacagactcaacgttctggttgtattccagttcctcaaatcctagtttctctcatttgcatggttggaggcttgaagcagcaatgtctgtctcatagtcattttgtatctaatattttactggaggtgcaatcaattggataacatcttgattcttgattgtgggatttgtaatatatctatctactatcatatcttagtatagttgatcagttggagtcgaagttctgaagggtatagatttagagtcacaacaacattgttatgagtgcagtttgcaaattcaggagtttctaaggc

SEQ ID NO: 87730 - DNA, 251 bp, Glycine max
  unsure (1)..(251): unsure at all n locations
  Clone ID: PAT_MRT3847_50228C.1
gaagaaaccagcgtcacatcatcgtggttctgcaaaatatatttttctttttgggtgaataaataaagggttgtgcgtggtggtgttttnttgtgtntgtgagtatcngaatccgcgcagttaggttgnnnnnnnnnnnnnnnnnnnnnnnnnnnnnnnnnnnnnnnnnnatgggagatcaagtggagggaanggtgcagnncgttctggaacaggagnactctnaagtngntctccgngggtggcaaagg

SEQ ID NO: 87731 - DNA, 401 bp, Glycine max
  Clone ID: PAT_MRT3847_50229C.1
agcatagttcccgtccctgtccccgaattagcggtggggggtttttgatgcccatccccgtccccgcgggaaatttttccccgactgcaaggccccgaatggggcagtccccgcggggatccccaagttgtggggagaattgtcatgcatacccgcacccgcttacacccctaattttttttatgtcttttattatttattgctttgaatttttttatctttctaaaaaaagaaaaattaattttttgttaataaaatttgtatttaccccacaaatttacttgaactaaaaaagggtttaagttaacataaattagaatagaattacaaagaatacaataatttggttttaatttgttttggtttgaattttttttatggcttttattaggtattccttt

SEQ ID NO: 87732 - DNA, 503 bp, Glycine max
  unsure (1)..(503): unsure at all n locations
  Clone ID: PAT_MRT3847_5022C.1
ttttctctcacgtgcctcagaagggcccggggaaaatattatggccacttgtttggcggcaattttgcttatgctatcaaggacagaaattagtatcagaaatggattatattagagattatggcatcaaggatggtgaccaacttcattttgtgtaccatgtatctgacacttgcagtttcgagagaaagcagtccaagaaacgagttgtcaatttgaaacagcacatgaggtcatcatcaaaagtgaatagatatcaacagaaagaacataacgatgacaaagacattgatttggatgatatagtcatagagaatgcgaggatccagcattgcaataatgcagaagaaaatggaggaggaaagcgaagcttagctggcattttagcagggttgttctcacacagtcggttggcagttgtgagcagagctagaattgagagcatgatttgctgctcaatgatggctagatttatagtgagcagttntaggaaaattagaaga

SEQ ID NO: 87733 - DNA, 1093 bp, Glycine max
  Clone ID: PAT_MRT3847_50230C.1
cggacgcgtgggtttgtaactgatcaaaagaagatagattatcggttaaatagatggtttgaaaaaccttattctacgccacccttttggattagcataacagagacatccatcctcagtcattcgcaatggcccgacgactccttccactcacctccctccgccacctctccatcgccgcctcgcgtcgcctcctctcctctgcactccccgtcgctccccgcccctatccgcccctcaccgcccgcttcgccgtcgtccggtgcctctgcaaccgccccggagactcggcgtactcgcccctgaacacgggaaagcccacctccatcttgtcgtcgatcacggagcgccctccgacggacatggcgcccctgttcccgggctgcgactaccatcactggctcgtcgtcatccacaagcccggcggcgaaggcgctaccaagcaacagatgatagattgctacgttcaaaccctcgccaaggttcttggcagtgaagaggaagctaagaaaaagatttacaatgtttcctgtgagaggtacttcgcatttggatgtgacattgatgaggagacatcgaataagctggaaggtttgcctggagttttgtttgttctcccagattcatatgtagatcctgaacacaaagactatggaggtgaattatttgtgaatggagagattgtgcagagaccacctgaaagacagagaagagtggagccgcagccacaaaggcaacaggacagaccaagatacaatgatagaacaaggtatgttcgacgcagagaaaacacaaaatgaaggagcaagcggataataagaggagggaggagagggatgttgaagatatggaagagtggattctgcactattattgtagtgtagcctttggatgcctactatttctggtggtacttgaatatgctagtagttaaactagtagtatatgaatatgttagtagttaaaccagtgttgatgttggctttattctttatcatcttttccatgggagagtgttgaacatatagcatataatatatctctatgcagtgttactgttttgtacactgcttcttaaaaaaaaaaaaaaaaa

SEQ ID NO: 87734 - DNA, 513 bp, Glycine max
  Clone ID: PAT_MRT3847_50231C.1
gacagcaacactgatgacattccattaattttagtgtcatattcaagagtagcagctatgaattctttcacattgcctttaaatccaggtcccacgagcatttcttccacatcaccaagttgagatgtgataataccacgtagtgtccaagaaactgggcagagataatggaaccacatccaccatacaggtatatgagattttggaataagaaatccggatacaagattccatagagagtaaaatgcagaagaaataacagctgcaaagtgttgtgtaggtgtaatgccaacagccatcatgccgtaaaaggtgaagtacataaatgtgaggaacatgaacacaagatagaggaaaaactttccaacatccctttcaaaattgaccatgaaatatgtgattacaccaaatactattgtctgaagagcaacatatgggatctccaccagcccctgagctattgcgtatgagattggagagtacattccagcagccttctctctataaaacact

SEQ ID NO: 87735 - DNA, 422 bp, Glycine max
  Clone ID: PAT_MRT3847_50232C.1
tttcgttcacgcgcccgcccacgcgaccggaaaccccaaatactaatccaagcctctcccaactcacaaagccatgtctccaggacccgctgacgtcgcttcctctgaggttgacgcagagcaacaacttcccttcgtagatgaccccactcataagaagataccccaaccacaggaggacaatgcatcccttgacgaggacttgaaggatgatgacaaaaacgactaccatgaagacgacgacgaccaccactacgaagatgacacggaagacgatgcctcaacgtggtgctgagggaataaagcccagcaaaccgacaagaacagcccaaaagcccagctgctgctgggaccgaaaacctgctcctggcgctagatgggctccactcaccaaacccccaaaattctcatcttcatctcaa

SEQ ID NO: 87736 - DNA, 266 bp, Glycine max
  Clone ID: PAT_MRT3847_50233C.1
ttagaacatgtaaaattgcacctatagtggcatgtcagtacaagtgctcatttgcttactaaaggacaacatataccatagcaaattattctagaactattcgtaagagtctgttgcttgtgtagaatccaagactctgaggatgtgaagactgaagtccacaaaatatcatggagagcaacctctgaagagctgcctatagatctttctgctgctcttgatatctgtggttgatcacattcttactcagcatttgagtaccttaa

SEQ ID NO: 87737 - DNA, 703 bp, Glycine max
  Clone ID: PAT_MRT3847_50234C.1
tgcagtgaggagctctctatgacagcgctcgattcgtcggagtttatcgggcttaatcatcggatcgaagagtcgaaagggaacggtgaagtgagtggtggaaatggttttgaattggaaattgagaaaagagaagaagaagaagtggaagaagaaaaggaggaggaggaagaaaaggaggaggaggaagaagaggagttatcggagggtgatgattctatgtatgactatggtagtgatggtgatggtggaaatgaaatgtatttgtggaaaaataaaggttattttgaggagccggaagtgagaaacgagaactctttgtttatgaattcttccgtggcatttggatcgcgagacctggatgattttttgttgcagagtggtgacatttctgtcatgcctgatctgtttcagaatcagcgaaaaaagaatgatggagtgaatatgggttctggtcgaaatgaggaagggaaagatgaaaagtacgtggtcagaggcaatgaagttgaagaaactaaagatgttggttattttgattctgtagaggaggttagggatagcgaaatttctgcagattgcgatcatgttcgagattctgatatgcttgctaacatagtggaaagttctcccttcatagattgtcggaaccatgttgaacccgcaggcccaggttctgatgattttgggttaggtgcctggaaac

SEQ ID NO: 87738 - DNA, 265 bp, Glycine max
  unsure (1)..(265): unsure at all n locations
  Clone ID: PAT_MRT3847_50235C.1
ccaaatanacatctatatacatgttctttcacttctctttgaaaattgtttgtgtccttttcaattgaggttcattcaagttattcttcaagtcatgccaagttgtcctaatttctgaacacccggaggtttttatttttgtaagttttaatgtgataagattagaatgtcaaatttagaccatttataaataattgtatggttaaaattaaataattttaattctcacttgtatgtaagttcacaacctttatgtctgtagagc

SEQ ID NO: 87739 - DNA, 765 bp, Glycine max
  unsure (1)..(765): unsure at all n locations
  Clone ID: PAT_MRT3847_50236C.1
ccacgcgtccggtttaatcatcggatcgaagagtcgaaagggagcggtgaagtgagtggtggaaatggttttgaattggaaattgagaaaagagaagaagtggaagaagaagaggaagaggaagaagaagagttatcggagggggatgattctatgtatgactatggtagtgatggtggaaatgaaatgtatttgtccaaaaatataggttattatgaggagccgaaagtgagaaacgagaactctttgtttatgaactcttccgtggcatttggatcgcgagacctggatgattttttgttgcagagtggtgacatttctgtcatgtctgatctgtttcataatcagcgaaaaaagaataatggagtgaataaaggttctggtcgaaaggaggaagggaaagatgaaaaggacatggtcagaggcaatgaagttgaagaaactaaagatattggttattctgatgctgtagaagaggttagggatagggaaatttctgcagattgtcgtcgtgttcgagattctgatatgcttgctaacacagtggaaagttccccctcaattgattgtcagaactgtattgaaacgcaggtccaaggtcctgaaagttcttatgttggcaaggtggatgaagttgatttggatctgctggcgaaagaagttcctcgngatatgggtttggatgttaatgatggtggttgcatggaaaaagggaatgccaccagtgaagaagctattggcactggtgatgctcatggtgtaaag

SEQ ID NO: 87740 - DNA, 421 bp, Glycine max
  Clone ID: PAT_MRT3847_50237C.1
aactaaaaactatgatgttataaatttaattatccccaacatggggagataaagatggaaggaatgcaggaagtaagttatcaacacccgcttggttgaacaaacaaccctttccttgcaggttgattgaaaatgaagggctaactgatggctgaatgaacaaaaatgaatttatttaatttgtgtctgttgattgaattattaaaaacaaagaacgtcccttaaaaaaaagacagacagcctgactgaaaaaatatagagtgagtttccaacacatactttgcccttccttttcgtacattgtaactaaaacaaagtttgcttctaactaaactaagcaatgattgctggctttctttgaaaccaatgatctatctacacccaccgttatgcattcttgctgactgaaagggaaggagga

SEQ ID NO: 87741 - DNA, 256 bp, Glycine max
  unsure (1)..(256): unsure at all n locations
  Clone ID: PAT_MRT3847_50238C.1
aatggataaagtgctaacatcaattgctaaaaaaataaaaaacttcncagtaatttatcttataaatatcactaaagtaccaaatttcaacaccatatacgagttatataaaccatacaccattatgttcttttttaagaacaagcatattataatataccttaaaaccagaaacaacaataatatcaattagacactcaaagacaagcaatatttcattaatattatcaaaacaatataccataatacaagaaaa

SEQ ID NO: 87742 - DNA, 554 bp, Glycine max
  Clone ID: PAT_MRT3847_50239C.1
cccacgcgtccgcccacgcgtccgcccacgcgttcgaatgtttgggactttgtttgggggataagagagcgatgttggtgttccgaagattgatccagaatcctcctatgaatgacgataagagatgagagaacaaagctttggagataaaatgcatggaataactctccctctcactgcaactgcaaatagcttccttttgagatctcctctaccaagttgtttcatacccacttgtaaagttagctacggatttcgttttaaccattctcagtggaagcaccataaaacagaaggatggagcaataggaatagaacgatggtggtgagagcaaggcgtagcgagtcaccgtatgatgttttgggagtgtctccatcagcatccgtcgacgaaatcaaaaaggcctatcggaaacttgctcttaagtatcatcccgatgttaataaagaggataaggcacaggagaagtttatgaggataaaacatgcatacaatacattgctaaattctagttcccgcaaaaatatgattctggaagtcgagggtatgattt

SEQ ID NO: 87743 - DNA, 408 bp, Glycine max
  Clone ID: PAT_MRT3847_5023C.1
atccaaagccaaaatttgacacataaatttggttttttaaaagcaaaccaagcaaaaattggacacaaatttaaaggtggcatttaaaaagcaaaccaacaacgcaacgggaaagccctaaaacttggtgggcttaaaaaaaatgtaatcaggggttctcccaaaccccccccattaaaacagaatggtaaaaggggttttgccaccggtgataaaaaacccaattttgggaacaaaagttgcgagatgatgggggagacttcaaactatgtccgaaaaacaagcttcctaaaaacgaaaacacaagggcaagaaaccaacatttattgtgaccataagaaacgacatcccctgatgaaccaaaccggacgatttacttttttttttgggcagccttggtgaccttgg

SEQ ID NO: 87744 - DNA, 389 bp, Glycine max
  unsure (1)..(389): unsure at all n locations
  Clone ID: PAT_MRT3847_50240C.1
actgagcatcgtctagctatctcgatcgaactgtccaaggtcctgtcacaacttaggaacactgggagtaagcggcgttatcgcagagtggttaactaacgccaacagtgtaacagtaaaaaatcaattcacatgctagtgaaccaatggcacaaaaacatggttgtgtgctcaaattgacacaccaaacggtgatactgtagaggtgagccgaccataggacnttggttgcaggtgctattgcataagccataacgcggccacatctcgcatttatgcgtgcacaaaaaaagacaatgcctaattgcttaaacatcgcgtcaacagcaaacgtgcacataggtaaacgttgcgccacagaataacacttagcatgtgtaataagggct

SEQ ID NO: 87745 - DNA, 248 bp, Glycine max
  Clone ID: PAT_MRT3847_50241C.1
accacacgtacgctcccataagacaggaattttgtgcatttatataacccattcattaaggggaatggtgtatctactatgagtgtgcgtgaactttcctattttatattggattcatataatatacactatcatcttggaggtcatggtgatcctgcattacttcagccacagcatgcttggattactaggcgtactctgtgcttggcttcactatatccaactacaaaaatgattaattcacttga

SEQ ID NO: 87746 - DNA, 420 bp, Glycine max
  Clone ID: PAT_MRT3847_50242C.1
ggctcgaggatatttacgttcagagctatgattagggtggactatttgttgtttttagcttgataactgctgatatcactatgcattgcacactattgtgactaggggtcacctagatcatcattggtagcgtgagctgtgctgctagagagatgccctccactgactttgacagaagagaattgatgacttatcaaaatgtgatagaggagaagcctgcctatgcaaaggtaccaggccataaggagcatgctggactcaatggatatgctgcaactgcaataactatggctaatccggttccaaagccgatctctaaaattcaacctatttgaatcactggcaataagactattacaaaacgaggtcctgacaggaaacgtatttcacagtgagaagcagatgctcatccgagcccta

SEQ ID NO: 87747 - DNA, 401 bp, Glycine max
  Clone ID: PAT_MRT3847_50243C.1
tttttatttaatatattcctttttttttttatttttttttttttttcctttgtctccggtaataattttatttttttatttattttttttttttttttcttcttttttattacttttttgtctttttttcttttttggtctgtcagacaaccgtatgaccattcccaggcacatggaagtgtcctaagaacgatcctctacagccaaagatgagactactccaaagagaaactcacccgggccgttaatcacgctctgatcacacggtcatgattcatccaccagacgtaggttcctgtctccttagaactcaaggacacagaggtacgagcctatagaaccccacgcgtccgcggacgcgtgggcggacgcgtgggcggacgcgtgggcggacacgtggg

SEQ ID NO: 87748 - DNA, 289 bp, Glycine max
  unsure (1)..(289): unsure at all n locations
  Clone ID: PAT_MRT3847_50244C.1
nngcacgcgtacgtnagctcggaattcggctcgagnagaaggacaaganagtttttaatcactgcttcacaggnagtggtgtcattgactggctggtttctaacaagctagttcggaaccgccaggaaggcctcatgatctccgcctccctgctcagtgaagggtacctgcagcctgctagcgatctgtccaagantgcagcagatggaatagctgaaaaccctttcctggacaaccctgatgccttctactacttcccagacagtggattcttctgtgaggagaactc

SEQ ID NO: 87749 - DNA, 2621 bp, Glycine max
  Clone ID: PAT_MRT3847_50245C.1
ataggcgagttgtttggggggccggaggctcatcatgtctgctcaggaaaggacctcgttcccaatcggtccactgcgtttctgcgaaatttcttcgtctctgtctctgacctcctaacgccttctcgattcctaactccttcaaccctttgcaccattcaacacgtcgtcatcatgctcccttcaactctcgcctgatcagattttccgtttcgtcggcgatctctctctctctctctctcagttcgcgatccatcaccggttggaggttttagggcacagagaccaaggtcgccgccatgtcaatgtcggattccgattcgtcctcctcttatggcgctgaatacaagagtctcaaacaagttagccgcgagcgattattacatgaaatgcttaggtcagcgaaaacaggggattcaaaatctacatggaaggtactaataatggacaaacttactgtaaagataatgtctcattcttgcaagatggctgatatcactgatgaaggcgtttcattggttgaagacatattcaagcgaaggcaaccattgcccaccatggatgctatatacttcatccagccaaccagagagaattattattatgtttttgtccgacatgtctggaaggaaacccttgtacaggaaggcctttgttttctttagtccaactatagccatagaattggttatggaaattaaaaaagatgcacaggtgttgcctcgtataggtgctctgagagagatgaacttggagtattttaccatagacagtcagggctttattacaaacaatgggagagctttagacgggtttttgggcagcccggggaatattttggttcccgtggtgccactaaaataagttgcgcctgttatgattcttgcctctgtttgtcctgagaaatttgagggagaaaagggtcagaatttgatgaggctagcaaaattgacagaagaggatatgaacgttgttcacaatatgagaatgctccctcggcctgagtcctgcgagttgctcatcattgatagaactattgatcagattgctcctgtgatacatgaatggacatatgatgccatgtgccgtgatttgttgaatatggagggaaataaatatgttcatgaggttcctagcaagactggtggtccacctgagcgaaaagaggttcttttggaggatcatgatcctatatggcttgaacttcgtcatgcacatattgcagatgctagtgaacggctgcatgagaagatgaccaacttcatttcaaagaataaagctgcacaaatccaacatggttcaagaggtagtggtgaaatgtcgacaagggacttacaaaagatggttcaagcacttccacaatacagtgaacaaattgacaagctctccctccatgtagagattgcaggaaaaattaacagaatcattagggagtcaggacttcgggaacttgggaagctagagcaagatcttgtttttggagatgcaaggatgaaagatgtgatcaaatttttgactacgaaagaagatacaagtcgtgaaaataagttgcgcttgttaatgattcttgcatctgtatatcctgagaaatttgagggagaaaagggtctgaatttgatgaggctagcaaaattgacagaagaggatatgaacgttgttcacaatttgagaatgcttggaggagaacctgataccaaaaaaactttgacgagttcttttgctcttaaatttgatatgcacaagaaaaagcgtgcagcaaggaaagatcgttctggtgaagaggagacatggcagttatcacgtttttatcccataatagaggaactcatcgaaaaagttagcaaaaatgaattatcaaaactggactatccttgtctaaatgacccaagtccaactttccacggtacaccttatgctgtaccagtaactcaaaatcctcctgctcattcaatgagatcaaggcgtacaccaacttgggctcgacctagaggctctgatgatggatattcaagcgattcggtgctaaaacatgcatccagtgatttcaagaaaatggggcaaagaatatttatattcattgttggtggagcgaccagatctgagcttaggatatgccacaagcttactggtaagctgaagagggaagttatactaggctcgtcaagtattgatgatcctgcacaatatatcacgaaattgaagatgctgacagcacaggaactttcattggatgatctccagatatgacgtgtcacccacttgaaaaatggaagatgatcttcttccgcttctctaatatacgtgttgtatccatattgtttattcatctcatgtaacaaattctttggacatttgacccgtggtatagtcaagccactgaatgttaaactgtgcatatattaggaattgttcattggatagagacaattttaaattttgaaaaatttctggtaaatgctattcgttcgaatgacactttcgttaaaagccgctttcaaaaggaaagagcgttctggtgaagaagagaaatggcagctatcacgcttttatcccataatagaggaactccttgaaaaactcatgaaaaatgaatggtcaaaggaggatatcattgttgatga

SEQ ID NO: 87750 - DNA, 296 bp, Glycine max
  unsure (1)..(296): unsure at all n locations
  Clone ID: PAT_MRT3847_50246C.1
ttgggctgagttgagtgcttgnatggtcgtgagaagatgatagaagggggagccgagaggactgcgagaggggtagcagttgaggccttgcgagccgtaaaaacgaagatgacctcccttattgagattacgaatactttggatggtgcgagtactaaagcctacgttaaggctactgaagccgagggtttttgtggaaaaccggcgtgagatcctaagtacccgaactctgacccctagtctaccatcgatgaaaatggcaaaagaaagtccaaaaccgatgtgcggcccgggct

SEQ ID NO: 87751 - DNA, 229 bp, Glycine max
  Clone ID: PAT_MRT3847_50247C.1
cacacacataactgaactaaaccaatcttattcaacccgcaacagacattcaaccgagccgggtatcacacactcgcgcactcatatatatcttctatccctgcaacaacatagttgttctcttcactctcacaatgcgaatactaattgaactctctctcatcaccatccacctctacttctacctctatatcaccctctgcaacgacctcaccaactacgatcacct

SEQ ID NO: 87752 - DNA, 1153 bp, Glycine max
  Clone ID: PAT_MRT3847_50248C.1
cggctcgattggttatggacattaaaaaagatgcacaggtgttgactcgattaggtgcattgagagagatgaatttggagtattttaccatagacagccagggtttcatcacaaataatgagagagctttagtggagctatttggggatgaggagaataatcataaaggtgttacatgtttgaatgttatggcaaaacggattgctacagtttttgcttccttaagagaatttccttttgtccgctttcgtgctgccaagtccctagatgcaaccacaatgactaccttccatgatcttattcctacaaaacttgctgctggtgtctgggactgtcttatgaaatataaaaaaactgtacctaatttccctcagactgagacctgcgagttgctcatcattgatagaactattgatcagattgctcctgtgatacatgaatggacatatgatgccatgtgccgtgatttgttgaatatggagggaaataaatatgttcatgaggttcctagcaagactggtggtccacctgagcgaaaagaggttctcttggacgatcatgatcctatatggcttgaacttcgtcatgcacatattgcagatgctagtgaacggctgcacgagaagatgaccaacttcatttcaaagaataaagctgcacaaatccaacatggttcaagaggtagtggtgaaatgtcaacaagggacttgcagaagatggttcaagcacttccacaatacagcgaacaaattgacaagctctccctccatgtagagattgcaggaaaaattaacagaattattagggagtcaggacttcgggaacttgggcagctggagcaagatcttgtttttggagacgcagggatgaaagatgtgatcaaattttttactacaaacgaagatacaactcgtgaaaataagttgcgcttgttaatgattcttgcgtccatatatcctgagaaatttgaggctgaaaagggtctgaatttaatgaaggtagcgaagttgacagatgaggatgcaattgcaataaataatttgagaatgcttgggggagaacctgataccaaaacgacttcgacgagttcttttgctcttaaatttgatatgcacaagaaaaagcgtgcagcaaggaaagatcgatctggtga

SEQ ID NO: 87753 - DNA, 936 bp, Glycine max
  unsure (1)..(936): unsure at all n locations
  Clone ID: PAT_MRT3847_50249C.1
aagcgtgagagggtagcatagcaaagctgaatacggctgcgagaagacgacagagggggagggagttgtagagaggcgcatgatagcagaatgagttggcgttagggggtggagcccaccgacggttcagcgacatgcggttccggctcgggacaggacctcgtcctctatcggtccactccgcttctgcgaaatttcttcgtctctgtctctgaccccttaacgccttctcgattccgaactccttcaaccctttgtaccattcaacacgccatcgtcatgctcccttcaactctcgctaaataacaatgccaccataaattcactcctccttcttcctcttcttttgatttttgttgattggttcaaattgaagataccctttccatttctctctcgtttctcgtcttcgtagcttgatcaggttttccgattcgtcggcgatctctctctccattcgcgatcgatcaccggttggaggttttggggcacagagaccgaggtcgccgccatgtcaatgtcggattccgattcctcctcctcctcttatggcgctgaatacaagagtctcaaacaagttagccgcgaccgattattacatgaaatgcttaggtcagcgaaaacaggagattcaaaatctacatggaaggtataagatgctgaattctgcctgagtttttctgcttcaccataaatacagatggaccatccttctgtctattttggcctcagtctgtaatttcattctaggaattttttagaagaaatttcattttatgatgctgatgattggacataggacatatttagcaaatctttccaatatgcaccttcttgtaagtacagtcaattgctaaatcacgtttagaatggtttctttatccattggatctatatctantgtttgcatgttcaagtagntactagttagcaact

SEQ ID NO: 87754 - DNA, 188 bp, Glycine max
  Clone ID: PAT_MRT3847_5024C.1
gctacatgtcaaaatccatatcggtatgcacacagctctgcatatacctaccaaaccttttgatcaaccttgacaaggtcgatgttttggagaataagttgagtgattcagcgtaagttggcgacgcttagtcacatcaacttttaacgaagaatgcccttggccatccaaaactaccaaagtacttc

SEQ ID NO: 87755 - DNA, 1354 bp, Glycine max
  Clone ID: PAT_MRT3847_50250C.1
cgtagctaaaaaagatagtacttttcggttttcaattaggtagaaagactcaaatctcttaaaaccatctatgacatcttttctgtttgagatattctagaggttcacctttctttgtaaagaactagtctcgagttttttttttttttttttgaaatactccatgtattgattttacctttttggcatcgggaaatgcaatcccccgctagaaatatagaactgtattattatttcgacataatagattatgcatttcactacacaaagtctaaagcattagaacaaaaacctgagtgaagaaaccaacatggatccaaaaatcaaataaaagattttcatactctgggctaaaaaagcttacaccgccattatcaattgccataacataaattaattagaaacaacacttccaactttgagcttgtcagcagccaagacatacgagacaggaaccacctgttttgatgaatcatgcgagatttctccctcaattttattgcctccctcgtcaatacattgatcatctttacgttctacctcaattagcttttgcttgctcatcccagtgtacatttttcttcttacctcctttcgtgcttccctttcagatagtttcaaatcatcaaactcctgctcaaacttcgcttcatcctcaggtgaaaagaatacaacctccttattgccaagctcttcatacaacttctcaatctttgccttccaaaggatgcccatctcagtgtccatcttgtgataaggagttttcatcaagtactcatcaatcccacctgccttgtctatgcatcgtagggcatgggtggtgattttaacacgaacatgacgatctaaaatataactaaatagccgcttttcctggacattaggtttccaagttctccttgacttgttaccgccatcttcactgacacggttcccaaactgaatgtgtttcccggcgaagagaccgcgtttggcgcggttcatcacaatcttgcttcgaggcaagcatctctccaacgattccttttctcttcgactcaaaccgttctctcccactgtcttcagaactttcttcaacatctctttccctctgaacgccatgtcatttatcgctttacaatgttaggtcgctgaacagagtggcgccgccgtcaccaccgagcgccgccaccgtcagtccgtcacttggagtgtttttggacagaggaaaagaagaagggaaagaatgtaacctggactgaaacggcaccctatttgggcaagcttcttcatacccagcctcgagccgaattccgagctgagagaacggatttacatgttaggtcgctgaacagagtggcgccgccgtcaccac

SEQ ID NO: 87756 - DNA, 315 bp, Glycine max
  Clone ID: PAT_MRT3847_50251C.1
ggctcgagggaaaacgcatacacaaatctactttttcgcatttgatcgagaaatagacgagaaagggaagtggcttcacagaagatagacatgccgcgggaaatgtgagtgataactccatcttgaacacagtggaggcgacttggatacgctcaactagtacatgaaaattttttctgaccagggacgaatatactgataacaggaactcgaaggttcatactgcttgtatgctgactacattgaagactaataacagccgtgctgcttgtgagcagatgccacatatacttgcaactgtgggagaacaaactt

SEQ ID NO: 87757 - DNA, 421 bp, Glycine max
  Clone ID: PAT_MRT3847_50252C.1
caccgggtcatattattttgagccaaaaaagaaaccgttttcggtgattccattgtttcattgaactaaaatttgaaaaacaaaacaaaagagaatttcaatggcggatgatagtaaccgcctcgtgaggctgctatgccgcccgaagccactcaacaccaaaggatccgacccgggaatccatttctggcttatcggatccccattcttcccgccactcaccgtcgcctccttcctccgccgcatccacgccctcccctccgctgcttcccccgatttgcccaaggaatcggaggaccttcgcactctcatcccgagaggcttcgaagtcgtcggtgccctagcttccggcgatgacgcccacgctcgcgcggccgttgacgccgcgcgtacgttgaggaaccttctctacggcgaggga

SEQ ID NO: 87758 - DNA, 843 bp, Glycine max
  unsure (1)..(843): unsure at all n locations
  Clone ID: PAT_MRT3847_50253C.1
ttacgaattcgagcttggtacccggggatcctctagagtcgacctgcagggtcacctgtcaattctcatgcaacaaagtcatcacacatatcacatctactacttccttctcatttttagatgatgttcttttcataaattatttattattttaaaatatttatttgtttactttcaaataatatagccttaaaaactaaatacactaccaatatagttgtaactgtataatataactaatcatatatatggaatcaatattttagtcttcccgtaaaaaaaacaaaaaaaaaatattttagttggataaaccttaagggtccattcaataaaatagaatgaaataaataaaaaataaaattttaaattaaaataaaatataaaaatgtgagtctcattttatttcatttttattttttttctatccaaacgaacggatcctaaacacatatattgttatgtatatgggttagtccaaaagcgatttgttaaagtttaaacggcaggctaagtatgttaaaattaggctgtgagtatatgtttttntggcctcatctactatttaactcataagttagttaggttagtttaataatggctcaccaagtcagtctgcaattaattctttttaatattaatttatttttcatacttttattattaatggtttatcaaaatttagtagtaaaagcttaaatgctggnggttttactattagaataatccatacatattttttatacttaaatcaatattggatatttttnaaatttttaatctggttttaatncatttttaaaaattcaaccaccttctaaaattttggaaaattttccatttttt

SEQ ID NO: 87759 - DNA, 166 bp, Glycine max
  unsure (1)..(166): unsure at all n locations
  Clone ID: PAT_MRT3847_50254C.1
tggagtctcctcgcnatttacttgtcaagtttgaaattganncgcaaccctcattttctctcatcaaccatggtgtgttcctcttctatctgcacagaatatacnactntcnntgaacacccttcctttnatcaccactgnacttcgtcaaagaccnatatccaaa

SEQ ID NO: 87760 - DNA, 502 bp, Glycine max
  Clone ID: PAT_MRT3847_50255C.1
attcttatacttttgtgttttcccagttttttctttttttaaaatatataacccccgtgttacaaatggggagtcctaaggcaaaaaaaaaagaaaaccgcccccaccggggggggaaagagttattaaaaacagaaaaccccccaagacaaaaggggggcccccccaggaaggactaaaaccgtttttcccgaaaacattggggcaaaaaactgggcttcaccgaagaagattgaaagcccggccaaaaggtccggggatgaaactaaaaacggtgcgggcccccacacaagatccctgtcattgttcaatgaaactaccccccccccgccaagatgggtgctagaaaacaaactctttggggcttcccagctccggccggtccggaaaccggggttgtattttgttccccttggggggggggggttaaaaaaggggggcctttgagacccccaaaatggcccctaatataaaagaggggggccgtgtttttgaataatgg

SEQ ID NO: 87761 - DNA, 586 bp, Glycine max
  Clone ID: PAT_MRT3847_50256C.1
gagcgccttatctcctctcccaataatgcctatttccgcgtcccccacagaggagagagccacactctcgtggcgcaaaattccccacttcaaatacgacgccgttcagccccgcctccgtcgcaacaccaccaccaccctcactttcgccaccgccaccggcggctctaaattcgcctccgtctccgtggcggagcccaaactgcaccacgatttcatgcccacgccgtcccagctcttcaagaaccccctcgccgccttcgccatcgtgccccgtgacgccgctctcttctccgccggagccatcgccggcgccgccgccaagaccgtcaccgcgccgctcgaccgcatcaagctcctcatgcagactcatggtgtgcgtcttgggcaagatagtgctaagaaggcaataagtttcattgaggccatagcagttatagggaaagaagaaggtattcaaggttactggaagggcaacctccctcaagtgatcttctttaatatttacagtgattcgaggctctgtgctgatgacagttataagaaaatatgcaagggagagaatggcgagctctctgttgcagga

SEQ ID NO: 87762 - DNA, 597 bp, Glycine max
  unsure (1)..(597): unsure at all n locations
  Clone ID: PAT_MRT3847_50257C.1
tggttctttatgtggctttttttgtttgtgatgtttgaaacaacgtgtttcttaatttttgtttgtaatgctgaaaacaccatgatgttaatgttgttgatgatgagacaatgtggctgaagttgtctttgttgggaacagtaggtgcacccatcggagaacaagaggtaagggagacagaaaaaggagaagaaaatatatggtgctgatggtgcactggattactgtgtgcatgagataaatccaacaatgtctaaaagtggtccacagaagatcatttgtaaaactagtccaccatagccttcgtctacattgatatctggaaaacaaaaggacgcatttgtttcaagttatctactttctttccgtgaatannntgataggaatgacgttcttgcgtactttaaaagttatgtttggttaacaactaatattttttgtaaatcctgttgtgaaaactttgaaagtagagtgtaaagtaagttaaaagaataaaattggacattttacatannnnntgctattgataggaacttgggtataatggggtgcctaagttccacatcaagtaacatgagtgtcatctagctgacctct

SEQ ID NO: 87763 - DNA, 670 bp, Glycine max
  Clone ID: PAT_MRT3847_50258C.1
ggctatgtgacggctgagaagacgacagaaggggcctctcagagtggatatatagtgtgtcttgataaccttcaaagctacatttgtaaaacactgataagtctgatccagaacgcaaaatgctacagcttggtggttttttgcaccagcagtgttcctgaatgtgatacttgagctataaatccgtccccaactacagctgcaaaattttatttatagttaagtctctttaagtgtaataaaagtttcttgtcaaatacgcaagatagtatattggtccaaactgtttatagtccttgccataatttactatgatgaataattgaatctaactctaagcaagcacttacttgcacacgtgcagagcacagagtgaccacccttgatttcacaatgcatggggaataaaatatgaatcagatcataatgttatccaaagaaatgaagaaaaatgagtggtgagtaaaagtaaaacttaccattcatcgagtttacatacattcactcttaattatgtttgtgattagttgagaaagcaatttcattggcagcatgctcaaaagattcaaacatggtacaggagatttccatcaacttcccagccgcacgcgtttgggtaaaaacaaaatgttaagtcagctaatagccaggatactttcccatgcacccg

SEQ ID NO: 87764 - DNA, 231 bp, Glycine max
  Clone ID: PAT_MRT3847_50259C.1
cagagcagagagaccttgaagagctatggacgtcggaaagaataacgaggatttccaagggaaagaagggtggaaacacgaaagcagctgagccctttgctaagaagagatggtacgatagcaaggctccttgcctcctcgaggtcaagactatgggaacacactcgtctctcgtacaaagggaacaaacattacagccgaaggactcacagatagggtattaaaggtctc

SEQ ID NO: 87765 - DNA, 457 bp, Glycine max
  Clone ID: PAT_MRT3847_5025C.1
cgtgcctccttctttgggggggggggggggtggggcacgctatcgtaaccaagagccggaaggattaagcctgagcctcatgagcagaaacagaagtatgtcgagccgtatgggaccacgctatgaagaagagcggcgcactaagaagaactgagttaaaagtacagctactggactgagagagacatagatgtggagagagataacgggtttaccaaaatggtggctaaagaggtgcaaaaaagattagtagataggaagcggaagggggaataagagatagtaaatagaacggggggaatagagcacaattaataaatgagccatgggagcgggatagcagctttgtggaagggaagagaggaggaataaacacgcaaataagatgcgatccaggagaaaatttcgtgcagcacatatattgttagaatacctaaccaactcatagttaggtgta

SEQ ID NO: 87766 - DNA, 851 bp, Glycine max
  Clone ID: PAT_MRT3847_50260C.1
gtaggaggcattcagtatcttagaccatgttatgcagactttagagctccattcagttactgtataatcatctcactaaagtagcatcaggagtcagaggacactgacatcatattccagctgatacttcaatgagttctatgtaactgagcaaatgttggcacgtgggctaaaaatgaagcaccaaaagtaatattttaactgtggctatatcatactcctagggttgcaatcagccattactgatctttaggttagatggctcttgtgagacccagttttgattattggaaactggcttatgaatgccagcatttgtaaccttaagttttaaagggaaaaaggacttaaagaggattagttagaaccaattgcataaggagtaatgagggtgcagagtttgaaaggcttgtgttgggaatattacttagcattttgatccgtcattaatgttcatttgagcactagtatgggatgcaaaacctattggacttaaaatttaccattcttgaaacacaggagacgatgggtatggtaagtttgaatattccaaatatcttagataagatatcttgtatgagagattgtgagatcagagaattaaaaatcattagtttaggtgttacaactgaagatcatttaccattgtcttgaatttgtgacgcttgtgcttggtaccaactagacgttcatctgcaaacattttattgcctgtggatttgcaccctacattcaatttgtagctagtaagtcttagtaactcttctctgttaccttgtaatccatgccttgatttgtaagaaaaatgctaacaacattttttttttaatataatttttatgattgacggg

SEQ ID NO: 87767 - DNA, 107 bp, Glycine max
  Clone ID: PAT_MRT3847_50261C.1
gcgacgtgtccattattacgcaagttaaatgcgtcgacttgtacatgctgattattgacaacgcaaaggttatttaattaacacacacgggctgacttacgatcgtg

SEQ ID NO: 87768 - DNA, 592 bp, Glycine max
  Clone ID: PAT_MRT3847_50262C.1
gggttcgtgtagtgtaatgttactgtacataaaaatttaaaatactttatcctttttcaatttttgttttggtttctcacctttggtaatgcaagcatggtttgttgtacataaaagttcatatttgtcaaattacaaatttaagatatttagttgttaaaacaaaatcactttaatttaggaaaatcaagttaagagaaaaagtttgatagtatgagttcttttccactatgttataagtagcaagttaaaatttagaaaattgactctttctaacatgcaccttaaaaatagtatgcccctagagtttatggccattgatttggcaccaaaaatcattttaaagcccaagacacccaaaatataaggcaataaaaaaaactagatgcaccaatttaggaatggtgcagagatagaattagctagaaaactagacttcaacgattccatggtttcatatagttccaattgtacaaaagcaagtttatataatcataatgatgggaggggatcgtgctgcaatgattccagaaatggaagagaaatctgaaccattacatcattcaattagaatatggggtctgaaacagga

SEQ ID NO: 87769 - DNA, 272 bp, Glycine max
  Clone ID: PAT_MRT3847_50263C.1
gaaccgaggaatgggtttcacaagcaagctaaagccctcgaggcctggtgtgtccatgaagctccgagtccgtgatccgtgagtagcttctctccttagttaacttcacctacctcctccgttatctgccgcgattcggagtcctggttcaaagaaatttccccccttcattaatttctgtggttttgctcgcttgatttgcatgtgatccaatgttttcccatgcatcctgatcgatgcatctgtctccgccgcatgatgacattaggagg

SEQ ID NO: 87770 - DNA, 420 bp, Glycine max
  Clone ID: PAT_MRT3847_50264C.1
cccacgcgtccgtttaaattttaaaaaaaaaaaaaaaatataaaaaaaataaaaaaaaaaaaaaagataaactatatataataaaatgggggggcgtccggttggatggatcgttgtttacgtgtggtggcattcgatttgattcttttttctttggcgccactttaattcatttggctggccgttgttttgcagctccttgactgggccctccttgtccttacctaatttaattgggttggaatccatctttttttcgctggctggatatgtattaaaaacgcccggaccgattgtctttacaatgggtcgctctctttgtttgtcgattgggcccctctttttgggggttcattccggccgttgggtggggtttttccccccccttagttcgttttttttgccaccttccccctgccc

SEQ ID NO: 87771 - DNA, 946 bp, Glycine max
  Clone ID: PAT_MRT3847_50265C.1
tcacgcgtcacggtaaggccgagtttcgtgagcgagtgctcgcactgcgctaaggcctgcggatgcgagatcacgcgagtgaggaactccttgcggacgccggggagcgccaggaggcagtggtgcaccgggagctggacctcgccgacgatgtggaggcggtgccggaggaggagatcgtagttgcggtgaattgagccgccgagggagttttcaaccggcaaaaccgcgcgatccgcgatccagagctccaccgcttgaaacgcagcctcgaactggtcgcacggaatcgcctctccgttcggatacgctttccccgccgcagcttcggagtacgcgccgggaacgccttggtacgccacgcgcagctgcgagccgtgcatcggcgccggcaagaggtcggagatcgtgagtggcttcggcggaatcggcttgatgttttcaccatcagctttgacaggtacgatatttagattcgttacggcggcgttgtggccgttcacgtcgccgacgttgttgtcgttgtcgtcgccgtcggcgggagaatcttcccgctgcgatacgaccttactggctaagatggcgcacgagctttgccaatcggctcggctcgcgccgagtccctgcgagaaactcgcggattcgaagccgtaaccgcatttgactgtgaaacgggtcggagcgacccgaatgaccgagtgacgcgcccgggtgagatagttgagagggttggggtacggtggggtgagggtctgcatattaaaggacttaaatggaattaattaagaagaaaaattagggttggaaaggggaatttagttgcctattggtactagtactgcttgaatttgctgattggggctctggtctgaagcttgatgttcgttctctctctcgagccacaatccgagactcccgaacgcgctgcactgcgtgcacatagctt

SEQ ID NO: 87772 - DNA, 424 bp, Glycine max
  Clone ID: PAT_MRT3847_50266C.1
ggggaaaaaaagatattttttttgaaaaacgaaaccccccaaccaaacggggggggctcatgtgcacttgcgcattgcccttttcctcctccaaagcgggccccaccactccttatattctttgggcctaaaccttattgggttccttacttaatttgctacaagaccccattccataacaaaaatccaactccatcatcaattttattaccctcagataacaacaccttaacaacttttgatccttcactagggccctacaactacatccttttaattttttttttgccatgaccccccttgtgtttcctaaacacaataatacagcacttgcttcttaacatgaacccaagattatttatcccttttgcgtgtttgttctacatattgagggggagtgagggatgaaactggaaaaattgct

SEQ ID NO: 87773 - DNA, 752 bp, Glycine max
  Clone ID: PAT_MRT3847_50267C.1
gtcctgcagcgtagtagctcgattcggactaccttcgcttctgtatttacattttctccttaaactcattcttcgcactcttgcattgcctccacctccttttctccatttatagtataatggctgctgaagtatattaccaggctattggtactttgcagtcccattcttatctgaataatttaaatcatcaccaaaagcatcaaaacaatttagtaacattggtgtctagggattttatcagcagtaatggcttgtcaacgagaagaagtaactgcactggccagaggaattgtagtgtaattcgatctctagcttcgcaaacatcagtcgttgatccagtgttgtccccttcaagaagcaatgctggtgacacttacaagaaatcaaatgaagcagctttaatccttattcggcatggtgagtcgttatggaatgagaagaacttattcacagggtgtgtttgatgtccctctaagcaagaagggtatagatgaggcaattgaagctggaaaaagaattagcagcattcctgttgatgtaatatttacatcagctttgattcgtgcacaaatgacagccatgcttgccatgacccagcaccgtcgtgggaaagtccctatcatgatgcacaatgagagtgaacaagcaggtcatggagtcaagtgtttagtgaagatacaaaaagcagtccattccagtcatagcatcttggcaactaaatgaaagatgtatggggagctgcagggtct

SEQ ID NO: 87774 - DNA, 379 bp, Glycine max
  Clone ID: PAT_MRT3847_50268C.1
agagtactcaatctttttaatcatcgcacactgatataggactgttgtgggagcatatgtatatgagtactgggtcaacagtacagagaatggctagtttactggaccatgcttcatttaagtgtatgcttggtctgagtcacctagtcacacatccaatgatagaacacccactatttgtaccaatatgaaaacctcattgaaactgagtttaacgtactgggcaaaaaagttgtaacatactagcatcttgatactccataaggatgcaacatatggtgtttgtaaactgtaaatgctatgaaacgcggattggaaccaacattataaggcacgattaatgctaactggcatttcggttactcatatacatgacgca

SEQ ID NO: 87775 - DNA, 555 bp, Glycine max
  Clone ID: PAT_MRT3847_50269C.1
agggaggaatcaagaaatagcccctgatggagaaaggtggcagcgcactaatagcttccagcagaggggtttaattccatctccgtctactcctcaaactcctttacagatgatgcacaaagctgaaaagaaatatgaggtgggtaaagtgacagatgaggaacaggcaaagcagaggcaattgaagggtatattaaacaagttaactcctcagaattttgagaagctttttgatcaggttagagcagttaatattgacaatgtggtcactctcaatggtgtcatctcgcaaatctttgagaaggccttgatggaacctaccttctgtgaaatgtatgccaatttctgttttcatctggcagctgtgttacctgatctcagtcaagacaatgaaaagataactttcaagagattattgttaaacaagtgccaggaagaatttgagaggggggaaagagagcaagaagaagctaataaggctgatgagggtgaggtcaagctgtctaatgaggaaagagaagagaaacgaaccaaggcaagaagacgtatgttggg

SEQ ID NO: 87776 - DNA, 466 bp, Glycine max
  Clone ID: PAT_MRT3847_5026C.1
gcctgcaggttctgaagatggatatgctaaggttgagatcctaaatgaacagcatcaagatttaagtgcagccaaagtatcactcggtgtgctgggagttatttcacagattactctaaaactagaacccctcttcaagcgatccatcacttatgtggaaaaagatgattcagatttgggagaccaagctgctgcttttggagatgcacatgagtttggagatatactgtggtacccaagtcaacgcaaggttctctatcgtgttgatgatcgtgtcccaactaatacatcgggaaatggtctttacgacattatttctttccgtcccactccttcaaatacgtcggctttcataagaaccagagaggatattcaagaatccactaaagatgccaatggaaagtgcatagatgcaactaccacaacggacaccttcatcaccgaagcttatggtcttactaacaat

SEQ ID NO: 87777 - DNA, 1290 bp, Glycine max
  unsure (1)..(1290): unsure at all n locations
  Clone ID: PAT_MRT3847_50270C.1
tgattttgtaaaaattaaaatcttaatagccaaaacggtgcacgtgaaacaagatggcacaggcgagtaaatgaaagaagacaacgcctctttcaaagccacgttgcttttaaagggatagcaggatgttgaagacagcagaccacgttgcttttaaaggggtagcaggatgttgaagacagcagagcctaaattattaattgcggttttatgattggttgcaattgttagatctcatttttataagtacttttattaataaattttgaattgcttaaagtaaattcttgacttccattgaataattttacttgtttatgcaataaatatttgtagtttattttttaaaaatatttttattagtaccaatttatcttagacttagagtagttattatccataaatgaaattgatacttggaagaagacattatcttgaaactcacgttgcttttaaaggcatcgcagtggtcgttgaagacaaccaacccccactacactaatgcttggtaggattaaaataagtagttttaatgataaattaataattatttaaagtcaggttttgaactttgtctataaaaaattcttttttgagagaataatttatatttgattaagaaaaaatgatgtgtagatatgtggtacacattccggaaaacctagcaatggatgcagcggctcctctgctatgcgcaggaataacagtgttcaatcctttgaaagaccacgatttggtagcatcaccgggaaagaagattggggtggttggtctgggaggccttgggcacattgccgttaaatttggcaaggcttttggccaccatgttaccgtcatcagcacttctccctccaaggaggctgaagctaagcagcgtttgggtgctgatgatttcattgtcagctccaaccctaaacaattacaggntttgtaatgcaattgtttgcctctacatttcacagcattaaaaaagtatatatatgaaattgatgcatttgggccaaagtataataaatgggtgaagactatgtaaacatgccctagttactccggcgacactcaggctgcactgagaagcatagatgtcatattgcgttctgtcatcgcagttgactctgctgtcacttccatcaacatgcgaactagccttcaatttgattcaaatttcgtctattcatcacttgtttctatatctactgtttagtaaaccggtaattttacctctgcaattggatcactaagtcatatatttatcccaattatcttctgtttaagtttgaatttggggtt

SEQ ID NO: 87778 - DNA, 502 bp, Glycine max
  Clone ID: PAT_MRT3847_50271C.1
tttccctttggttcctaccccgagtccctactacggctgcgagaagacgacagatggggggttagagaaacaagacataatccttttcttcttccattcccttctcctttcaatctctagaattaacaccatgtcactgacacttttcctgaagacccttttcctcttcttcccttgctacctgtgcctccttgactcagcaacaacaacaacaacccttaagcccattttgctaaccccatccaagcctgcaacgacaatccctgcattcccagaacaatctgatgtctcagggtgccctctcaccctctcagatgagctctttgatgggatcaagagtgcatgtagtggtgccaaaagtggtgctgacatggagctccaccacagcaggtgctgtccagtgcttgcagcatggttgtattctgcatattctgccactgcactaggcagcatggcaggccatagccatagccatagcaacagtgctcatggtcatggccat

SEQ ID NO: 87779 - DNA, 457 bp, Glycine max
  Clone ID: PAT_MRT3847_50272C.1
gggaccggaaaacaaaaaacggggggggccccaaaggggggattaacagggggggcaaaaaaaaaggggaacaaattcccccccccccccttgggaataaaaaaaaatcaaaacgggaaacaaacagtccccacccaacagggggaaaaggggggccaaaaccaaaactttaaatcccagccttggccttaaacggaggggggcgccccaggttttaaaaacggggaaaaaaaaaaaaatcttttaaagggcccaaacaataacgggggggggaaaatcccccccaaattttgggaaaaaaaaaaaaaaggggggcaacgaggccccctatggaacaaaaaacgggcaacaaaaaacaaaaaagcttttatcatcttaaggaatggggacaaaaaggcaccgggaaaaacttcccagggatcccatttaacaaacccctccccaggtgtagcccaaa

SEQ ID NO: 87780 - DNA, 2019 bp, Glycine max
  Clone ID: PAT_MRT3847_50273C.1
tgattttgtaaaaattaaaatcttaatagccaaaacggtgcacgtgaaacaagatggcacaggcgagtaaatgaaagaagacaacgcctctttcaaagccacgttgcttttaaagggatagcaggatgttgaagacagcagaccacgttgcttttaaaggggtagcaggatgttgaagacagcagagcctaaattattaattgcggttttatgattggttgcaattgttagatctcatttttataagtacttttattaataaattttgaattgcttaaagtaaattcttgacttccattgaataattttacttgtttatgcaataaatatttgtagtttattttttaaaaatatttttattagtaccaatttatcttagacttagagtagttattatccataaatgaaattgatacttggaagaagacattatcttgaaactcacgttgcttttaaaggcatcgcagtggtcgttgaagacaaccaacccccactacactaatgcttggtagtattaaaataagtagttttaatgataaattaataattatttaaagtcaggttttgaactttgtctataaaaaattcttttttgagagaataatttatatttgattaagaaaaaatgatgtgtctcaacacccacctagtatctctacagctgcgagagggtctgattaattctctagttatggctgagagcagagcgaatcacacagtgagcgtatttgggtgggcagctcatgattcgtcgggcaagattaccccctacagcttcaaaagacggcagaacggtgtgaacgatgtgacaataaagatcctctactgtgggatctgccacacggatctccactgtgctaaaaatgaatggggcatcactatgtaccctgtggtacccggacacgagatcattggggaggtaactaaggttgggaccaatgtgaaggggttcatggaaggagacagagtgggtgtgggctgtttggcggcttcatgtttggaatgtcaccactgcaagaccgatcaggaaaactactgccaagacctccaatttgtctacaatggaatcttctgggatggcaccatcacctatggtggctactctcaaatctttgtcgcggattacagatatgtggtacacattccggcaagcctaccaatggatgcagcggctcctctgctggtgtgcgcaggaataacagtgttcaatcctttgaaagaccacgatttggtagcatcaccgggaaagaagattggggtggttggtctgggaggccttgggcacattgccgttaaatttggcaaggctttcggccaccatgttaccgtcatcagcacttctccctccaaggaggctgaagctaagcagcgtttgggtgctgatgatttcattgtcagctccaaccctaaacaattacaggctgcaaggagaagcatagatttcatattggacactgtttcggcagagcactctctgttgcccatcttggaattgctcaaagtcaacgggaccttatttctcgtgggtgcaccagacaagcccttacaattgccagctttcccattgatatttggcaagagatcagtgaaaggtgggatcatagggggaataaaagagacgcaggaaatgttggaggtttgtgcaaagtacaatataacgagtgacattgaattaatcacaccagacagaatcaacgaggctatggagcgccttgctaagaatgatgtgcgctaccgtttcgtcattgatattgctaatgctgccgcttccaacaactaaactagccttcaattcggatcaaattttacttgtttcgatatttactgtttaatagacccgtgattttacctctgcaattggacgaataagtcatatatttatgtcaatgactttttacttgttaaactgatctatcgtttaagtctgaattaattttttaagcttttagagaaaaaaattataatttaaacatttgtatgtttggtactctcgttttatttaataaaatgaatcaatct

SEQ ID NO: 87781 - DNA, 148 bp, Glycine max
  Clone ID: PAT_MRT3847_50274C.1
ctcctgcccaaaactggtaaaattccaaatcaataaggattgcggcgaacccccaaagatccaacattcattacggaaacacagactggggaaaaataaggggggaggggttgaggaaaaatcaattgcccaccacagcctcgctcca

SEQ ID NO: 87782 - DNA, 459 bp, Glycine max
  Clone ID: PAT_MRT3847_50275C.1
ccttatacgatatagggggactcagccgtggcggcattcatacaattctagatgcgcactgcaacatgaaccaactggacaacagtggcaatgcacaccgatcgtggtggggttgctgtagttgcatggtctgttggaggcagaggccatcgctttatggacgttcacttcagctacgagggattggacacctgagcaaggaacatgacatgccgacttgcaagctgataagtactatgctggaccacgccgaatgatattgaggttcatggaacaccttactgaacctggatggtgccaggatacacaacctgcgatgtgtaaagaactatatgccaacaacgggtcggtgagacaaggtctctcagtacctgttcgggatcgaccctattatttgaggcgaaagaaggtcgaacgtgggtgtcgtttttctcaaggtttcccagatgaacgcgatga

SEQ ID NO: 87783 - DNA, 754 bp, Glycine max
  Clone ID: PAT_MRT3847_50276C.1
ccacgcgtccggaaggtgatgattcagaggaaggatggacagcactcatttatcaatgatgtgctatatgttcccaatatgaagaataatttgctgggcttgggacagttgctagaaaagggctactcaatgcagatggaggacagtcaaatgaagatatttgatagcaagaggaggctgattctaaaggcctctttgtcaagaaacagaacattcaagattggaattcagattgcagaatttcaatgcttggttgcttccataagtgatgaaagctggatgtggcatcacaggtttggtcatctaaattttaggagtttaagtgaattgaaaagtaagaaaatggttcatagtcttccccaaattgagataccaaaacaattatgtgttgagtgttgtgtgtcaaagcaaccaaggaattctttcaagtcagaaattccaatcagatccaaaagaaagcttgaagtgatctattttgatgtgtgtgatccttttgaagtgaaatccctaggaggtaacaattactttgtgtcattcattgatgaatttactaaaaaaatgtggatctatttcattaagcagagaagtgaagtgcttaacatttttaagaagtttaagttcttgagtgaaaagcaaagtgataaggtaatcaaagtgcttagaacagatggaggtgggtgagtatgactcacatgaatttcaagtattttgtgatgaataggggataattcatgaagtgacatctccctataca

SEQ ID NO: 87784 - DNA, 499 bp, Glycine max
  Clone ID: PAT_MRT3847_50277C.1
caacacaccaccttcagagaaccattgctagagaagcaaaagcatagagaaaaaagtggaggattgttgaaagagagagtctcgtgatttgaggaggccacacacacccctctcccatctccgaaacaaaagcttcaaatttcggtcacaatttaaacaaaaggggatttatttaaaaactttttttttattaaataaaagaacagaacttggggtgtggcaaagcatagagagaaagaagaaggaagaagaatcattgggtgtgtgattttgaagtaaaaggtgaagtttttgaatagatcaaaggtgatgtcgtgttcttcttcatctggttctgaagaggacgatgaggggttcgactcttaccggaaaggagggtaccacgccgtaagagtcgccgaccagttcgccggcggcaggtacatagcgcagaggaagctcggctggggccagttttcaacagtttggctttgctatgatactactacatctgcatatg

SEQ ID NO: 87785 - DNA, 326 bp, Glycine max
  Clone ID: PAT_MRT3847_50278C.1
ctggtcatgatcatcttgctcaatgataatctgaagattcaacttaggaatggatctcctgcgcatcgggtgcccgagaatgctcagttggggcgggtccacatagcaacatatttcgactatgagctgcatgaattgccatggtctactctaagatccgaagagcccatcaaattaatatgtatcaggctcaaggcaaaggacggcctgattacatgtaactcgacgggggaaaaagtcgatttctgtgctataacagacattacacctgatccaacgatcatcatttatcattctggagtaccatggagcattttattcaacct

SEQ ID NO: 87786 - DNA, 368 bp, Glycine max
  Clone ID: PAT_MRT3847_50279C.1
cttatactttttttcacatatacattgaaaaaggggctctttacaataaaaaaaggtgtaagttaaaaaaccttaaaaaattacaaaaaaggcctacgttcacattatttaaaaaaatcctcctggaatggaagaaaaagaaaaatcggaaaagatagatgccatattgctacaaagaaaagaacctcaatttaatgttgttcatcgctcaaatggtaacataattgagttaaaatgttatcttgctgatttttgaaacttcctaatggttccgtgttgtattttaaaaaatctgaatttagaaatgcacttccgaaaatacacacttggaggggccattctccgaatagatctattggaaaactttt

SEQ ID NO: 87787 - DNA, 353 bp, Glycine max
  Clone ID: PAT_MRT3847_5027C.1
agtgagagacggaaaagtgggcccggcggtatcagtaaccaataacagtgccatgggaacataaacatgtagaggatcatccttattattgttaattgaagaagaggaagacctaacataaagatgtccgttacggagctgaaggagcgtcacttggcggcgacggaaaccatcaacagtttgagggagcgcttgaaggagaggcgtctatcattgctcgatacagatattgctggttacgcgaggtctcaaggtagagcccctgtcacctttggtcccaccgatctcgtttggtgtagagcgcttcagggtcatacgggaaaggtgtactcaatggattggacttcagaaaa

SEQ ID NO: 87788 - DNA, 133 bp, Glycine max
  Clone ID: PAT_MRT3847_50280C.1
aatgtgcatcattttcatttgttttcacaaatttgactcctggtttaaacccacctattgacacaaataggccaaatctcttggcaaaatatagaatccaccctataatatagaatcacggcgggctcgggga

SEQ ID NO: 87789 - DNA, 331 bp, Glycine max
  Clone ID: PAT_MRT3847_50281C.1
cgggaaaatgttattcgttaatatgttagttttagttagcgggtggactccaacccccgacctatccctccctctctcctacttttaccagcaagccaaccttatatctccattacactctggatgtgaccatgtgtgttcctatcaggtttctgcatcacttgacgctctcatagaaatcagcagcggaaaggtgaacatccatgttctgatggctatggcagcctttgcatcgatattcatgggaaactctttggaaggaggcctgcttcttgccatgtttaacctcgcgcatatcggtgagctaatgatgcaactcacacacttgctg

SEQ ID NO: 87790 - DNA, 109 bp, Glycine max
  unsure (1)..(109): unsure at all n locations
  Clone ID: PAT_MRT3847_50282C.1
aaaccaaaccaggaacacggcgggttttggcggggnaagacgaacaccccggacaaacacacggagtagtcctttggaaagcacgaaacaaggggcccaaccaccagga

SEQ ID NO: 87791 - DNA, 288 bp, Glycine max
  Clone ID: PAT_MRT3847_50283C.1
aaggaaacctggaaagttcctatttccggtaaattcgattaaataataaccaaaaattggtacctggtaccctgtcaccttggaattccaaattgcacgttaaggttaactcccgaattggacccaaaaaacaagggaaaattaattccccccggtttttttcttttttgggggaattttcaaacttttccaggggaaaaccctagggagcccaatttgctttaaccttttggaaccggcaattaaatgccccagggctgttatttttccccaaaaaggattcgtttt

SEQ ID NO: 87792 - DNA, 211 bp, Glycine max
  Clone ID: PAT_MRT3847_50284C.1
aggcggaaaaccagtatagcgcccgaccttcgctagtataactttttatgacttcgggcaaacacaacaaacaaaccaatcaggccaaaggacaaaactacacaacgaagcacgccaatacaaaaccataccaaaaggtgcccaataccatgcacccaaaggacccaaactccccgctcactaccatcaaagaattaccccgcaaaccgca

SEQ ID NO: 87793 - DNA, 239 bp, Glycine max
  unsure (1)..(239): unsure at all n locations
  Clone ID: PAT_MRT3847_50285C.1
tcacaacatttntcacaggcttcatgttgtatttcacaagaaggaggcatatcataatttttatcaccattcttgataatacaaatgggatcaccatttttaacacattattgagtacaaattatatcttcattgtgaacacaaagcttaagattaccatttttagcacataccatatcacaaatagttgttcctatacaaattcaatgacaatatccatttttagttcttctcctcct

SEQ ID NO: 87794 - DNA, 213 bp, Glycine max
  Clone ID: PAT_MRT3847_50286C.1
acgcgtcagccaacgcgtccggagacgcgtgagtaatcatcaatacagtgctgcgtgtgttgctctgtgaatccatcatcttcttccattggaggaccagttcctcctggaatagacatgataatacaggttgccttaatcacttctctgagttgctaagttaattgctccgtcattgtttcactcttgggtctcgcgtacccgtgtcaccgt

SEQ ID NO: 87795 - DNA, 300 bp, Glycine max
  Clone ID: PAT_MRT3847_50287C.1
cgggccctgggggtgttctaaatatgatcaaacagatattacggtaaaattccttggacaccctcaaaatcatatcacactaattcaaaccgggaaggagggttcattgatggttactaactgaactcatcttctaataataccctattgaagtccaaaacagtttcttcaaaatcttcgagttcttgttcacattggactctttctgggaatgagactattgctcactactattcgaatcaatctacgaaatacgttcctacttaaggttgagaattggtttcggcagcttatgaggct

SEQ ID NO: 87796 - DNA, 617 bp, Glycine max
  unsure (1)..(617): unsure at all n locations
  Clone ID: PAT_MRT3847_50288C.1
cacgcgtccgctgcatatttaaaattgggaacgcaaagatatgcctgaaatccccgagcattcttttcgaacgatgcaaaaaaatttcactcaagctattgcttacaaagagacccattagctcgcccgacagcccataagttactagaccaccccttcatttcgagatcaatcggcaacaaaagctgcaaatgtcagcataaccagagatgcttttccttgcatgtttgatggaagccggacaccggtatatattatatatatatatatatatttatttatttttgaaaagtcatgttacttcttacgtgatagttcctaacatgctgcaattgtcctgaagtttgaatgactcaagatgttataaagtacttgataacatacaaagatgatgtacacactggatatcaatagactttgttatgatctatatgccaaatcactatgattcaatgtcagtatatcattgacggcagaagaatagaaaaaacaatgccaaatcatgcaattgttttttcagttatttatgtagatgcattantgtagtccaatctcgtatatattattattaaactgcaaagtgaaggtggtatacaagaaccattagtggaaatttg

SEQ ID NO: 87797 - DNA, 255 bp, Glycine max
  Clone ID: PAT_MRT3847_50289C.1
ccctctttttcggtgagagagcgcgatcagctgaggagggggtgtgtagggagacagactcagtgttcaatggctataacgaacaaagttccacacattccactttccacgggggaagaaggcgattcagtgcgcacatggacagtgaagcatcctgaaaaggtaccatctgaccaagacgccctttactgcaatgaaagaaactgggaggatgaaaaggatgatgaagaatatgatgcatgaagtgcagaaaca

SEQ ID NO: 87798 - DNA, 277 bp, Glycine max
  Clone ID: PAT_MRT3847_5028C.1
cacaaagtccggtgatgccttctttggcaatttcaaagatggatggcgacatggccagtttctttgtattaatgcgaatgggacaaggtacactgaaatttgggaaaatggtgttcttgtagatggcaagtatttagacagatgaccatggtggacaaatgcggtcggtgcccaaaattttgtaattactgtgaattttagtcttttctcgatttttatttgtgttttatgttgtataatagctgtttttgccggcaagctatgttttgtagtctgt

SEQ ID NO: 87799 - DNA, 262 bp, Glycine max
  Clone ID: PAT_MRT3847_50290C.1
ggggggggggggtttttttcaaaaagaccactatttggtatgtttgatgtaaaaacacataaggcaactaggtgttacaaaataaactagggaaccaccgccccctttttttgacaacaagaacaaagatgagcctatcagagctttcttacaaatataagtgtcctgccttcccctttagtttagtgagtacaaacactttaaaacagaactcccaaaatattaatttggtggactagcaatacccggatacatttttggg

SEQ ID NO: 87800 - DNA, 279 bp, Glycine max
  Clone ID: PAT_MRT3847_50291C.1
gcggtcaatttttttttttttttttattattatttcctttttttttaaaaaacatactaattcgcggcgggttatccagatcatacaccttcccttcactcaattcacatccacttacatttaaacgcaacagaccactctgtctcctaacttaaaaagattgatacccctaataaatgacttaactcatacctcactgcattttccataactttacactttccattcttataaactctatccctacaacattattaatgaatctcccttcccacattt

SEQ ID NO: 87801 - DNA, 115 bp, Glycine max
  Clone ID: PAT_MRT3847_50292C.1
cttgctagattgatgacccccattgcaacacatttgagtacttctgcgaatggggaggttggggattcaggctatgtctgctcctgaatatacaaaaacttgtgagggctactcc

SEQ ID NO: 87802 - DNA, 398 bp, Glycine max
  Clone ID: PAT_MRT3847_50293C.1
agtgttttttttttttttttttttttttttttttttttttttatagtttttttttttaaaaaaaggggagaataaacttttttttttggttgggaaccccaaaaaaaaaaaccaaaaaattttttggaaacatttggggggggggggttttaaaaaatggggtcccaatcccaacccatttaaacccaattttttaactgggtggggattttttttggagcaccattttttaataaaaaaacaaagtagattaacctgtgggtcccccccagagagggtaaaaaaactcaaaaaattttgccttacccaccaaatattttatttcccaaggagaggggcccccaagaaaagttcattttgggggttaagggggttttcaaaaaggggacccaagtgaa

SEQ ID NO: 87803 - DNA, 418 bp, Glycine max
  Clone ID: PAT_MRT3847_50294C.1
gtgggatgcaaccttcgcttgaccacttcaaggtacttgacacccatcattaggcaatccgtgaagtttcgcgacatgtcgggagtcgaaaggaagcgttaatgcgcaatccgtaaagttccgtaacattccagaagccaaagaggggacgattgtgtaatccgtaagatttcgtgacattacggaaagaaaacaagtaacgttacataattcgtaaagttccgtaatgttacggaaaaagaatcagcaaaaaaggggcagagggggtgtatttagtagacatgggtgtgcaaatagcaatcatacccacttgggccttccaggatgttccaacagaaggcggtgccttctggtggaagcaacccagctcgcctgggcgagctgggcggcaaccacttccctcttttcccctataaat

SEQ ID NO: 87804 - DNA, 344 bp, Glycine max
  Clone ID: PAT_MRT3847_50295C.1
gaggtctggtccggaattattcccggttcgacagcaataagtcggcggccgccctatatttacaggggggctttttttaatttttgttgttacaacaccaaagattcctttattgaagatagacctacaaatgaatcaaggcaacttttccaccctataggtttatattatattatatattccacgtattctgtccatgcccttttctttttctatctacaacccccccccctcctgcgcggttacaacttttttgtttattccttccttttaaactataaaaaaaatttaggatataaaagctgtttttaattccaaaactcaatggcttatcattacacaaa

SEQ ID NO: 87805 - DNA, 439 bp, Glycine max
  Clone ID: PAT_MRT3847_50296C.1
ggaaaacatggaaaactttaaaggttgccttatggcacctaatcaaattcaaattaggcattctaaactgaaaccatttctaaggtgaggcgactgagaaaggaatgaaaataattttgttaaggggcactcggtattctaatgaggacagatagatgctgaaaatctggccgtaagaaaacaaaaaatacacactgattataccaagagctgtgctaaacagattatttgcctagcacggatcactaagcactctctagggcgtgcgcacacggatgataacttgtgaaggccggtttttgcaagaaattgctaatttctggaaagatcaggctggagctgaaattggaatggctcccactattaagaagaactgattaaaattgacgagattgattcctgaaggaaaaattttaggatcaaaatttaccatttcaac

SEQ ID NO: 87806 - DNA, 1891 bp, Glycine max
  Clone ID: PAT_MRT3847_50297C.1
cttttctttcagggaaaacctatatgttcagaatctcaaatgtaggcttttcaacctcaattaacttcagaattcagggtcacaccctaaaattagttgaggttgaaggatcacacactgttcagaacctttacgattcacttgatgtccatgttggccaatcggttgctgtgttagtaaccttaaaccagcctccaaaggactactatattgttgcctcaacaagatttacagagacacctctcactacaactgctgtactacactatgcaaactctttttcctctgcattgggacccgtgcctgctccccctgttgataaatatgactttgactggtccatgaagcaagctagaacctacaggtaaggtcactaaaaaaacaaagtaaaaaaaaagacttcctgagttgttttaatttattgataaattctaatctgtttaaaatgaattattcctgcagatggaatctgacagcaaatgctgctaggcctaacccacaagggtcattccattatgggaagattactcctacaaaagtaattaagttggccaattcagcacctttgatcaatggaaagctccgttatgctgttaacagtgtctcctatgttaaccctgacacccctctcaagcttgctgattacttcaacattcccggaatcttcagtgtgaatttactccaaaactctccctcaaatggtccaggatacataggcacctcagtgttgcaaacttctctccatgattttattgaggttattttccagaacaacgaaaacaccatgcaatcttggcatcttgatggttatgatttttgggtcattgggtatgtcagcttccttgaattataagttttgtttctattatcaaaacaatttagaattagcttaggaaagttttaatgattgatcattgccacaattgcagtcatggtttcggccagtggacagatgccagcaggaaaacatataatctagtggatgccctgactagacacactacacaggtaaacttaacatgaaagttccctattccttattttgagttttctttagagacccttataataattaatagaatgtggctatttgtttgtttgtttctgacatgcatagctggtgtgcttcaaatgaatgtaggtgtatccaaaatcctggactactatattggtgtctttggataaccaaggcatgtggaacttgaggtctgcaatatgggaaaggcaatatcttgggcaacagttctatctcagagtgtgggatgcacagaaaagccttgctaatgaatatgacattcccaacaatgttctgctttgcggcaaagctgttgggcatcacccttagaacatatatcaactatcagcctcctatttatcggtgtattttctggtcatgagggcttgactacaactagaattccttttcctttttcttaaaaatgaaaaaggacaatgagaagctactttctccaaatttcggatagactcgagtatatttgagaaaaaaaaaagtatttttattaatttttcattgctcgtttgtgtattaacaattgatttcatacttaatttatttatagctataagttgtgaagaaaccaggttacgtttcattcgtttaaaacttgatcaaccagcaaattgagtttgacatggccgaatgctacgttcaatattaagattcgagtaccttataatcatggttaacttgtagtatatttgaacagaaactagtcctgtaaaaaccccttctggtgatacttaaaagtaaaatataaaatgggaggtcaggttgccagatccatcttgtgatacttaaactaattcctactattgtaattgaattggcacattgagaaatcacaatcattggattaggagattttatgct

SEQ ID NO: 87807 - DNA, 464 bp, Glycine max
  Clone ID: PAT_MRT3847_50298C.1
agaaactgaacgataatgtttcattttgagttcatagttccaagtattcctttttattttctcttgagtgatgtttgagctgtgaaataataacagtgttttttttttctctgtcgtcattttcagcagacaatatgcgaagaactggcttgttacatttgttatgccttgtcattgctttagtaagtgtgcaagcagaagatgcgtataagtattacacatggacggtgacttatggaactatttctccattgggtagtccccagcaggttattcttatcaatggtcagtttcctgggcctagacttgacttggtgactaatgagaatgtaattctcaaccttatcaacaagctggacgagccatttttactcacttggaacggtattaaacaaaggaagaattcatggcagagatgagttttgggaaccaactgtcccattcctccaaactcaaattacaca

SEQ ID NO: 87808 - DNA, 2080 bp, Glycine max
  Clone ID: PAT_MRT3847_50299C.1
cttagctatagtccaatcatgctttctactctctttactctttagtttaattttattttttgtatatattaaggcggcacagacccaagtgggtgtaagtcagtcttgggagtgagtcactcttcttgcataacccagatctgcagacaatatgcgaagaactggcttgttacatttgttatgccttgtcattgctttagtaagtgtgcaagcagaagatgcgtataagtattacacatggacggtgacttatggaactatttctccattgggtagtccccagcaggttattcttatcaatggtcagtttcctgggcctagacttgacttggtgactaatgagaatgtaattctcaaccttatcaacaagctggacgagccatttttactcacttggaacggtattaaacaaaggaagaattcatggcaagatggagttttgggaaccaactgtcccattcctccaaactcaaattacacatacaagtttcaggccaaggatcagattggtacatatacatactttccatcaactcaactgcataaagcagctggagggtttggagcactgaatgtttatcatagatctgtcatcccaatcccttatccaaaccctgatggagattttactttactcgttggtgattggtacaaaaccaaccacaagacgctaaggcaaactttagaatctggaaaacctcttgcatttcctgatggcctccttattaatggtcaggctcattcaaccttcactggtaacccggggaaaacctatatgttcagaatctcaaatgtaggcttttcaacctcaattaacttcagaattcagggtcacaccctaaaattagttgaggttgaaggatcacacactgttcagaacctttacgattcacttgatgtccatgttggccaatcggttgctgtgttagtaaccttaaaccagcctccaaaggactactatattgttgcctcaacaagatttacagagacacctctcactacaactgctgtactacactatgcaaactctttttcctctgcattgggacccgtgcctgctccccctgttgataaatatgactttgactggtccatgaagcaagctagaacctacagatggaatctgacagcaaatgctgctaggcctaacccacaagggtcattccattatgggaagattactcctacaaaagtaattaagttggccaattcagcacctttgatcaatggaaagctccgttatgctgttaacagtgtctcctatgttaaccctgacacccctctcaagcttgctgattacttcaacattcccggaatcttcagtgtgaatttactccaaaactctccctcaaatggtccaggatacataggcacctcagtgttgcaaacttctctccatgattttattgaggttattttccagaacaacgaaaacaccatgcaatcttggcatcttgatggttatgatttttgggtcattggtcatggtttcggccagtggacagatgccagcaggaaaacatataatctagtggatgccctgactagacacactacacaggtgtatccaaaatcctggactactatattggtgtctttggataaccaaggcatgtggaacttgaggtctgcaatatgggaaaggcaatatcttgggcaacagttctatctcagagtgtgggatgcacagaaaagccttgctaatgaatatgacattcccaacaatgttctgctttgcggcaaagctgttgggcatcacccttagaacatatatcaactatcagcctcctatttatcggtgtattttctggtcatgagggcttgactacaactagaattccttttcctttttcttaaaaatgaaaaaggacaatgagaagctactttctccaaatttcggatagactcgagtatatttgagaaaaaaaaaaagtatttttattaatttttcattgctcgtttgtgtattaacaattgatttcatacttaatgtatttatagctataagttgtgaagaaaccaggttacgtttcattcgtttaaaacttgatcaaccagcaaattgagtttgacatggccg

SEQ ID NO: 87809 - DNA, 402 bp, Glycine max
  Clone ID: PAT_MRT3847_5029C.1
ccaaggaggggtctctatataatagaacagaaaatagtgtctgtttttcgcaacaaaattcaatcataccaattttatctgtccataatgctcaggaacagacagcatgttttcctcattccaaactggattcaagtggctccttattatagttggctggacagtctgcaggctttaagcaatagcaccaaatcaatttcagaaagaaaattattactgtttctgattttacaactttaaatagaaaatacagagcaccggtttcccaagatcatttagtgataccaacctgctggccaaggctcaaaacaacatacggatcacctgactttatatctctgatagctaaattggggcctttaatcactttcaccttcaacattccaataaattccaccatac

SEQ ID NO: 87810 - DNA, 581 bp, Glycine max
  Clone ID: PAT_MRT3847_502C.1
gtacgtatagctacggtaattacggcttcgagtggatgtttaacgttgttctttacttgagaaagtttgccgaatgattcaagttgggcagcactaatattcaaaatcgcaatatatctctgaaatataaatctaggaagacagccatgaaacaagagtcaccagcctcaccactgccatcgtcgcttccacaaccatcaccaacaatgacaacaacgaaaaatgtgatcaagcttcagaacagtttaactccatcacggttaaggcttccttccaagtacagagagccgccaaagactccaccagaggttgttgtcaacaatgtggtggtgtcaacaccatcaaggagagccaagtctgtgactccagagttgaagcacaattcaaggatcaaaaggggtcttgtgctgaacaaggccaaacccaatgaagaggttgtgggaacaactcaaaggggtagggaagctgaagagactaaggttgtcgctggtttcgtgagacctcatgttgtggaacaaattgctaggccaaggaatggggctggggattttgtttcaagagggacaagaggactctgtgag

SEQ ID NO: 87811 - DNA, 1319 bp, Glycine max
  Clone ID: PAT_MRT3847_50300C.1
cctcgagccaatgcgttttctctctctctctctctctctctctctctctctctgtgttgcgttttgtgaaatcttattcgacatggcgtcacgggacaacaagaaggcgtcgagcagccgagccggcagaattcgcaccctctccgatctgaaccgtccctccgccgattccgacagcgactccgatggccctcaggagtactacaccggcggcgaaaagagtggaatgcttgtccaggatccttcaaagggaaatgatgtggatgaaattttcaatcaagctaggcaacttggggctgttgaaaggcctcttgatcagcttcaggagcctccaaggtcaactagctttactggaactggcaggttactctcgggggaaactacacgatctactaataatcagcaacctgaggctgttgttcataacattgttttctggagtaatggtttcactgtaaatgatggaccattgaggagtttggacgatcctgaaaatgcctcatttttagagagcataaaaaaatctgagtgtcccaaagagcttgagcctgaagataggaggtcatctgttaatgttaatctcatacggaggaatgagaactatcgtgaacccgaaaagcagcatgttgcatttcagggagtgggaagaactcttggaagcagctctacatcaatggctcctgactctcctgctgcctcaacacctcccaacacagcgccaactccttctgctggcctggtagttgatcaatcattgccatcaacctcaatacaactcaggttggctgacggaacccgcttgatatcacattttaattaccaccacacaatcagcgacattcgtgccttcattgatgcatctagacctgggggtcggcagaattatcaacttcagttgatgggtttccccccaaagattctagctgatgaaactcagactatagagcaggcaggactggcaaattcagttgtcatacagaaattttagcaaattgctgcttcatgcgattagtcattgctggctaaatgctgcatggaagggatccagttttattaggggcttctagacgtgaggtactgttatttacaaaaacagataggaaacccccctaatgttggggggacattttcttttgttgctcaaagtttaccaagtatttgctttaggaccagttggatggcttagctttggacctatttcatgttatgatgattgtgttgtgtgtcctctttctggctgggcctagtgactgaacttgataatatattgaacacttcactgaaatgcaggatagccgtaagtcacacgtcagtttttg

SEQ ID NO: 87812 - DNA, 136 bp, Glycine max
  Clone ID: PAT_MRT3847_50301C.1
tcccaatcaattaaaattctataggctctatgtataattcaaaaaaattgaagggtttttccaaatcccaacccaaattcaaggcttttaatgaccattattttagtttagctggccaagatgagccccagccaaa

SEQ ID NO: 87813 - DNA, 190 bp, Glycine max
  Clone ID: PAT_MRT3847_50302C.1
gaggcagattgaagcatttcatgttttcaagctatttactactaaccaacataagccacctaatatcgtcaatgtatttattacaaacaaaagtaagatactaaaactattaaaagacttcaaaattgacaaagaggatgaacaatttgaagctaacaaatctcaagtgataagaaaaattaagactctt

SEQ ID NO: 87814 - DNA, 2426 bp, Glycine max
  Clone ID: PAT_MRT3847_50303C.1
gtatatattaaggcggcacagacccaagtgggtgtaagtcagtcttgggagtgagtcactcttcctgcagaacccagatctggtagtttacaaattgcttccttttatagaaactcaaccataatgtttcatttttgagttcctagtgcccagcattcttttttatcttctcttaaagtgatgtttggactgtgaaataataacagtgtgttttttctctggttatttcagtagacaatatgggaagcactggtttgctacatttgatatgccttgtcattgctttagtaagtgtgtcgcttgtgcaagcagaagatgcgtataagtatttcacatggacggtgacttatgggactctttatcccttggctagtccccagcaggttattcttatcaatggtcagtttcctgggcctagacttgacttggtaactaatgaaaatgtaattctcaaccttatcaacaagctggacgaaccatttttactcacttggaacggtattaaacaaaggaagaattcatggcaagatggagttttgggaaccaactgccccattcctccaaactcaaattacacatacaagtttcaggccaaggatcagattggcacatatacatactttccatcaactcaactgcataaagcagctggagggtttggagcactcaatgtttatcacagatctgtcatcccaatcccttatccaaaccctgatggagattttactctactcgttggtgattggtacaagaccaaccacaagacactaaggcaaactttagattctggaaaatctcttgcatttcctgatggcctccttattaatggtcaggctcattctaccttcactggtaaccaggggaaaacctatatgtttaggatctcaaatgtaggcttgtcaacctcaattaacttcagaattcagggtcataccctaaaattagttgaggttgaaggatcacacactgttcagaacctatacgattcacttgatgtgcatgttgggcaatcagttgcagtgttagtaaccttgaatcagcctccaaaggactactacattgttgcctcaacaagatttaccgagacacctctcactacaactgcagtactacactatgcaaactctttttcctctgcattaggacccgtgcctgctccccccgttgataaatatgactttgattggtccatgaagcaagctagaacctacagatggaatctgacagcaaatgctgctaggcctaatccacaagggtcattccattatgggaagattactcctacaaaagtaattaagttggccaattcagcacctttgatcaatggaaagctccgttatgctgttaacagtgtctcatatgttaaccctgacacccctctcaagcttgctgattacttcaacattcccggagtcttcagtgtgaatttactccaaaactctccctcaaacggtccaggatacataggcacctcagtgttgcaaacttctctccatgattttattgaggttattttccagaacaacgaaaacaccatgcaatcttggcatcttgatggttatgatttttgggtcattggtcatggtttcggccagtggacagatgctagcagaaaaacatataatctagtggatgccctgactagacacactgcacaggtgtatccaaaatcctggactactatattggtgtctttggataaccaaggcatgtggaacttgaggtctgcaatatgggaaagacaatatcttgggcaacagttctatcttagagtgtggaatgcacagaaaagccttgctaatgaatatgacattcccaataatgttctgctttgtggcaaagctgttggacatcacccttagtatatatatcggtgtattttctggtcatgagggcttgactacacaactagaattatttttcctttttcttaagaaagaaaaggacaatgtgggagaagtcaatttctccaaatttcggatagacttgcgtatatttgagaaaaaagtcttgtattaatttttcgttgctcgtttatgtattaacaattgagttcatacttaatttatttatagctgtaagttgtgaagaaatcaggttagatttcattcgtttaaacttgatcaaccagcaaattgagtcttacatggccgaatcttacgttcaatgttaggattcgagtaccttataatcatggttaaacttggatatttgaacagagactagtgtaaaaacaccttctggtgatactttaagtaaaaaataaaatgggaggtcaggttgacagatccatctcgtgcaagtttagcaaatcgataattgagtcatctcaactaattcctactattgtaattgaattggcacattaagaaatcataatcattggatttggagatttaaaaaaaaaaaaaaaaaaaaaaaaaaaa

SEQ ID NO: 87815 - DNA, 440 bp, Glycine max
  Clone ID: PAT_MRT3847_50304C.1
caactcaggttggctgatggaacccgcttgatatcacattttaattaccaccacacaatcagcgacatccgtgcctttattgatgcatctagacctgggggtcggcagaattatcaacttcagttgatgggtttccccccaaagattctaattgatgaaactcagactatagagcaggcaggactggcaaattcagttgtcatacagaaaatttagcaaactgctgcttcatgcagtttgtcattgctggctaagtgctctgcattaaagggatccatttttaatgggggcttctagatgtgaggtactgttatttacaaaaacagataggaccccccctaatgttggggcgacattttcttttgttgctcaaagtttaccaagtatttgctttgggaccagaaaaaaaaaaaaaaaaaaaaactatttcatgttaaaaa

SEQ ID NO: 87816 - DNA, 143 bp, Glycine max
  Clone ID: PAT_MRT3847_50305C.1
ttttccgacaccgaggctcgcattcttggtggctaacctgactaccgcccccctattctcactacttaattcgattctgtactttgttacaaacttgatattgcttacatcctaatctgagtactcattactacaacaaaacc

SEQ ID NO: 87817 - DNA, 259 bp, Glycine max
  unsure (1)..(259): unsure at all n locations
  Clone ID: PAT_MRT3847_50306C.1
caacaatgccaatgcatcaccatcactcttcttnttcnccntactcttctntnttgtttntcanatgacctccntcaactccgaaggcntctncctgttagntctcaaagcgggctgtggacnccgaccccaccggagttnttacttcctggtnggaaaccgatgtcacccnatgtnatnnnncgggaatctcctgcaccggcgacaaagtaacccaagtctcnntcccaagaaaaaacctcaccggttanatncttng

SEQ ID NO: 87818 - DNA, 250 bp, Glycine max
  Clone ID: PAT_MRT3847_50307C.1
gctctttacatcttatttgctagtctgtactttctattttctccaccgccttgtctcattcgagagctttcgtcgttgatgtgataggaccacatcctggttggttggctctcatggctggtatttctactggtgccgcatctttctttatttcatagcgccctccttctgaggacgatttggaacaactcatgttttatattgctcaactccctcttcatcttggaaagcttgaagacttgtcattatt

SEQ ID NO: 87819 - DNA, 460 bp, Glycine max
  unsure (1)..(460): unsure at all n locations
  Clone ID: PAT_MRT3847_50308C.1
ccacgcgtccgttataagtgagggaaaacaaccttccattggcagtggtgcaaaggttatatcaggaagtgatgtctcagatgattctgatcaaattctaattggttcagcatcaattgctggtggtttattgagaaatatagttgaggaagttgcaacttttcaagaaggcaagcagcaacattatggaaactnatntgnngtgtgcatgggagagcnncgagagttctgttaacagcattggggagggaagcattcctggaaacaaagttgctgaatcagcaaattttgattaccatcagggacaaacttctggctttcgggatcatgctaaccggaatgggtgttgactcaattgctgcttctgaactcagtagtaatctacctaatgattctcgctctctctttgatttttcatctctgcagcaaacttcaagcattaatcaacaggacttgaaaa

SEQ ID NO: 87820 - DNA, 445 bp, Glycine max
  Clone ID: PAT_MRT3847_50309C.1
gcccacccaagtccaacaaaaaaaaaaatccgcaaaacccttttcccgggggggaagcctaaaacaacccctgcttttgatggggggagaaacttttttaaaaacccttttttttcccgaaagaaattaaaaattttgaattttgaatcctttgtccagggggggaaataaaattttcttttttgggcttgggccccccaagcccaatttaaggccctctttttttccccccagttggggccaaaaacaacccttaaagggaggggcccttttcaacttggggggccctccaaaatccaaaacaagtttaaaaaacaaggatttttgggaaccctgttcctataaaggggtttcccacaaaaaaatttttggaaaaaaatccccccaaatttttggctttttaaaaagaattcttttttaaataaccccctcccctttaaaagcc

SEQ ID NO: 87821 - DNA, 373 bp, Glycine max
  Clone ID: PAT_MRT3847_5030C.1
gtttggtggtgccaatttttttgcctttggtttcaccatgggtgatggtctgggagctcagattggggacgctttgattcttgtttacactgtctgatccgccatcgatgccagacgttgagtcagacactcccacgtacctatttgtgcacccttgccaattgggttccttgtgtttttggttgacttggctgccatcctcatcaccggaattggtatcaaccctgctcgtagtctagatgctgctatcatcttctacaatgaccttgtttgggatgaacactggatcttctgggtgggaccattcttcggtgcagctcttgcagcactctaccgccaggtcgtaatcaaggccattcccttcatgtccaag

SEQ ID NO: 87822 - DNA, 308 bp, Glycine max
  unsure (1)..(308): unsure at all n locations
  Clone ID: PAT_MRT3847_50310C.1
ttacanncatnncacanangcatngncttcggctagngntttganncttgaatcannactaancanncnnnnnacannaannnnnnnanacngaaanncagnanattccngnancnnnntnancccccccccccccccttcnccccccccncnnaccctatnnaataangacnnnagcacnnngctgnctncnttgntnacaacnttcanactcgaaganaancaattatnnannngganaanacttncaacattntnatgaannattnaannaagngtacnacacacaanaagantacntgnncngt

SEQ ID NO: 87823 - DNA, 134 bp, Glycine max
  Clone ID: PAT_MRT3847_50311C.1
ggtgattggtggggtttccaaggggcaggtaaggctttcccaaccaaaatggtttttgtggttaacctggggtggcctaccccccaaaattttttggttggaaattttccaggggttcttgggttcccaatttt

SEQ ID NO: 87824 - DNA, 461 bp, Glycine max
  Clone ID: PAT_MRT3847_50312C.1
ccggccgacgcacgcgtacggttggtcccaaaccttctagtacagctgatttataggactgaacaaggctcacctcgtcgggctatatataattgactccacgcccctcacatctttaagtgaaaacacacaaacaatcacttagtcacaaacctcataagatacctaaccttcttttcaccctattaaaagcgtataactaagtcactgaactttccgaaatataatacatcactgaaacttgcaaacagaaaactcataacacacaaactctcatagaaaaatcgttagcaaatctccacacttctcacgaatatcatggctgctgttgcttatacacaaatcaaatatgccttatttactgtacatcaaattcactatataaacctttctatctatacactaactttcatattttctgcttcaaactcaaattattattacttacaatattattatta

SEQ ID NO: 87825 - DNA, 350 bp, Glycine max
  Clone ID: PAT_MRT3847_50313C.1
tgtctaaagaaagaatcttctttggctatatctaaatgcacgtcatttatacatatggtgaaatactccattccatgaactagtgtatacttactttgcagtgggcaaaaggggagctctagcaccagagttaccaggtttccctcttaaattcgatagaaccacataccagaaccctgcacaaaaaaagcttattaaccatgcattgttgtagatcacaacatacgtgttaggaactgagagggcaatttcatcttcctgcatgaaaccacgaaccacaggtcaaactccaactactagtgcccgaatagccgccgcattgaaccctcttggattcctataagctccat

SEQ ID NO: 87826 - DNA, 259 bp, Glycine max
  Clone ID: PAT_MRT3847_50314C.1
ggctcgagcacagacacagcataattcatacacatggtttatgccaaccatcgatatgtggttataggttccactgaagctaaaccaataacccctaatctcgaagggagagaaaggggccaactattagcggctgacaaggcacccgggccatgagattgttcacccaactagttgctggcatatccaaggacttaataccctcagagaatggctttcagacagctgacgactactaagataagaactttcatgcatc

SEQ ID NO: 87827 - DNA, 533 bp, Glycine max
  Clone ID: PAT_MRT3847_50315C.1
cggtcgcgttgtcggacgcgtgggcgcggcgggatcatcacgagattgcaaaatgaaggtgttgtctctgaaccctaattgcttccgtgtttggatttttgtgtgtttgtcgctgaaacatgttcggttttgctgcagttcaacattgcaaatcccaccactgggtgccagaagaagctggaaatcgatgacgacctgaagctgtaatcatttcactttctctgcaattttcatttgtattactcttctgattgtgtgtcgcgtgttgcgcttagaggaaaaaccgttgctttttaagtggggatgctcagaaacgaagctttacttcagtgttgctttgtgctgcgtttgggactccttattgattacgatttcgaatttgccaaagggatcttgagtttaatcgctgctatcttagggttgtcttttttttctattaaagttgctagctttatgattaacctgacacataaagctgtagtgcatcatggtaagtgcttttcatagattgctgattgcgtgcatatgaacat

SEQ ID NO: 87828 - DNA, 318 bp, Glycine max
  Clone ID: PAT_MRT3847_50316C.1
ctctacctgtaagagtgaaaaaaccttctcttatccttttctttattctcaagagcacttcatcattgtctccaatgtaatgacttgtaatccaccatccgtgctccaaaacaaacttaatttcaatttaaacataacttgtcattacttttcctatatttgtaaacatttcaatacttccataactcttaaatttaccacaaaaactcctcccacaaccacatactcttccatatttactttttattttatataaatgttatatatctattaatcataatctttcaaacttacattcttatttctttttatactatc

SEQ ID NO: 87829 - DNA, 283 bp, Glycine max
  Clone ID: PAT_MRT3847_50317C.1
ccattcgttcgttttttttttttttattttgtttttaattatcagttaaattacgggggggcactgtcataccccattgtgagagcctgttacaaaaaagaatttcccaatgctaaaacaacgtcacgaccctcataactgataacagaccacccaaatattgctaacctagcttggcacgcagaccaaacccttgccatgggcacgaagaccggtataccctccaggcccatgaaacagccccctaacccgggccacagcaccaacaaccgccattacagaa

SEQ ID NO: 87830 - DNA, 369 bp, Glycine max
  Clone ID: PAT_MRT3847_50318C.1
cccaaaaaaaccaacatggacgggggcccgtattttagttaaattatgcaataactgagacataatcaggggcaagttttcccctgttgcagtttgaaacacccccaccccgccattctccatagaggggggtttattttgccccatttttaggaccacacattcccttggatttcccacttgtttatgtgaggcatacatacaaaaattccttactacttaaacaccttggttttagcagtttcctgatcctatacgggagaaactttaccagtaccaaatgataaaggtcacaaaataattttttaaaccaacttcccttttttcccaggtaactttaaaaccccaggtggggtttttttttgtttt

SEQ ID NO: 87831 - DNA, 203 bp, Glycine max
  Clone ID: PAT_MRT3847_50319C.1
aagggaaaaaagaagctaaactactcttcatattttaagcaaaaatagggtctacattaaataacagggggggtaaggaccataaaagggcccccgaaaaacttaaaccacaatttctttggaccttaccaaaaagggggggttccctcgggtaaattccagggccgaaggggttggaaaccacccgcgggccccgcgggggg

SEQ ID NO: 87832 - DNA, 455 bp, Glycine max
  Clone ID: PAT_MRT3847_5031C.1
aaggcccgcgcgatcgccaagaaggccggtgccaaggtgctcggctttgaaggcctgggcaagctgcaggtgatgattttcgaagagctggtcgagcacaagctggaacagccgcacttcattaccgagtacccgttcgaagtctcgccgctggcccgtcgcaatgacgagaacccgaacgtcaccgaccgtttcgagctgtttatcggcggtcgtgaaatcgccaacgcctattccgagttgaacgacgcggaagaccaggccgagcgcttccaggcccaggtggccgagaaggacgccggcgacgacgaagccatgcactacgacgccgacttcgtacgggcgctggagtacggcatgccgccgacggcgggcgagggcatcggtatcgaccgcctggtgatgttgctcaccaacgcaccgtcgattcgcgatgtgatcctgttcccgcacat

SEQ ID NO: 87833 - DNA, 2592 bp, Glycine max
  Clone ID: PAT_MRT3847_50320C.1
tttattatctcaccactctcagcccccaaacttcgggcttttctctttttcccatcgatctcgtttctcccaaattcgagtcttccttcgtttccaagtcagcgttaaggtacgattgcttttcgattcccttcaattttcatgtttctaaccgaaccaaattgggatcggtgttgcggttttagggtttagtttggcgcgtgcgatgaagatcgaggaattggacgatggagagtgtagtagggaccatgaagagaagtttgagaggcagattgtgagcgttgatgccaagagagcgttggttggagcaggtgctcggatcctgttctatcccacactcttgtataatgtgcttcgtaacaagattgaagctgagttcaggtggtgggatcaaattgacgagtttttgttactgggcgctgttccgttccccaaagacgttccttacttgaagaagcttggtgtgggtggtgtgattactctcaaccagccctatgaaaccttggtgccatcgtcgttgtatcatgctcacgggattgatcatttggtgattcccaccagggattatctctttgccccctcatttgtggatatcaaccgggctctttggattattgctcagaatgcaacttgcggtaaaactacttatgttcactgtaaagctggtcgggggaggagtacaacaattgtgctttgttatctggttgaatacaaacacatgacgcctgctactgccctggaatatgttcggtctcgaagacctagagtgctactagcaccgtcacagtggaaggctgttcaaaactataacaagcgaaggccttctcctttaccatactccccctctggggatgcagtacttataaccaaagctgatcttgaaggctatcatagcacaggtgatgctggtatggaactggcgatagttcctaaaatgctgaagactaagcccatgattgcaagattatcttgtctgtttgcatccttaaaagtatccggcagtagtgtaccaatgaccaggcggttgccggtttctgagtcacgtgcttgctaagtcatcttgatatgctgtcaagcaggtggcctgtacagaagatgatgatgaaaataagtgaagtttgataatttcccaaagtcggtacaattgtgttacatgaagagaggatgcatagaaagaaagaaagataggagagtaggtttctccaatgggtggttacatcgcaccacggccagcgcccaacccggctgcttctcgcattctcccccccttttctctggcgaacgagtttctcgctagttagccccagaaatagatactcagaagttattcagttagtatattcccaccaacagaaactcagaaaaactcacccactccaaggttactcactcaaccacaaccaccatgttctgatattcccctgaccacacttttcacacaccaatcaaactaatgcaaatgcaaagcatgtcaaccaccatggcttcgttttctcctccgacccatttctcagccactccttcttcctcgaaaccccgtcttgtctacaagaacaactttttcttctctctcaggtcgaggagtctttctctctctcccttgaaggctgctgcttctgagaacggcgtcgggaccgccgtggagcctccgccggagcaggccgtgccggtgccggagccttctctgcctccggtggacaatagttctgtggggaccaatgggtctgctgttgcggttgagagtgaggtggcaaaggtttaaagtagtttcgtggatccgaggtggggttgcaggaacatgggatttgaagcagtttccagaaaaatggaaccaccgattgggatgctgttattgatgctgaggctagaaggagaaaatggctcgaggataacccggaatcatccagcaatgaaaatcctgtagtttttgacacctccatcgtaccttggtgggcatggatgaaaaggttccatctccctgaagctgaactactcaatggccgtgctgcgatgataggattctttatggcgtattttgttgatagtttgacaggagtaggtctagttgatcaaatgagcaacttcttttgcaaaactctgctgttcgtagcagtgttgggagtacttctgatccgaaagaacgaggactttgaaaaccttaagaagctatttgatgagactacattatatgacaagcaatggcaagcaacttggcaggatgagaattcaagcacttccaaaaatgagtagtggaattgctgttttgtagttctccctcccccaattgtctcttaatacagtgctgtatataattttgttagtacaaaacaagacatggatatggattagacattatatttcatttccttctctcgtcctagttccaaatgaacccaagaaagtttgtgtttgcaatgctggaattttcttggggttgttttgttaattttagtagttcttaattaattaggtttgttacagtcaatttgacaaatatagtacattctctactcataatgactactaaaataaattcacggtgcaactagcaacttttatgtgagatcaggtggtgacctaatgtttacttgt

SEQ ID NO: 87834 - DNA, 532 bp, Glycine max
  Clone ID: PAT_MRT3847_50321C.1
atggtattattttattattttttaccaattaatattaaaccttggaggggggtcctttggtgaaaaaacgggaatccacgggcccaaagcaaagggggaaaaaacgaaagcaaaggaagctttgggaaaagggactttcgaaaaaaagggggaaaaaatccctgggggttccccaaaaaaaaaaaaaattgaaaagctcacccaaaaccccggtttaaagggaaaagggggccccatttccctcgccggaaaaaaggaaaacgctttgggtttcttttccccgggaaaaaaaaaaggtaaaagtcaccaagttgttttttgcctgcccggggaataaacaaaaattaaaaagggaaaacaaaaacggaaaaccccggaacaaccctaaatttaaaccccccgaagaaatgggaaggtaaaaacccccttcctcgggggggggggcaaagggaaaaacaaaaaacccggacccgtggcgccgacccggaaaacccggaccggaaccgggaggccaaacaactttcccaaaagg

SEQ ID NO: 87835 - DNA, 828 bp, Glycine max
  unsure (1)..(828): unsure at all n locations
  Clone ID: PAT_MRT3847_50322C.1
gaaaaaaaaaagaaggaatcggagcatccttcctccattctactatttcttaaagttaaactatcaattctcaaatattcaaatttgataatccaggaagaccatcagatccattttccgtggccttattacaacaaaattgacaagaaatgctagttggtttggaatgtaagcattgatcaatccgtttttccaaccaagcaagtcttctctcaagtctcaacacaccaatatgcaaaatccgaatgtcaacttgtgcaatcctggcacaagcccgaagcaaaatgtaataatcagcatgagcaacataagtcagcgcaccttcgtccctctttctcacatagtgaatataatcaagtctttttcgcttgacactaggtggtatataataaaatctgttctcctccatctctaatttcatctgtctaatggcttccttgacatgagattttcctgaactgtgctcttgggaatctgagtcttcactgtctgcggacctctcatgggaattattgttgctcacatcttcaaggctggtgtcatcatcaggaaagagttcattaaaacctttttttctaatcttttcctccttggatatcttgccaatgcatcctttatccctggaactcgtttggttgaaagaagtatttgactgctctacattttctgatgnntttgtatcctcttcattctgataaaatttccatanntattctatcattttttcttcctcnngattaccatangatnnnnctgatcnnncaannnnnacatccctacagtatttgnnatatgtagnnnngtcntttgaatacccatnnntatctg

SEQ ID NO: 87836 - DNA, 317 bp, Glycine max
  Clone ID: PAT_MRT3847_50323C.1
gggaagaccgactttattgaagacaacgctccacaatagacgtgacagtcgctcctggcagggctattgatactattattgggagcaaaaagggataataaatagcctacataatggtcctcattgagtacaccctataactacaccttatacaatataaatacgcgcagtcgtcgtatcatatgtgaacagatgtgcactggatactcagatcactaacactgaagattcagaacagatgttcagggtaaagatgatgcaggttaacaccttgcccttctgagccttacaatgcatctaaacattataggtgcctg

SEQ ID NO: 87837 - DNA, 341 bp, Glycine max
  Clone ID: PAT_MRT3847_50324C.1
ggggcacaagtgcaatttgcttgatcgtagataactacaatacagtgtgattaaaatgcacgtccctgcattcatcattgctacaactttggtcgcatggcactgccatacctacgataagttccctctccgaatgaacactggctacggtgcccgtattccggaggtgaaatgcgcaaattggaggcttgctgtgaaagcacacaacatctttggctttgagaccattcctgaagagtgcattgaatcatcatacgaatacatccatggcgaccaatatagataggctccaacataattaaccaacaagcttacttttatgccacagacctcgaagtcca

SEQ ID NO: 87838 - DNA, 218 bp, Glycine max
  unsure (1)..(218): unsure at all n locations
  Clone ID: PAT_MRT3847_50325C.1
cttggaattcaagcttgaatgaaatgtttttttttcacataagtcatctctgaaacgaggtagacaactaccgcagggaactctacatgncttaacaagtaatacatcccgatgcattgatacgctgtgactaattctttgatgtagaccacaacgccttcatcatcttcttcatcgaaacccaatactacacgaacatcactcgcgccaacgtgctc

SEQ ID NO: 87839 - DNA, 457 bp, Glycine max
  Clone ID: PAT_MRT3847_50326C.1
acccccaacaaaaaattttacatgcctttcccattttaaaaaaaatacctataaatgtcacttttgtttcaaaaaggggggaagggggggccccattttttgttataaatggggtccaaaaccccccaactcgaaaaaaataaacttaatgataatttaatgaagcggaagtggtttttggctaattccttccccatcctttgattctttaatcattggaagggaaagcctttttatttcattgactagggcaaacccaatagccccgaaatcttatagggaactaggggtaataacccttaaaaaaaatttaaaatgaggcccgggggagtaatttaaatacctttcaccaaaactttttatttcttgaggtcttcaaacatcggaaaaggtttcctatgtggggggaggatttttaaggttgcggccttaacaaggctagccttaaacactacct

SEQ ID NO: 87840 - DNA, 360 bp, Glycine max
  unsure (1)..(360): unsure at all n locations
  Clone ID: PAT_MRT3847_50327C.1
ggaggtacgtaatcggaatcggcncagntcccatgactgnacttgatagggnagattatantccttcaaagagntccaagntaatggggnntttnannacatcngaagattagatgggtttngaaaagcacaaggagcggtggctacattgcacacctctaaattgtgccntccngatgacttcatcaagcngaaaaggtncattgtctanagcaatggcnattgatcggtttcccttgtagattagtagaaaaaaggnttcggnngggtngctatcaattctggatnganagngctgncatgcnnagcaattggtanggtttcttgtgtnggtncatggaaggcatgacttggcnannc

SEQ ID NO: 87841 - DNA, 410 bp, Glycine max
  unsure (1)..(410): unsure at all n locations
  Clone ID: PAT_MRT3847_50328C.1
caaccacaattccacaaaatccgggcaaaattggaataaaaaaaatggcaaattaaaaaccccggccaaaggaaaaaaaaccctttctaacagggtttggggggcgaggggaggttcatccaacgggcttgttttcacccctatggaccccgggcggaattcaggaactggtttttcaaaatcaaaaccccctaccacaaattaattcccaaccttcctttggaatttggaaactttaaccgggccccccttctggggggcttngtgggnggggccaaggggaaaagggaaggtttcggcccccaaanacaggtttaatagtncaaaatggcatttaagggggggcctccaaaaccatccttgggtggatagaaaaatgggtttccccccccacccctgaatacttgggg

SEQ ID NO: 87842 - DNA, 1124 bp, Glycine max
  Clone ID: PAT_MRT3847_50329C.1
cattaacaaatactctttattcggctcgaggaaaaaagaaagaacccaacgaagaaagaagaaaaaacaaaggacccaaacaaagccgaaagaaagaaagaaagcacgattacttgcacttgttcttcctctgcagtaaaaccctagctagccatcatcgtaacgtaatcgatccctctgactctcactctagaaccttcgactcgatccgaatccctagatcggattgcaaggctggcgggtattctggtcaagtaaatgacggatctcccccgccgcggcttcttattatcgttgatagggttaccgcgctgtgacgattgttattgttttttccaagaagaagaagaagaagaagaagagtgtgaagaagcatgctgagcgtggtgcgcgtgcacctgccctcggaaattcccattgtaggctgcgagctcacgccgtacgtcctcctccgccgccccgacaagaccgtttccaccgacgatgttcccgaaaccgctcccttagacggccatttcttgcgctacaaatggtatcgtgtacagagtgataaaaaagttgctgtctgtagcatacatccatcagagcaagccaccctgcaatgcctaggctgtgttaaggccaaaatacctgtttccaagagttaccattgcaccacaaagtgtttttcggatgcatggcagcatcatcgtgtcttacatgatcgtgccgcatgtgctcttaatgaaaatggaaacgaggaggatcatgtatttgggcactttatagtactgggtctggggcaagctattgatgtttatctgcctctgcatcaagtgctaggttttgaaataggtaaacaacacctttatattcaacaggagctacacaaacttacaatgaaaagttatcagaaaagtttacatccctggctagaggtaagactaattgatatatttgagtgttcaatagactaaccttgttaactgagttttatttaactgaactaaacttaccacacatttcattaagtaaatagtgattaccaaatagtatttatcattatgaatcataaatatttgttttgtactacaaatttaccaaatgtttctcgatgggaatacatgatagctctcaattgcaac

SEQ ID NO: 87843 - DNA, 232 bp, Glycine max
  Clone ID: PAT_MRT3847_5032C.1
ttgagctacattaacggagcaaattaagattattgcggttagacaacgcagtaaaattctttgccaattctgaggaaggggcccttgtcaacggaatgccaaaggtatttggttctgccaaggttgtgacaaagtccaggctttaggaaattactacattgaattccgggaggtcttgccctttccggagcgccgttcggaagccttgagagcaaaccgataattaaaagca

SEQ ID NO: 87844 - DNA, 142 bp, Glycine max
  Clone ID: PAT_MRT3847_50330C.1
accagacttccgaggccaacttccatgatcatgcccagaccatctttctctctgagaacacgagggtgaaggctaatcagattataatcctcacactttactcaactcgtgaaagcgacgactattgatcctctagtcctta

SEQ ID NO: 87845 - DNA, 1167 bp, Glycine max
  unsure (1)..(1167): unsure at all n locations
  Clone ID: PAT_MRT3847_50331C.1
ctttctctctcatcatccctctcgaatagaaaaacagaacagaagaaagaagaagaaaagaaaacccaaacaaactctaaaagaaagaaagaaagaaagcacgattacctgcacttgttcttcttcctcctctgcagtaaaaccctagccatcttaatcgatccgaatcccgagatccgattgcaaggctggcgggtattcgggtcaagtaaatgacggatctcccccgccgcgccttattgataatagggttaccgcgctgctgtgacgattgttgttttcaagaagaagaagaagaagaagaagaagagtgaagcatgctgagcgtggtgcgcgtgcacctgccctcggaaattcccattgtaggctgcgagctcacgccctacgtgctcctccgccgccccgacaagaccgtctccaccgacgatgttcccgaaaccacacccttagacggtcatttcctgcgctacaaatggtgagtatcgtgtacagaatgataaaaaagttgctgtctgtagcatacatccatcagagcaagccaccctgcaatgcctaggctgtgttaaggccaaaatacctgtttccaagagttaccattgcaccacaaagtgtttttcggatgcatggcagcatcatcgtgtcttacatgatcgtgccgcaagtgctcttaatgaaaatggaaacgaggaggaggaggtatttgggcgctttaatagtactgggtctggggcaaccaattccagcttatctgcctctgcatcaagtgctagcttgacaaatgggtctgcaacacctttgtatccagcagctatcacacaaagaagtggtgaaacttggtttgaagttggacgatccaagacttacacccctactgctgatgacgttggtcatgtccttaagtttgagtgtgttgtagttgatgcagagacaaaactgcctgtggggcatgtcaacactatactaacttcacgtgtcattcctgctccctcgcctattccacgccgaataatacctgttgatgggatggcacatttagatgtggatgggagaatgacatcttcaggaacttttactgttctatcatacaatgtattgtctgaagcatatgcctcanatgatctatacaattactgcccttcatgggctccttcttggcatatcgcaggc

SEQ ID NO: 87846 - DNA, 295 bp, Glycine max
  unsure (1)..(295): unsure at all n locations
  Clone ID: PAT_MRT3847_50332C.1
cncgcacgcgtacgtaagctcggaattcggctcgagagctattagagcccttgtaggcttctaaagttctctcttccagattaaaaaaaaaaaaaangggnggccgccgactagngancncgncgncccgggaattanttcnggncnggnacctgnnggngnaccagnttnccctatngggagtcgtattanngctnggggtaaccanggncatagctgttcccngngggaaattgttatcngntcananttccncanaanaaaangnnnnnaaaaaaaaaaaanaaaaagncnn

SEQ ID NO: 87847 - DNA, 138 bp, Glycine max
  Clone ID: PAT_MRT3847_50333C.1
ctctagacagttcggatctgtcactatcggtcataacgcatgaccccctaagctggtgtaccctggcatgagcacggcagtattgcactgcgaattgccctaaaggtatgtctagcatgtcagccatttcaagggcgt

SEQ ID NO: 87848 - DNA, 278 bp, Glycine max
  unsure (1)..(278): unsure at all n locations
  Clone ID: PAT_MRT3847_50334C.1
ttctcttcattccaaatccaggtcctctggtgcctttgattctggaccgtcataaaagacatgctgaatgtgccagttctctaattattggatcctttattccatcaacaatgattgctgtgctctactattttgaccattattgtggcatttcaacttgcttcatcagataaatttcaacttaagatagcccccttcctttcattatgaatttgctttcttttgggantcatggttataatatgcggtctaactggaattcccccgtcaaatggtgt

SEQ ID NO: 87849 - DNA, 513 bp, Glycine max
  Clone ID: PAT_MRT3847_50335C.1
cttttttaactcggcatatggggagaatgatttggttgcattatggtttggaactcccagatgggaaactgtaaagtgtaaactgttacccaccattctaatggtggagggctatcctctatggttatcttttggacttgtgttgatacccagcattctgatggtggagggtcttcctgcatggtagtcttttgggaatttgtcgaaactcaccattctactggtggagggctatcatgatcaggagacttgtgatttcgttttgagacttatgatcaaatgattaaattgttttgtcaattcctagtttaaacattaaaactattacattgagtgtatgtttttttttaaaggcatttcattgagtgtatgtatgcttatacatttagttcataaatacacacacacacacacacatgcctgtctgtctgtctgtatgcatatccatgtgtgtgtgtgtgtgtgtgtgtgtgtgtgtgtgtgtatcttaagatttgatttgaaatgatgatg

SEQ ID NO: 87850 - DNA, 586 bp, Glycine max
  Clone ID: PAT_MRT3847_50336C.1
actaaactcaagcaaaaaacgtatggttttcgacaataaaaaccacaattaatgacattttaattcccttaataagtcatatgatcagtattcggaacttgttaacataccacaccaaacttgagagaattcagatatatttcaatgagatctatcaaaatatcattattctgtacaccaggtaactatcaaaaaaaagattggacaaagctgtttacaagtagcttatcctgttttttcatccctggaagggaaaatattaaaactgtcacttgttagtaacaacatgtagaccaaactctatatttagcgcatgaacatctttgaggaactgatcactcaaatttaaatttaagagaaaaatacaattaggctgtaacacttaattacttataccaattaggactatttttgacacagcaggaagctatccatcctgcaatcatggaagtgacatttttactattgactgttgtttgcacttaactgttcaacattcagtaccatttagaaaccaaaacccatatgcataatcaattccttatagtccaaaaaagaaaacagtaggaaacaaatgcaacaaatt

SEQ ID NO: 87851 - DNA, 361 bp, Glycine max
  Clone ID: PAT_MRT3847_50337C.1
gtttatgtttagatacctgatgaacctgagtttggcttttggttctgtggctgacaccaatctgctaatactgctactttctgaatacccttcttttggtgtcaagtaccagattttgtgacagttgggggtagagtaactgcagaagtattgaactgtgcactaaatggcttcaactgggtttgatgaagacggtgataccagaggcggtatgtgggttttggaacagaagattgaccagccaatggatgaagaagctgaaaggctaaaaaacatgtacagagaaaaaaaattttctacattgttgcttctgcggcttgcatatcagagtcttggcgtagtttatggagtttgggaactt

SEQ ID NO: 87852 - DNA, 378 bp, Glycine max
  Clone ID: PAT_MRT3847_50338C.1
attagaccttgatcggcttcactaacgcagacaatgtcagacaagcctcgtagtggaacccgtttcggtgccgattcggatgccagtgacctgtatgctggtggagacaatgaatatgtgactgagctgaatgaagagggcgatgatgatgacaccaagtccaagggcaaggcttcatcatcagaaggcggtgtacgacagaagccgcgtaccttcactgtccaggatgcgtttgaggaaacaaagggcgtggaaactgacccgtttgctcagcacaacaagggccgtgtgattgctgaacgagaggatgagtatcatgcacgtcgtatgaaccgcatcatctcaccttctcgtgctgaatccttcgcaatggatgct

SEQ ID NO: 87853 - DNA, 350 bp, Glycine max
  Clone ID: PAT_MRT3847_50339C.1
gatcaaatgtagtgtctgatccgaaatttaatcaccagtctaccacgtgttgatgcaaacttgttcacaccgatggctatcctgtgttcgattttttgggagccaaggatgacattgtttctggcggctcctaccaactgctgcactttcgagacttaagactgtcctggcccgtgtttatgtatctcgttcatggaagagcccatagttccactggcctgctccagcggatttgctacctaaccttcgcgcactgcctgaaggctacatcttctatagagacacctacatctactgaaatggccagtgctatacatcgtcaggcccggcattaccctgtcctactcaaa

SEQ ID NO: 87854 - DNA, 589 bp, Glycine max
  Clone ID: PAT_MRT3847_5033C.1
gtattattctactataatatattaccattaatattgctgcggaaacgagcggatagtacggaacacatacaactcgccggcgagtccttactacttcccttctgacgaagagcccactccgatgagactcgtacccagaactagcacgaccatgaatgaaagatgcgagaaaggtgatcaagcctcctgcatgagtggagagtcccggagctatgtctgtttatgacgaccgctgatgtcagccgctgattcataccttgacaggcatatcaataccataggagtggactacagaatacaacctgagcatctagatgggaacactatatatcatctatcttgatacaatgtataaagggaacagatatccgcagtgaatatatgcgattagcgtggggccgatgggaatataggtgaataagacgacatggcccaaggtggcgttaataaagtaccctagaggcaggccgaaaaagggcggatagcaagtgaaaaagatcactggcttctagatggaaccattcggcgactcacggttataaaagttgcgggcaataagacgatcaaggctttggcagatgaaatggga

SEQ ID NO: 87855 - DNA, 422 bp, Glycine max
  Clone ID: PAT_MRT3847_50340C.1
acggctgcgagaagacgacagaagggatggttcagcgcactagtctaagatcaagtccaagattttctactaagtgtgcttagatgtcatgagacatgtaaagcatgaaggatatgcacaaagtggtctcacctccccattaggatggtccaaaatgtaattggattgaacttctcccaattcaattaaatttctctcccaacacacacattgcacttaatgcaagtaaaattataaaattacccctaatataaaaactaatctaggtaccctaaaatacaagggcagaaaaatcctatattactagggtaccctccctacactatgaagccctaaatacaaggttcaaaaataatgaaactctaatctaatatatacaaaagataagtgggttcatacttagtccatgggcccaaaatcta

SEQ ID NO: 87856 - DNA, 139 bp, Glycine max
  Clone ID: PAT_MRT3847_50341C.1
tacggctgcgagaagacgacagaaggggatctctcagagccttgtcattcctgtagtatccaacactgttgaagatcaggaggactactacaacccagattcacatgctggaagttcccccttaaggttaaacagtagt

SEQ ID NO: 87857 - DNA, 503 bp, Glycine max
  unsure (1)..(503): unsure at all n locations
  Clone ID: PAT_MRT3847_50342C.1
aagagctagttacaagttctgacaccaaaacatccagtaccaaggttgctccggatactgcagacaaactaactgaacagatgagaagggcatttagaattgaggcagttggactgatgagcttgtggtttagctttggttcaagtgtccttgctcgttttgttgttgaatgggaatctggtaaagagggttgcactatgcatgtatctcctgatcaactttggcctcataccaagtttctggaagatttcataaatggaggtgaagtttcaccgcttttggattgcattcgactgactgcaggacccttgcatgctctggcagctgcaaccaggccagcaagagctggtcctgttccaggggttgcagctgccttatcatctattcctaaacagactggtagttatatatcttcacagggacttctgcttggtaattcaactacttgttgtcagccaacatctggacnngggcaaacactgtcatgctactgctagtggctc

SEQ ID NO: 87858 - DNA, 494 bp, Glycine max
  unsure (1)..(494): unsure at all n locations
  Clone ID: PAT_MRT3847_50343C.1
gtgtgtacattatttactgtcctcctctcaatcgaagaacgagatggagggtggattccttctgaatgttgtagtcagagagggttcggccatcctcaagctgctttccggcaaagatgagtcgctgctgatcaggtgggattccctccttgtcctgaatcttctgcttcacattctcgatggtgtccgatgactcgacctccaaggtgatggtctttccagtgagggtcttgacgaagatctgcattcctcctctcaatcgcagaaccaaatggagagtagattccttctggatgttgtagtccgacagagttcgtccatcctccaactgcttgccagcgaagatcaatcgctgctgatcgggtgggatcccttccttgtcctggatcttctgtttgacgttctcgatggtatcgctggactcaacttcgagggtgatggtcttgccagtcaatgtcttgacgaagatctgcattcctnctcgcagtctgagc

SEQ ID NO: 87859 - DNA, 235 bp, Glycine max
  Clone ID: PAT_MRT3847_50344C.1
ctcgagccgaatcggctcgaggcagattaaaagggatggaattaccaagcttgttattcttccactttatccacaattttcaatatcaaccagtggctcaagcctacgtctactggagagtatattccgagaggatgagtatctagtcaacatgcagcacacagtaataccatcatggtatcaacgtgaaggatacataaaggccatggcaaatttgattgagaaagagttgaga

SEQ ID NO: 87860 - DNA, 682 bp, Glycine max
  Clone ID: PAT_MRT3847_50345C.1
acaataattaacaattcatttccaaacattttggagtaccatcaagatacaaactttacacaccaggcagaattcctattactcgcattcatgcatggtaattaacatgggaagctgaataaagaagaaaggaacacattaatagtgagcaattagaagccaccacgtgattaaactgacgagtcctgaaccacaaacttgcaccaaccagacaacatcaacaacaatgtgaatttgggaaacacatacaatgtgttaggtgaatttgcatcggtaaaccaaatttaatcgcaacatcaggctattcaattaatctctccagaagtttaccctttcaacagacgagagatgatcttggtgatgtaggaagttgggtgcatgatgaccaacgaatgacagattcagtcaccacaagatcaagttgctcacactcaccaagtccaattgtctggtttctcttgttgtggaacccaaatgccccaagaccaattgttccacctgcccttttaccctctacaggcttgcaatccaactctttaacatcatgtccaaagcaaaggggagaatctccagcaattgcatttacatttgacgtgttagttaggcattctgaaatacaaaccctttgctcaacaacagaactggagctgagaaatgcaaagctaggccttgggggaataag

SEQ ID NO: 87861 - DNA, 101 bp, Glycine max
  Clone ID: PAT_MRT3847_50346C.1
tagcgtccatcatgctcctacgttccatggacaacgacctcgttccccaagcaatccgtggttacatatacagcacgttccgttacgtcacaaagcgtcgc

SEQ ID NO: 87862 - DNA, 476 bp, Glycine max
  Clone ID: PAT_MRT3847_50347C.1
aaaaagattgttaatatatgctcctgtaaactttcagaaccctcctttggtaaactgaaagtcatcaagatcaatctctgtggtcaattgaagagtgtcttcttaatttctgtggttagccttttatctgttcttgaaacaattgaagttttagaatgtaactctttgaaggagattgtccaggtggaaacgcaaagcactggtgaagtcaagcttatgtttcctgaattacgctctttgaagctacagtttttatctcaatttgttggattttatcccattccatcgagaaagcaaaaagaactcttcaacgaaaagattgatgtttcaaaattagagagaatggagttgtcctcaatcccgattgacataatatggagtgtccaccaatcttcacgaatttcctctttcaaaaatttgacacatttggatgttaatagttgttgggaattaaaagatgtaatatcattttcaat

SEQ ID NO: 87863 - DNA, 203 bp, Glycine max
  unsure (1)..(203): unsure at all n locations
  Clone ID: PAT_MRT3847_50348C.1
atgtgtttgacatctcttgtctacatctacaggaacatagtaaatattcactatctcaaataagattacaagtttcatagacaaacttcaaaaaaccctctctattacaagttttttggataaacatgagaaaactttttcatcacatgacctcttctcccttgggtgtgaggcctctntaggttgggtggttttgcatcttg

SEQ ID NO: 87864 - DNA, 489 bp, Glycine max
  unsure (1)..(489): unsure at all n locations
  Clone ID: PAT_MRT3847_50349C.1
caagaagaaagaaacttccaaacatgcatcaattttatgggactaatctctcccttgccttgggcttacaggaacatggnnacaatgggggttcggctggctcatgataaaacccaaatcaacaccacgggggggaggaagggaatgggcctggntttcgagcaaggaaggaaggcgagnggctacgncgaaaaagcactnacaggcagccanccggggaatnggggggggggcggaggctnnnactgcatnaacacttgggcaacaaacaccggagggggcaccannatcnccaccaancagggaancnacgcccgaanctaacagggganagacgggggaacaangggggncatnggaggcggaanngggggnaanggggngnngggccnnngaagcnnnngntgngggaccaannncannnggnncagcnnaannggggacaaaccgggggggggggggggcccgggaannccggaccggggccgg

SEQ ID NO: 87865 - DNA, 747 bp, Glycine max
  unsure (1)..(747): unsure at all n locations
  Clone ID: PAT_MRT3847_5034C.1
gcaccggaaacagggcgaattgaaaagcagaagagggtggagaaacagggattattattattgtacagctgagaacttaggacaatgtctgcagaatcgccaagttctgctcgtaaagtggttgttcatctcagagccaccggcgatgctcctattctcaagcaatccaaattcaagatagcaggaactgataaattcgctaaagtgatagactttcttcgccgacagctccacagggaaacattgtttgtatacatcaatagtgctttttcaccaaaccctgatgaattggtcattgatttgtttaataattttggttttgatggcaaactggtggtcaaactacgcttgttctatggcatggggctaaccctgaatgatggctgcaggttacaaaagctccatattgtgaatacattgtttcctttcagaaattcgggacttgcatataatcacagtacacgatttcttttgaacttgaagattctcaccggatggaagtgcggtaagacatttaaagcaaactggagtcacccgtttgggtgtgttcgtgtgatagttatggatgattatggtttgtgctgcttgttaaaatgctaatccttcagtaattcatcatgacatttttaaaaatatgtgttgctgctaatacacaaactcatagtcaacggattttaggccccttataagttaaggaggtccgtatttcccaaatttaaattgggcccgtcggtttttacaaacgtn

SEQ ID NO: 87866 - DNA, 370 bp, Glycine max
  unsure (1)..(370): unsure at all n locations
  Clone ID: PAT_MRT3847_50350C.1
aacttcgaaacagagcacacggacaaccgggcaaagggcagactcaaaaagcgcgaccccaaaacgccacanangaaaagagaaaccggcacgggcaagaacccgacaagacccaaaaagccagacaacagngaaagaggccccccaaacaaaccccacccnggaagaaaacccacacgcagccggggaccagaaccgccgggacagcgagaaaacgncgccaaaaaaggccccagcagaacagcgcgcaagcaaacaggaaacggncaccggccaacaanagcccgagggggccccaaacaacgggcgagaccaccgacaaccaacncacaacacngaaggaaaaaacgccagaaagcaagacgccagc

SEQ ID NO: 87867 - DNA, 126 bp, Glycine max
  Clone ID: PAT_MRT3847_50351C.1
acagatccatgtcgatcgtctttcactatatttataaatacaatttgcctcttttgagcttatggacactaactaaaatcttagtaggattctgcctacgactgagggagttctggatggggaagg

SEQ ID NO: 87868 - DNA, 204 bp, Glycine max
  Clone ID: PAT_MRT3847_50352C.1
tgaaaatcaagctgagttggaaattaaaaggccaagttgacaacaggtttaggttatcatttagcaaaacatttaaggtttgtatatgacctaacagaacaggacattagttaaagatgaaaacccatccaaacagggggttacacacgtacttctcttttcctatgtattgcggtgccttatataaaatttatcaattattga

SEQ ID NO: 87869 - DNA, 579 bp, Glycine max
  Clone ID: PAT_MRT3847_50353C.1
gggtatagatgtattatctattcgggacaatgagtgtttaatgttggaaattcgagattataaattgagttagagcaattcgacgtaattgatttactagctcgataatatcaataaaactcctttaaaataatatgagcgaaaaatcataatttttttttgtggtaaaataaattgattttgatatctatcaatgaagccttttttttttttaaaaaaaatgatgcaatcttgaacacaaaaaagatagagtatggtttttagactcaccaggaccaaaggtatctttttaaaacggtggtataaaaattgtaggtaatttccaagtaaaagaagtatagaaaaaatcattatttaatttttcttcccaattctaagagatcccaaacgattgtattttcaagcagccaactgtgtagtgtgtactgagtcgtggatcctaaaagccctccaactccaagcattattcaccaaaagtctactgaagtttcggcttaggtatataggacaataggagacgacgttttcaacatgagaacaaaatagatcatttcacaccactaactatgctgtcatttt

SEQ ID NO: 87870 - DNA, 621 bp, Glycine max
  Clone ID: PAT_MRT3847_50354C.1
cggacgtgtggggttttgattatcagaagaccaaatcgaggaatccggaaagggaaggagagagtggtttcgttcttcccttttcgactcctttcaaattgttcctttttcatttcaattcgcatagaattcttttccttctgatttgattagattagtgaagatgggaatgaaacaagtcattaaaaacctcgacgcctttcctcgcgccgaggatcacttgttgcagaaaacccaatctggggctctcgtatccgtaattggtttgattataatggccacattgtttgtgcacgagctcggttattatcttacaacttacaccgttcacaagatgtcagtggacttgaagcgaggggaaactcttccaattcatattaacatgacgtttccttctttaccttgtgatgcttcgcttgaacagttatggccatataattggcactgaatatatatctgatcttgttgaaaaggaacataccaatcaagagcatgatgataataaagatcatgatcatcatcatgagcattcagaacagaagattcatttgcaaaaccttgatgaatctactgaaaatattatcaagaaagtgaaggaagcattaaaaaatggggaaggat

SEQ ID NO: 87871 - DNA, 1677 bp, Glycine max
  Clone ID: PAT_MRT3847_50355C.1
gctaaataaaaggagaaaggaaaatgccataaattaaagagaatcctaaattctgtaggcgtgttgtgattatcagaagaccaaatcgaggaatccggaaagggaagaagaagaagaagaagagagtgggttgggttgcgtgccccgttccgttcgttcttcccctttcctttcaattctttcttttcaattctttttcttctgaacacagaaaaaacagaagatgggaatgaaacaagtcattaaaaacctcgacgcctttcctcgcgccgaggatcacttgttgcagaaaacccaatctggggctctcgtatccgtaattggtctcattataatggccacattgttcgttcacgagctcggttattatcttacaacttacaccgttcaccagatgtcagtggacttgaagcgaggggaaactcttccaattcatattaacatgacgtttccttctttaccttgtgatgttttgagtgtagatgccatcgatatgtcgggcaagcatgaggtggatcttgataccaacatatggaaacttcgcttgaacagttatggccatataattggcactgaatatatatctgatcttgttgaaaaggaacatacccatcacaagcatgatgataataaaaatcatgagcattcagaacagaagattcatttgcaaaaccttgatgaatctactgaaaatattatcaagaaagttaaggaagcattaaaaaatggggaaggatgcccggtttatggtgttttagatgttcaaagggttgctggaaatttccatatttcagtacatggactaaatatatatgttgcacaaatgatctttgatggagcaaagaacgtgaatgtaagtcatttcatccatgatttatcatttggccccaagtatccaggacttcacaacccacttgatgacacaacaaggattctgcatgataccagtggaacatttaaatattatataaaggttgttccaaccgaatatagatatatctcaaaagaagttctaccaaccaatcagttctcagtatcagaatattattcccccattaatcagtttgatcggacctggccagctgtctactttttgtatgatctatcacctattactgtcactatcaaggaagagcgccgcagttttcttcattttattactcgactttgtgctgtgctaggtggaacctttgctgtgacaggaatgcttgaccgttggatgtacagacttctggaaactttgactaaatcaaagtccaaacggtagatcatgaagtcattgcaatttctagtaacaactctgcgtctccaaccaaaggggtttcaggcactatggaatttactgccaccaaagattaaaaatatagtggttgcatagttgaatcaagcattaaattttaagcacgtgttcatacagttccttgtaatgtctgacatcaatgattaacagatcttaatctcttttcttttggaatgagtgttttgggttcggttttgactgtggacagcattgtcttatgaaccacacctgtggaatttactttgtagaactcaaattttgattatagtgactaagatagctgtctgtttctgtagtaaagcaaaacgctgtgcaacccaacattggattttcctgattaaattatcctaaactgcatggaacctgagatttctgtt

SEQ ID NO: 87872 - DNA, 470 bp, Glycine max
  Clone ID: PAT_MRT3847_50356C.1
atttattagacatgcaaacagtaagtaaatattatttcccatctttttctttgcatgtttaattaaaccaaagtattaataagcttgtttcttgcattctgaggcaatcagctatttctgtatattacatatgcacaaaagtgaattttgatatggtactgttagtgttagacctccaattacccaagtgtacactagaaaggaaaagaagaattgcagagacttaaggcatgtctgcattgatggaggactggagattgtgggaataatactcactgtgatagcagaatcagaggaatctgagatagtgggaataatatctctcctttacatatttacaactcatgcacgttttgcatcttatgcttggcaagtattattgtttataaagatctctttacatatgttgggtctgggtccttaattaaagtgttaagttaaaaacataatgcttattttgcttactctgt

SEQ ID NO: 87873 - DNA, 319 bp, Glycine max
  Clone ID: PAT_MRT3847_50357C.1
ggctcgagggcacataccaaaacatttgtggcttgtgttgtgtgactgaaggcctaaggcataacgtggaagtcgatcaaatgcaaacagagtgcttggactataccaaatccttattataggaaggctccttgggtggtcaaatgctttaactttagcatctacaggatgagaacaacccggactttgtagttgaaggggtttctctcttattggaagatcatgagagacttctcagtgacctaacctttgctctaaatcataaaacgttctacttgaaaaaatgttgtgctcatgtctcaccacctcaagggtagca

SEQ ID NO: 87874 - DNA, 294 bp, Glycine max
  unsure (1)..(294): unsure at all n locations
  Clone ID: PAT_MRT3847_50358C.1
cngcnaataaaccagagggcagaganaatcgtaccanaggagccacgagnnntncctctgagccgtctgatgaggatgatgaagcangtgcttgttaacagngcacaaatccagntgntatgaagcgcctgaganggaaggnttctantggnnggngtggntagaagggccnagangaagnnancnnggcgcaatggtctgagnctgagttgcnggttgaaaaactnagagtggaaaangcaaccctagacaagcagntcacggatgctagncaatagttnccggnaggttgat

SEQ ID NO: 87875 - DNA, 397 bp, Glycine max
  Clone ID: PAT_MRT3847_50359C.1
caacatatgacaaaaaggcaccttcttatgggcagactttgactaaaagccacttacttgcacacactattctatatccacgttttcaacatgaccattggctatttatatacaccataacactgctgcaattatctgtggcgtcctactactactgcctgtttttcttacacttaggtgcacgctagctatcttgacttttgaaacctcagactgaaaatggaacgtggggacattgataatatcattgataggctccttcatgagagaggcaaatcagcgaagctggtgcatctttctgaggctgtgatctagccgacatgtgtagcatccagggatataagcatgaggcagaccaacctcttggaactcgatgcaccaattgagatatgtggag

SEQ ID NO: 87876 - DNA, 4819 bp, Glycine max
  Clone ID: PAT_MRT3847_5035C.1
taatagatggtacagtagttcatcagaaatcaagcctgcttcttcgaagaaccagcgttatattatagttggtatcgattactttacaaaatggatcgaagcagtccctttgccaaatggtgtgaaaatccctaagtttactaagtttgcaggagagacaaatgagtccactgttgaacacattgctagatatttggtcgaggcaggggatttggctaataatgaaaatttaagaatgaaatttttccctagttccttgactaaaaatgcttttacatggtttacaacccttcctcctcattccatacataattggaaccaattggaaaggattttccatgagcaattttatatgggacagtctaagatcagccttaaagaattagccagcgttcgacgcaaggcacttgaatcaattgatgattatttgaacagattcagactcttaaaggcaaggtgtttcacccaagtccctgaacatgaattagtcgaaatggctgctggtggcctagactattcgattagaaagaaattagatacccagtatttaagggatatggctcaattggctgatagagttcgacaactcgaacgattgaaggctgaaaaggctagaaattctaaattccacaagaaggaaaaggttgcatatgtcgaaaccaatgacagtgaccaggagttcgatattatttatgaaaatatcgaaccttccaatggaaaaaaccctgttgaacctaaaaatgataaatttgtgtctaaaacttatacatttgacataactaaatgtgatgaaatatttgatttattagtcatagatggccagattgttgttcctaagggcttgaaagtacccccaatcgaacaacagaagaaaaggggttattgtaaatttcataatttccttggccataaaacctcacgttgtgttcttttcagggatttggttcaaaaggctcttgacgaggggaggctaaaatttggtgagaaaccaaaggttgttcaggcaaatgctgaaacatccaaagctgctgacactctctatgcggagccccaagaaataatgatggtcgaaacaatggaggtgtcccatgtgcaagttcaggacatatctgaagaggattacaacgaacaaatgaagaagaaataccaagttgttaacaagggggcaaagcagaaccaacgtttcgataaaggcaaaagagttatggtgcagtcgaatactaatcagaagtctggtcgaaggaatactttcgctcccccgggttcagttccggttgaaaaatggatgcaccagggactcataaggttcaacaaagggatcatggaagtaggtcgttcgagtggaacgaagcaaattggcccacaagaggctaataagtactcttataggaacaattacaaaggaaagaatcctatgacgaggacccaatggcgtaggttccagcgtcagaagaaattggcctaacagaatctgcaaacgggccagtatagagaagtatctaggaggccagtaaaagagaggctcttgcctccggtggatgaagataagatggaggatgaggatctactcgattctgaaccagattttgatgtcatctgtgtgcaattagcttatttcgaaaagccagattttcagatgaaaagtcatctcaaacctcttttcatcagagcaaaagttgagaatgttggaatcaacaaagtgctcattgatggaggagcggctgtcaatttaatgcctcgatttatgctctacaaaatcgggaaacatgacactgatctatctgcccacaacattgtgctttcgaattatgaaggtaaaactggctattctttgggagccattcaagtagatgttgctgtaggcagtatagttcgaccaactctattcctggtgattcagtccaaggctaattttaacttgctattaggaagagaatggattcatggagttggggctgtgccatctacccttcaccagaaactcattatctggagggaagatgggattgtggaaaatatagaggcggatcaaagcttctataagtcggaggtcgataatgttactgcacaaacctttgacaaaaagttggctaacatagcaccttgtggtgacaaggaggctgttgtcgaatcgagtgacaatgttgctcaagatcctttggaggaaatcgacattggagatggctcgattaaaaggccaacttatatcagtgccaatatcacctcaagtttaaaagaaaagctggtgcctcttcttagagagtttaaagactgttttgcttgggattaccacgaaatgcctgggttgagcagagaaatggtcgaaatgaaattaccaattaaggagggaagaagaccagtaaaacaactaccaagaagatttgcgccagaaatcatgtccaaaattaaggaagaaatcgaaaggctgctgaggtgtaaattcatcagatctgccaggtatgtcgaatggttagcaaatataaataatgctacacctaaagatgaatatgctatgccaatagcggaaatgttggtagattcggcagccggcttcgaatttttaagcatgttagatggttattctggttataaccaaatatttattgctgaaagtgatgtgtcgaaaacagcatttcgatgccctggtgctttaggcacttatgaatgggtggttatgccctttggtttgaaaaatgctggggccacttatcaaagggccatgaattccatgtttcatgattttattgacacatttatgcaaatttatattgatgatataattatcaaatcctcctcagaagatagccatttggattatcttaggcaatctttcgaacgaatgaggaaacatggattaaaaatgaatccattaaagtgtgctttttgtgtgcgtgcaggagatttccttggttttgtggtgcataaaaaaggcattgagataaatcaaaataagacaaaggctattcttgagacgaagcctccttcgaccaaaaaacagcttcaatctttgctaggaaaaatcaacttcttgaggcgattcatttcgaatctaagtggcaaagctcaaattttttcgccattacttcgactcaagaaagatgaaccattcaaatggaatgaagagcatcaaaaggctttcgatgaaattaaagaatatctgatcaagcctcctgtgttaatgcctcctagtcgaaacaagactatgaagttgtatattgctgcgtctgacaagaccattggtagcatgttggctcaggaagatgatgatggcatagaacatgcaatttattatcttagtcgtgtactaaatgatgcagaaactagatatactgccatagaaaaactttgtctttgtctgtatttctcttgtgcaaaacttaagcaatacataaagcctgttgatgtttatgtgtattctcattatgatattattaagcacatgttgtcaaaacctattttacacagtagaattggaaaatgggctttagccttaacagaatattctttaacatacaagcctttgaaatctgttaagggtcaaattgtggctgattttattgtagatcactcactgatcgaaatgccgcaacactatgtcgatacagagccttggattttgtattttgatggttcgaaacacaaacatggaactggaattggagttttaataatatcccccaataaagttccaactaaattcaaatataaaatcaaagggctttgttctaataatgaggctgagtatgaggctctaattacaggccttgaaattttaattagcttgggggcaagaaatgttaacataaggggtgattcagaactagtgttgagacaattaacacaagaatacaaatgtgttagtgaacacttagcaaaatattttgttatggcaaattctcttctgaatcatttcgattatattaacattgagcatatacctcgacaagaaaaccaagaagcaaatgatttagcccaaatagcttcagggtacaaaatgtcgaaggagaagttaactcaggccattgacaatatattagataatgattggagaaagtccattattgaatacttggaaaatccaataggtaatgtggctcgaaagattaaatttagggctttaaattacgtgattgtgggaaatgatttgtttaaaaagactgcagaaggagtgttgctgaaatgtttaagtgaatcagaagcatacttggcagtttcccatgttcacagtggggcttgtggatcacatcaagcaggccataaaataaagtggcttttatttcgacaaggtttgtattggccttcgatgttaaaagactgtatagaatttgctaaaggctgtcaggaatgccaaaagcatgcaggaatacagcatgtacctgctagtgagttacactccataatcaaaccttggcctttcagaggatgggctttggacctaattggtgaaatcaagcctgcttcttcgaagaaccagcgttatattatagttggtatcgattactttacaaaatggatcgaagcagtccctttgccaaatgttgatcaggaagcagtaattagtttcattcaaaattatattatttataggtttggtattcccgaaacaattaccactgatcaaggttcagtttttacgggacgaaaaatgaaagaatttgcccaaaaaattggctttcgattattaacctcaacaccatattacgcgcaagcaaatggtcaggtcgaagcagccaataagattgtaattaacttgattaaaaaacacattgcccaaaagccaagaaattgatgaactactgtaccatctgattaggagcag

SEQ ID NO: 87877 - DNA, 324 bp, Glycine max
  Clone ID: PAT_MRT3847_50360C.1
aaaagacaagcatagacaatcactacctgtaactaatggatactctgtgacacttacactaacacgaacagaagggcatatgacccttaaatggggacagcccatatgacaagtgccgactgaatccagttccgtatacacagcatatgtatatatagaccgatatgtacataggacaccagtgagtcaacgactacaattgagataccactatagggaggattgaaacagaactgaaaaccacccctatgtccttgactgccgactgggaatagacaagtcaccctcactgaaccagtgggcttcatcggccataacggctga

SEQ ID NO: 87878 - DNA, 427 bp, Glycine max
  Clone ID: PAT_MRT3847_50361C.1
ccatcaactctcgaattttcagttaaaagcatcgacaagaaatactgaagcagataccgcgatcggatatactgataacatgactcacgaccttgatgatggaccccctgataaccaggagctacataatcttgacaactaagaaaaggcaatgagggaaaaacccgggactccgaccctgctcccacatactagagagctccacattgcactacttgtgttcctacattggagcagcaacaccagtgtctaggaaagactgctgccccgagatcctcctgggaaagctcaaactcccagtgccaccacagatatctccaaccaacctggccaaggagaaacgcaaccttgagagacctcctcaagcgagcactaaagaacgaacttctcttgactactgaaggatttactctcagtgagtcaatac

SEQ ID NO: 87879 - DNA, 2090 bp, Glycine max
  Clone ID: PAT_MRT3847_50362C.1
ggctcgtgagtttgcaagacttatatgaatgagatcaatcttgcagcccaaacaagaatttatccaaggccggagacgaaatggtggttgcgagctgttggtgttcatcttcatcttcatggctgccactgtcattgccactgcattcgaacttgaaggcagcatcaacgtcactgtccccgaaatggaaatatcacgcattttctgaagcctcctcctcctcgtgttctctcgttcacaacaaccaagacgacgaccttcaagctctcttacagatccttccatctgatttgcatcacaatctcctcaatcaacctaaccgccctcaacttctagaggttattttggatttggggcgttttccagaagcgcgttatctaggaaaacacggaggccattctttaaggaacactgagcttaggtaacagtgaaggagttggaatatgctgaacaagctgttggtgaatttgggaaggacaatagagctggcattgagggtacgttacaccgaatatctgcaattaggagtaggaatggtcacatagttggtttgacctgtcgagttgggagagctgtcactggccagattgatatggtttatgatctgcttcagtatgggaagagcattttatttgttggaaggcctggggttggcaaaactactgttatgcgagagattgctcgtgtactgtctgatgagcttcacaaaagagtggtgattgttgataccagcaatgaaattggaggtgatggcaatattccacatgcagcaataggtggtgcacgaagaatgcaggtgcctgagccatcaatgcaacatagagtgatgattgaggcagtagaaaatcacatgcctgaggtgattgtagtagatgagattggcacagaagctgaagctcatgcttgccgatcaattgccgagcgaggaatcatgcttattgggactgctcatggacagcagcttgaaaatatcatcaagaatcctacactgtctgatctggtttgtttttatttttatatggttgtgccaataacatctggttatgccaataacatctaagggtgtgttgggaaaatgttgggttgaacgtagcccacattttttccaatccactgatatacttctcccttttgagctttggaatgcgtaaatggacgtttggtgccttgcaaactgcaaaccaaacaaacactaagactttttagtttttgctttcaaagtctatctattgctttcttgggtgtaaaaggcctttaagagaaaaaaaaaaaaacttatgatagttcactgtttgctcttatttaactgttccgttagtttaattttagtattttcatgtgaacattaatgcatcattattgacctgcaagctttaggggggaggggcaatcaagtcattattgagcatgacaagtgtgcactgaattctattatgtatttaaactaatatttgtaactgtctgtctcttttaaccttgctttatggtctgcataagtagttctgtagaaaaggcttgaaactgaatcctattttatggtgtaaaagagttttcattgacgttttaattttcaaaagtatcctgaaaaattatatcacccattcagttcaataagcatttagtagattaatatttgatgttaaagatttaaagatttacttgatttgtggagccatgaatcattgtgcaatataatcaacagtaatattcaagattcacctccatttgctttattagattggcggaatagaaagtgttactctgggagatgcagaagccagagccagaaattctcagaagacaattcttgagaggaaagcacctccaacatttgatttcttaattgagatgagagatagacactactggcttacacatcaggtatgttaattgagcatatattactatgatagtaacaatagtcttacttatcccactaggtgcaattagttatatggatcacgcgaccacatcaaacaccgtaaaaaactaaattattagggatatttattattcaacatgagtccccttctaataatttcttccatttttttttcacacacacacacacatgtatatctcctgctgat

SEQ ID NO: 87880 - DNA, 327 bp, Glycine max
  Clone ID: PAT_MRT3847_50363C.1
taatcttccgatccgcgcgtacgatgcgttatgcatgatattaccctttcagctttaaattacaccagcctccattcaagacttgtccgggttttttctgcccactgttatccacttgactcttatcttaatcaactcacaccttcagtccatcctgctcttgaataccttccatctttacaacatcacaataacactgataccctgtctgcccaagcaccagtatatgcagtacttaccaatgtacctatcatattgcctcttgattgtgatcactacatatacatcatctctgccttgagaacagctataaactccatgatatat

SEQ ID NO: 87881 - DNA, 223 bp, Glycine max
  Clone ID: PAT_MRT3847_50364C.1
aatgtgaggagcctgttgatatatgaaaatgcaatggaaggcagaagcgttttgccaagcaacataggattcaaatttacaagatattcattattgctaatcttaaaaaacggctatgacattcaaatttcactaccaaaattctttgaatatatgacattcaatacttaaataaaaaaacgaatgaatcgcattaaataaattaaatggaatgggggggggg

SEQ ID NO: 87882 - DNA, 339 bp, Glycine max
  unsure (1)..(339): unsure at all n locations
  Clone ID: PAT_MRT3847_50365C.1
ccagcctttctcttggncactacccantactaatgccaggggggttatcaccattacaaccgccacataacaaaatcactcaaaaccatgtcctttcaccccaatcctaacctcaacaacctccaaaccacttatccccttaaccatatggtcctaaacatgcacctatcctaccccaaattcataaccctacccttaatccccaattaaaccctaatcatactgtaccaaacccttaatctgtccaaccagcttttccttccaatactctccaacctcccctactcttaccaacacctaaactccaatcccttactcttcaaacactaactaaacctc

SEQ ID NO: 87883 - DNA, 285 bp, Glycine max
  unsure (1)..(285): unsure at all n locations
  Clone ID: PAT_MRT3847_50366C.1
aacactcataacacaaagcacaaagcanagctcatccttgagttaaaaaatggcagcagctntctttccatggctctctcatccccatccttgggctggcaaggccgtgaagtgggnccatcaggccccagnagtgggcnanggtgagcatgaggaagaccgtcaacaagcangtcntcttcaggnangcccaatggtacggcccagaccggtnnagtaacttgggcccaattctcttggnaanccccngtctaaactaaaccggtgattccccagnggantacg

SEQ ID NO: 87884 - DNA, 603 bp, Glycine max
  unsure (1)..(603): unsure at all n locations
  Clone ID: PAT_MRT3847_50367C.1
acagccctgcataagtggtgatctttaaatccatctgatcaaacccctaaaggcttatatcacatgtttatgcttaacatttaaaagattatcacatatgctgaacgtactcttatgtgtttatgatatacttaacaattcataatctctgatagtacttgatattgattacatataacatactcgaacactacttgaaataacactgattgtaactgaaatcgtacataagcacctataattacttgctataagctaaaatattaagagtgttgggaacaacaccttaatttttcatacatacatacatacaacacatttgttgttcatgtggccctatcttcacatttcttaatctcaaactttctacaattttccttacaacagagaatcatgttaacctttaaaagcattaaaatgatagatcattaattgagaaaaaaaccagtgttgagttaatcttaccatggagcggcactcataagtccagcacgatcagtgcggcactattctgtgtactttctggcttgnggntatacagagtgcatgaagttagaaacagtgcaaataaccatgcacttgaaacaagtgatagcactgaat

SEQ ID NO: 87885 - DNA, 490 bp, Glycine max
  Clone ID: PAT_MRT3847_50368C.1
tgtctaccgtgccagtgtctgcatggtaggtccattcactggcctcaaatccatggctggcttaccaaccaaaaagaccaactatgacattaccttcattgctctcaactgtggaatactgcaatgcatgcgagtgtgcccaccagatggcaaaaagaaatttgagactctctgctacctgccacaccttgatgatgcacaataggcaaaggaagtacaatacctacttaggaagggatggattccttgcttgcaattccagttggaccacggtttcgtgtaccgtgagcacaacaggtcaccaagatactacgatggacgctactgaaccatgtgggatctgcctattttggttgcactgatgcttatcaagggtaaaagagcttcaagaagcctagactgataccccaactgcttcattcgtattatcagattcgaccacctttcgccaagtccgtgcattaactttattgccttcaagtcccccagc

SEQ ID NO: 87886 - DNA, 230 bp, Glycine max
  Clone ID: PAT_MRT3847_50369C.1
tttacgcgttctcaatccgccatcacaggtggacggaccttacaagcggaaacaaaggcccatgttactcgatttcaagaatatctcaatgtctgcctacttcgatgaggacaaattcgttatatggaatgaagaccactcctctgcgctggccacagactttctgaatcattgtcttttccacttctggtttatttgctgaactctcttccattttgatataggacttt

SEQ ID NO: 87887 - DNA, 646 bp, Glycine max
  Clone ID: PAT_MRT3847_5036C.1
tgaagcataagcagctaaagaaaaacttgattttttattacttttaaaggattgttgcaaaaaaaaactatggttagattctgctggagaccagctgcggtgggtgatgatggagatgtgaatggtcgagttgaagggcttctatggtacaaggatttggggaaccatctttatggagatttctcaatggctgtgattcaagctaatagttcattagaggatcgtagccaacttgaatctggaccattgacttctgactatttgggtcctcaaggaacctttgtaggtgtatatgatggtcatggtggcaccgcagcctcgcagtttgtcagtgacaatcttttctgcaatttcaaaggtatgttatatatgcccttaactttattttataagcatatgtgtatttattggtcgtatagtatttttttttctcttgatacttttcaaatgaactgaagactgcgaaaaggcattaatatgttcttccttaacccatgtattcaaaattataaccattcacaaccaaaactgccaagtaacataattcgaacaattggaccctattttttgacagtgaaaactggattgttaatgattttaagtataaagacctatttgaaaatcaaattgaaacaagtatcatgta

SEQ ID NO: 87888 - DNA, 192 bp, Glycine max
  Clone ID: PAT_MRT3847_50370C.1
cttacgcctagggttttaccgctgctttttctagatttaaggaagatgggtgaggaagaggtttacatcagcattgcggttatagcccatgttgactctcggaagtccactaccactggccacctgatctacaagcttggaagcattgacaagcacgttattgagagatttgagaaggaagctgcttacatg

SEQ ID NO: 87889 - DNA, 692 bp, Glycine max
  Clone ID: PAT_MRT3847_50371C.1
gacacacattcatccattctataatttcccaatgtctgatatcaaccccaaccagccactaccaatggatgaagtggtgacctataaggagtgttggcacaaccatgctgcagcacgtggtcgtgtcatctatgatggttgtcttgagtatcttgttgatcaggacaatctcatatgtgcttgttgtggttgccaccgcaactttcatcggaagcacaccattttcaacggcatacctgaaactcaaacactagatcgagtgcaggggatgaggcctaagagaaagaagaggactactttctcgtcagagcaaaggaacaagctgatctgttttgctgagagtgtggggtggaaacctcgaaaggataagaagaacgaaatccaaagcttttgctccgagatgggaatgacccgtaggatgttccttatttggcttagcaacaatcgtcaccgggcaatcaagaaagcttagaagttgtttgtttcgctgtcatggttgaatcagtcttggcacttggtgttaataagatcactctgttcaaactcaaagtgtgttgtttaggaagttatggtttctttttcagtttttgtttttttgttttcaccgtcttttagctttattttgttttcttaatgtaactgtagtgccttggctttaagtgatcattcaatccatgtaccttaatttcccc

SEQ ID NO: 87890 - DNA, 468 bp, Glycine max
  Clone ID: PAT_MRT3847_50372C.1
ccttccttcaccaaaccttagctagctccactcttcctcaatccggcattcgtcaatggctgcgacggcttccaaatttcttcaaactccctccaaacccaaactccgatcccaatccaatcccaaatcctcgccggttgtaacccccgacactccacaaaccctatatcctcgcagatccacgcgcgccaagtccctcctcttcgatgctcccaagcctccccacacaccgctcgaaatctcgctcacaactccgaagcggaggatacgacgatccatcgattgtgtcgatcaggattccggcgaagataaagccacaaccagcaaaatttcagataaaaataaagctccggtcgtcgatgcgtcaaagaagaagaagaatgggaagaactcaattgaagtttcctttgctccggtaacaccggcttcatcggaaaaggcatccacgaggaagagggagggtgaggg

SEQ ID NO: 87891 - DNA, 342 bp, Glycine max
  unsure (1)..(342): unsure at all n locations
  Clone ID: PAT_MRT3847_50373C.1
gggncaaatgcacttttaagctttaatgtactttaatttcaggtttcagttttaaaacaggaaatttagaatgacatgcaaaattgtaattgcaacttcaatgcactttaaggataagagaagaattatcattagcttcccattgagatttttttcactacgagcccacttccacaacttctgaataccatttgaaccaagtgccaaaacatcagcaaccacaatttcagacagttgccatggtttagctctatctactccatcttccacagttctctagttttctccgcatcttgacttgtggtattgacttcattcttcgttgaaaatcggacgcgtggg

SEQ ID NO: 87892 - DNA, 482 bp, Glycine max
  Clone ID: PAT_MRT3847_50374C.1
gctgtttttttttttttttttttttttttttggagaaaaacaaacggaaatagccattagacattaaaggctggttccacataaacacaacaaactcgtattattttcttaccactaaaactacttacaagcatccctcctttttaaagaactattacctcctctggcatttggtcaaccagcgctgataccgttctttttggggatgaaaaaacccaccttaacaccaccttggttaggaagtgcaggggctctgacttcctttaaaataggaaagagaggtggtacttctttgaggcactgacatgcagcatttttttcatatttggggggggccgaagatttcgctttcttgacaccattggaacatgcagctgagggggtttcaactttacaagagagggattttatgcctgggagcactggcctttgaggctttacaccattgaaacccttgcctgctggctctgaagctttaagtg

SEQ ID NO: 87893 - DNA, 195 bp, Glycine max
  Clone ID: PAT_MRT3847_50375C.1
atggcaaatgaagctcagaactctttttcaccctttcacgtgttggtgtctcttgttcttttgcaatcaaacataggcatgcagccggaattggctcggaccagtttaaggaaagctgctaggtgttccagcttcacaggcacctattccaattcaagcacaaatacatgcacatggaggatattcacaaactaa

SEQ ID NO: 87894 - DNA, 370 bp, Glycine max
  Clone ID: PAT_MRT3847_50376C.1
tgagagtgaaacattcttgcagaaggcgatccagcagcaaggtagagccagtgtgatggacacgatccaagagattcaagagaggcacgacacagtcaaggaaatagagagaaacctaaacgagctccaccaagtgttcttggacatggccgtgctggtgcagtcccagggcgaacaactggacgacatcgagagccacgtggcgcgcgccaattcgtacgtgcggggtggggtccagcagttgcacgtggcaaggaagcaccagaagaacacccgaaagtggacatgcatagccatcatactgctcattattatcatcttgattatagtcctccctatagttctaagaaattgattgatcacatattct

SEQ ID NO: 87895 - DNA, 348 bp, Glycine max
  Clone ID: PAT_MRT3847_50377C.1
ccgaataaacaccccacccaagaggacaccgacccccagggagaacctttgaaggggaggccgcgcacacaccccgccgcgggcagcgaaaacgcacaaagaaaccacgcccgccgaaaaagagagagagacccaagtacaccaggccaaacgagccgagcaggcccacagaaccgaagaaaaggcgagcggacgaagaaagaagcaaaaacgcgaccaagaacaaacagcggaagaaaggaacccaccctgcaccgggaaacaaaaatgcgaacggcgcacgaagggccccgcggcgcaacaagaccgcaaatgaccagaaagaaagagccaagggaaaagaacaca

SEQ ID NO: 87896 - DNA, 397 bp, Glycine max
  Clone ID: PAT_MRT3847_50378C.1
atgaactgaaaagagaagcagcagaaagaggctggaacttgggagctgttacagaaaatgaccaattggcaaattccgaattatgagattcagaaaaccggttcaaaaaagaggggaggggctgcatctagttattcaatccttattgaaattagtactttcccatcttccccccctaatgcattagcagatcaagatacctgtttgtttccgtgatatacgaacttgattccatcggcaattcaacatgggatggttctgtaggtgaagcaagtccacactgcgttaggttagaattcattttcgaggcattgtaaacgaaatttcaaaaagtgaaaaaactttttgtgtagttgctgcattttatatttggcattcaggcaattgttgtctaata

SEQ ID NO: 87897 - DNA, 494 bp, Glycine max
  Clone ID: PAT_MRT3847_50379C.1
ggcatcagcaaatagaaaatgacattaagaagccagtaaaaaacaaatacccttacatcactgggaaaatgaatccgaaaaaacaaggtcgaattcctatgggaaattttttcccagtcattagtatttcgggaataacgttgtctattatatctatgattcctaacgctaatagttgtatcaataataataaacataagaccttctttcaagtgaaagagcgtccttttcagaaggtggaggagtggatgagataagtgagtgccaaagccaacatcatcaaaacatacgcaatcccttgatctatggacgttccgtcgctggtaggagcaggtgctggagctagggattgggcatgaacagcgacaggcatgtaaagagtgaagatgagagagagaacaacggcggccaccactccgaaaccgaatgaaaatctgaaactagccatctttttgctctctctctctcaaatgcagtaattggaggagtgggat

SEQ ID NO: 87898 - DNA, 1748 bp, Glycine max
  Clone ID: PAT_MRT3847_5037C.1
ttacgaacgtcatgtcgggttattttggtttgaacttaggcttacacaggcctaattttgtgtctccattatctgagtatgtgttacagacagaattaccaaggggtgtgaaaatccctaagtttactaagtttgcaggagagacaaatgagtccactgttgaacacattgctagatatttggtcgaggcaggggatttggctaataatgaaaatttaagaatgaaatttttccctagttccttgactaaaaatgcttttacatggtttacaacccttcctcctcattccatacataattggaaccaattggaaaggattttccatgagcaattttatatgggacagtctaagatcagccttaaagaattagccagcgttcgacgcaaggcacttgaatcaattgatgattatttgaacagattcagactcttaaaggcaaggtgtttcacccaagtccctgaacatgaattagtcgaaatggctgctggtggcctagactattcgattagaaagaaattagatacccagtatttaagggatatggctcaattggctgatagagttcgacaactcgaacgattgaaggctgaaaaggctagaaattctaaattccacaagaaggaaaaggttgcatatgtcgaaaccaatgacagtgaccaggagttcgatattatttatgaaaatatcgaagacaatccctgttgaacctaaaaatgataaatttgtgtctaaaacttatacatttgacataactaaatgtgatgaaatatttgatttattagtcatagatggccagattgttgttcctaagggcttgaaagtacccccaatcgaacaacagaagaaaaggggttattgtaaatttcataatttccttggccataaaacctcacgttgtgttcttttcagggatttggttcaaaaggctcttgacgaggggaggctaaaatttggtgagaaaccaaaggttgttcaggcaaatgctgaaacatccaaagctgctgacactctctatgcggagccccaagaaataatgatggtcgaaacaatggaggtgtcccatgtgcaagttcaggacatatctgaagaggattacaacgaacaaatgaagtatagagaagtatctaggaggccagtaaaagagaggctcttgcctccggtggatgaagataagatggaggatgaggatctactcgattctgaaccagattttgatgtcatctgtgtggtatctattttgccatctgaatatgatgtccaatctgaagttactgagatcgaaagtgagttcgatcattttgatatggctgacccaaagccagtattcgaaaagccagattttcagatgaaaagtcatctcaaacctcttttcatcagagcaaaagttgagaatgttggaatcaacaaagtgctcattgatggaggagcggctgtcaatttaatgcctcgatttatgctctacaaaatcgggaaacatgacactgatctatctgcccacaacattgtgctttcgaattatgaaggtaaaactggctattctttgggagccattcaagtagatgttgctgtaggcagtatagttcgaccaactctattcctggtgattcagtccaaggctaattttaacttgctattaggaagagaatggattcatggagttggggctgtgccatctacccttcaccagaaactcattatctggagggaagatgggattgtggaaaatatagaggcggatcaaagctt

SEQ ID NO: 87899 - DNA, 2520 bp, Glycine max
  Clone ID: PAT_MRT3847_50380C.1
ggaaattagacaacaattgcctgaatgccaaataaaaaatgcagcaactacacaaaaagttttttcactttttgaaatttcgtttacaatgcctcgaaaatgaattctaacctaacgcaggggggacttggttcacctacagaaccatcccatgttgaattgccgagggaatcaagttcgtatatcaccgaaacaaacagggatcttgatctgctaatgcattagggggggaagaggggaaagtcctaatttcaataagggtggaataactagaggcagcccctccccttttttttgaaccgggtttttttataaaaaaaacatcatatttgttccgggggggagcaaagggaaaactttttcatgatattgggctaaacatctcagggacaaaagcaaattcccccctttaaaaactgcataatttgtttcccttaggttttcaacatattagctcattgaatatctatgacagcagcaacaaatttgaatccacaacaaacaaaaattgaaaacatgtatcacaaaaggtaaacaaatccacagatctagattcaggatcaaagaatcgtttgcacccttgcaccaattaaccaggcattggacgtctaactcctctttgttccaaaacttgaacgagcctccctatgatgctattaattcggcctcagtgccgtttaggattaaacggtggatgttgtgagttggggacttgaacatgtagtcgaaatggaagccattggaggaaatgaggatgatggtaggctggactagaactggattagtgaaacccagatctgtactaaacattgagaggtacaatagcatagttttaggctgaacaaattcattacggatacaaaactagatgagaacatacgaatctcataattcggattttgccaattggccattttcagttacagcttccaagttccagcctctttctgctgctcctcttttcaattcatttatgcgattttcaactgaagcacaggcagcactgatgtctatattcttctgacaaagctccttccattgcatggacaacgcattaagctcatatgcagtgttttgctgatgatatttcctttcacggtttactttttcaatcttttcattttgttcctgagctaatttctgcattcttgataagtatacttccaatctttggttgtgttgtttccaggtatcgggaccatattttaacatcaaatccaaattttccatcctcataatctgatattgcagcaggtgttgagctctatgaagagcttgcttccaagcagtttcgtcgttccttttattcgccggcggcatttccaattcgtagcgcgatctatcaagagcaacgggaggtcttccggctctcacacgttcgtactctctcgcaatcattgggtagttctgctggaaattggagttgggaagaggagggaaatctttgaggaaatcggtgggcttcttggtgctgcgacgcatctcatcctccacgagacggtcaacctcaagtttgactctggggtctgcgtagtcgtcatcaatgtaaggcaatgcgtcgattatttccgcgttagaaccggtaggcctaccgtaagacggtggggcttccagcattagaactcccccgttgcttccatccgccatggtcgcttgcgtgaagagagacaaaaaatgaaactggatgagaacatacgagtctcataattcggaatttgccaattggtcattttcctgctacagcgcccacgttccagcctctttctgccgcttctattttgagttcatttatgcgattttcaactgaagcacaggcagcactgatgtctatattcttctgacaaagctccttccattgcatggacaacgcattaagctcatatgcagtgttttgctgatgatatttcctttcacggtttactttttcaatcttttcattttgttcctgagctaatttctgcattcttgacaagtatacttccaatctctggttgtgctgtttccaggtatcgggaccatattttaacatcaagtccaaattttccatcctgatgatctgatattgcagcaggcgttgagctctatgaagagcttgcttccaagcagtttcgtcgttccttttattgggcggcggcatttccaaatcgtagcgcgatctatcaagagcaacgggaggccttccagctctcacacgttcgtactctctggcaatcattgggtagttctggaaaatggagttgggaagaggagggaaatcattgaggaaatcggtgggcttcttggtgctgcgacgcatctcatcctccacgagacggtcaacctccagtttgactctggggtctgcgtagtcgtcgtcgatataaggcaatgcgtcgattatttccgcgtcggaatcgctagacctaccgtaagacgctggggcttccagcattagaatttccccgctgcttccatccgccatggtcagagactgaagcttttcctctacgcgtacccttctgtcgtcttctcgcagccgta

SEQ ID NO: 87900 - DNA, 925 bp, Glycine max
  Clone ID: PAT_MRT3847_50381C.1
ttttggttttttttttttttttttttttttgggcaaatggataactttttcatgatattggactaaacatctcaggtacaatagcaaatctagttttaagcagaacaaattcattacagatacaaaactagatgagaacatacgaatctcataattcggaatttgccaattggtcattttctgttacagctcccaagttccagcctctttctgctgcttctcttttcagttcatttatgcgattttcaactgaagcacaggcagcactgatgtctatattcttctgacaaagctccttccattgcatggacaacgcattaagctcatatgcagggttttgctgatgatatttcctttcacggtttactttttcaatcttttcattttgttcctgagctaatttctgcattcttgacaagtatacttccaatctctggttgtgctgtttccaggtatcgggaccatattttaacatcaagtccaaattttccatcctgatgatctgatattgcagcaggcgttgagctctatgaagagcttgcttccaagcagtttcgtcgttccttttattgggcggcggcatttccaaatcgtagcgcgatctatcaagagcaacgggaggccttccagctctcacacgttcgtactctctggcaatcattgggtagttctggaaaatggagttgggaagaggagggaaatcattgaggaaatcggtgggcttcttggtgctgcgacgcatctcatcctccacgagacggtcaacctccagtttgactctggggtctgcgtagtcgtcgtcgatataaggcaatgcgtcgattatttccgcgtcggaatcgctagacctaccgtaagacgctggggcttccagcattagaatttccccgctgcttccatccgccaggtcagagcggacgcgtgg

SEQ ID NO: 87901 - DNA, 621 bp, Glycine max
  Clone ID: PAT_MRT3847_50382C.1
tagcatgccaatcaatgtcaccagaacaaggggcaatgcaatcacaacttgatgcagtagctgactggattgtgaaattagaataccttcaatcactgaggctaaaatcaagagatgagaaaggtcgaccttggaatttacacttgaagtctttgaaaaatcatattaatctcactgacatatatttgctgggaaacttgaacggtccatctattctgactcagttacctccaaatcttgttgaacttaccctatcacattcaaaacttgaggaagaccccatgaaaattttgaaagatcttccaaatctccgctcattgtctttacatgcagaatcctacataggaataaaattggtctgcaattctaaaagctttcctcagctctatgttctaaaagtttggaagcctgaacaattgaaggactgggaagtaaagcaacaagcacttccctctcttagacaactggaaatccgatcatgtctgcgcatgacaaagcttcctgatggactaaagcatgttaacagtctccttgagttgaaattgacaaatatgccagtggaaattaatactgacaagcataacattccgcccaattgtgaagtccacagagatgactccg

SEQ ID NO: 87902 - DNA, 183 bp, Glycine max
  Clone ID: PAT_MRT3847_50383C.1
actttaaacacctaaataattttgcctttttgattgactgggttgaatacttgtaacttgtggcattaaattatttgtacgatgctgaaatttatactatatctgttatatgctataagtgctgatatgatctaaatgttgtctttgaattaacatacaggagtaccagggtgaagtacattt

SEQ ID NO: 87903 - DNA, 197 bp, Glycine max
  unsure (1)..(197): unsure at all n locations
  Clone ID: PAT_MRT3847_50384C.1
gtcgcangcacgctnagncagacgcncgcacgcganacgnnaagcncgggaanncggctcgagatgnactggganncccncccnngggatcctcgnagaaacccccgggacagnttccacacaacanncnnncgnaccgcgnnngggnnnnnnccngccccccccccnccncgncncnncccncncnnggcncnnng

SEQ ID NO: 87904 - DNA, 1557 bp, Glycine max
  Clone ID: PAT_MRT3847_50385C.1
ttgctctttgttacagtgcagcaggacagaatgaagtagccttgaaccttttgaggaaggcttgtggtagttctgaagcaaagcatagaccccattttccttcatttttgtttggtgcaaagctgtgttctctaaatccaaaccatgctcgtgaaggaattaaattttcgcaggaagttattgatctagtgaagcatcaaaatgagcattttttgagtcagggccaaaaatttcttggcatttgccatggagctgctgctagaatatctgtactggattctgaaagaattatatttcaaaaagagtctttgaagtttctaaaggatgctgctctgaatggaaataataatgacccggaagtgatgctcactcttggattagaaaatgcaattcaaagaaatctaaatgcagcttatgacaatataatgatgtactcagacatgatggctggcagctcaagaagaggttggcagctgttagcactaacagtatcagcacagcagcggtttcaggatgccgaaactatagttgattttgctttagatgaggctggcgatatagatcagttagaactactgagactgaaagctgtacttcaaattactcagcagcaacccaagcaagcaattgagacctacagaatcttgctagctgtaattgaagcaagaaaagagcattggcttcaagctaagacattcaggcacgaggcattaacagaacagaagttggaaatggaagcctggcaggatttggctaccatttatgcagatctttgttcctttcttgatgcaaaagcttgtgttgacaaatcccagtcgatagaatttttttctcccagaagttggcacatcactggtttgttgtttgaagctcaatctttgcataaggaggcctttgtttccttctcagtttcattgtcaatagaaccagatttacattccctgtatcatctccactgcaaaattgtttcttaaacttggcattccatcacttccaattgcaagaagctttttaatgaatgctttgagattagaccccacaaaccatgatgcatggtttaaccttggattggtttcaaaaatggaaggctcgttacaacaagcggcagactgctttcaagctgcatatgagctgaagctttcagctccagtgcaaaaatttgagtgattgaaaccttgggagaactgtaattttttgttgttgaggaaaagtgagttcaagcaagagcattatacaaaagccatgagcaagcaactaatggaaaagaaaatatacccatggttaatatttgttaagaaacctatatagctacatctagctacttatttatagatttacttcattatgttccaatgaaatgcccttcacatttaacaagatgagtttacacagaaggacagaagtttggcttcccaggtggtatagaattcattataacataatgtcaagcagaatgtactatagttttttgggtctcctgtgaggtgtaaggtgaggttaatccctgtatgtaaagttcacacacatatagcttgattgactactttaagtttcatt

SEQ ID NO: 87905 - DNA, 591 bp, Glycine max
  Clone ID: PAT_MRT3847_50386C.1
aaaaaaaccagggccacccggtttcctttttgggggcccccgggggggaaattttcccatcaccttaagattagcccccttaggggacccggttttacaatcaggctaacggggggggaactaacccccccccttgggggggtttacaaaatacgtgggggcgggttattaagggttcccagaacccctttcccccaaagggggatgggttaagggtgtttgggggggggaaccttttttagttttcctaacgggccaatttttttggtagtccaggcccaaggggggttattggtttaacaaactttttttttagtttttttccccccggggggggggtgggggtcccgcaaaatttccaacccctttttttttggggggccggcgggggggacccccaaaagagggtgttttaaacattggtttttggggggaaaagtattgggtggaagagtaaccagttttgtttttgttttttaaacgggcccttggaaggggcctttcagggggggggctatttgaagaaccgagttggtggggggggcattttttgggattttgaaccacaaagtttggggggggggggcccgg

SEQ ID NO: 87906 - DNA, 1714 bp, Glycine max
  unsure (1)..(1714): unsure at all n locations
  Clone ID: PAT_MRT3847_50387C.1
ttgggatgtttgcaggttggaaaaggtttgtccaaggatgataaggctcaaaaattagccctccaacattggctagaagctagaagttacctacccattattccattaataactnttactaggcttgaaataatgttacactttagtttatggtctaatctaatatcaacaatgcccattcttgcttgttttctgcacagattgacccacgtcatcgctatggacacaatttgcacatgtattacgatatttggtttgagagccaaagcacccaaccatttttctactggttggatgttggagatggtaaagaaataaatcttgagaaatgcccaagatccatcctacaacgccagtgcattaaatttttgttaccattgcagaaagaaagagaagaatacgaagtaatagttgaaaatggaaagctagtttacaaaaaggatggtaggcttgtggacactgatgagaaatccaaatggatatttgttcttagcaccacaagggccttgtatgtggggagaaaacaaaagggtacgtttcaacactcaagctttctttctggcggtgcaaccacagcagctggcagattagtggcccatcaaggtgcccttgaggtacggatcatttaacgacacacaacatcatcataaccaaactcattatctatcgtcattattaaatttcgttacatgcacaataatgcaggctatttggccatatagtggtcactaccaccccacagaagagaacttcaaagaatttataagctttcttgaggagcacaatgtagacctcaccaatgtaaaggtaagtgtttggcccactccaaaattacacaacttatatataaatacctaataataatggttgtttcatgcagagatgtgctatagatgatgataatccatcacttattgggactaattcatttactgccactaatgaatcacaacaagctatgggccctactctaaattctcgcacaggcccagcaagtgcaatcaatgtcaatgatagcaagacgcacaaaaaggatgatgcagcaacatttaacttgtctaagaggttgtcttgtaagtggaccactggggctggacctcgtattgggtgtgtccgtgactatcctgaacatttgcaatcgagggcgttggaacaggtcaatttgtctccaaggcccacttctgcacgcctgagcaattacggcccaattccttcacccaggcccagcccgaaagtgaggatgtctcccaggattgcttacatgggcttgcccagtccaagaaacccaattccagctgcgagttaaagatgcatcgcagggaattaggattaaggttgacaaaaattggtcagctttacaatggtcaaagtatagaggggcacttattggggcgacaactagtaaatgatgagatcataagactaaccacaactcttctctcctttacctttttttttttgtttaaattcaaaattcgtttatttcattctttttaggaatttatatttcagggcaaattggacccttcaccatttttctgcctctttcttttttgggaatgcagaaatattcttttttcttcttcttttttgctgtaagcggagttcagattataaaacataataatctcatattttgtccttttcacccctttcacaccacaacaaacaaaaaaacaaggnnnnnnnnnnnnnnnnnnnnnnnnnnnnnnnn

SEQ ID NO: 87907 - DNA, 676 bp, Glycine max
  Clone ID: PAT_MRT3847_50388C.1
tagtagacggcaccgcccttttttttctttttttttattttttttatttttttttcttttttttttttttttttttttttctttttttttttttttttttttttttttttttttttttttttttttttttcttttgggggggcaaaaaaaagggggccccaatttttttgggttaaacaaggggttgggggagaaacccgggtttggggtgggttagtttacaacattcccccccccaagacacgggaattcaaggcccgggggaatgggaaagggggggtccaccgggttaaacagggggggcccggggggggggttccaatccaaaattttttccaaaaccccccattttacctcccccaaaggggagggctttttcggggggaaaataacggggggcccaaacacccccggcccaaatggcccctgacattggggtggggggggccaagctttggggcacaacccccggtactgggccaaattggggggggggggccctttaaatgggccccccaatgggctaaaaccttataagggctttcacgggaccaaatttttcatttgggggtttaagccgggcccccttaacattaaaaaaaatgggggggtaaagggagaaacccttggtccccacttttttgcccccgggaaaagggggggccccttttttttt

SEQ ID NO: 87908 - DNA, 262 bp, Glycine max
  Clone ID: PAT_MRT3847_50389C.1
ccctacattgtactattacagcttgcctggacagtattgcattccttgttctacctactactacaattaccttccacctcttacgaggagttcttcaccttacctctatgtgagccctgctccttcttctagatatcctcctccatcatacgagtacacatcaccacctgctccttccacagctcccgctcccaagtacatgtacaaatcacctccacctgcagtttacatatatgcttccccacctacacctatctacaag

SEQ ID NO: 87909 - DNA, 5856 bp, Glycine max
  Clone ID: PAT_MRT3847_5038C.1
atggctagaccacccccaagtaatcgaaacaatgatcttccaaatatggaggggcaaccaacgcagacatctgtcagtaatgccaatataaattctggcataggggcaattcctgaccaaactgttggcacgataagttcgaccgctttgacggttatgaatcagacaggggtaacttctcccatgaccaacatgacgttggcaagttcgaccacgtcagcgtctgcttttgccccatggaataaccctaggttgcaaaactctcaaccaaatatagagaatcttaatatgtcctctccatcaggatctgtagcgggtaatcaaggtaggcaaccaccaattcgacagatccaaatacaggcgcctgtccaagaggtacagatgcctaacaatccagggatgcaaatggctcaagcaccacaaacattggcacgcatagagccaccagcccaacaggtcgaaccaaaccctggtatagtattggtaaataggaaccaaaatgctgatgaagtaatagggaatattcaacaaaaccgtttcgataggcagaataacctggcccaaatggtcgaaacgattttggtacaaaatggtttgaacttaggcttacacaggcctaattttgtgtctccattatctgagtatgtgttacagacagaattaccaaggggtgtgaaaatccctaagtttactaagtttgcaggagagacaaatgagtccactgttgaacacattgctagatatttggtcgaggcaggggatttggctaataatgaaaatttaagaatgaaatttttccctagttccttgactaaaaatgcttttacatggtttacaacccttcctcctcattccatacataattggaaccaattggaaaggattttccatgagcaattttatatgggacagtctaagatcagccttaaagaattagccagcgttcgacgcaaggcacttgaatcaattgatgattatttgaacagattcagactcttaaaggcaaggtgtttcacccaagtccctgaacatgaattagtcgaaatggctgctggtggcctagactattcgattagaaagaaattagatacccagtatttaagggatatggctcaattggctgatagagttcgacaactcgaacgattgaaggctgaaaaggctagaaattctaaattccacaagaaggaaaaggttgcatatgtcgaaaccaatgacagtgaccaggagttcgatattatttatgaaaatatcgaagacaatgaggttgatttagcagaattaaaacctggacctccttatgtttgtaaactccttagaccttccaatggaaaaaaccctgttgaacctaaaaatgataaatttgtgtctaaaacttatacatttgacataactaaatgtgatgaaatatttgatttattagtcatagatggccagattgttgttcctaagggcttgaaagtacccccaatcgaacaacagaagaaaaggggttattgtaaatttcataatttccttggccataaaacctcacgttgtgttcttttcagggatttggttcaaaaggctcttgacgaggggaggctaaaatttggtgagaaaccaaaggttgttcaggcaaatgctgaaacatccaaagctgctgacactctctatgcggagccccaagaaataatgatggtcgaaacaatggaggtgtcccatgtgcaagttcaggacatatctgaagaggattacaacgaacaaatgaaggttgtgtatcctcaggctgaggaggagttaattgattttttgaacaggtgcaaactcgaaaacaagattgtgatgctctgccctcgctgcagtgcagtttgtgatagggaggctactgagggcctcaagaaataccaagttgttaacaagggggcaaagcagaaccaacgtttcgataaaggcaaaagagttatggtgcagtcgaatactaatcagaagtctggtcgaaggaatactttcgctcccccgggttcagttccggttgaaaaatggatgcaccagggactcataaggttcaacaaagggatcatggaagtaggtggttcgagtggaacgaagcaaattggcccacaagaggctaataagtactcttataggaacaattacaaaggaaagaatcctatgacgaggacccaatggcagaggctcttgcctccggtggatgaagataagatggaggatgaggatctactcgattctgaaccagattttgatgtcatctgtgtggtatctattttgccatctgaatatgatgtccaatctgaagttactgagatcgaaagtgagttcgatcattttgatatggctgacccaaagccagtatgttactatgttatgaataatggctgtgtggaagagcaattagcttatttcgaaaagccagattttcagatgaaaagtcatctcaaacctcttttcatcagagcaaaagttgagaatgttggaatcaacaaagtgctcattgatggaggagcggctgtcaatttaatgcctcgatttatgctctacaaaatcgggaaacatgacactgatctatctgcccacaacattgtgctttcgaattatgaaggtaaaactggctattctttgggagccattcaagtagatgttgctgtaggcagtatagttcgaccaactctattcctggtgattcagtccaaggctaattttaacttgctattaggaagagaatggattcatggagttggggctgtgccatctacccttcaccagaaactcattatctggagggaagatgggattgtggaaaatatagaggcggatcaaagcttctataagtcggaggtcgataatgttactgcacaaacctttgacaaaaagttggctaacatagcaccttgtggtgacaaggaggctgttgtcgaatcgagtgacaatgttgtccactctgtcaaactccatcctacctatgggtttatatgggagagggaggaaattgatgctgttccctctgaagatggagtcattccaccaactggaattacggcttatatggccgaaaatagactaaatacggcctttgaggctgaatctcaacaaagtatggcagttgaagccaagatcgaagatcatgaaaacaaagaaacaaaggatcgaagactggattgtatttatgacgatgagccgctggggttcgagaaaaaccccgtaagtgaggtgccaaagatgcaggctcaagatcctttggaggaaatcgacattggagatggctcgattaaaaggccaacttatatcagtgccaatatcacctcaagtttaaaagaaaagctggtgcctcttcttagagagtttaaagactgttttgcttgggattaccacgaaatgcctgggttgagcagagaaatggtcgaaatgaaattaccaattaaggagggaagaagaccagtaaaacaactaccaagaagatttgcgccagaaatcatgtccaaaattaaggaagaaatcgaaaggctgctgaggtgtaaattcatcagatctgccaggtatgtcgaatggttagcaaatatagtccctgtcattaaaaagaatggaactcttagagtatgcatagattttagggatttaaataatgctacacctaaagatgaatatgctatgccaatagcggaaatgttggtagattcggcagccggcttcgaatttttaagcatgttagatggttattctggttataaccaaatatttattgctgaaagtgatgtgtcgaaaacagcatttcgatgccctggtgctttaggcacttatgaatgggtggttatgccctttggtttgaaaaatgctggggccacttatcaaagggccatgaattccatgtttcatgattttattgacacatttatgcaaatttatattgatgatataattatcaaatcctcctcagaagatagccatttggattatcttaggcaatctttcgaacgaatgaggaaacatggattaaaaatgaatccattaaagtgtgctttttgtgtgcgtgcaggagatttccttggttttgtggtgcataaaaaaggcattgagataaatcaaaataagacaaaggctattcttgagacgaagcctccttcgaccaaaaaacagcttcaatctttgctaggaaaaatcaacttcttgaggcgattcatttcgaatctaagtggcaaagctcaaattttttcgccattacttcgactcaagaaagatgaaccattcaaatggaatgaagagcatcaaaaggctttcgatgaaattaaagaatatctgatcaagcctcctgtgttaatgcctcctagtcgaaacaagactatgaagttgtatattgctgcgtctgacaagaccattggtagcatgttggctcaggaagatgatgatggcatagaacatgcaatttattatcttagtcgtgtactaaatgatgcagaaactagatatactgccatagaaaaactttgtctttgtctgtatttctcttgtgcaaaacttaagcaatacataaagcctgttgatgtttatgtgtattctcattatgatattattaagcacatgttgtcaaaaccgattttacacagtagaattggaaagtgggctttagcattaacagaatattctttaacgtacaagcctttgaaatctgttaagggtcagattgtggctgattttattgtagatcattcattgatcgagatgctgcaagattatgtcgatacagagccttggattttgtatttcgatggatcgaaacacaaacatggaactggaattggagttttaataatatcccccaataaagttccaactaagttcaaatataaaatcaaagggctttgttctaataatgaggctgagtatgaagctctaattacaggccttgaaattttaattagcttgggggcaagaaatgttaacataaggggtgattcagaactagtgttgagacaattaacacaagaatacaaatgtgttagtgaacacttagcaaaatattttgttatggcaaattctcttctgaatcatttcgattatattaacattgagcatatacctcgacaagaaaaccaagaagcaaatgatttagcccaaatagcttcagggtacaaaatgtcgaaggagaagttaactcagttgatcgaaataaaagataaactggaattactagagccattaagcactaaattgccaatgccaaaacttgtgggggcaaatacaccacaaaataatgaagatgaaagcatgaatgatctccaggaaaaaattcaaattttggccattgacaatatattagataatgattggagaaagtccattattgaatacttggaaaatccaataggtaatgtggctcgaaagattaaatttagggctttaaattacgtgattgtgggaaatgatttgtttaaaaagactgcagaaggagtgttgctgaaatgtttaagtgaatcagaagcatacttggcagtttcccatgttcacagtggggcttgtggatcacatcaagcaggccataaaataaagtggcttttatttcgacaaggtttgtattggccttcgatgttaaaagactgtatagaatttgctaaaggctgtcaggaatgccaaaagcatgcaggaatacagcatgtacctgctagtgagttacactccataatcaaaccttggcctttcagaggatgggctttggacctaattggtgaaatcaagcctgcttcttcgaagaaccagcgttatattatagttggtatcgattactttacaaaatggatcgaagcagtccctttgccaaatgttgatcaggaagcagttcagtttttacgggacgaaaaatga

SEQ ID NO: 87910 - DNA, 304 bp, Glycine max
  Clone ID: PAT_MRT3847_50390C.1
gctgcacgcctgccgtaccggacctacttgtcgggcacgcgtccgcccacgcgtccgtacggttgcgagaaaacgacaaactgggtcgtacacagcctcaacaaccctgacgcttgcagagcagagggagacacaaccattgggctaagaccccctagtgttattggcaaattaagaacaaaccataccccaagtcacggttttgccgtggtgttcctgatcccaagatctgactgttcgaaaaatcgatggaaaaaatcagagtggaaaaaagatcataacgtggctatcgagtggaaccaca

SEQ ID NO: 87911 - DNA, 995 bp, Glycine max
  Clone ID: PAT_MRT3847_50391C.1
ccggtccgcttgcaccctcgggccaccggtccgtgccacccgtttggccttccaccacactccaacaacactcgttttcttgaacggttgaaccctcagctcaccgatcctctcctttcccaacaattcaccgctccaaaatgggcaaatccgcctccaccaccgccgccgccgccctcgtcctcctcctcttcttcatttccccatcaaccgcagagatcaaaaccctcagcataacctccgacacccgccccatgatcctgctggagaaattcggcttcacccactccggccacgtgtcgatcgcggtctcctccgtctccgtggtagcctcaggtgggtcccagcctgatccttcacgattagggttttttcttctgagcgaagagtccctcctccaagtcctgaccgagatccagcaaaaccctagcttctgcgtcctcgactcccgctacaccatgcacctcttcaccttccgcaaactctctccccctcccgcggccaccgccaactacacctaccccgtcacaatccccaacgaatactccatcttcttcgccaactgcgcccccgaaacctccgtctccatgctcgtccacaccgagctctacaacctcgacgccgattccgaacactcccgcgactacctctccgccggccaaacccatctccccactctcttctctctcttctccgtcgcctacttcgccttccttgccctgtggatttacatctgctactccaacaagctctcactccaccggatccacctcctcatggcggcgctcctcctcatgaaggccctcaacctcctctgcgccgccgaggacaagcactacgtaaaggtcaccggcaccccgcacggctgggacgtcctcttctacatcttccagttcatccgcgtcgtcctcctcttcaccgtcatcgtcctggtcggcactggctggtcctatctcaaaccctttctccaggagcgcgagaagaaggtcctcatg

SEQ ID NO: 87912 - DNA, 432 bp, Glycine max
  Clone ID: PAT_MRT3847_50392C.1
ctttttgttttttaaaataacgcacactttacacattattactacaataaaaagaggtgaggaaacttttcagataggcagagcatactcaacaagaggccgtgcgctaatttcctttgttgaattaaacaaacgaccatgcgaaaaaagacccgaacttcaaatcatgcctaggattcctgatttccactaccatctggcgatatcctgagggacaaagaaagctggcatgaataagttaccggcaattgcgcaatcttgggagattccccagagaacattccaaactgcttactggtagggattgtccataaagacactcagatgccatgaggttttatttgcccgctcagaactccccattttaaaaccattttaggacccatacctttattgggaagaaaaatcccacgaaggagggtctgattttgt

SEQ ID NO: 87913 - DNA, 796 bp, Glycine max
  unsure (1)..(796): unsure at all n locations
  Clone ID: PAT_MRT3847_50393C.1
ctttacctttcccggacctcacagtcgtcaattcagttcagccgcacgacctcctcccaagtcccaaccctccctctccctcacgccttgctctctcagccaccgggaggtcagccgtcaaggaagaaagccatcgcgagcacatccagcagacgaccacgaagccactgcagtcagtcacttggtcgggacgctaccgcttgtcacccatttacgagctcacaccgtcgcgattccaccgccgacagccactgtgacccccaaatgagtatcactagacagcgcccccttggtggtgggggtcatcatgtattggactacttgaagcgcatgcaggcagagaatcctgctttcttctatgcagtccaggatgacaataatctcgcgtgtgggaatatagtttgggctgatgcaacatctagaacaaactactcttattttggagatgctgttatattggacacaacctacaagactaaccgataccgggtgccatttacctctttcactgggttgaatcatcatgggcaacctgtgttatttggttgcgcattgattttcaatgaatctgagtcgtcatttatatggctattcaggacttggcttcatgccatgtctggccgccaccctgtctctattacaacagatttggaccctttcatacaagttactgttgcccaagttctcccttcaactcgccatcggttntgtaaatggagcatatttagagaaacccgaagcaactggctcattaatgtcagtcacatnctgattttgaaactgaattcagaaatgc

SEQ ID NO: 87914 - DNA, 277 bp, Glycine max
  Clone ID: PAT_MRT3847_50394C.1
tggacaatcaccaacctttggtttttgcaaaaaaattgtttttgacctaggaatagttacccttacagggttctttgaatgtgctcatatgtggttctccattaatcaaggagaaattctgacatatacttgactgttcacctgttacatcatggtttttataaaagattgtatctcatcggatttgacatcatttgtgacctcctctggagatgttgctgctggtttcacaggatctttagcaaataacagattggtgcagaaaaggatagtatgg

SEQ ID NO: 87915 - DNA, 284 bp, Glycine max
  unsure (1)..(284): unsure at all n locations
  Clone ID: PAT_MRT3847_50395C.1
nattnnatgnannnntangtaannttgnaattnggttngaatnntgntnantatnanatantttntnagaantatnttatttnnantaattntnnaattnanannttatntngntnaattnanaannaaaannantntnanatattaannatnaaangttgaatatattttgaaanataaannaaangaaaaanaanaanattataangantatatnattgnnatnaanaanannaantnatnanntaantaaantantnanaaatnatnattaaananaaaan

SEQ ID NO: 87916 - DNA, 679 bp, Glycine max
  Clone ID: PAT_MRT3847_50396C.1
attgattgacttcccgagtgctaaactttgttccatagagaaaggaatggattcccccaaggatcatcaaaatgttgtaaccatagatgtccatgctgccaaagatctgctcaattcatctggttatcgttatctggatgttaggtcagttgaggaattcaacaaaagccatgttgagaatgctcataatgtcccctatgtcttcatcacagaagcaggacgggtgaaaaatccagattttgttgaccaggtggcagcaatatgcaagactgaggatcatttgattgtggcttgcaatagtggaggaagatcactccgagcctccgttgatctgcttgattcaggatttaagaatattgttaacatggggggaggctactctgcgtgggtggatgctggatttgccgggaacaagccaggagaagacctcaaaactagctgcaagttccgtcctaacatcgcaaaacccactgcacaaccatagtagcattctttccttctccaattttatgaataaagctcaatgcttttttttattattttaataagaaaatgttgaaacgatttgtattttctaacttcctttgtataaaataaaaaacggtacttatgatggagaattggagatgacctctggatttttcatccaatggtggaaaacaagacaactcgttgttgc

SEQ ID NO: 87917 - DNA, 382 bp, Glycine max
  Clone ID: PAT_MRT3847_50397C.1
aatttttccacgtatactgacctactctgagtggtgcatctggtccctgcatggtcttcttcaacctcaggattccaactcatcacacctcggcgcacgttagccaacagctcccagtcccctcacacagtgactctcccaaatccctaatgcgaatctcaccctaatccctctctcctcgtccatcatcatccatcttgcaagcagcaagctgcaagctccatcaacacttgcctcactttcgattccagaatttcccaaattctcattcaccaaccacaatgatggaggaccaccctctctccgtgccccgtgacgaaatggaaaacctcgtactccacgacgacgacgccgccgccgccggcaacaacggtaacgatga

SEQ ID NO: 87918 - DNA, 397 bp, Glycine max
  Clone ID: PAT_MRT3847_50398C.1
aaaaaaaaaaaaaaacaacaaaaaaaaaaaaaaaaaaaaaaaaatttacaaaagattttaaaaaaaaaaaaaaaaacaaaacaaaaaactaacattcaaacaaaaaaaaggggccccccccgggggggccccccattttccacctatttactcccgaataaattccggcccgccccccgacttcccccaaattttccctattaaaagcttgtttaaaccttggcgaaaactggttcttgggtaaaacctgggaaaaataaatttcccccccaaattccccccccgatccttcccggataaaaaatggtgaaccccggggggccccaaacaaaaatcaatcgccttttattcgctgcccctttataagccgttttacacttggaacccctttttttca

SEQ ID NO: 87919 - DNA, 374 bp, Glycine max
  Clone ID: PAT_MRT3847_50399C.1
gggtcgagctttgctctgttcttttctatcttgtgcagttgcagcttttaccttttctgctaaggtgaggtttgctcttagatcccacaagctagcgggacttgttaatacaaaaaactcaaatctatggttcatgatcatctacattatttgaaatctgggaaaagacgaggacaggtttgatgttcccaaaaccatgtctaattagactactgactttggtgaagctggggctctcttaggcaatatgaacctagattggcactgactactcacaggattactttactccaccaacaacttgaacacagtgttcactaaagaaaatgagaaatctcgctggcggcctcatactactgaagctgaagttgtcg

SEQ ID NO: 87920 - DNA, 526 bp, Glycine max
  unsure (1)..(526): unsure at all n locations
  Clone ID: PAT_MRT3847_5039C.1
ctactataggaaagctggtcgcctgcagtccggtccggattccggtcgaccacgcgtcgccaccgtcgtcggctggagagacacagaagggttaacacatgttgcaaaaccgatttacacagtagaattggaaagtgggctttagcattaacagatattctttaacgtacaagcctttgaaatctgttaaaggtcagattgtggctgattttattgtagatcattcattgatcgagatgctgcaagattatgtcgatacagagccttggattttgtatttcgatggatcgaaacacaaacatggaactggaattggagttttaataatatcccccaataaagttccaactaagttcaaatataaaatcaaagggctttgttctaataatgaggctgagtatgaagctctaattacaggccttgaaattttaattagcctgggggcaagaaatgttaatataagaggtgattcagaattagtgttgaggcanttaacacaagaatacaaatgtgttaatgaacactt

SEQ ID NO: 87921 - DNA, 844 bp, Glycine max
  Clone ID: PAT_MRT3847_503C.1
gaccgcttaaaccctttgctctgcgccttgagtctatctctctgttcaccaatggccatgtacgcaatgcttcgccgcgcctcctccgccgcgctgcctcagttggcgcgccgccccgccatggcttcctcgtcttctagaaccttccacagtgttctctctgttctccgcagagagacagcgactactactactatcgcaccctctcttcgcttcgccaacgccttcgctaccaagtccagcgcggacgaacatctagctcaagtgcttcagtctgagatccaatgcgccctcgaagacgatcatgcccagcaccaagtcgaagttcctgttgattttccttttgacattgaggacaatcctggagaaagaaccatacaactaaaaggaaaattcagagatgaaattatcaaagttcaagttgacatccctaatgtagcaccagaagaagaacatgaggatgacgaaaatggcaacaatgagaagaatgatagtgaatctagcattcctttagttgtgagtgttttcaaagaaaatggagtgtctctagagtttggcgtgactgcttttcccgatgagatttccattgatagcttgtcaataaaacagtctgaggaatctgaagaccagttggcatacgaggggcctgagttcattgacttggatgaaaatctgcaaaaggcttttcacaagtatcttgagatcagggggatcaagcccagcacaaccaacttcttgcaggaatacatgtttgctaaagacaacaaggaatatttaatgtggctgaagaacctgaagaacttcgtcgagaaatgatttggtctctgaggatcggttctctgag

SEQ ID NO: 87922 - DNA, 385 bp, Glycine max
  Clone ID: PAT_MRT3847_50400C.1
caactctgttctcatacagggtgctgttattaataacctaatgaggaggcctatactaggtattgctgatgatctatatgacgatgatattgctggttaccaagaagtggatgatgctgtcgatactgatgacggtgatgcagtcgctgacgatgaacgcgaagctggtctaagaagatatggtgctacccttaacgatatagaaattcgtgagcttatggaatctgctgatgcggacatcagtgtaaccatggattatcgcgagtttattgctgcttaacttcatgacgactaactcgagcgtgatgaacatcttatcgcaggatgtcaatattgttgaaaggatggtagtggctacatgacatgtgatgtactacaacatgct

SEQ ID NO: 87923 - DNA, 288 bp, Glycine max
  Clone ID: PAT_MRT3847_50401C.1
actggaggatatcggctcgagacggaagaaaagcacttgtaagatctcatagcaggaagtcctgcacgggaacttggcatgtgtgacctctctagctgagagtgatcctccattacttgaagatgctttgaagagaataaaagttattcgtgaaaaggaattgtctcatgctgatgaccagaggagaatgtcttaccctatcgctgaagaagctttgaggcttctcttgtggttagctagactctgatgctgtatgtgaagctgctctgggtctttatgaattaaatc

SEQ ID NO: 87924 - DNA, 734 bp, Glycine max
  unsure (1)..(734): unsure at all n locations
  Clone ID: PAT_MRT3847_50402C.1
gctctactctagacatatctgactgttcaacagtggccgctcatccccggtacgccaatccatacaacaccccctcttcggcaccaccaccactaacacccccaggccacgaagcagcaggcacaatcgccgccctcgggcgcaacgtaaccaccctctccctctcggaccccgtgaccgccgaccccctgtcaccctgccactcgtgcttccactgcacgcgcaacaaacccctcctctgcaccgcgctgaccgcctacggtggcaacgcccccggcgccttcgcccagtacgcccgctacccagcccacctcgtgcaccgcacgggcgccctccccgccctctccgccgtgctcatggagcccgccgcctgcgcgctccacggcatcgagcgcatgcaactcgccccggggagccgcgtgctgctcttcgggtgcgggcccaccggcttgctgctcgcgcagctgctgcgactgaacggcgccgcgcacctcaccatcgcgtccaagaccgggccgaagctcgacctcgcgcggggaatgggcgtggcggatgcgtttgttgccatctcggacgatggcgcggtcgcggacatgnccgccctgcacgccgcgaacccccacggcttcgacgtcgtggtcgnnnnnannnggncgcccnncgtgctggannnnagcatcgagtttgtgcgcannngggntaagctggtcgtctanngnngtacgacgacaagg

SEQ ID NO: 87925 - DNA, 469 bp, Glycine max
  Clone ID: PAT_MRT3847_50403C.1
gtccgatttgtgcatagtagagtttgcttgtttgaaaataaatgcaattcctcaaaaaaaaaaaaaaaaaaaaaaaaaaaaaaaaaaaaaaaaaaaaaaaaaaaaaaaaaaaaaaaaaaaaaaaaaaaaaaaaaaaaaaaaaaaaaaaaaaaaaaaaaaaaaatataaaaaaaaaaaaaattaaaaaaaaaaaaacaaaaaaaaaaaaaaaaaaaaaggggggcccccctaaaaaaacaaaaatttaaaccccgttgaaaaaaaataaaatttttttaatatgggccaaaaaaaaaaaaaaccggggccgttttttatcccctttgagttggaaaaaccccgtgggaaacccaactaaaccccttttaaaaaaaaaccctttttgggatgtggggtaaaaaaaaaaaggccccaaaaaattccctttcccaaaatttgccaatccttaaattaaattgtaaccccccct

SEQ ID NO: 87926 - DNA, 270 bp, Glycine max
  Clone ID: PAT_MRT3847_50404C.1
ggctgatctaagatgtttgtctcagatgctaggcattggaagtgatgcactggatagacttacacatacggaaagccctctgtcacaaagttatatctctagagcaagagagagaagcattgtaaatcaaactgattccaaggagatatcctcaatggatgacatggttggtcaacatctggatgttagtattttgtgccaacaaatggattcagaaggaaacaaacttgtgcctttgtatcaaagagtattgacagctctgatcattga

SEQ ID NO: 87927 - DNA, 408 bp, Glycine max
  unsure (1)..(408): unsure at all n locations
  Clone ID: PAT_MRT3847_50405C.1
ccaaacccgggggcaannncgnaanccgcgcccaanccccccncacncagaacaccaacgccgccnccnccgcccccaagcancgccgccccgccgacgagaacanccgcgacgaggcccgccgcatcaatgggggggacgaccaccaccncnncncggccaaanacgncccnnncaaggccgacccggccnccnccacgacggagncccacncgcncgacgagaacgncnaccgcncccaanccggnggcccccncgacgnccagcacgacanggacgcccncaagcgcgncgacggcgagnaccggcgcaaccccnncgacncncgcgncggcaagaccaccnggcccnacggcnccggcggcnggagcaaaaaaagagngggnccccccngaganccacgacgac

SEQ ID NO: 87928 - DNA, 346 bp, Glycine max
  Clone ID: PAT_MRT3847_50406C.1
gagcactccaagatccctagtatgcatctacatgctgtgcacattcttatgccacagatgaggattacccgtgaccgagataccagtcagcgcagtcgaagtctccgtcggagtgcttgacgtaccggtctccaacaacatacgatagcaaccatggatatttcacatgatgatactgatctccaccttctgacaattacctctagctgcacgttcagcatgatgaccccagaattactacctgctatcaaggctggtacattctgcttaatgataaagattgagcatactttgcgagaggattgttatagcagacttagaagagtatggccaggaaactatgtta

SEQ ID NO: 87929 - DNA, 459 bp, Glycine max
  Clone ID: PAT_MRT3847_50407C.1
ggctcgagggaacataccgttggatggctcctgaggtatggattttccttggacttcatgtttcttcctgattgatttttttggtgacatcattgatcatggtgcaatccaaattcaggatcagtttttgtttatggtacacatttatgttctacctgtttgaaaagtgagacataagatggtggacagggaaaacggataacagtggcttttattttttatttttggacatgtggtgaaagggtatggtgaccttaaatgtaagaaaaacattctatgcggaatgcaggtccaggtcaatcaatgcttgaaaagttgatccacttgacataatttcttggttaccatttaactatctatgatcatagtggagcataatgttcaactattaaaaatatactgggatgggatgatgttaatattctgtcattagcatatcgaaaggatatcttgctgatg

SEQ ID NO: 87930 - DNA, 2430 bp, Glycine max
  Clone ID: PAT_MRT3847_50408C.1
gcgcgtgcccaccctatgtgtaccatagtgtgggattcctttttgctccaattgtgttggcatggctgttgtgcatcagcacacttggtttatataatatattcaaatggaatccacatgtatataaagctctttcgccatattatatgttcaagttcttgaagaagacaaggataagtggatggatgtctttgggtggaatattactgtgcataacaggctcagaagctatgtttgctgatcttggacatttctcatatatggctattcagattgcattcacctttctggtatatcctgcgcttatattggcctatatgggtcaagctgcttatttgtcgcatcatcatgattccgaactggaactaagtttctatgtctcagttccagaaagtgtgaggaggccggtgcttatcttagctattctagcttctgttgtgggaagccaagcaatcatcagtggaacattttctatcataaaccagagccaatctctgggttgcttcccaagagttaaggttgttcatacatctgacaagatacatggtcaggtctacatccctgaaattaattggatactcatgatcctctgcattgctgtgaccattggatttagggacacaaaacacatgggaaatgcttcagggttagcagtgatgaccgtgatgctggtgacaacatgccttacttctttagtaattgtagtttgttggcagaaaccccctataatagctctttgcttcctgttgttctttggctttattgaactgctgtatttctcagcttcactgacaaagttttgtgagggtgcctggttacctattctgctggccctattcctcatgattataatgtttctttggcactatgcgaccatcagaaaatatgaatacgatcttcacaacaaggtgtcactagattggcttctagccttaggtccaagcttgggaattgctagagtcccaggaataggcctagtgttcactgacctcaccactggcatcccagcaaacttctcccgctttgttaccaacctccctgcatatcaccgcatccttgttttcgtgtgtgtaaaatcagtgcctgtccctcatgtccctgctgctgagaggtatctggtaggccgtgtaggacctgctgctcatcggtcctaccggtgtatagtcagatatggatatcgtgatgttcatcaagatgttgattcctttgagtctgaactagtagcaaggcttgctgatttcatccaatatgattggtaccgatctaggaggagtagcatgagcattgaggatgatggttcaaactccaatgaatcatcaagttacagattaactgtaattggaacaactggtttcaccatccaaccaggatacgagagtggcggggagagtgtgcagcaagcaagtgtatctgttggtttcccaactgtacaaagtgtgactgatgttattgagatggaaccggtcatgactgagaggagagtgaggtttgctattgaagatgagcctgagagtgatgcaaggtctgagacaggagtgcaaatgcaggaagagttggaagatctttatgctgctcaagaagctgggattgccttcattctagggcattctcatgtaagagcaaagcaaggctcatctgtactaaaaaagttggcacttaactatggctacaatttcttgagaaggaattgtagaggccctgatgttgcacttaaggttccccccagtttctcttttggaaagttggcatggtttatattgtgtagaatatctaacttgtaattagcttcttttttttttggtgtttttcatatagagggacataggcttcaatgccatagcagtgtgcagtttccaaaaggattttgtgaatgagactgtgggaatgactctacccttaaaatttaacgtgatttatatagaatgcttgagtgcatgaacagattgagatggaaccggttgtgactgagaggagagtgaggtttgcaattgatgatgagcctgagagtgatgcaaggtctgaggcaggagtgcaaatgcaggaagagttattttatctttatgctgcacaagaagctgggattgccttcattcttggacattctcatgtaagagcaaagcaaggctcatctgtactaaagaaattggcacttaactatggctacaatttcttgagaaggaattgtgaggccctgatgtggcacttaaggttcccccagtttctcttttggaggttggcatggtctatattgtgtagaatatctaacttgtaatcagcttcttttttgttgtgtttttcatatagagacttaggctttgtttctcttcagtgctctgtttccaaagaattttgtgaatgagactgtgggagtgactctacccttaaaatttaacgtaaattatatagaatgttttcttttttcttaatttc

SEQ ID NO: 87931 - DNA, 408 bp, Glycine max
  Clone ID: PAT_MRT3847_50409C.1
agaaaggtaaaagagagtgccaaaatgcccttaattaggcatgcttttgtgtcaaccgcagaccggtatgggtcactcataggaacaaaaccacctcacatgtggatttggggagaaaacttccgactacctagagggctgaatgctacagctctccctgggagagtttcaaattataaaaagacatctattggttcctagttatcaaccgcttctacgagagttggctcatagacgatgggagcctgaaagacatgaagatgcatcacagttgcaacaacgaaggcaagcccgccggctgcaacatcattccggaatcttacaccagggggccttccgggaccaccaatatcaattggcacaggctcaagagtgtgggaagttagattctggattcttccatccttg

SEQ ID NO: 87932 - DNA, 315 bp, Glycine max
  unsure (1)..(315): unsure at all n locations
  Clone ID: PAT_MRT3847_5040C.1
cggccgataatatttttttcttantctttttttcacaaatataataacaacaaccacccnaaaaaaaaaacgactgttttcaaacttattaaacacccccaccaacctcaaaaaaaaaaaaaaaaaaactcatcctacaactaacatattttacccctacccataaaccaaattaacttttccacaataaccatcatttcttcaacaatttcaacaacccaccttactacacatatataatcttaccaaaaataccaaaaccaacctttccaaaattataaaaccaacttttcaaaaatcaccccactttatctc

SEQ ID NO: 87933 - DNA, 162 bp, Glycine max
  Clone ID: PAT_MRT3847_50410C.1
tcgctcacacagatctggacccgtgaggctgacatctacgctactccaagggctgactcactgccagctgtgcttaccgaaattgaatccaccaaagtcggcatggcctgcctaaagcatggatcttcgacgttcatttctgaaggtccacgcttgataccc

SEQ ID NO: 87934 - DNA, 425 bp, Glycine max
  Clone ID: PAT_MRT3847_50411C.1
ggaattcagcacgagggaaggagtgtaggtgggttttttctttggtaaacttaataaagaaaaagaaaaaaaaaatcaacagtacggacgtatattggactaatggacccaatatgtttggcccattctctgacgttcacaggggagataatgaaggcaattgtttcacctttttgcatttccctttttatttatacattttctttatgtactttttttgtatttttccccaaaaaatatacttatttcagaatttaattttgctcctcttttctggttctagcctaaggtattatttgtttttgttttaaaattctttgtttgtaatagaaatagaattttattcttgaataatatataaaataataaaaaaaattccttatcattagattagtttactcaatttatgaatggattaataagtc

SEQ ID NO: 87935 - DNA, 230 bp, Glycine max
  Clone ID: PAT_MRT3847_50412C.1
gaaaaaaaaaaaaaaaacatggtggtaaaggtgtatggtccaacctatggatcccccaagagggccctggtgtgtctgattgagaaggaatttgattttgaaacagggcatgtggatctcttcaggggagagattaaggaccctgagttccttaagctgcagcaatttggaccccttcctgttattcaagacggtgattatactccctatgaatctcgtgcaataatcag

SEQ ID NO: 87936 - DNA, 127 bp, Glycine max
  Clone ID: PAT_MRT3847_50413C.1
ttaattggctgaatatgatgtcgacctcgacgaacgtggtagtcctggacaacggccgcaggctgatcaatgcggcatcggcggtctgagcgacccctccgtcatagtcccgaagtgactctaacgc

SEQ ID NO: 87937 - DNA, 399 bp, Glycine max
  Clone ID: PAT_MRT3847_50414C.1
agatcacacatcagcacatccatcagacaaatcttctacctaggatcagggattacaacccaatcgtgttgccgagtacgttccagacgttatcagtagggtcattagcattgtgaccgatcacctcagtgcctacaccataggtaatgacaacgacatacactacatctacaacaacataatcaatcatgccgagtatcgctgtgcacggaagacattcgacacacgatacgctttccaaaaagctcacacatcgcagtagtagtttggtatgcctgatgctcatgataatgcgcagcttaacgtgtcatctacatacgcacagatcatccctgaaagtagaacagtgtgcgacacatcacagattaccagttcagcagacgactactgtcacgagag

SEQ ID NO: 87938 - DNA, 151 bp, Glycine max
  Clone ID: PAT_MRT3847_50415C.1
aagaactactactgacgaaccgcgactcaccaccgacgatcaatggacaacaactataaagtgttaaagcatgtaaatgctggcatcttccaccgccggagatgccggacacagaaatgtcggtgaccgcatcgtggtgatgggcatgtac

SEQ ID NO: 87939 - DNA, 424 bp, Glycine max
  Clone ID: PAT_MRT3847_50416C.1
gcagtccggccctaatatagtttttaaattcattcattccaaggcttttgggaggcgctcagtggcgtgcagtttcctctcgaatttctttcttcccgcagtctttctgggcgggcgtctcccgtctgtttcttcccatcttcccccttatcatcctgggactggataattcttgaatagtctgggaggtagcagggaacccgagttcggagcctcgaccagaacctccagacgggaaattggagcaggtggtgtcgttccaggacgctgaggaccacctcctcccctaacgcacagcccaacgatcctaaaagtaaaaaccctgagtttctgagtcaagactgagctggtggggcggggaccgagtaggcgtggatggggagcccagcgggtccccagcggagaaaatgggtgagacgcctgg

SEQ ID NO: 87940 - DNA, 576 bp, Glycine max
  Clone ID: PAT_MRT3847_50417C.1
tgttttagacttcgcaaaaccctacgccgatcccaaacgattccgatcgcgaaaatggcatccgccgccgccagatcgatattccgatcatgctccgccagccggtcagcgtttcgcgtcgcatcggaatccaaaccggttcgttctccgttccgtatcgcgtccaataagcctctctcgcagtcccaatccactctcaggttccccgtggaattgagttcgtgtgttgaatcgatgatgccgtaccacacggccactgcttctgcgctcatgaattccatgctttcaatttcaagccgcacgagcgcttggattcccgaaggccaaaagcagactacttgaagatcaggaagcatagatgggattgcagggacattctatgatatgatgttcatcttgaaacaagattttgttgttgctaggaataattgctatgcatctataactaattactgaacattatttagagcacgtttgtgtgctctcctgggtttgtcgcacatcattacgcagaactttagtttacattgcaggtttttgttctcttttttatgaaccaaattgtcccatttaagc

SEQ ID NO: 87941 - DNA, 455 bp, Glycine max
  unsure (1)..(455): unsure at all n locations
  Clone ID: PAT_MRT3847_50418C.1
ggggaacaaagcgggggacacgncaacngaagggcgnncaggacacggggcaaaaggaccccnaacaccnggccaagacganggcacaggcagagggggagaggcgcccanggaacaagggagaacanaannancacagggggagggaaagggcattttttttttnaagngcggaagacatgtgagggacttgccagggggcaaaagatcaaaggctccgcctttctcctctgaagggaggttggggggggtgaaattattcaggttggccactccttggccacattggttgggangatggggggnggggcttgttcctttggngccctgcggggcggatgctgcgggggggggggcgatgggggagctgcatgggtgtgggtgggaggcggaggggggggaggnggggagtggggggaggggggggggggggggggggttttggggggcggcgg

SEQ ID NO: 87942 - DNA, 401 bp, Glycine max
  Clone ID: PAT_MRT3847_50419C.1
caagtctacacttcaatcaaccactttcaacgaatcaactttcagctttacgcttccagccaattatattcaccatgtctccctgtgactgcaagacctgcggctcctgcaagggcgactgcgcttccagctgcagctgcggctcctgctcccactaagcgcctcatgctgctgctgcgcctgacaccctgagttccccccttcgcgcaaacacaccaccccgacaatgtccccgcaagatccgatcaaacaccacttgggacgtcaagaacaacgcatgggcctttctgatggcgttttggggtgtggagccagagggggggggggggttgaaaggtactctgcttgttcgcttgaacgaatggaacaaatcctgtcaaatgaaaacgggttcgaccttg

SEQ ID NO: 87943 - DNA, 488 bp, Glycine max
  Clone ID: PAT_MRT3847_5041C.1
atcctccaaattccacttcaaatcttatggcaaactttggaactacacaaagaacacccaacactaccaccacaccttcaccaccctccttagacccttacgaaccaaaagggcctcatgaaaagttgtacactgatttcaaaatctactggacccttcaccatgcccctgacttcagaagctgcagcaattcgtgtcatcagaaacttggagcatcttggcttgtactacacactctttgtgtggatcatactcttcatagtcctcattcctcatcgtaagttgtcattgattatcttggtcatcatgacctatgtgatagttatttattgtttagttctaagggcataccccaaatctattttccttcatagaaccatagataaaaagtttgtgttggctttgctagtgtttgcaacatttgtgcagctgattttgactgaggcagggattcaacttgctgtgactttggcttgtgctgtgccttt

SEQ ID NO: 87944 - DNA, 782 bp, Glycine max
  unsure (1)..(782): unsure at all n locations
  Clone ID: PAT_MRT3847_50420C.1
ccccgtgccccccgcccgagcgcttccggacccgcatcgacccacgcgtccgacccctacgccgatcccgaacgattccgatcgcgaaaatggcatccgccgccgccagatcgatattccgatcatgctccgccagccggtcagcgtttcgcgtcgcatcggaatccaaaccggttcgttctccgttccgtatcgcgtccaataagcctctctcgcagtcccaatccactctcaggttccccgtggaattgagttcgtgtgttgaatcgatgatgccgtaccacacggccactgcttctgcgctcatgaattccatgctttcaatttcaagccgcacgagcgcttggattcccgaagattgcaatgatgatgtttgataaggtcgagaagattgaagcaaacttttacataatatctgcaatgtatgaaagtgtctgctgaaaaaattaggagagttgactcggccattgtaaggacaagttgatttctgaaatggagctttaaaacctagaccacctgtacttcattttctttctatttcagatgcattagaggattgcaattttatcctcatgaactttagtgccaaaggcaattaagttggaaatgtactacaaagtaccaataaagtttcattttgtttttccatgtttattagaattttcatattgaatagtctagggatgctttatggatgttagnnttggagtatgtaatgaaatttctgtaattcctatacaatgatgcctcttaagtttgaanctcaaactaagtnnaagttc

SEQ ID NO: 87945 - DNA, 391 bp, Glycine max
  Clone ID: PAT_MRT3847_50421C.1
gcgcgctccgcaagctcccggattgggttgagagacatacttactattgttacgcacacttttgcagactaggcgtgcaaaattcgaggggaagcctatgctgtgaaggggtacatatttgcacgcaggtcgaaacaatgtcctactcgcagactcccgcacttctgaatgccataaacaactatgtgaagtctatcatgcaaccggattttaattctgctacttgtgaatagtcttaacaatttgaacgtttaagtaatagcacttcttgtaaaggggattaataatcgcccgtgtttcatcattcagagggaaactcttgctctactggtgattggtgaaaaatgtttatcttactaataacttttccggatggaactactgcttttgg

SEQ ID NO: 87946 - DNA, 189 bp, Glycine max
  Clone ID: PAT_MRT3847_50422C.1
gtaaactccataccaaataagtagtcccaagaacaagaacaatgttcattttgtgtctttaggatattattggtgaaaaactaaaaaaaaattattggaaaacataaaaaaagttatagatagtataattttgtgcattcaacaaagacatttttcttttagtttattaacaaatgtccttatctggtt

SEQ ID NO: 87947 - DNA, 204 bp, Glycine max
  Clone ID: PAT_MRT3847_50423C.1
ggcaactggggctaaacacaaaccccgtggctacgttacgcactacctcagctgtctgtctgttactaaaagaaccaacatttctagaaccctctcagccaaaaaaaacaatgcacacccaccagaagccgcccacactggattactgtccttagctcgcgcggaacaaaatccaccagccctcctacccatgcgatgaccacc

SEQ ID NO: 87948 - DNA, 1673 bp, Glycine max
  Clone ID: PAT_MRT3847_50424C.1
gcacgcgtccgcacagtagttgctgagaatgaggataacctctgcactatatctgaagaagaacaggctgctatagctgctgcagaagctgcccgagctaaagctcttgctgctgctgaggcatatgcctctgcagaagccagatgtaataccctgttacagcttccaaagataccctcattccacaaatttgctagacgtgaacagccttcacaaaatgacgagtgtgatagtagaaaaagatggcctggtggtgtttatggaaggcaagattgtatttcagagattgattctaggaattgcagggtcagggactggtctgttgatttctctgctgcttgtgtcaaccttgataattccagaatgccagttgataacctttcacagaggagtcattcaaatgagattgccagccatttgaatttcagagagcactcaggagaaagtgttgctggggacagcagtatatatacaaaagcttggattgacacagctggtggtattgcaattaaagaccatcatgccatagagagatggcaatctcaagcagctgcagctgattcttatttttccaacccatctattgatttgaaggatgaagaggattcaaatgcctgttcgaagttacccagctggaagcgtgatggtattgcaaatgagagctctatttcacaggttactgtaaataaggaggctcaaaaaggtcattcacgaggagcagatcatattaaacaggctgttgtggactatgttgcatcactacttatgcccctgtataaggcaaggaaactagacaaggatggatacaaggctataatgaagaaaagtgaaacaaaggtcatggagcaagccacagatgcagaaaaagccatgactgttcgtgagtttctagattttaagcgaaagaataagattcgctcctttgtggatgtattgattgagagacacatgacaacgaaaccagacatgaaatcttaatgttctttggatggaatagtctgtactttgttgtacgtctttgtaagagttgccaaattctggttcttcctacttcagttctcagttttggtggccttgggcatgttctcatatgagcacctcaatctgcctgtttaaatgatctagaaggtacaattaaaaagacaaacaaaacttgatcgattcaaatcaagcagcttctaaggaaattccttgtcagcttgtcctagcaaccttgaacagcatactgaatactgatggtagattgccagtaaacaggcctcactacctctataaacagacttgttgcaaatatcggttagatattcagagtgatgggcattggcaggtttgaagatgacagcaggttgcattcatctgtcgtttaatatatcatgtttcattgaggtttatacctttgaagattgaaaacctttaacccatttttattaaaggggtttctatagggcaagacattaaatgaccttatcaatttcttctatttgtacagcttagcattgttctagtgatgacaagcatacatatccattttctatgtcctactagaaacatttaacatcaattactaactttttttcttcattctccaaagcggggaaagaattatgccagcttttgtaagatacttgattactcaattattttctcctcctactgtctcattctcgtcttgt

SEQ ID NO: 87949 - DNA, 364 bp, Glycine max
  Clone ID: PAT_MRT3847_50425C.1
ggaattcggcacgagggctactaatgaaagtggttttaccttcaatacctctcggcacagcattgattgatatgtatgctaagtgtgggcaactgcaaaaatcaagaatggtatttgactctatgatggagaaggatgtgatttgctggaatgcgatgatttcaggctatggaatgaatggatatgcagaatctgctttggatatattccaacatatggaggaatcaaatgttatgcccaatggaattaccttcctctctcttctctcagcatgtgcccatgcagggcttgttgaagaaggcaaatacatgtttgccagaatgaagagttattctgtgaatcccaatttaaagcactacacttg

SEQ ID NO: 87950 - DNA, 348 bp, Glycine max
  Clone ID: PAT_MRT3847_50426C.1
cttctccccacttcctctatataatacacactatacaacataacattcgtatatacacacaggaccaaccactctttttacttgatttacttcctccatggcatctttcatcatcataccactcctacttctttctatctgcgtcgtacatgtcttacatcaccgtcgaggctattgtcggggctacccaggtaatggcggtagcggctatcctggccgtggtggtggctaccctggtcgtggtgtcagcttataaaagtgacaacccggaacccttcatggaccagcgcgtgaaacgctacggtccaatcttcaccacccacgtgttcggcgaacccaccgttttct

SEQ ID NO: 87951 - DNA, 116 bp, Glycine max
  Clone ID: PAT_MRT3847_50427C.1
caggatgacatagattggaaattaatagacaaaactgggaatgaatcacgtcacatgggccgtacaggtgaatacaaactcgatgaaccccatgaacagatcctaacgaatacact

SEQ ID NO: 87952 - DNA, 399 bp, Glycine max
  Clone ID: PAT_MRT3847_50428C.1
ggagtacattatcttgtaaagaaaatgtatgctactatagtttatttttccaaaattaagtatttcatgttttctttcgtaacttcgttgctggtacgccccaattctaaattgagctttcagtaagtacaagttatctgactatcattttttcctttgttatattcagacattccattgcagacatgggaaagcttatctcttcaataatgtgtaagaagttatcctgattttgggcaccttatcattgtgtagtaaacattcccatgtatcaagaccatcaaccataaaacttggtaatctagtactgtgtcacctatggtgttcaaaaggagaagaaaagagagagaatattgatatgttgtatatcctcaaacaaagttttggacacactacata

SEQ ID NO: 87953 - DNA, 327 bp, Glycine max
  Clone ID: PAT_MRT3847_50429C.1
gggggtgatgactgggatataggtgcatgccacgaaatcatatatatgcatgcacataagatgaaggttcctatatattttggcattccctcctcatttaacgtccatccacattttctgaatccttttctctctctctattccttggtgattttcaaggaactcatttgtattggtgatgagagaagaaaacaagctaattaagaagcaacgatgagcagcgatttgtaccgattcgcagtatcatcccacttcaataggtttccaaaatcggtctccctccgaaagaaagttccatggtggtaccagatcctggacccgcggtcc

SEQ ID NO: 87954 - DNA, 674 bp, Glycine max
  unsure (1)..(674): unsure at all n locations
  Clone ID: PAT_MRT3847_5042C.1
ccacgcgtccgcagtttttgcccttaaggaagatcagcatataagagtgcaaaaggaaggttttgaagtaaaggaagagaagaaggtggaacaggtgactgtggctttgcacattggattgcctaacacaggaggccatgaccctgatgatgataatgatcatgatgctgatgatgagaagaaggttttccatgttaaggaagaagaagaacccttgaagaaaggcttccagggtaattgttctttcaatcaggagagaagattttggattccaactcctgcacagatccttgttggaccgatgcagtttgcttgctccatatgcagcaagaccttcaatagatataacanatatgcaggttagcaattggtaattctcaacttctagtgcaaaaaacaaacgataagattttctattaattaactatttgctcttaaattaacttgtttttaaactaaacacatatttttaactaccaattatgccaggaagaacctttcaaaatagagagtgggaactgagaattaagcatttatttgttgtttgaaaagacaatcgtgcttgattttcatataatacgcctaacctatctacagatagcttacacttcaatttcatcgctatataagtatcattaacaaaatagaatctaacaccacagntagtttgaaaa

SEQ ID NO: 87955 - DNA, 365 bp, Glycine max
  Clone ID: PAT_MRT3847_50430C.1
ggggaaaaaaaatttatttatttattattattcttaaaccgggggggaaaattattgggaaaaataaagggcccccctttttttttttccccgccccaaggggttaacccccttaactttaaaccccgacaaacaaaccccctggtcccaagaaatttggggaatagggcccaacaaattttgtttttaaggtcgggggcaaagggcgttttaccggtaacttggcccccaggcctttaaaattaaccgcaaaataagggcaagggttacttttcccgggccccctggttgggttcaaaggcccacaaaggctttaagggcaaaaaaaacaacggtggggggccaacaaatattccggggggacc

SEQ ID NO: 87956 - DNA, 815 bp, Glycine max
  Clone ID: PAT_MRT3847_50431C.1
caaccgtttcgctactacgccctgcctctcccatctaatagcaggattccctaatccagccatctcgaaatgtccgacccggaaaacacacccgcgccccaatcggagcaagactcctcttcgccaccgcccgcccaagaccaacccgtcgccgctgacgccaagctcggccccgccggcgtctccttcagcatatggccccccactcagcgcacgcgcgacgccgtcatcactcgcctcatcgaaaccctatcctccccctccgtcctctccaaacgttacgggacaatgtcccccgacgaggcctccactgccgcccgccagatcgaggaccaggccttttccgtcgccgccagctccgccgcctccgacaacgacgggatcgagatcctccaggtctattccaaggagattagcaaacggatgctcgacaccgtcaaggccaaatccaccaccgcttccgccgccgtcgatatcgggactcctgcctccgatgctgctcctgcccccgccgcagatggcgactccgccgctggcgccgagtccgaaacctgatcattcgggattatagtatattaaattagggttcccttttgagggtttatattttaatattatgatgttccatttgtataactttgtttatttctcgtgctgccaatcttcattataaattattcccttgaacatcttgttgttttattgcttgcctggaaacattattgcgcgtgtgtaattattgtttgtttgcttgtttttttaagtgaattctcactttagttccttgatgttatatgctaccattgatttagtcg

SEQ ID NO: 87957 - DNA, 305 bp, Glycine max
  Clone ID: PAT_MRT3847_50432C.1
atgtgagaaaacaaaaaaaagtttatatgaaatactaaactagagataggtggattttgtaattcccgatctcttataaaacagtttaattgcttaaggacatcgcctttttttgtccaatcatcattacttacaaaaatcatgtgctacaacatattattaacctgtgcatcaaacattcatttcacggtatataaacatcttactatgagactagttttctaattcaacattgcatattaacctgggacaatttattgattgaaaattacacttgctcataactattaatatcaattattaca

SEQ ID NO: 87958 - DNA, 854 bp, Glycine max
  Clone ID: PAT_MRT3847_50433C.1
tacggctgcgagaagacgacagaagggggcagttgttagcgaaggctgaaagaataacgatggtgggagtggtgatagaagatgaagttgttgttgctccaactaacttttcaatggttgaagagggaatttatcgctctagtttccctcgttcttcaaatttctcctttcttgaatctctcaatcttcgatccatcatatacttgtgccccgaaccctatccgcaagaaaatttagagtttcttcaatcgcaaaatattcggctctttcactttggtattgaaggcaagacggatctctctgtgtctgccgttagagataacatactggaggccgttaaagttttaattgatgtgagaaatcatccagttttaatccactgcaaccaagggaagcaccgaactggttgcgttgttggttgcttgagaaaattgcagagttggtgtctatcttctgtgtttgaggagtacaagcgatttgctggtgctaaatataggacaacagatttaaggttcatagaaacagttgacttattaagcctgagacagtgtcttaacagcatcatataccagtacctaggatatgcttcaaagaagctgaggttgcggtatagagatgagaattcaatcaagccccagttaacatcagtttaattagctttttagtggagctgttcattagttatttgaacacaaaatttgatcacatactatgtgacgttacattcaattgttttattttttcatttatccttttgatcacttttatacatttccagaaatggtttttttgttcacatatatatatatatattctgaaatcaacttaagagatggtttttttgtggtataaaa

SEQ ID NO: 87959 - DNA, 140 bp, Glycine max
  unsure (1)..(140): unsure at all n locations
  Clone ID: PAT_MRT3847_50434C.1
agngctcccgaagcccgaccacgggcaccttntttgggggggattccaattntagggaanagggcaganangaccaaaagaagcccganttaaagatncgcaagctatctttaaagccctatctttggatttgccctaat

SEQ ID NO: 87960 - DNA, 890 bp, Glycine max
  Clone ID: PAT_MRT3847_50435C.1
cccacgcgtccgtacggctgcgagaagacgacagaagggaaccatgctaaactcattcactattaaggtaattgtgatagtacatacatgacagctaatcttactgttttattaatgtcttcagttaatataatgctgatgcttagactaacaagaaatttattggtaatgaattgaatcactgtatatatcttaattactactacaacataacacaatgtgatagaggttagatttttaggtctctatatatatatgaatttttttaatgagtttaatcctttaaataaatagaatacacattctgactaattatgtgtttgagtgttataattgttttttctagaccttttttaattccattagaaaactgataagaagtaattttttttaaaataaactaaatcaaatatgaactagacatattttatagaaaaaggatgaaaggactaaaaatcaaattctggttgtcaatgtcacatgcatgaaggatttttttatccttctttaattttctgtgtccaagatatggctatatctttgaatgcaaacaaacgcgcagttacctcaaatttaattaactattttttgtttgagaattttttttttgagtactttttttttttagattattgcctcaatatgcctatataatcctgtctctctcctaagtcattttcactaataatgaggataggtttggatttcagcgtctcagtgatgtaacagtttttttgttccctcaaccctcatcttgatttagacggtttggattttaagttctaacaattttgaaccctcaaaaaagtttgccagatgaagtaacctagtagctagtctacaacctataaaaaactaaaataagaaaatttcccccaaaaaaaaaaaaa

SEQ ID NO: 87961 - DNA, 339 bp, Glycine max
  Clone ID: PAT_MRT3847_50436C.1
ttcgtccgtttacgactgcgggatagacggggggttctttggggggatctctgacggggctcataacgttgatcataccgaagagaaagatctggaggaagaaaagttggtgtgagatattaactttgagattagatcggactatggatcgtctacagatgcccataccgttggacgataagcctgcggatataccttcatatgtgctagtaatacatgcttgaaaagattcttcagaagaggatgatcaagaggaagcccaagagatacccgccatgatgggacccagattggatcctcaatttcatgcggaacatgctgaggtggaaacacagatgg

SEQ ID NO: 87962 - DNA, 738 bp, Glycine max
  Clone ID: PAT_MRT3847_50437C.1
gtttcagtatttaaaaagtgagaaaagaaaggtatgtggccatatgttattaattcgttggaagtaacgctagcttcagaagtcgatggtttgctttcttcgcaccgtgtccgcccgcctcttctcctcctcggtttgccactgaatgcagctgatatagtttacagaagttgtgaaggaccaacagagcacttaagagagtttaactgagagctgcagggatggctcatttggatgtttgtcatcaagtcaggttcattggtcagcttgaggaatatggaagtagactttcttccagtattcctacggtagaaggatcaaaagataaagaagaaatcgttgaagttaaacctatcttcatgccaaattttaagaaaagaaaacgccttagccttaatcgtcttagagagatcaaagcagatatgtgtgcaaggcaaagtagtggcacacctaaaacaaagtgtgaaagcatagacagatggtcagctaagaggtatgagttggctcagcaaagcatgtgggaggtcttaaagggcgaaggtgcaacttttgaaaatccaattacccgacctgcactaagaatggctgcccgtaaacacattggtgatactggactgttagaccacttactgaagcacattgatggtaaagtggcacctggaggaactgagcggttccgtcgatgtttcaacaccaatggaatcatggagtattggttggagagtgctaatttggatg

SEQ ID NO: 87963 - DNA, 299 bp, Glycine max
  Clone ID: PAT_MRT3847_50438C.1
ctacggcacgcatacgcccactcttcctcccacgctttcatagcttttctataagacgacagaaggggataacttgaccggttaaatagagactttatgagccctaaaaaaacaataacaaaacataacgtgtaggataaaaaagatagaatgatcgcttaaacttctctctctttctttgatgcttctttccctatattcatcccttgctctgagtcgccttaacacaaaaatggattataaataaataaccaccctacccaacaacaacttttgttctttacaagacataacattct

SEQ ID NO: 87964 - DNA, 360 bp, Glycine max
  Clone ID: PAT_MRT3847_50439C.1
gcacaaaaataatttactccggcatttgcacccttatgattggagtccctatcaccagcttgtagagggatgaattttccaacgtagggaaaagccagaagttaaacacagaggacgctgatgaaagaaaccaatacaagacggccatagcggccaacacttggtgtctcccacataacttgggtgggaaataggatccatcggcatcaaaccggaaatctgtgactctggctgttgaacatgcttcacctaatgaaagacttcacaaaatttggggaggagaaaaactgtattatctttatggctttaagatagcgtggaaacaacaatgactagaatttctttaggcacaaattgttc

SEQ ID NO: 87965 - DNA, 829 bp, Glycine max
  Clone ID: PAT_MRT3847_5043C.1
gatgatatctctgctggtgaaaatggattaatgagattttggttggaggaaaatacccacccaaccatggctgcaaccattcctttctctctgcttaggaactgcgcgccattgaaactagcaacacctttcgctcgcaaagcctccatctttaatcttcttctccctcttcaaccacgcaggttggtctctagtacctgtgctgtgaacaatgaagaggctacagcaaaaacagcagctgttaattttgatagtgaagctccaacaatatttgataagatcataaataaggaaatcccttcgagcattgtatatgaggatgaaaaggttcttgcatttcgtgacattaatccacaggctccggttcatgtcctagtcattccaaaattaagagatggattaacacaacttgggaaggctgatagtaggcatggggaaatattgggtcaacttctgtatgctgccaaaattgtagctgagaaagaaggtattgatgatggattccgtgtcgtcatcaacaatggtcccagtgcctgtcaatctgtgtatcatctgcacttgcatgtattaggtggcagacagatgaattggccacctggttgaaggttgactattactttttaaattttaactgcctattttctgatgaatctctcatggatatttcttcatcaagagttgtaattttgagacctacatataaataatcttgcaacaactgatcctttagtttggttatatgattattcattgggagcttatctatgattaaatagaaagggtgaaatgctttttgtgtgaaaaaaaaaaaaaaaaaaaaaaaaaaaaa

SEQ ID NO: 87966 - DNA, 711 bp, Glycine max
  unsure (1)..(711): unsure at all n locations
  Clone ID: PAT_MRT3847_50440C.1
ccacgcgtccgaaacttccatctttcttgctattaattgttgctaatttctggcccatggatcttcaaaggcaagagccatgcccttctgaaaatttgaacatcatcacattttcagataccgtaccatgccaaaatccttccatcaacactcaaacaaagacgaatcagacacaaatggaagatcaaaaacaccagcatgattccgttcctcgtgttttactagatctaagtctctcctccaacaaggattcaggtgatgataactcaaagcttaagccagaactcaacctcctcaattgtttccatacaaatttctctgaaaactcatcagaatctagtcagggaaatgaactggatcctcgtgttttctcatgcaactactgccaaagaaagttttatagttcccaggcactaggtggacaccagaatgcgcacaaacgtgagagaactttggcaagaagaggatacaaagctggtgctgccgattttggacacacatactccaacattcattttctgccttcacatggcttatacaacaaagcacttggaattcaggttcattctatgatcaacaaaccttcttatcaaacaccctttttcgggttgtgccgttccaataatgggtggcagaggcaacctttggattcacaaccagcaattgggaactttcgtgtggnggcagaaactgagtcatcatccttggctg

SEQ ID NO: 87967 - DNA, 400 bp, Glycine max
  Clone ID: PAT_MRT3847_50441C.1
tttgccttcaagttctgaactttattactggggtttctccttcacttgcttgatctgagtctttctgtttgtgtccaatgttttgttgttttttttcttcttttttgtatttttttttgtattttttgtttggtgtcatggttggtctcaatttatctgcaccaaactttctttaagtgaagataaattttagtgtcttaaatagtttaacggtcttgtccttacattgtgtcctcagtgttggaagtttgttctagataaaccaccaccaaatcttgggttggctgcttcactggcaaagttttactcttttttctgtttccccaacttcccctttttgttttctttccccttattgagtcaactatacttaataattaggtagttcaaataccactca

SEQ ID NO: 87968 - DNA, 263 bp, Glycine max
  Clone ID: PAT_MRT3847_50442C.1
gatcataacccctttttctttgcattgcagcatcaaacttcaggggcgacattcctcagtccatttgacatcaaactgaatgtaatcaccatacaacatccttaccactattggctcattattctaactagcagatctcatctcttgcgctccattacctaatccatgtcacaatcttctcattcaaatctaaagattagatcgcactcacccataaatcttcattctgacactcatagctactggctgctttctataaaccc

SEQ ID NO: 87969 - DNA, 562 bp, Glycine max
  Clone ID: PAT_MRT3847_50443C.1
ctcttttttttttttttttttttttttttttttttttttttttttttttttttttttttttttttttttttttaaaaagcaggcaaaatgggggccctcgtttttattcaacggaccccctacggggggaaaacaaaaacaaaaaaaaaaggggcttttgtttgttctacgggggtttggggctacaaaaaaaaaaatagctcgcccccttacaaaaggcttacatcctacggttttggaaagacctgaaaataaaaataaaagggggaacctattttcctttttttttaaacccattttggggccaggtagggccttgcccaaaggggggcccccccccggggtggggggggccccccgggggaaaaggaccccccgggggggaaaaatttttttgaccaggggccaaattcatggggggggaaaaatattggggggccattatgggggggggcggggaccccggaaatgattgattcaaaagggggggcctaaaagaaaagttggccattgcttgtgggggagaaaactgattctgggagttttggggcgccccttcagg

SEQ ID NO: 87970 - DNA, 407 bp, Glycine max
  Clone ID: PAT_MRT3847_50444C.1
gagaacacgggaatgtgaggatgttctcaaatgattgtgtaaggtcatttgataacttgcttttaggttctatgtcctcaaagtgcacattgcatcccaaactctaggagtgttttgactgatatgtaccaaatcatgtttggtacagtgtatcaagctgtgttcttgaaaggaaatttaattatcagtagtctaggaaaaatttaaaatagaaccatggtctggtcattggtgctgtgtatgtccttgtgaattcaaatttaaaattttctcggggaagacttttgtgtttgaagaatatagaagtcagatttcagcttgctggtttatactttgagcttaaccttcggaatatagaagtcagatttccatgcacaacatcatattcttttcctttactatatgtt

SEQ ID NO: 87971 - DNA, 1404 bp, Glycine max
  Clone ID: PAT_MRT3847_50445C.1
ggctcgagtacaaatcgaatctaactttagcagttgaaaatgctgaaaatttagcagtgttgtgaaattagtaaaaaaaaaaaaacggagaagccgaaagagaaacctccggtgagacgatcgatggcggaagagaggtggttctggctttggagagtttgctgagctctgaaatcgaaatcgctaatcaccgaagagagcatcgaagacaagcctttggccagcacgtcggagctctgtcggaggtgatcgtcgccgtcggaaccgtgggaactggaaggctccgtcgtttcgagtacgacgctgtcgttttccgctgcttccattgtcgtttggttcagttcggtgcgcagaaggaagtgatgctgtgactgagaaaaatcgttcatgtccttaacaaccaaattgaacgggttaattttgggatattactaaatggcacccacgtgagtagtaccaatagcaacacacttgttattttttgtctttcgaaccctttctgctcccattcgatcctttgtggctcattgtattcgaacgaaccctaacaacgtctgtggctctgtgtgagactgcgagccacgaacccaatctccgacgacgacgacctcggtccagggacgacttatctccggagacccacaacttttccggcgaccaaccgtgcgcaggtgcaaggataagtgtgtgatctatctataaacgcaagatgtcagctgggcctggacttgaatctcttgtgagatcagacaatttcagtcattacaaatgatggacgaaatatagtgggagtcctgaaaggttttgatcaggcaacaaatataattcttgatgagtcccatgaacgagtttattctaccaaggaaggtgtacaacaacttgttcttggtttgtacatcatcaggggtgacaatataagtgttgttggtgaactggatgaagaactagattctagtctggatttgtcaaaactcagagctcatcctttgaaacctgttatccattgaagtgaaatactatgtgccggatttaatgaatgtatgcctacttggtggaaacagtcttagatttgcggcattgtatactagagtacgttgtgaaactctataagaatatgcagacagcataatatttctaatattctgattctgttagcatgtaagtcttgtcaaacaaacaaattctgagactatttgatgtgaaaaaactatcttctatttggccattgttttactaatataaattagtttaattcgaaaaaaaaagcggccgctctagaggatccaaaaaacaagaaaaaaaaaaaaaaaaaaaaaaaaaaaatttaaaaaataaaactaaatggaacaccacgtgagttgtcccactttaaacacccttgttattttttgtctttataaccct

SEQ ID NO: 87972 - DNA, 219 bp, Glycine max
  Clone ID: PAT_MRT3847_50446C.1
ccgatctgcttggagaccacagaggcgtgagcaggaccttggagcttcataatcacatgtactacattgagtagtaccttcacctctctcaacaatctagctagaatctgctcctatctatatgtaataaggtatgctgatatgcactattcaactaggagcactagctatgtgggtaactgtcactttatgtcatgtgggtatgtcacctaagacact

SEQ ID NO: 87973 - DNA, 879 bp, Glycine max
  Clone ID: PAT_MRT3847_50447C.1
ctaattattttaattttatttttttaatttttatattaattttttttttttttttttttatttttttttttttttttttttttttttttttttttttttttagtagaaacactcaaaattcaaaatcttcattgaacgaaaaactgaatataaagtaaagatcaggccgataaaacgatctataagagatggaaaattatcattgattccaactacagacacgtctttctagaaaactaaacaaaaaataaagcagaaaacattatacttggggaagatttgagctggttggcgctccaaaaccaccagatccacgaccaaagccgggccttccgccaggacccccaaaagagggcctgtagtcagcaggagctcctcccttgtctcctccaaagtcaccaccaggtcctcctcggggacctccacggtatccatcacgatcaccaccaaacctacgctccccttcaaagcgtggtggacctctagggcgatcaccggatgggcctccaaagggcctgccaggtggcttggcttgcttcttcaaagtagcagggacaatttcggaaggaaggttaaggtaagttctgagaaactcgatgccatcgttggtgaggaaccagtaatagtgcatccaagcaaaagtttctctcacgtactcgcgagacttgaaactctgcatcagcttaatcacctgcagattcggcacgtcgatctcagggtgcttggccaaattgaagtccttcttcgcgaagcaaactccctcttggaagaggtatttgcagatctccttgcggttcttctccgggatgatcatggttgcgaggtggaagcggaggcaatggaaattgggaaacaaagttctgcgaatacttccacacc

SEQ ID NO: 87974 - DNA, 1209 bp, Glycine max
  Clone ID: PAT_MRT3847_50448C.1
acgacccacgcgtccgggagtgagtagtagatccaatcgtgtgcggcaatgcctcaccgtaacaaccctgcgcctctcccccttgtcgtcaccctaaactgcgtcgaggactgttccctcgaattcgaatccctcgccggcgtcgccaccgtcgaacatgttcccctcagccgcctctccgacggcaagatcgagtccgccgccgccgtgctcctccactccctcgcctacctcccccgcgccgcccagcgccgcctccgctcctaccacctcatcctctgccttgggtccgccgaccgcgccgtcgactccgccctcgccgctgacctcggcctccgcctcgtccacgtcgacacctcgcgcgccgaggagatcgcggacactgtcatggcgctcttcctcggcctcctacgccgcacgcacctcctctcccgccacgcgctctccgcctccggctggctcggctccgttcagccgctctgccgcggcatgcgccgctgccgcggcctcgttctcggcatcgtcggaatctcctcttccgctaggtccttggccactcgcagctaggcctacaaaatgagcgtgctgtatttcgatgctcgcccggaaaaatgaatgaaaagttcccctctgcagcacggttaatggatactcttaatgatttactagctgattggaatcttataccctacattgggctgaaaattatgacagatcaatagaagaatggagtttgtatttgctagtcatagttttgatgtttgggagaactggactctagaaggttccttacaggaatgcagactggtgaactgtagaaacccatcagctgttttggatgtacgcgttgagattttggcaactgtaggcgaagatggagttactcgttggcttgaatagagtgattgtaggtctgtaatactcaaaagggaggagcttgtaaattactccagtcccgtgacttaatgatctttcaaatgtctctttgtgaaagattggaatgtattcatagtgtagagcataattttttatttttcatttatgatttattgaggaactttagtgagatttcattggagtgatgaacttggccctcgtgtgatgatattttggctttgccctgttgcagtttgacctgtaactgtaacccctattatcaagcttctgaaaatcgcaagtattgaagcaaggtagtgattgacccagtct

SEQ ID NO: 87975 - DNA, 326 bp, Glycine max
  Clone ID: PAT_MRT3847_50449C.1
gggggaaccaacccaaaaaaaaatgtaaatttttttttgggggcaaaaaaacaggcccaatgggaaaatccctccctaaacaaaaaaatttttcgaaacaaattgtgctaaatttataaacaaaaacctttaaggctttattttaggaagcctggggagcgaaccaaaattttaattttgaacaacatatttctctttaccacctttttgaaccctttttgcaatttaaaaatacacgtggaaaccaattttaaggctcaccttgttaagacggcgtgaatggtttttttttttcttaacagcccccctcccctttttaggggtgg

SEQ ID NO: 87976 - DNA, 404 bp, Glycine max
  Clone ID: PAT_MRT3847_5044C.1
tttactgtcgttttaacaaaggtttttatttattaatttttcaactatacattttttataattctaagatatcacgcatagtttagttaatattataattttttataacttttcataatttataaaaaaaaataaaagttattttgtagaaaattatatataatttactgaaatagtaattttttatttcaacataattctaggagtaattttggttccaagcaatgctattatatcctcaacattaaaccaaatccttagttccaaacaatgcttatacagttgggataagatagtgtataacaaatatgctgaatataacgtggccaaaaatatatccagaaagattagtaatcatttttacgataaaccccaaaacataacaaaaacatgataaagcacgg

SEQ ID NO: 87977 - DNA, 2210 bp, Glycine max
  Clone ID: PAT_MRT3847_50450C.1
aattggcaacacggctgaaggagtgagtagtagatccaatcgtgtgcggcaatgcctcaccgtaacaaccctgcgcctctcccccttgtcgtcaccctaaactgcgtcgaggactgttccctcgaattcgaatccctagccggcgtcgccaccgtcgaacatgttcccctcagccgcctctccgacggcaagatcgagtccgacgccgccgtgctcctccactccctcacctacctcccccgcgcctgcccagcgcccgccgccgggcgctaccacctcatcctctgcctcgggtccggcgaccgcgccgtcgagctccgccctcgccgcggacctccgtctgcgcctggtccacgtcgacacctcgcgcgccgaggagatcgcggacgctgtcatggccatgttcctagctctacttctgcggactcacgaactagacaaaccccctctcccatctagcgcagaccccctctggtgctcaattcatagagtcaactgtgagacttagtggaaactgttctgaactattgaaagatggatatattatagctctgtatgcacgagaccgctctgcacttcatgtctctaggcaaagagttaaaggtggaggttggatcatggattccatgtcaaatgtgtcaaaaagagaccctgctgcacagttcctcatcatcttcagaagcaaggacacaattggattgcgatcccttgctgctggtggaaaattattgcagatcaatagaagaatggagtttgtatttgctagtcatagttttgatgtttgggagaactggactctagaaggttccttacaggaatgcagactggtgaactgtagaaacccatcagctgttttggatgtacgcgttgagattttggcaactgtaggcgaagatggagttactcgttggcttgaatagagtgattgtaggtctgtaatactcaaaaaggaggagcttgtaaatcactccagtcccgtgacttaatgatctttcaaatgtttctttgtgaaagattggaatgtattcatagtgtagagcataatttttatttttttcatttttttgcttctttttctttattactaattgaggactttccattggagtgatgaacttggccctcgtgtgatgatattttggctttgccttgtaacaccttttatcaagcttctaaaaatcaaaagtaatctatcaaggtagggattgattcaagcatcaggtttcaagtttgtctcagagtacctctgctagatctgaaggaaggcgcagcaggtcaggtaaaaaggccaaaaaaaggcatacccgtcacaagtcccaacaaaaacatgaagatccttctgcactggagaaagaaggcacatctcagagagatgatactgctatgagtggcactgaccaagctttgagctctagctctgaagactcaagaaatagaaaaactccaatagaatctatgcaagaacccactggtgctcaagtcataaagtcaagtctgagacttagtggaaactgtactgaactattgaaagatggatatattattgctctgtatgcaagagactgttctgcacttcatgtctcaaggcaaagggttaaaggtggaggttggatcatggattccatgtcaaatgtgtcaaaaagagaccctgctgcacagttcctcatcatcttcagaagcaaggacacaattggattgcgatcccttgctgctggtggaaaattattgcagatcaatagaagaatggagtttgtatttgctagtcatagttttgatgtttgggagaactggactctagaaggttccttacaggaatgcagactggtgaactgtagaaacccatcagctgttttggatgtacgcgttgagattttggcaactgtaggcgaagatggagttactcgttggcttgaatagagtgattgtaggtctgtaatactcaaaagggaggagcttgtaaattactccagtcccgtgacttaatgatctttcaaatgtctctttgtgaaagattggaatgtattcatagtgtagagcataattttttatttttcatttatgatttattgaggaactttagtgagatttcattggagtgatgaacttggccctcgtgtgatgatattttggctttgccctgttgcagtttgacctgtaactgtaacccctattatcaagcttctgaaaatcgcaagtattgaagcaaggta

SEQ ID NO: 87978 - DNA, 363 bp, Glycine max
  unsure (1)..(363): unsure at all n locations
  Clone ID: PAT_MRT3847_50451C.1
tcatggtagaaattattttgtagtcttttatggctcttgaattaacaaatgctatgtacattgggtatttggcagaccattgagtatgggtttttttaatgaatcantgagtatgggntatacacttatcttggngtcttcttattnntctgtatttcaaaatcatntaattaatcttggaaatcaatttttctttagaaagctaannngggtggttctgcaagactttggcattgacttttgatacaccacatcattctgtcaaactgnttcagtgaaaaaattgggggggcagtaaattctgcgggaacacttaaagaatatttnnccaaatttctttaaaatattccgtcaattgccagg

SEQ ID NO: 87979 - DNA, 468 bp, Glycine max
  Clone ID: PAT_MRT3847_50452C.1
gagttgaacaacagcaagccggtggagccgaagaacagcaagccggtggagccgaagaacagcaagccggtggagccgaagaacagcaagccggtggagccgaagaacagcaagccggcggagccgaacaagaacaagccggcggagccgaacaacaacaagccggtggagccgaacaacaacaagccggtggagccgaacaacaacaagccggtggcagcacaatctcgctcggccaatgccaggaacccccaaccattgagttcgccgccggtctcgagggccgggccgcagacgaattcactttccgtcctgccaaccctaacaccttcggcggccaaaacaccgccctcaacccgttgatcatcgtcaacttcctctgcgaccgacttaacgacaggtgccaagcggaggaggctcgcaacaggtgcgaggagctattgaccgagttccaagcacgcggaaacg

SEQ ID NO: 87980 - DNA, 235 bp, Glycine max
  Clone ID: PAT_MRT3847_50453C.1
tattaaactccaccctactccttgacaaatctgcttattcgctaccaaaaatgtccctttaaatcattgtgcttcacgttaatctaggatatgcctcaagtgtgcaaactcaattgcttgatccacctattactcccttatcgcagatgatattgatcctactatgggttacctaaccatgtgtacccacccactgactattcttacgcaaggtatggatcacaccttgaccatg

SEQ ID NO: 87981 - DNA, 240 bp, Glycine max
  Clone ID: PAT_MRT3847_50454C.1
aattccagtgttcccatgtctcatgctcactgaagtcgaaccccgaatggcttctcaagttcttcatcacaaggcactgtttgcccccacgctaagtatcccttcttcatctcgtaacgtcacgttaatttctagggttccttccacctcaatttcatggcattgcactcctctcattgctaagcttagtttcgctgtgaaaactgactccaacgtagaacgcccaggtgatgccatcga

SEQ ID NO: 87982 - DNA, 266 bp, Glycine max
  Clone ID: PAT_MRT3847_50455C.1
gaagcaaaaaacacacttctgaattaaaaatgaataacccgctctgcaaaactgcaagctggattataagttgccaatgggcaaaacacagtgtccctggttttacaggtttaagctaaatcgaaaacgcagtcactctactggcctacaagctcaaaacataacaggaaattccgcgcacacgatggcgggagctgcacttgcaatcctaatccacaaataggacactttttctccacctgaccttgcacagaagagcctcacat

SEQ ID NO: 87983 - DNA, 338 bp, Glycine max
  Clone ID: PAT_MRT3847_50456C.1
caaagacagagaaaaaatccaaagagtaaatggaacagaagagaaagcttgaagctagggtgaacaccattgaaaggagtgaagagaccaaggtgatgaaagttgatgtagaaacgttcaatctgtttacttcatgcagagctctcgacttcatcttggactacatgtatttcatgtcactacaatacctttagttcattatttattgtattttgttcttgattcttgtccttaatttatcataaaaactcttttcattcatagttttagaattcatatcaagttgtttatattttctgagaaatgaatatggttcttttctattactttgaatttat

SEQ ID NO: 87984 - DNA, 273 bp, Glycine max
  unsure (1)..(273): unsure at all n locations
  Clone ID: PAT_MRT3847_50457C.1
cttggatcctctagagagggcgcccccggacacatcttcgttttctttttttttaacaatcttgactcaaaagatgccatttactgcnaccaactgaattgcagctaggaggaatagaaacatcatagaatctgcaggactttacgaacgaagggtcatatcctcaaccaattacatttattaaaagtagtgactaagagacctgagtgccttcggcctgcatgagcatcataaccaacctcgattggagcaactgatcttccatagccacac

SEQ ID NO: 87985 - DNA, 446 bp, Glycine max
  unsure (1)..(446): unsure at all n locations
  Clone ID: PAT_MRT3847_50458C.1
cattcgagcggccgcttttttnnnnnaatttttttttttttttggggttttttttcccacaccgagaaccctttgttggtttccttggcacccaacgttttgtttccaggccctaccaaaggggggcaaaaggaaaacaaccttttttttcctgaaaaagataaggttgtcgccattttagacgccgggacaaagggggcaaatactaaattcttactactaaaaaatcttatgccaccaccccccccatgatcgtgggaaaaatcttattttccccgggcccaaggggggtgttttttctgaaaaattccaattttacaagatttttggggggggggggaggaaaccacatttttttaaattttggaaaagaggcacaaggggtagacacttttgcgggggttattttttttattgtgggacatatccgagtgtacttgctcaaa

SEQ ID NO: 87986 - DNA, 541 bp, Glycine max
  Clone ID: PAT_MRT3847_50459C.1
gacccacttttttttagaaaatggcgcgttcgatagccgatgacagcaggggcagctttatctcaaatattgttgtgaaacactgatatccacatgaactatctgctcgaccctataggagctcaaattcataatgcacctacaaccagggtggagaccacgaagttaaatgcggggactgtgtcggttacacagatagctcacctgcgtcatatgagaggcatccttcacaagaaaaggaaccatgtcgagggagaatcttcttcttaggttccctgggagaatgatctttgagagagctcttgcttaactacagccttgcgcagctactgagtgtgagagactcatactgatctgtgtgacactggagactacagcgatcatacctgctgcttcatagcctgacggacaagagcatcgagccgtcaagaccttggccacaagtactctattaatgtctctaatgacgttataaatctatcggctaagagcgaccctacctgtgcaatgcaacagctccctaagctgtgtgcagatactt

SEQ ID NO: 87987 - DNA, 341 bp, Glycine max
  Clone ID: PAT_MRT3847_5045C.1
gttaggtgtattggatttatagggacacggagtgttaagtaaactattaaatcttctgagacagttaaatttgtaaactattccaaacttaataaatctacatgaggcgacccctgaatagctgttaatatgccagctctatgtccagaaagtcacctctgcagctgatcgttaattcgagaaagggcatttatccctcgaactatggtttctatagtttcgatgctctctacaattccagtctcgagtaacaataccctttcctatacacactggtatttgtattaacggcctgtagctcgataatcaggggctactatctcatccgcggcatcatcgat

SEQ ID NO: 87988 - DNA, 212 bp, Glycine max
  Clone ID: PAT_MRT3847_50460C.1
taggtacctcccatcataacaattaagttatctactcaggtttactcgaacatgaatgtccaatagctgcctagtctatagcaacgccgtgagtgactggccttaaacgctggagcataaattaaagctggaatgcacgacatcgaactatggtgtcgtccgtcaacagagcagtttgctgcaacatctttcgatgacctcaaacacatacg

SEQ ID NO: 87989 - DNA, 287 bp, Glycine max
  Clone ID: PAT_MRT3847_50461C.1
gcggctcgagctgcttgagataaggtgagcaccaagtgttgcgaggtgctggcttgtcacgcagaccacataaccgcgaggagcaatgggtggcagatcacataagagaacgttggtgcactgaaatgtgaaagtgaggcatgggcactagaatgtgaaaacgaatagggcaataggaggactccaagggcaactgggaacaaagtggaggacaaccccttagtgcagaaaaaagaactgtttcagagcctgtcctggcagttacaaaacctaagggaaactatctt

SEQ ID NO: 87990 - DNA, 368 bp, Glycine max
  Clone ID: PAT_MRT3847_50462C.1
agagaaagaagttgtaaaggataggaagaagatagaaaatgataaagagcgagaacaacagcatggtgatcagactgtcagagaaatgttcgtggatcatgaagatttggttactgtaaagcttgaagagaacggagcagttggagggacagaaccaatggacatctctacaacatcaacatctcagctatgtggaattcctagttcagatgtgacaattttggaaggtcatacttcagaggtgtgtgcttgtgcatggagccctacaggatctcttcttgcatccggatctggagattcgacagctcgtatctggacaatagcagaagggagatgtaagcctggttcagagaatggccctttgaatg

SEQ ID NO: 87991 - DNA, 2578 bp, Glycine max
  Clone ID: PAT_MRT3847_50463C.1
gagaagaaacggaagcggtgtaaaagtaacagaggcggatagaaccgaaatacccaacccgaccgggtgagcgtgactgtaggagtttctaattgcctggttcagcttcaccttcaccttcaccttgcggtgtaaaagtaacagaggcggatagaaccgaaaaacccaacccgaccccgtgagcgtgcgtgactgtggcagtttctaatccgttctctctctctctctgctacctcttacctagctcgctacctcacgtaatcgttcaccgttcacctttttcttctccaatcgcaaccaaacttctctctctccctctctccctctctctctctcatgttcttgtagcggaaccgttcttgcttctcggagaacatggcctccatctcctccgccgaactcaattacctcgtttatcgctaccttcaagaatcaggtttcacgcatgctgcttttacttttggttatgaagctggtattaacaaatgctccattgatggaaatttggtgccgtcaggtgctcttgttacatttgttcagaagggtctacagtactttgagatggaagccaacttgagtaattgtgatgcagacctggaagaagatttttcattcttacaacctttggatcttatcacgaaagatgtgcatgaacttaggcaaatgataagtgaaagaagaaaaaaactacagaaggaaagaaagaaggaatttgaaaaggagcatgaaggtgaacgtgtacgggtaagagaaaaggatagacgtgaaagggagaaagaagttgaaaaggatagacgtgaaagggataaagaagttgaaaaggatagacgagaaagggagaaagaagttgaaaaggatagacgagaaagggagaaagaagttgaaaaggatagacgtgaaaaggagaaagaagttgaaaaggaaagacgtgaaagacagaaagaagttgtgaaggatagggagaaggtagaaaatgaaaaagaacgagaacaacaaaatgatagacagactgtcagaaaaatgctcagagatcatgaaaatgcggtgcctttgtacgtgtgcgagaagaccacagattcggggccagaaccaatggacatttctacaacatcaacatctcagctatgtggaattcctagttcagatgtgacaattttggaaggtcatacttcagaggtgtgtgcttgtgcatggagccctacaggatctcttcttgtatccggatctggagattcgacagctcgtatctggacaatagcagaagggagatgtaagcctggttcagagaatggccctttgaatgtgttggtgttgaagcatgttaggggtaaaacaaatgaaaagagtaaagatgttactacacttgactggaatggggaagggacacttctcgcaactggttcatatgatgggcaagcaagaatttggaccaccaatggtgaactgaagagtacattaagcaaacacaagggaccaatattctctctgaagtggaataagaaaggagattatcttctgactggaagttgtgatcaaactgcaattgtgtgggatgtgaaggcagaagaatggaaacaacaatttgaatttcattcaggtccaacacttgatgttgattggcgcaacaatgtgtcttttgccacaagttccacagacaatatgatacatgtttgcaaaattggagaaacccaccctataaaaactgttattgggctccaaggtgaagataattgtatcaaatgggatcccacaggttcattgttgttttgatggaatatttgatttgttttgtagatatggagtatgaagcaggatacttatcttcatgacttaagggagcattccaaggagatatataccatcagatggagccccactggtcctggtacaaataaccctaatcataaactggtgttggctagtgcttcatttgactcaactgtaaagctatgggatgtggaacttgggaaactcatgtacagcttggatggacacaggcatcccgtatattctgttgctttcagtcccaatggcgattatctagttagtgggtctcttgacagatccatgcacatatggtcattgagggacggcaagattgtcaaaacatacacaggcaatgggggcatttttgaggtctgctggaataaggagggtgacaagattgctgcatgttttgctaataatacagtttgcgttttggattttagaatgtaatatctgtgaagcgccaatttctcctcaccagtacattaaattctttctttcccccccttgagatgagatcggtggaaatgtattttgggtgggtggataggttacccattttaaccatagttgtagtggaccctgttgtaatttgctagaacattattaaaaagtagtttgtaggagtgcattcttaataagcaaaagtgtatagatttagttggacaaaatcctgtacaaggatcgctagactttttgtatctacttgcctttctcttgcacgatggctgcaaatggcatgcattttcggtccctttgatccattaaggcttgttaatgaaagggaaaggggggcggggggttgataacc

SEQ ID NO: 87992 - DNA, 361 bp, Glycine max
  Clone ID: PAT_MRT3847_50464C.1
gttttggagatttagagaatccatattagaataacaaaataagtaaagaatatgattgtgaggaaaaacaagccaagtgcaaggtcactacttatgctttttgttatggttcttgcttttctctttgtcacttataatttggtgtttataatcaaacaccatatgggtggaacttgggtagcagaagagttgaggtttcttgatcctgtgatcagcatgcctggaaaggtgatggcattagcaaattccaattcaaaatttcatgttgcagtgaccgcaaccgatgcggcttacagccaatggcaatgccggattatgtactattggtataagaaggttaaagatattcctggatcaaaca

SEQ ID NO: 87993 - DNA, 1477 bp, Glycine max
  Clone ID: PAT_MRT3847_50465C.1
aggagatgagcgagcgtgatgtgccggtgtccgattctggtagtggagttcctaaaagaggggttagtgaattaatggaggttcgaggagattcggacacttcaattttgtctttctctgagtttttagttatgtttgacgatccagattgggaggttggcatcatgcctggactggtgaagcttgaaaccggggattcaaacaggcatggtgacacggtatgctcggttttgtggtacccctccggatagtctcaatttaaggagatatgatgcacttttagtttgtgtaaccaatgctaaaggtgctaatattaggaaatttgatgtcactgtatacatcaaggttttaagggctgtggatctgcccggccagccggttagtgaattaatggaggttcgtggagattcggacacttcaatggtgtctttctctgagtttttagttatgtttgacgatccagattggggttttggcatcatgcctactctggtgaagcttgaaactggggatagaaataggcatggcgacgtggtgtgctctgtttgccgctacccaattattggttctcggtttaaggagataaaatctcattttagtttgtgtaaccaatgctacagtgagggaaaagtgccttcttcatttaagcaggaagagtacagatttaaagagtatggaagtgagggtgaagccatgaaagataagtgtatgtgcttcaacttgcaatcccgtaatgaaaagtagatagcggcattcaattttttgtctttagatttttttgttctactatcttgtattatcccatcttgtttatcctagcttttcaggtgtgaatgtgattataactagagctcatgagttcagcaggcattttggccccttgtttaataattgtttcaggtggtgcttcactgctctttagtaactgtttatagacattgtaaaacctttaacctccgtgacaaacatttgtgtttatcatgcttctttttatcccttctttctgatttgtatgaagcatttatcttttgacacatgaagcctgaaaagtaagtctagagtactgtgattctaactttcaattatatttgtagtattcaacggaggagtggtcaatttttcccccttgttacgttagattttgtttatacgctttaagtaccatgagtacaatacattcaatggtttatatttcacctcaattttaatctgtcagtacatttaactctgctttgaactttcatttgtttccatatggttaatttgatgtgatgcaatgagagtatacaagaattttgaacagtagggactttgcggttttgtatttatatattcacgaatttttccatctcttcatccatctcttcatcaacagtacaatcagtggcggttctaccatgcggccagcaggggcatatgcccgggctcagctaggcattttttttggttacaagcccaatatttttttattagtctt

SEQ ID NO: 87994 - DNA, 484 bp, Glycine max
  Clone ID: PAT_MRT3847_50466C.1
ccccatcggaaaaatggctcatcctgcctaacaatcgaactctacaccagccaatccgccaaaacgttccaaccttctccattacatggccatgtttatagtagccttgatcatccttgaaggcttagctgtgatgataatttggctagttatgaagccaaaaaggttggagtacagtgtggagaatgctgcaatccacaacttcaacttatcggatgcaaatcacctctatgccaactttgatatcaccataagatcctacagtcccagctctataatctgcatatactatgacactgtggaggagtcagtgcgatatgaggaccacactctacccaccaatgctgttcatccattcttccagtcacataagaatgtgaccaagctgcacgtggccctcacggcgcagtccgtggccctgtatgagtctgtgcctaaggaccttaagcttgagagatcctctggggatattgagcttgatgtg

SEQ ID NO: 87995 - DNA, 177 bp, Glycine max
  Clone ID: PAT_MRT3847_50467C.1
ctcgagccgaagtcaattaccttcaaaagctgtcgctggagatgttacatgtggtagcggacgtggcggtttacccaccactgttggcattatcggtggaggaaacattcgctactaaaatgtcaacagaaggacacttacacaacttggtaaaggtaagaaaatagtgtgagttac

SEQ ID NO: 87996 - DNA, 217 bp, Glycine max
  Clone ID: PAT_MRT3847_50468C.1
atctttcgaattttttaacgctttggtagagcccgacacaaggaacagagggcattgtttgacctatcatttgaagtccaacgactcactatagctaacacactgaactgtaaacctcaaaatacaagaacaacaacaaaaagccttatcccgctaggggaaggcaggaacatgcatcaaacaacaccattcaacttgggtcaagaccatattttag

SEQ ID NO: 87997 - DNA, 402 bp, Glycine max
  Clone ID: PAT_MRT3847_50469C.1
gatttaaaatgaatcctgactatattgtggaagtatgaacaatgacacacgcactttcgtctcaggtagagacacctgcattcattatacatgggacctcacacagctgacagttacaagctttaggttaaccatatatccgataatttgggcatatccgtcctaagttggaatgggtttatcgacacccgtagctaatcaaacctatgctggtggatgagcctagggcttatcttcagctgcccctcctatgcctccgcactgtgctgttccaatgatgtgtcaaaccggtgtggatccaagctcagcaaagggatgactataaacacattacttgacatgctcataatatcatttagtttcctttggagcaggggaagctttactgatacttggggggag

SEQ ID NO: 87998 - DNA, 147 bp, Glycine max
  Clone ID: PAT_MRT3847_5046C.1
tcggctcgagattagtgagttggtcattgacacactcttttctgaaggttgtattgccagagggatctaaagatattacaggatctgttccacttcctgtgaaacagtcgcaggagacaaagctttcccacttggctatagttggta

SEQ ID NO: 87999 - DNA, 511 bp, Glycine max
  Clone ID: PAT_MRT3847_50470C.1
ggaggaaaccaaaacctttattaaaaaaaaatccccccccccccaatcctccgggccaaattacaaaaccgggggggggggaataacctttcaacctttaaaccccttaaaaaaaaccccccccccaaaggaaaaaaaaaaaccggaaaaaggcagggaaaaaaaaaaagcttcccccccccaaccgaaataaatttgaaacccacccctgcccccaacggggcccttaaaaattaaaatcccaagaaaaccgggggggggccaccgaggaggattttaatctttgggtccctttgagcccggggggggagacccaaaacggttggagaaaaacaaaaaggattcggggatgggaaaacccccttgttgggagctggggggtttgggaagcccggccaaaatttgaacaacttcgcccaaagggggcccctccccgcctgttcctaacacacaggggggctacaaaaaaaacatgcctcaccccaggaaggggacccgggggaagcctagg

SEQ ID NO: 88000 - DNA, 432 bp, Glycine max
  Clone ID: PAT_MRT3847_50471C.1
agatttaaaaatatttgaactgttaatctttgctcggcgcactgcagcgactgactcttgaaccttcttcttgttcccaggggatatcctgctctttaccaaggtgattgatgtccccaacacgtaaggatctgatttgctgctcgatatggagggggggaccagattgataacacttttaccctaccaatcattgagagggcaagctggggcccattctacggactgatggtgaaacctacatgaggtggtcaacgcactcgcgcccggaaataaaggaaccggatctgtttcgaagtaccagtggtggacctgcctttttgtgaggcatacttcgcgggccttgtccccgatggagtcttaaaacaactgaacatccgacatctgtgcctccgtcgtttcacccactagatggcaagccctttggtctct

SEQ ID NO: 88001 - DNA, 915 bp, Glycine max
  Clone ID: PAT_MRT3847_50472C.1
gacgccgtttcaactctggagttcaactctccgttgcctcgaaacgtcgttactgcgccgttaaggcggaatcccgagctcgacacgttttattatctcggattgaaaggaatcagcgttggcggagaagctcttccgattccggaatcgatttttgaggttgacgccatcggcggcggagggattattatcgattccggcacggcggtgacgcggcttatgagtgaggtttacgacgcgctccgcgacgcgtttgtgaagggggcgaaggggattccgaaggcgaacggcgtgtcgttgtttgatacatgctacgacttgtcatcgagggagagtgtgcaggttccgacggtgtcgtttcattttcccgaagggagggagttaccgttaccagcgaggaattacctgataccggttgactcggtggggacgttctgcttcgcgtttgcgcccacgacgtcgtcgctttcaatcatggggaacgtgcagcagcaggggacacgtgtcggtttcgatatcgcgaactcgctcgttggattctctgctgatagctgctaatagtggaaaagcgtgcgtggtatacgtagaacagaagaatctcgtgcttacttttaatttaatttaatatttgtttttaattttcagaatttgtaacggtggagtaagggaaagggataatttgtttttatttttatttgcaattgtaacgtttgggaccattcggataaggtacaatgtaagttgggccagccgaatggtgctaaaatgtagagtgagtgagtgggtgaggactgaggaggaagtggtgcttataaaatggtgagggccaagtttagatttagataaaggtatttctttggttaggttttgtaaaattaggtgaaaagttagcttatcaaattataagtgataagt

SEQ ID NO: 88002 - DNA, 434 bp, Glycine max
  Clone ID: PAT_MRT3847_50473C.1
gacccatggggcctccccctcctggacagatggtgagaggacctcccgctcctcctcgtcccgggatgccggctccaccaccgcctcgccccggcatgccaccgccacctggaagtggtgttcccgtgtttggtcctcctcgacctggcatgccccctccgccgaaccctccaaatcaacagcaacagtaatgggagaattgattggtaggtttgtatttgttgttttcttcagtactctgtttatgtgtttgagtgtgtgttatcagaattgagtgagtcagtgagtgagtgtatgtgtgtgagtgtttgggtgtgcctttgtaaaattgattttgtagttatttatgtttggatgattttactatgatagctattttgatgtaaaatttagtttaaatttttcaacatcaaagttttaaaaagctgctgccc

SEQ ID NO: 88003 - DNA, 2118 bp, Glycine max
  Clone ID: PAT_MRT3847_50474C.1
gtttaacaacatacaatgccaaaacgaagctttcccaacaaatcatccaaagcttcctctttctttgttaaaatccaataatcttgacgtgaacccttctcatcccaaaataaaacccccaaaaccctaaccctatttaccataacttcacacattcactactatctaatggcacctctcacttatctcttcttcccacttttcctcctctttgccttaacacactcccgaagcacaccacactcctccaaaacgacactcctcgacgtcgtttcctccctccaaaacgcacacaatgccgttgccttcaccccccatcaccttaaccaacaccaacgacaacaagaagccttgcttctatcgtcgtcgtttggtattcacttacgttcccgagcctcaattcagaaaccctcccacagagactacaaatcgctaaccttatctcgactcgctcgcgactcagcccgagtcaaatctttacaaactcgcctggatctctttctgaaacgcgtctcgaactcggacctccacccggccgagtcaaaggccgagttcgagtccaacgcgctgcaaggccctgttgtctcgggaacgagtcagggaagcggcgagtacttcctccgagtcggaatcggaaagccaccgagtcaagcctacgtggttctcgacacgggaagcgacgtgagctggatccaatgcgcgccgtgctccgaatgctaccaacaatcggatccaatcttcgacccgatttcgtcgaattcgtactctccgatccgctgcgacgagccgcagtgtaagtccctggacctctccgagtgccgcaacggcacgtgcctctacgaagtctcctacggcgacggatcctacaccgtcggagagttcgcgactgagactgtgacgctgggctccgcggcggtggagaacgtcgccatcggatgcggccacaacaacgaaggactgttcgtcggcgccgccggtttgctcggccttggcggcggaaagctctcttttccagcacaagtcaatgcgacgtcgttttcttattgcctcgtgaaccgcgactccgacgccgtttcaactctggagttcaattcaccgttgccgcgaaatgctgctactgcaccgttaatgcggaatcccgagctcgacactttctactatctaggattgaaaggaatcagcgttggcggtgaagctcttccgattcctgaatcgagttttgaagttgacgccatcggcggcggagggattattatcgattccggcacggcggtgacgcgacgccgttttaagtctgaagttcaactctccgttgcctcgaaacgtcgttactgcgccgttaaggcggaatcccgagctcgacacgttttattatctcggattgaaaggaatcagcgttggcggagaagctcttccgattccggaagcgatttttgaggttgacgccatcggcggcggagggattattacccgctcccggttgactcggtggggacgttctgcttcgcgtttgcgcccaccacgtcgtcgctttcaatcattgggaacgtgcagcagcaggggacacgtgtcggtttcgatatcgcgaattcgctcgttggattctctgttgatagctgctagtgaaaaagcgtggtaaacgtagaacaaagaatctcgtgcttacttttaatactataataatttaatctttttattttttttatttttagaatttgtaacggtgggataaggggaaaggggtaatttgtttttatctttttttttttacatttgtaacctgtgggggccattcggataaggtacaatgtaagttgggccagctgaaccggtgctaaaatgtagtgagtggtaagtggtgcttataaaaggacgagcttgtgcctacaaaaaatttaaaataaaatttaaaggtaattttcagaaagtgagacggtggagtagaagtaagggatccggtgtttttatttttatttgcaattgtaacgtttgggaccattcggataaggtacaatgtaagttgggccagccgaatggtgctaaaatgtagagtgagtgagtgggtgaggactgaggaggaagtggtgcttataaaatggtgagggccaagtttagatt

SEQ ID NO: 88004 - DNA, 1559 bp, Glycine max
  Clone ID: PAT_MRT3847_50475C.1
catgcacattcacggaatcccgctcgagacggcgcgagaagacgacagaagggtagttcggattatgattaaagactagagttcggctggttgttgatacaggagtaaaagcaggacaggctttcctgtttgtgtacactaaataattggtcttgaaatcgaagaaaaggaaactcgtcaaacttagagagaaatactttcagcagaatggtggttccatttcgcaacagcaactctctacaagtgaaaactcctcccgaattactcaaattttcacagaagaagaactaaagaaagcaaccaacaacttcgacgagagcttaatcattggtagtggaggttttggaactgttttcaaaggatatcttgcagataacagagttgttgctgtcaaaaagtccaaaatagttgatgaaagccaaaaggaacaatttattaacgaggtgattgttctatcccaaatcaatcataggaatgttgtcaaactcttgggatgttgtttagagacagaagttccattactggtttatgaatttgttaatcatggtaccctatttgattttatacacaccgaaagaaacataaatgatgaaacttggaaaacccgtgtaagaatagcagcagaggcagctggagctctatcatatctgcattcagaagcctcaatacccattatccacagagatgtgaagactgctaacatcctcttggataacacttacactgccaaagtgtctgattttggagcttcaagattcgtcccaattgatcaaactgaaatagcaacaatggtgcaaggaacttttggttacctggatccagagtacatgcgtacaagccaactaactgagaaaagtgatgtctatagctttggggtagtgcttgtagagctgctaacaggggagaaaccatattcttttggcaagccagaagagaaaagaagtctcactaaccactttttgtcttgcttgaaagaggatcgcctgtttgatattgttcaaattggcattgtgaatgaagaaaataaaaaggagatcatggaggttgctattcttgctgcaaagtgcttgagactcaacggggaggaaaggcctagcatgaaggaagtggcaatggagttggagggaataaggataatggagaagcatccctggattaatacagaccaaaatgttgaggagactcaacaccttcttcacgaggcatcatctagcatttatgagcttggtgatagcagcagccatcaatatgctgggtatgatagcattagggatcatgtactgattgctttggatgatggaagatgatcaattatgcatggcagcatacagtctattttataacaacaccaattagttgattacatgagtgtacctgtcttggttcatcttaataaattccatttctgttggcttttcaagacaaaaaaagttgtttccatgagtgtgtagttgtatgtttgtatttattcaaatatgtttatgcagaaatttttaagtccttgattatatagaatgtactttggtagatgcaaaaaaatgcctaggaattcaaacttc

SEQ ID NO: 88005 - DNA, 172 bp, Glycine max
  Clone ID: PAT_MRT3847_50476C.1
tagtgagacatcaggaactctctgcacttgatttgatgtgggatgggtgctgggtggaattctatccggccacatctctgatcacttggatgctagagccattacagcagcaaggagcttgtactgtgcagaccgagctctagtagtatatcgaggttatggacgtgctggt

SEQ ID NO: 88006 - DNA, 149 bp, Glycine max
  Clone ID: PAT_MRT3847_50477C.1
aattccattcactcacccactttttacaactttatgacttgtaaaacctttacattacccaactaaacaacctttcaacacataccactttctccatctttcctaataacaaaaaaacccatacccttctccctttccaacaatttcac

SEQ ID NO: 88007 - DNA, 1035 bp, Glycine max
  Clone ID: PAT_MRT3847_50478C.1
attcgtctcgagacggcgcgagaagacgacagaaggggaatttgttaacaatggtaccctttttgattttatacacaccgaaagaaaggtaaataatgaaacttggaaaacgcgtgtaaggatagcagcagaggcagctggagctctaacatatctgcactcagaagcctcaatagccattatccacagagatgtgaagactgctaacatcctcttagataacacttacactgcaaaagtgtctgattttggagcttcaagattggtaccaattgatcaagcagaaatagccacaatggtgcaaggaacttttggttacctggatccagagtacatgcgtacaagccaactaactgagaaaagtgatgtctacagctttggggtagtgcttgtagagctgctaacaggggagaaaccatattcttttggcaagccagaagagaaaagaagtctcactaaccactttttgtcttgcttgaaagaggatcgcctatctgatgttgttcaagatggcattatgaatgaagaaaataaaaaggagatcatggaggttgctattcttgctgcaaagtgcttgagactcaatggggaggaaaggcctagcatgaaggaagtggctatggagttggagcgaatgaggctaaccgagaagcatccttggataaatacattccaaaatccagaggaggctcattgcttcaaaagggatcatctagcctgtgtgtatcaggtgatagcggcagccatcaatacactgggtatgacagcattaatgatcatgtacaaattgctttcgatgatggaagataattaattatgctaagcagcatacgctccagtttgcttcaaagttctgttaaaccttctgtattcatgatgaaaaatccattgagttgttttcatgagtgtgtatttgtgtgtatttatgtattgaactatgttatgtagtaaagttaaagacttaaaattatatatatgcaatgcgcttacttcgatagagattgaaacttaaatcaccatgaattgagtatggtc

SEQ ID NO: 88008 - DNA, 392 bp, Glycine max
  Clone ID: PAT_MRT3847_50479C.1
ggaaaaacaaaacttgaaattaccattcacgggaacaatccctatcataataatattaaccttggggaaaaagcagagccgagagaccatgatagctgggacccccctactcacattggctgggaatttatcaaaacattaaattgttttaggggttttttcaccaaaatcccattttaatcaaaacgttaactaaaacccaatttttgcccttaagggatgcatgccagggttgaagcccaagccccccaacaggccctgtttataaggcaacaacgtttttttcttaaactccactgaaacaacccgggtcacgggggaaagcaacttggggggcgaaaccgggccctttctgtttgaaaccgaaccggaatttttcggggaccggaaat

SEQ ID NO: 88009 - DNA, 284 bp, Glycine max
  Clone ID: PAT_MRT3847_5047C.1
ggacggacaaatagaaacatttatacgcggtgagtcctaattcaggttaatcgaactttcaccttttgccagctaaaaccaaacacttttttacattacttcgttatttccatgacctcaccacacccacttcaagtccaaacaaatgtgaactcgatgaccggctccaactatacccatttgttctgaagttgatcgatggacacttttaaaaaatacgtattgattaaattcaactcttgccaggtaaggacaaagctaaacttcgaactaaaaagcatttt

SEQ ID NO: 88010 - DNA, 225 bp, Glycine max
  Clone ID: PAT_MRT3847_50480C.1
tagatgctgctgcgatgctaaaacgcaccgtgttgttcctgttcttgttcaaaagaaaactgacacaagtgaggctaggggcataaacagcagtggcagaaaaaccccatccggtgcgggctctctactgcggcgtgtgcagctagccccccgactactgtgaatacggatccgattattagaaatgcaaacactgggcgaaccaaaaccgctcctgagatatac

SEQ ID NO: 88011 - DNA, 225 bp, Glycine max
  unsure (1)..(225): unsure at all n locations
  Clone ID: PAT_MRT3847_50481C.1
gnaaactcccgtnatggnatcnatccaactcttctntatttcananaccatgttncttgntntgcctgcctnatttgggcaacaanaacatagaaagaacaaatcgcacgatagctaaaattcttcttgnnttatngaaacaatagcatgttcatcaagtnantgcttnctcatgattaanatntnntatngngagatggttctggnttttggacaccatgnntt

SEQ ID NO: 88012 - DNA, 419 bp, Glycine max
  Clone ID: PAT_MRT3847_50482C.1
ggtccagtatttatttatacttataaggataaataaccaatgcccattttgaaagagtgagttatttatcatgcatacacatatccaatggagttaccaaatctatgacgtgcataatatattaattatattggcacacctatcatgaatatattgatgtgtatggttaaaactaaagttaagcccaacggacaccttctctgactcttttgaaactaaagaatttaaagaaagagttaatatgacacgtcccttgcaaagagcaagaagttacccaaggaaaaacgtgatttaaatttctatggtctaaaacatttattatacatttcacatatttataagggtccgatagtatataaaccgtatttattaatgaaccttcgaattatgaacgcttttatcctagagtaagaagattt

SEQ ID NO: 88013 - DNA, 107 bp, Glycine max
  Clone ID: PAT_MRT3847_50483C.1
ttttttggtgtggaaaagttaaccaaagcaagggcgagggaacaacgaattggttaagataaaacaccttgcgcctttcttgccaatgacagcaatatccgattagt

SEQ ID NO: 88014 - DNA, 330 bp, Glycine max
  Clone ID: PAT_MRT3847_50484C.1
caggagaaaccgggattttacagatatttgcttggttcaacaaacaagggcttggctacaaatatttccctagaaataaagggtggcccaacttttacacacacaccgcctaaattctgccgatgaacaagctgggaaagattcatattggggctggcagcttaaatactctttctttaaataaaaaaacccaggaaacattttgagattaaacaacaattgaaagttgtgggctctagacttccgaaataattgggagagagaaaattcttatgaaaattcgagcttaatttaacaagctcaatagctttacccaaaaccatattctaa

SEQ ID NO: 88015 - DNA, 391 bp, Glycine max
  Clone ID: PAT_MRT3847_50485C.1
aaggaagcgaaaatggaacaaatgggacgacacatattgctcaactccgtgctgtccctgcttacactcaattaattgaagaagtcaatccggtgaagatgaacagggctaataagtctataccagtagcacaggatactacttgttctggtagtcatggcaatgaggggaaaaaagaagctgcacattctactaaatcatttactggtgcttcacctgataattctaagaaacagtcttccaacaatggagtgaaagttacaagtagatccgattctattgatctgttttttgatgcatgtgagattagcaatgggagtaatggaacacattatgtcaaagttcctctatccgagactacagaaggtaacagggaagctatgaaatcaat

SEQ ID NO: 88016 - DNA, 434 bp, Glycine max
  Clone ID: PAT_MRT3847_50486C.1
gggaaagaccaagacaattgcatattcatcctaatatatacagaaaaaaagtaagtattaggtacagctattttttttatggggggatcacttggtatgatcctcactttacatgtatgtgaacatcattttgcctaattcagcttagacagcaaaaagaggcaactagaaaaaaggaggacagaaacacagaagcatagcaaatccacaggagtgtgtataacagccttcttacttttgtcaaacaatccaatcagaagcagcatcactatgacgtgaccaagcttggttttcagttcatccacagtttttatatccagccattttgggcgttccttaagagggaataaaccaaagagacttgatctgtcagaaggtttttgatctactccaagattactgacaaagagctcatagagacccattccaaagac

SEQ ID NO: 88017 - DNA, 264 bp, Glycine max
  unsure (1)..(264): unsure at all n locations
  Clone ID: PAT_MRT3847_50487C.1
gggtgacaacatgattgagaggtccaccnancttgactggtacaanggaccagctctccttgaggctcttgaccanatcaatgagcccaagaggccctccgacaagcctctaaggcttccattgcaggatgtctacnanattggtggtattggtaccatancangnttcanaaccccagtctctacacgtcccactggcacagtnccaataccaccaatcttgtaganactggggttntgaagcctggnntggtggtnacttnt

SEQ ID NO: 88018 - DNA, 415 bp, Glycine max
  Clone ID: PAT_MRT3847_50488C.1
gcacctaacggcatttgtgaaacttgaaaccttagcggaggtaacttggttggagcgagttcacattccgtagatgaatggatggtccttagtgctaatttggcaccatcaaattactatgataattctagtgttagcatgtgtgaatccagatctgaggttcattgtgcagattagcgtggaagagaactatggagtcagcaacggtatcatcatctgagtcggagactgcgcttgctcttgctctggcgtcgtagtcacagcatccctacgtctacgaacttgtctgcttcacgctctatcgcctgcacatggaacgcgaactcctccgcgtggacgccaaccgcattcggcgtcaaatgcatgaggtcgtactcggcaactaccgatctttcattgccgtcgtcgacgcctt

SEQ ID NO: 88019 - DNA, 444 bp, Glycine max
  Clone ID: PAT_MRT3847_50489C.1
ttttgtttttttttttttttttttttcggaaccaccccaataaaaaaaaccccatgctatataccttcatcatcattaacccctcctttacttataatcgattgacgggggggcggctgcctagtattaaccaagtatggttgactagggcccatcccgttccattgcatccacttaagccattgtggccttgttactcgaaaacctcttatgaagatgcactagataattgagcttaatcccctttatataccccccactcctttgggctaaaggggggctattagggtcacaggggtttctggcactgccaacacatgttgttgcgaagaactagcttgcagaggactgaacccaacaatcttctggactgtctcaataaggcactgcttgccttaggggcatgaggagggtgaactctcccattgtgcaatgcgccaaata

SEQ ID NO: 88020 - DNA, 460 bp, Glycine max
  unsure (1)..(460): unsure at all n locations
  Clone ID: PAT_MRT3847_5048C.1
attagagaatttgagggtggggggtttgtcacgctttttgtcttgacggtggtctgtggacgaggatgttggattttggttttgattctttgaggacacgacgagcagaagcaacaaggtggtgactacagatctcgttaatgtcttgctcttgcgtaatgctatcacggaggatgaacaccattacaaaaatactaattgtgatttaaccatggcttcaatgaatgacaaaggtaaaattctcttttgacaatagaaaaagtaaagatcagttgttcacctttgatccaccaatttgtatttccattgtagaattcgtcaaaagtaatatttttttcaggaaaataaatatcttatgtcctaatctaaaaaatctagaaaagaaaaaagaaagaaaaagaaaaccctaaaccttgaccaaaaactacatagaggaanatgcggaatgcgaaacctaact

SEQ ID NO: 88021 - DNA, 774 bp, Glycine max
  Clone ID: PAT_MRT3847_50490C.1
ggttgttgtaaggcaagtgagcgtaggttggaagcagagagatggaaggttgggacccgaatacgaagtcgacgctgacacagatccctctgctggggacgaaggctggtccacgagacggggcggcatggacgcagaggctgaaggaagagtacaaggctctgatagcgtacacgcaaatgaacaagtccaacgacaacgattggttccgcatctccgccgccaatccggaaggcactcgctggaccggtaaatgctggtacgtctacaacctcctcaagtacgaattcgacctccaattcgatgtccccgtcacttacccttccaccgcccccgaactcgaactccctcaattggatggcaaaacccaaaagatgtataggggtggaaagatctgcttgactgtgcacttcaagcctctctgggccaaaaattgccccagatttggaattgcacatgcactttgcctaggccttgcaccgtggcttgcagcagaggttcccatcctcgtggattctggtatgatcaagcacaaagatgataccgcaaccacatcaactgaatcttagttagcatatgtcttactaaaactgtaaaagtagaattttgttgcctgattggtcaaaggaaataaatgagctgtttgaccacaaatttacaggatcttccttgtgtatccgcagatattgacatattctggcaaattaatatatatgcaacatggctaataacgattttgatctaaccttgattctcaatcaaatggtcggttac

SEQ ID NO: 88022 - DNA, 281 bp, Glycine max
  Clone ID: PAT_MRT3847_50491C.1
gaccgacgcgtacggtgaacatgacccttcgccatgggccttgttatccttgaacagaggaaaggcgccgtctagatgttcttgacacacttgaagcaccataaaggcactgttttctttttttccattcatttctctgatcttcacttctacatcttgttcatcgtcaacgacatcatccaccacccgggccgctgctctcccctctccaaggtggtcttccgggatccgtatcggttcaataagcggacagatctattcattgtcttcgatggcattca

SEQ ID NO: 88023 - DNA, 535 bp, Glycine max
  Clone ID: PAT_MRT3847_50492C.1
gttagttgcatgttgttatgtaagataatttttcgtgaaacatttcgaattaaatagcgttctgctcgatgttatcgacatgttttctggtcaaactgttccttcatagttcttgtttataacgctccataatagtctatttaagttttgtttttttgcttagaccagtctggtttattcgttgctactgcgaaatttgtccgacttgattgattttgtgtttcttctgactttttttatatttcagtaacatctttgctcaagaaaatgatgccatcgacatcccgtggtcattcatctgccggtgatgtcagtaagcgagtctatagaggcgattcacttttgccggcaaaaagagttaagcaggaagatccacttgaggaaaatcaacaaatgaatattgatgatgatcttgactatgataatgatattgattatgaagataccgctgactatgagccaagacctgatgtttctttggaagaggctggtattcctgataatcttgaaaaattcgtatccttcatattacatc

SEQ ID NO: 88024 - DNA, 315 bp, Glycine max
  unsure (1)..(315): unsure at all n locations
  Clone ID: PAT_MRT3847_50493C.1
agtgnacgatgacaagcgggcggacgcgagggaggacgagggccagtgtgaaaagagaaccacacaaaaacccaagggagcagaagaagaagaccaccaccgaaggagaaagaagaccaaggaaaagaccgcgaaacgaagaaaaacacncncggaggcggccacagaggacgggaaacaagcnacaccccaaccccagagcaggagccgaacacgcaaaaagacgaaagaggacagggggagagacaaaaaaggaagacggacagagcacagaacgcagaacaaccccaagagaaacaagngaaagagggaaaa

SEQ ID NO: 88025 - DNA, 928 bp, Glycine max
  unsure (1)..(928): unsure at all n locations
  Clone ID: PAT_MRT3847_50494C.1
ccccgtcgacccagcgtccgcttgtttgcttgcactgcttcagatcatgtcaatctcactcgaccagaaccttatggagctggagttggtggtctttctagagatatcccagaaactgctaatgtaaagttgccttgcaatacaactcattgccaaaattcatcaaaatccaaacaagcgcgtcctatcacagttggcattgttctactaacaattgcagtatcagcaattggtattttgaccttcactgtgtatcgtcggcggaaacaaaagcttggaagcacatttgatatctctgacagttatctaagcactgatgaagccattggtgcatataggaaaaatggatctcctttggtcagtcttgagtactctactggatgggaccctttggctgatagtaggaatttcaatggctatagtcaagagatgttccagagtttgaggttcaacttggaggaagtggagtcagctactcagtatttctccgagttgaatctgttggggaagagtagctttagtgcaacttatagaggagttttaagagatggatctgttgttgctgtgaagagcatcagcaaaactagttgcaagtcggatgaagctgagtttatgaagggattgaacatgttgacctcactgaggagtgataatgtagtgaggttgagaggattttgttgttcaaggggacgaggcgaatgctttctgatttatgattttgttcctaatggaaacctttcacgcttccttgatgtgaaggaaggagatggagaagtccttgaatggtcaacaagagtttctattgtgaaagggattgctaaaggtatggcatatttacatgcatacaaagcanacaaaccagcttcttgttcaccaaagcatctcagctgagaaagtgctcattgatcagcggtacaacccattgctt

SEQ ID NO: 88026 - DNA, 241 bp, Glycine max
  Clone ID: PAT_MRT3847_50495C.1
taccctcgcagccggccgggcttgcattgggtgcactatatgttgcttttttttaatctcttattatccttttgcccctgttctttgaacaattttaagattttcacaaaaaaaaggggttatagcaccgtatcttattgttttggatctattttcattcgaattattgcttgaattttgtatgtttaaacttcgagattgaggtatgctttggtttaatatatgatttgaattatggctt

SEQ ID NO: 88027 - DNA, 770 bp, Glycine max
  Clone ID: PAT_MRT3847_50496C.1
attcggctcgagctcgagccgattcggctcgagggctacgctggccaagtgaagagagtgtgtggataataatgttgataacggttagggaagcttcttcttgttcttcttctcccctcagcttctggcttaatcgtttcaacgcaaaaccctccaaaacactcaaaacaacatccatttgccaagctagtttctctgtccaaagaagacccactcattcatggaatactcgccatctctctaccagcagtgagctagcaaattttgatcccttgggtattaactcagatttatcttctggtctgaattctacctggaaaaatctggtgtgctcaattacacaaacatttgagagtacttcaagtgcagaaaagggaaaacctaactcttctcaaggggtagcagctgcaatagaggatagttcaatagattttggtgacttttttaagggcccactgccagggaagtttctcaagcttttagggtttcttgccttgtcaaggcttggagtgtacatacccctaggtggagttaatagggaggcttttgttggaaatttggatcagaacagtctattaagcactttggactcgttttctggtggtggtattggtagacttgggggctgctcccttggcgttctgccctccctcgatgcgccgctggtgttccgccttcgtgcacgcgtttggcccagttcgcttgctccgcccctgtgtcaaggtcctgcccgacggtaggcggttctgcagtacactcgatatgcttca

SEQ ID NO: 88028 - DNA, 263 bp, Glycine max
  Clone ID: PAT_MRT3847_50497C.1
ccgcttcagcctcagcccgttaaccccacccccattttagcgctttccaaaagggtgggccgcgccttggttttcctttcattgttcaatgctttctttcttggttcaacccacctgccttgccggattttagttttcccggcggattaaaaaggggggcctttacccctcaccaatcaatgggtattccgaatggacctttaggaggatttacctattggggccctcttaggggaccttaagagcttgtttaatgatggtgg

SEQ ID NO: 88029 - DNA, 262 bp, Glycine max
  Clone ID: PAT_MRT3847_50498C.1
gaacaaaaatgatgaaagatccttgcaacaataaccgggaacttaaagaatttgggaaaccagagaaccgagaagaaccccttgttttaaacagaggcttgacctttacaagggtagggttgcgacatcaaaaagggttggcggggattactaaattaaggaatgctttgcgatcaagcgaaaacaaaacccgaggacaagggctttaagcacaccgggggctgtttctttttccccaaaattttccacctttggtcctttt

SEQ ID NO: 88030 - DNA, 198 bp, Glycine max
  Clone ID: PAT_MRT3847_50499C.1
cactacagtgtctcacataccccgggagtaactcattagtgtacatttgagcaccatgcccgctgagggcccttatccgctcactggccgcatttcaggtacttgcacatccgctcaccatacctgagaagctcttacaataacctggctgaagtcaaatgtcgccagacactacacgactgtattgttacgatgcct

SEQ ID NO: 88031 - DNA, 374 bp, Glycine max
  Clone ID: PAT_MRT3847_5049C.1
agtgatactctcaagttttaaagatgctattattgaacacatcttacctggctccttctacaataggggagccattaatactctaaacctttgactctagtatttcaaccatatttttaaacacatttagagaaacccagtgctttatattctaattattttcctccatcttcaattacatcaaatttgaccaaactttctatgctctcctacagatcataaattccacttttgtatactcctatgcttctgctaattgattttttatgtacaaacctttatcattttttccctgctatcttacaatatctagaaaaattctccttacatttattaagtctttcattttatcttttaaatcctttacaaacaaa

SEQ ID NO: 88032 - DNA, 420 bp, Glycine max
  unsure (1)..(420): unsure at all n locations
  Clone ID: PAT_MRT3847_50500C.1
ttaattcattagttggactaatgtgtaattttttgttaacatatgccatttataattgtaatgcaaatagctaaggatatattttgtgcttggaaagatgtgggaggtaaaaattatcttctttggtagggtaactaatcaagactaactgatctgctaagcaaaatattgttataattctttcttttggaagggtggaagttggattttgattcttatagtggatgacatatcacattangatgtgcaatgtaaagagaaaaatgtaattaataattaataaatataaatatgatactgttgaggtttttaaattgctgatgattttctataaaaattactagtgtacgactgtgccactgatcttgaaatgattattccaatccattaagtactcaaattattatattttgaattatt

SEQ ID NO: 88033 - DNA, 488 bp, Glycine max
  Clone ID: PAT_MRT3847_50501C.1
actcgtcttaagatactccatatttttaactgtcctcaactgttgtatcttccaagtgacatgcttggcctcactgcccttgaaagattgatcatagatgcttgtcctgaattgtgtcgaaaatgtcacccccaatttggtgagtactggtccttaatagctcacatcaaacacatttccattggagaaacaaaagcaaggcaacgacttttccgaatacagtcccagctgcggttgagattgtgattagtaaaacttgaaatcttgcacagccaaggagaccacagtttaagaccttaccatgtatgaaatcatcgaccctgaaagtttaaatattattttctggctaaacttttcaattcattcagaatatgtttcgtatggatcaagattcaagaggagaaatcaacggttcaccggttttaaagccattcttattaggtatttgcatttctaaccttggtctcttgaatatttcaaactcttat

SEQ ID NO: 88034 - DNA, 244 bp, Glycine max
  Clone ID: PAT_MRT3847_50502C.1
ggcaagccgatgaagctaattgccgacatattagggtgcactttatgttttttctatacacaattgatccaggcggaatttgattaccatgcgtgggccggtacttacacacaacagatatagccctctgggatgaacattagcatgttgccatgagaccctactcatgatacaggttcaaatttgagccatcaattaacaatactacgtaggtcggtactgttgctcaaaatttgcaatctca

SEQ ID NO: 88035 - DNA, 723 bp, Glycine max
  Clone ID: PAT_MRT3847_50503C.1
aaagatatggcgacgcgggagcagccaaacagaccctgaagcaaccccacgttgccatatttgccctcacaacaaccacaaattacaaatactttgcattcattcacccttcttcgtcccctcaactcgatctacgccgacatccatgatcgaccaccgataacttcgccatccctcgccttgcgcagtgttgacgtcgttgttgcgtttctaggaatacgacgacgacgacggtgaaacgctgcgtttcgagaaacgatgaggtcttcttcttcttcggacaggaacaggatcaacatcgctgccagtgctcagaaagtcgatgtcgataaccgaatctccctccgattctactaccgcatcgctgacaacatcctccgacaggctgatatctttcgtgcagagaagaatattattgacctatatgtcatgcttttaagattttctagtttggtgtctgagacaataccacgccaccgagactatagatcatctccacaaaggcagaaagaatcattgaaaaaggcagtcagacctactgctggggagtttgtttaccaaggatcaaggagccaacagttctcttatgtcaggcctgtggaagagcatgtacgaagactatctctaactcttccacctccaaaggaggaaactctctcaagacattctatccttggtcccaacgggctaaaagggcattggagaccacctatcattgataaa

SEQ ID NO: 88036 - DNA, 1404 bp, Glycine max
  Clone ID: PAT_MRT3847_50504C.1
gcacgaggggcagtcagacctactgctggggagtttgtttaccaaggatcaaggagccaacagttctcttatgtcaggcctgtggaagagcatgtacgaagactatctctaactcttccacctccaaaggaggaaactctctcaagacattctatccttggtcccaacgggctaaaagggcattggagaccacctatcattgataaagggatcaagtatccaagcaacatagatctatcccctgttgaattaccgagcctacaacagtccatggaagatgaatctctgaaaaagaaagataacagcattgcagaacaccataaatcagagttagcttcaattctaacccaaagtgaggactgccagctgcagccccatccccagcctgagcctgaccaggagcctccttctcttatttcttttgaaacaacagaaacctctgctcaaatagaagttatcagacaaccttctcctccacctgtacttgctgaagtacaagatttggtccctgcagtgtcaccttgtgttaatgaggcagggtgtaagacagagattccgtcattagataatagtgttcatgccgaggatcctctacaactgcacatttcagctgctttgatggagagttttatgaagcttgccaagtcgaatacaaaaaaaaatttagagacttgcggtgtccttgctggtttgcttaaaaacagaaaattttatattactgcccttataatcccaaagcaggagtcaacatcagattcttgtcagactacaaatgaagaggaaatatttgaagtgcaagataaacggtctctttttccccttgggtggatccatacacatcctacacaatcttgttttatgtcgtccattgatctgcacacccattactcctatcagattatgctgccagaatctgttgcaatagtcatggcgccaagagatagttcgagaaaccatggcatttttcggttgacaacccccggtggaatgtctgtgattaaacaatgtgatcaacgtggctttcatccacatagtcagcctccagatggtggtcctatttacaagacatgtacagatgtatacatgaacccagatttaaaatttgaggtcattgatcttcgatgataagagttatgccctctgtcattgttcatagaccaagcttttctcctatataggttttacttttacaccattaattcagccgtggccataaagaacggcccggctgtgtttgtaaaaaagaaattatgctcgttgactgtttattttgagttgcactgatttgaacttttaacggctgtgttgcatgcatggtcttttgtattagtatcaatctgttttacccactgctgtatatcaaacatatgaagatctaaccggtatgcaataagtttgttactt

SEQ ID NO: 88037 - DNA, 547 bp, Glycine max
  Clone ID: PAT_MRT3847_50505C.1
tgattgacctgtgtgttcagaggggtttgactaacaagtccattggctcgagggaagatccctcgcaattctgttctgccaccttaagcaggctgtcaaccatcggatatgatgtttgtgatctctgtggagccaaattttcagccgtgactgcgcctggatgcatcgtctgtggaatgggaagcatcaagagatcagatgcactagcaggagcaggaccagttccttctccgttcggttgagtctcaaagatgggtcttaatccttgctatatataacctttgttaccctaatgttgtaaagagagagacaactttgtagagaaagtaaacaagccattatagggtaacaaatattgcaccacaactggagagattatagggtttcacttactgcttgaattttgatgattgtgatggttgtttctcggctctcattttttttccctccccgatgatgcattgtctgtgattacagaatgtgttgctctcctgtatgtttttccatgatataaacacgaaattgcagtatatagttgttttgcgtc

SEQ ID NO: 88038 - DNA, 754 bp, Glycine max
  Clone ID: PAT_MRT3847_50506C.1
acggctgcgagaagacgacagaaggggatggcgacgcgggagcagccaaacagaccctgaagcaaccccacgttgccatatttgccctcacaacaaccacaaattacaaatactttgcattcattcacccttcttcgtcccctcaactcgatctacgccgacatccatgatcgaccaccgataacttcgccatccctcgccttgcgcagtgttgacgtcgttgttgcgtttctaggaatacgacgacgacgacggtgaaacgctgcgtttcgagaaacgatgaggtcttcttcttcttcggacaggaacaggatcaacatcgctgccagtgctcagaaagtcgatgtcgataaccgaatctccctccgattctactaccgcatcgctgacaacatcctccgacaggctgatatctttcgtgcagagaagaatattattgacctatatgtcatgcttttaagattttctagtttggtgtctgagacaataccacgccaccgagactatagatcatctccacaaaggcagaaagaatcattgaaaaagaaattgttaatttcgttgaatgaactggagaacttgaaccagtggtccaacagaagatcaatgagcttaacaacaaatttgcataccaacaaaatggacagggaaaatttatttcaaataattcactggatttttctcctgtgaaaaagctaacttcggctagttatggcctaataaaggcagtcagacctactgctggggagtttgt

SEQ ID NO: 88039 - DNA, 5776 bp, Glycine max
  unsure (1)..(5776): unsure at all n locations
  Clone ID: PAT_MRT3847_50507C.1
cagagttgttcccaacttcacaccgctccgcgatctctcacaatccctctctccttggattccgcgcactccatttcagatcgataatcgcgatagcaccagcagaaatcagtctcgcgtttcctcaaaagcgcgaacaggatctgaatgcggtgaagttgttgtttaagaacgcgattcatggagtggacgacgctgcagcaccttgatctgcgccacgtggggcgcggcgtgagacctctgcagcctcacgctgcttccttccatcctcaccaagctctcgtcgccgtcgcaatcggaacctacatcgtcgaatttgatgcattaacaggaagcaagatttctgctcttgacattggagcacctgctgtgcgaatgtcttacagtcctacaagtgggcatactgtgattgcaatcctccaggattgtacaatacggtcttgtgattttgacttagagcaaacatgtgtattgcattcaccagagaagaagacagagcaaattttttctgatacagaagttcatatggctttgaccccactacaacctgttgtgttttttgggtttcataaacgaatgagtgtgacagttgttggaactgttgaaggcggtagaacacccacgaaaatcaagacagacttgaagaagcctattgttaaccttgcttgtcatcctcgcctccctgtactgtatgttgcttatgcagaaggtttgattcgagcatataatattcatacctatgctgttcattacacactacaacttgacaatactataaagcttcttggtgctggtgcatttgcatttcatccaactctggaatggatttttgttggggatcgacgaggtacactgctggtatgggatgtatcaactgagagacctagtatgattggaataaaacaagttggctcacaaccgataacatcagttgcttggctccccatgttgcgtttacttataactctatctaaggatggaaatcttcatgtttgggaaacgcgtgttacagtgaatcctaatggacctcccacacaggctaatttttttgagcctgcagcaattgaatcaattgatatccctcgcatcctttctcaacagggtggagaagcagtttatccattgccgcgaatcaaagctttagagtttcatccaaaatctaatttggcagcactagtgtttgcaaatgcgacaattgcggacaattcaaaaaataaggccagatacagtacagatgggagaaagcaactttttgcagttttacaaagtgcacgaggatcttcagcatctgttttaaaggaaaaactttctgccttgggttcgtctggagtgttggcggaccatcagcttcaagctcaactacaagagcatcatcttaaaggccatgggcatcttacaatatcagacattgcaaggaaagcttttctttatagtcattttatggaaggccatgcaaaaatttctcctatatcacgcttgcctctcatcactgttctagataacaagcatcatctgaaggactttccagtttgccagccatttcatttggagctaaatttctttaataaagcaaaccgagttcttcattatccagtcagggcatactatatggatggactgaaccttatggcacacaatctttcatctggatctgacagtatctacaggaagctatataattcgattcctggaaatgtggagtaccgtgcaaaatacttgatacacagtaaaaaacagcgcttatttcttgtagtgtatgaatttagtggtgctacaaatgaagttgtgctttactgggaaaatagtgatgcacaggtagcaaacagtaaaagcagcacagtaaaaggtcgagatgcagcatttattggccccaatgaaaatcagtttgctatacttgatgatgacaaaacaggattgggtgtgtatactctaccaggaggggcctctcaagaagctaaggacaatgataaagtttttgaagaaaatccaactgcaactgctgagactagtgctggttcaattcggggcccgacaccatttatgtttgaaactgaagttgatcgcatcttttctactccattagattcatctttgatgtttgcttctcatgggaaccaaattggaatagcaaagctcatacaagggtaccgcctatcaacttcaactgccaatggccattacatatcaaccaatagtgaggggaaaaagtcaattaagttgaaaagaaatgagatcgtacttcaggtgcactggcaagaaactcttaggggacatgttgctggaattttaacaacacagcgagtccttattgtttcggcagcccttgatatactcgctggcacttatgcaaattttgacaagggacttccttcatttagatctctattgtgggttgggccagccctccttttttctactgctgctgcaatcagtatacttggttgggatggaaaagttaggtctatcctctcaatcagtatgccttatgcagtcttggttggttctttgaatgatcgattgttgcttgctaatccaacggaaataaatcccagacagaagaagagggttgagatcaaaagctgtcttgttggtcttcttgaaccaattcttattggatttgccacaatgcagctaagttttgaacagaagcttgacttgtcagaaatattataccaaataacatcgaggtttgacagcttgcgcataacaccaaggtctctggatattcttgctagaggatctcctgtttgtggagatttagctgtggctttatcacaatcaggtccacagttcactcaagtgatgcgaggtgtttatgctgtgaaagctcttcgtttttccactgctttaaatattttgaaagatgaatttctgcgttccagagattatccaaaatgtcctccaacatctcatttatttcatcgattcaggcagttgggttatgcctgtatcaggtttggtcaatttgatagtgcaaaggaaacatttgaagttatagcagattatgaaagtatgcttgatctgtttatatgccaccttaatcccagtgccatgcggcgtcttgctcaaaaattggaagaagaaggtcttgactcggaattgaggagatattgtgataggatattacgtgctcgatctacaggatggacacaaggtatatttgccaacttttctgctgagagtatggttccaaaaggacctgaatggggtggtggaaactgggaaattaaaacacctactgctgtgaaggatatacctcagtgggagcttgctgcagaggtgacaccatacatgaaaactgatgatggtacaattccatccattatagtagatcatattggtgtgtatttaggctcaatcaaaggaaggggcaatattgtagaggtgagggaagatagtttggttaaggttttcatgcctacgggtaatgagaataaagtaaatggtcttgaagcatcttcagttaaatccatatctaaacagtctaatgtggtcagtaataccaaaggtgattcattgatgggtctggaaagccataaccaacagcttgccagttcctctgctgatgaacaggccaaagcagaagaagaatttaagaaatccttgtacggagctgctgctgatggaagcagtagtgatgaagaaggagtatccaaaataaaaaaattacgcataaaaatacgagacaagccaattgcctcttctactgtggatgtgaataagattaaggaagccactagacagtttaaacttggtgaagggttagctccaccaatgagaagcaggtcctcatctggtggaagccaggatcttggtcagatattatcccttccaccaccaactacaggatcggcttcttccactgtttcaactcctggtgacctttttggtacagatgcattgactcaatcagaacccatttcacagccaactactggggctttgggtgggggacttaagccaggacctattcccgaggatttctttcagaatacaattccatcccttcaagtggctcaaacattacctcctgctggaacttttctctccaattacactccaggggttgaaattaacaagacaactcctaatcaggttagtgcttttcaggttaatgttggtcttcaaggtggtgttccccctcaaaccattcagcaacctgctgttccaattgagtccataggacttcctgatggtggtgtcccaccgcaatcctcagctcaggctgtggtcatgccccagtctcagttacaagcttctcaggctcaaatttctagccaacctctagatcttagcatacttggagtacctaattctgccgattcaggaaagccgcctcaaactggttctcaacagattgctgtgcatcctggacaggttccccgtggagctcctgcttcagtatgtttcaagactggacttgctcaccttgagcaaaataatctttcagatgcattgtcttgctttgatgaagcttttcttgccttggctaaggaacaatctcgtggaattgatataaaagctcaagcaacaatctgtgctcaatagctcaagattgcagtcactcttcttcgggaaattggacgtctgcaaaaagtccatggtccaagtgcaataagtgcaaaagatgagatggcaagactgtcacgtcatctcggttcgttgcctcttctagctaagcatagaataaattgcattcgaactgccatcaaaagaaacatggatgtccaaaattatgcctattcaaagcaaatgctggaactactattgtctaaagcacctccaagcaagcaggatgaatttagaagcctgattgacctgtgtgttcagaggggtttgactaacaagtccattgatcctttggaagatccctcgcaattctgttctgccaccttaagcaggttgtcaaccattggatacgatgtctgtgatctctgcggagccaaattttcagctgtgactgtgcctggatgcatcgtctgcggaatgggaagcatcaagagatcagatgctcttgcaggagcaggaccagttccttctccgttcggttgagtctcaaagatgggtcttaatccttgcgctctatataacctttgctactctaatgttgtaaagggagacaactttgtagagaaagtatacaagagaatgaagggattatagggtaacaaatattgcaccacttctagagagattatagggtttatcacatactgcttgagttttgattgcgattgtgatggttgtctgtgattacagaatatgttgctctcctgtatgtttgtaattttgtaattatattctgcttttgccatgatagaaacacgaaattgcagagcataattgtatttcgtatatagttgttttgcgtcatcaaatttctttgaatccctaaaaggggttttttatttttttaaaaaaggggggggggccccaattttgggctttcccaccccggaaattaaacccgaaccttttctttgggggcccccaattttccttatggggggccgatttaaaccctgggggaattaaaaaaaccgggtttccccaaaaaaatgggtttnggataaaattcccctaaacaaacgggccgaaaaaaaaaagggcaaacccggggggcctttttaaggggctccctccctttattgggggtgggcccccctccctctttcaaaaaaaaaaaccggggggggggggtggtttatagaaaggggcccccccccgggggaaggggggtttgcgccatggccctccccggttttttttttttttt

SEQ ID NO: 88040 - DNA, 1960 bp, Glycine max
  Clone ID: PAT_MRT3847_50508C.1
cttcttgttcatcccctcaactcgatctacgccgacatagatgatcgatcactgataacttcgtcctccctcaccttgcgcagtgttgatgtcgttgttgcgtttctaggaagaagaagacgacgacgaaacgctgcgtttcgagaaacgatgaggtcttcttcttcggacaggaacaggatcaacatcgctgccagtgctcagaaagtcgatgtcgataaccgaatctctctccgattctactaccgcatcgccgataacatcctccgacaggccgatatctttcgtgcagagaagaatattattgacctatatgtcatgcttttaagattttctagtttggtgtcggagacaataccacgtcaccgagactatagatcatctccaccaaggcagaaagaatcattgaaaaagaaattgttaatttctttgaatgaactggagaacttgaaaccagtggtccaacagaagatcaatgagcttaacagcaaacttgcataccaacaaaatggacagggaaaatttagttcaaataattcactggatttttctcccgtgaaaaagcaaacttcggctagttatggcctaataaaggctgtcaggcctactgctggggagtttgtttaccaaggatcaaggagccaacctttctcttatgtcaggcctgtggaagagcatgcacgaagactatctctaactcttccacctccaaaggaagaaactctctctagacattctatccttggtcccaacgggctaaaagggcagtggagaccacctatcattgataaagggatcaagtatccaagcaacatagatctgtctcctgttgaattaccaagcctacaacattccttggaagatgaatctctgaaaaagaaggataacagcattgcagaacaccataaatcagagttagattcaattctaacccaaagtgaggactgccagccccatccccaacctcagcctcagcatgatcaggagcctccttctcttatttcttttgagacaactgaaacctctgctcgaatagaagttatcagacaaccttctcctccacccgtacttgctgaagtacaagatttggtccctgcagtgtcaccttgtgttaatgaggcaggatgtaagacagagattccatcatcagatagttctgttcatgtcgaggctccaatgcaattgcacatttcaactgctttaatggagagttttatgaagcttgccaagtcaaatacaaaaaaaaatttagagacttgtggtgtccttgctggtttgcttaaaaacagaaaattttatattactgcccttataatcccaaagcaggagtcaacatcagattcttgtcagactacaaatgaagaggaaatatttgaagtgcaagataaacggtctctttttccccttgggtggatccatacacatcctacacaatcttgttttatgtcatcaattgatctgcacacccattactcctatcagattatgctgccagaatctgttgcaatagttatggcgccaagagatagttcgagaaaccatggcatttttcggttgacagcccctggtggaatgtctgtgattaaacaatgtgatcaacgtggctttcatccacatagtcagcctccagatggtggtccgatttacaagacatgtacagatgtatacatgaacccagatttaaaatttgaggtaattgatcttcgatgataagagttatgctctctgtcattgtttatagaccaagcttttctcctatataggttttacttttaccattaattcagccgtggccataaagaatggcccggctgtgtttgtaaaaaaaaatcttgctggttagctgtttcttttttgggttacactgatttgagcttttaacccctgtgctgcatgcatggtcatttgtattaatatcaaactgttttacccattggtgtatatcaaacttgtgaagatc

SEQ ID NO: 88041 - DNA, 1692 bp, Glycine max
  Clone ID: PAT_MRT3847_50509C.1
attatgaaatagtatcaaatatgaaattaacgcgggaagcagtttctatcatagtatatacaatgggcgcaactagtgaaacatttggaaccacaaaaagagattctacgtattttacaccttgtcaattgattccacaccagttctaataaattattctaccgaaaagcagcaagagatgtttgttctgggtggttccagtatctattgtgcaaccaaacggaatcagccacgactgcgtatccatcttgattacgattccaactaaaatgggcatgagttctgttctttatatcaagaataccatgcccaaaactagcttcacggtatgctgaataacttggctggggctctgtcatagcagtagccagtccttctaaatttcctccatctccaatcgttatgtaaactggggcagattggtcattgatgggtctgcacagcccatttacaacattgtatgcaatatttgatacacgttcagatcgttcataagcatgaacatgaccagcaaagacgacatcgactttatattccacaaaccatttctcgtacattactctaactgtctccccttccatatagtgattcacataactattatacattggactatgcattaggactatcagccatggcgtctctgtcctgttcaccttgggcagttcctttacaagccatttgtattgaggcgtgtatttaccaaaagctgagtaagaagataaaacaatgatgtatgttgaagctctctttatagagtaccacaacggagatgtgctatttgatgctgtgtacggtaaatgataacgacaagtgtaaggcttgaatggtctggtttcaccaagttctggagcaaaatcaatttcatgatttcctgcagtccaaatccaaggctgataagctgcaattctctcagtaaatcttccccaggtatcccacttggtgttgtcatgatatggaaaatcatctgcataagagagatcccccacatacaatattgtttgccctttcacaggatttttttcataatgggtaagcgtcctgttggaattgtaagtttggcctagatccccaatgagaccaaatgtatagggaacatcggggccaacagggggaggagttttgaaccagaattgtcgagtggtattccctattccaacctcatagtaatatttggtatcaaactccaaattgtgaacagtgcagtgatgtatgtagccagaggtgtaattgaagtacttgtaggtaaggaaaaagccatgagcttgccatttgaattcactgttttcagcccagtaaatgacagtgcttgaaccgggttcatgtgggctaatccaagagatgataacacctttccctacgtgatctccttgtgttatatgcacctgttggggagcgttgtaaccaggaggcacacggaacgtatcactgtctattggcatatccaacgataaataatcatttctcagaaaatcactggtctttccacccatacagaaacatatctctccagtgtcaagaattaaagcccatgcaacaagtagaaaagcactaacaacccatctatgccaattcaatcccatctcttctctgttgattcgaatcccagtggctactacactatactaagggtgaaggaatattcatctgggtggttcgaatatgcttgtgctagtcaccaatcattaaaac

SEQ ID NO: 88042 - DNA, 604 bp, Glycine max
  unsure (1)..(604): unsure at all n locations
  Clone ID: PAT_MRT3847_5050C.1
gggatttttggngaagtgctcgnggggggcctggctataatgacatgattatggagtcgagttctggctcataaagacatacttgatcttgcaaaatatgcaaatgtgccggtaatgagtgtgttgacagactacaaccatgactgccagataatggctggtgcgcttaccatgggtgagcacattgggcggggttgaacgtacttttgttgtttatgctggagatggaaagaatattggtcactcatgtttgttgtggggatcatgaatgccgtaagactttgtctagtgtgtcgtgtaaaggattagaacctgatgcaaaaacggttgagagggtggggaaagctggaatcatggagaatgaggtaactaatgatcccaaagagggttttaaaggagctgttgtgtggtgtagaagaggtgggagcaggatggggcaaaaggaagaagctgtatagtgtagccatgtttttaaaggattgngagtgaagagagatgttatggatttggttgggtacaggggttggttatggattgtttatcctggagggagagttggatgggggtggtggtgtgtgtggggttgggtgggggttgggtgtgg

SEQ ID NO: 88043 - DNA, 500 bp, Glycine max
  Clone ID: PAT_MRT3847_50510C.1
gcgagaagacgacagaagggagttcaactatgaaacatgttcatatggttgatcactaatgatactaacaaatatctctccatccctagatgagatattcattagatgctctattcaaaactcatttttcaagcatttttcaatgacaataaaaacaaagaattgaagctaaggtaatcaaaccataaaacaagcaatcaaaatggaaagaagcaataacataggaaatgacattgaataaatataaagattaattacatgagagtagcttagtacaccaatcccccaacaatagatgaattagtctttcattgtcataaaaggcctcaaaattacaaaatgaaaaggagaaaatgaaagaaaatggaagatggagatagatgagagcttcaatcgtcgcacacaaccctaggtttatgctttcactttcatgtccaagagaatgtcctttatattggacctaatgtttttgtcttgtcacttcaaagtgcggtttactc

SEQ ID NO: 88044 - DNA, 329 bp, Glycine max
  Clone ID: PAT_MRT3847_50511C.1
gacatgctgctgacgatcttgaacgtcagtggagagatcttattgcgacaaatacaccctctatcgtcaagggacatacccaagtactgaccggtcatcttcgtgtgcacaccctacgccaaccatttcacgaatacgttgctagtcatacgcgtggttacacattacagccacaggaagatagccttgttggtcgcagaaaaaaacatgcacaagatgttcattggctttatggctggaaagaagggatctgtgcctgtaggatgagcgctggacataaaaaaacccccggagggctagatttactgacataccctgagggcgatccg

SEQ ID NO: 88045 - DNA, 320 bp, Glycine max
  Clone ID: PAT_MRT3847_50512C.1
cgcacgcgtgagacattatcaacatcacttgattaactctacatggcaactttattgtaaaacggataatgtgattacagacttggtttcttgatcttgaaacggatttgcaggctgctactattagtcctgcttctatagcggctcttaaatagggtcagagtggataatctctgcacgactctagcttgaacgatgtatcagcatcagaacgtattgaagctaactgtatcgtttctgcatttagctacctgacgaaattcgtactaaagctctgtgctgagacggccttaacagttgttatagactatgcagcaaat

SEQ ID NO: 88046 - DNA, 533 bp, Glycine max
  Clone ID: PAT_MRT3847_50513C.1
cacgtcccagggatgtgatagtcttgcttccaacatttgccagctcccgtcccagggtagcactgtcacaaaaataaaaataaaaaattccaagtctccagaattcgtttgtttcaatgaagtcaatgttaactacagtctacttactgtatcgaatgctgatgattagtatagtacaccattcctggtggttgaagtggtcggaaagtaggaggtgcgggggcttgctgtgttattggtatttgttgatgtggagttatttgcagggtctgatgtgtcaaaggcaccatagccccaacatgagttggcagttggggtgcgggcggtaatggtgggatgctaccataaccatatggagtgatgatccctccagttgactgcacgaactgctgggatggcggattactaagcatgtgaaattgaccttgtgatgaaggagcagcattttgcaagggtggtggttgggctaccaaaactgaaggatatgaatggtttggtgcggcaatcaactgttgtggggacctaaacatatg

SEQ ID NO: 88047 - DNA, 162 bp, Glycine max
  Clone ID: PAT_MRT3847_50514C.1
ggcttgttcgtgctcgtaggcggtacgcgctggttccacgcgaactactaccttaggattttcgaccatggagggtctcattagttcacacaggatgcacgagtagagtttatctttaaacacgcgacataaacatgacaaaactcaccaatatacttggga

SEQ ID NO: 88048 - DNA, 258 bp, Glycine max
  Clone ID: PAT_MRT3847_50515C.1
ccaacgagggatcgatcattttaactcctgcttctctttgctttgggacccctcaagcttgttctggtctgtgcaggccaattttcttttgattaggtgcactctttgatctgatcaacaaaattcgagaattcaagtatgggaacggccattactctttagagccaaacagatcgcaggatcccttggactaatagccactaatgaaaaagtttcaaccaatggtatttaaccacttgcccaggagttcaaaaatct

SEQ ID NO: 88049 - DNA, 326 bp, Glycine max
  Clone ID: PAT_MRT3847_50516C.1
aggcaatagttatcaattcctttaagatcaacttaccattatgacagcatggttctaggctgaacatatcacccatccaaatatctatgatctgcctaaagtacagcaagttcaatcaatccacacagctaatctctgtctgtaaccacttggcatttacaactgtaacctcattaaaaaccgtatgtaaaactcaaccacgagtgaaaacaaaggattaacacagttttcgggatatttcaacaatcacatactctttttaatagcaaaattcaaggggccctggccaatggactttaactgactcctaacactcagattgtctt

SEQ ID NO: 88050 - DNA, 385 bp, Glycine max
  Clone ID: PAT_MRT3847_50517C.1
ggagattgtacggctacaaggatgcagagaagagttgcaaaggaaaaatgttgagcttgaagcaaatcttgaaggtgttgagagcagcaaaggtagcggaagtaaagttcaatatttgagagttccacatcctaagtctggaattgattctatggttgagatcctcaaatgcttgaaagacaaaggagtcgataccagaagcatcaaatcaactttctccccacaggagttgtttgcagtgttagagacagaaactgatgagatgctgatgttgaaagcgctacttggggaacacatgatgaacttgattggaagcttcatttcgatgcccgggaaggttcaaattaaaagcaaaagactattcatttagaatttgaccaaattt

SEQ ID NO: 88051 - DNA, 465 bp, Glycine max
  Clone ID: PAT_MRT3847_50518C.1
cccccgggggggggcaaaattccaacaaaagactaagagaccttacccctaggggggccccacccccgcggggccagtcttttttacccacaaagcttaaaagggccagggggctaacaaattttatgggcaaatctctcatctaaccagaaaaggggatttccccaaaaccccctttaaaaaaacccaaaaaagcaaagggggggaaacgggggcaaaaagccctttggaaaaaaaagaatcccaaaccccctaaaaaagctttcactttttaggggaggaaatgggccccaaaagcagcttccaaaaaccccccatttgattccaccgcccccactggattaggggaaaggcaaatttccaaaactaggcccccctccccttaaaaacctggggaggcgggcacgtccccataattttggtggggatatccactgaaaacgggaaccggtttccccatcccaa

SEQ ID NO: 88052 - DNA, 458 bp, Glycine max
  unsure (1)..(458): unsure at all n locations
  Clone ID: PAT_MRT3847_50519C.1
acggagaagacgacagaagggggaataaaaagatggaagaaaatgagaaatttgcagtatccaaagctggagcagtcgatgcatacgccatggttgattcgttcaagattcatgaaaaagtgaactctcaaatcttcactggtgtgatggcctttgtgatgggcatagtgacaatggtgaggatgactaagaacatgccaaagaagctcacagacgccaacttctactccaactttggtggcgaatataaagggcaggctccaaatacagaggaaatgactactatgcctaacatctctgctcaagagttcatgactgtgatgaaacgcatggctgagttggaagacagaatggtcaacatgaacaaccagaccacctgcatgccacctgagaaggaggaaatgctcaatgctgctatcagcagagcagatgctntggagcaagaactcttggcaacc

SEQ ID NO: 88053 - DNA, 109 bp, Glycine max
  Clone ID: PAT_MRT3847_5051C.1
ggctcgagcacgccgctatatgatacgcaatggggtatcctcaaacagagaatacgatcagggggcaacatcggtggcaaaactacctctgatcaagacaacgcgtggt

SEQ ID NO: 88054 - DNA, 314 bp, Glycine max
  Clone ID: PAT_MRT3847_50520C.1
caaggaaggggaggggaaaaaattttttttttaggggcctcccaaaaacgcggaataccccttttcttttttgcgtgggaggggtttataaaggggggggggaccatcagaaaaaagggggaaatgctctttgtatccaaggggaaaacccccttgcccctggggtttgaggcgaaaagctttgaatttcccccccttttgggtaaaggggccttgggcgaaaaaaacgaagccctttccttccggaaattcacaaaaaaaaccctttttttttttgttggggacaccaagaccggccccaagaaatttggggg

SEQ ID NO: 88055 - DNA, 421 bp, Glycine max
  Clone ID: PAT_MRT3847_50521C.1
acgaggtttggtttattatcatggtgggattttcttggcacttgtttcaagtgcatactatctacattttttttgaaacaagtgatgcatataactataagcttgttatcacaagctaatctaggattttcttaattgtttcattttactgatatttctcttaatccttaatgggatggtcaacaagtttaatgtgtttgcagggctgtggtgcaatgctccctatatttcctgtttaatatctatctgtctttaagctaatggcaatgtgtgtatttctggtggaagttgttgctcttttagggtttaaatgtttacagtattgaatacagctgctggttttattcaactaagtatagtaaatgtagctacttggattactaatatttttgtgccactttttttttatgggccctttcat

SEQ ID NO: 88056 - DNA, 407 bp, Glycine max
  Clone ID: PAT_MRT3847_50522C.1
ttaagagtgagacacaccctttctgtcatatttttatggcatcccatatgttttgattaaacggctaaacaaattatgtaaatgtgtaaagtacgctcattacctcatcacatagttggtcctctttttttttttttttccaaaagtcttattaatgcacatttgttgccgtttggataaaatgataggaaggatccatcgattcttgcccttgtctgacactctagcaattaaccttccctctcactccttgaccccaccaatacatttctacaatgagtcacaattttgattccttttgggagggaggacccacatgaattatatcaccaccatggtcttcatttataaatgaagtgtggcaagaaaaacctcaagtgctagctcaatattctctctagagagga

SEQ ID NO: 88057 - DNA, 440 bp, Glycine max
  Clone ID: PAT_MRT3847_50523C.1
tcgttccgtttcccgctccagatctgtaactaattgcaccgttttttcatgtacaggtttactgctaatgatggaaaaacgaaactgaaagctatgattccttcggatatgcgctctcaggtgctctccggggctattcaaaacctaggtcttattcgcgtccttgattacactgtcaacgatatccccaataaatcggacaaataccttcttgccattaaatgtgaagctgtatctcccgcgcttgaaatggagataaagagtgaggaatctggatctgggattcttttgaagcccaaagtagagggtggagtcaagactgaaggtgctgctgctgggattcttctcaagcccaagcaagaagtggtgacaaaatctgctaaccagattctacgcgaacagcatggaaattcggttcctgctgcacgcatggcaatgac

SEQ ID NO: 88058 - DNA, 199 bp, Glycine max
  unsure (1)..(199): unsure at all n locations
  Clone ID: PAT_MRT3847_50524C.1
gacccactcgtccgcgggtgntctacaactagcaacaaagattcatcaagcanancaaccncncnccccaacgccgaatcaaaacagacatgggncngaaggaagattatgagcaggatgctgagaaagcaaagactgagccaccgactcaatcaaacgaagactagcttatcctaaaaagattgcacaagcaagccac

SEQ ID NO: 88059 - DNA, 285 bp, Glycine max
  unsure (1)..(285): unsure at all n locations
  Clone ID: PAT_MRT3847_50525C.1
gcgtacgtaagctcggaattcggctcgagctnnttctctggctgattnggcatctanagtcnncagtntntccacnctgttctncgctntcntgtnnnnnntttcgantcnttcgtcnatttannangnnnnttgggatgnnaccggggnanagngntantncnnnntantacnnnatcctcggnntctccannnnngctncgnaggatgntctgtaganngcttannagacagcnnccattaagaatcancccgacaaggtggtgatcccgagaagtttaaagn

SEQ ID NO: 88060 - DNA, 393 bp, Glycine max
  Clone ID: PAT_MRT3847_50526C.1
gtatgtggcataacgaaaactgtttattgaaggtgtcttacctttcatagaacctagaatgccagggatcttcggtccacagaacctattaagcgtcagtatttatttatgcaacaaaagctatgaccattgtgcaactacgattgattaagagtccatggatatacggccacgtgaaacagaacaaagtgttgtgagattactagattgagtgcatgccataacttacagcgtatggaaaacagaactatttatttaatttgactcaacggatattagaatacactttactgtggaggttattaaacttgcattcgcattgaactgacaggctcgctaaatgaccctgaccttgacagaactgattctggttgtcgcttttaccgggtgagg

SEQ ID NO: 88061 - DNA, 282 bp, Glycine max
  Clone ID: PAT_MRT3847_50527C.1
aaaataacaaggtatgggaaacagcctattattcatacctttctctcgcgctcatacattgaaattgtaacagtcaagggtgtatccaacagaccttagcctgtgggtcaaagcattggaggattggatgcattgcacgatgaatcggtggtattcaggtggaaacatgcattgatgtcactgtaggagcatgccaagagcaatattagatcctacactcatgccaaaaccttgtcttctgctacgtctgctgctgtctccaattaaccctttaagccaccc

SEQ ID NO: 88062 - DNA, 353 bp, Glycine max
  Clone ID: PAT_MRT3847_50528C.1
ggaattcggtcgaccacgcgtcgtggatcctatattgggttgatgttagagcatgaacatgattacataggtggcgagatcgcaaggacggagctctgacaacgttttgggatggaaaacctatactgactgaagagacagagctgggctggctcctggttgcagtctcagagagaaaatcaggtctgcactctgtctttttggaaaaagttgcagaacatacatgttgctcagtgtagcccttgaagctgggccaagaggggctttttgagtactgaggatctaaggagctgcttgttctctcaagaggggcaatgttggaaacctattatggttagacactaaactacacc

SEQ ID NO: 88063 - DNA, 139 bp, Glycine max
  Clone ID: PAT_MRT3847_50529C.1
ggaagaatatcactcatcccaacaacacaatattatccttgagaattctagcaccaagcaaatagcaaacatactatatcaccaaagaaaattaggtttgtgcagcccctatatagcagtcttttgttaaagaaagaag

SEQ ID NO: 88064 - DNA, 398 bp, Glycine max
  Clone ID: PAT_MRT3847_5052C.1
aaaattataatttatgtattttttttttatgttattaaaattattttttaatttatataaatattatattaaccgactggggaggaatttaaaaataaaaaaacaattatattttaaatttcaggcaaaacaaaatggtcgtcaaaaaaaattttaatacttaaaaaaccatgcctcaattggataaaacaaaaaaatcccaacacgaaacaggttcttttgcaattacaactagaactatactatttcaactgaactttatgcgggtgaattatcaatgagccaatattgtataccattttgaacaccatacgcaaaaacaaggacgggataggaaaaaaaatgggaaatgcaaagcaatatgtaaaaagagtaaactccactctcgtttaaaagga

SEQ ID NO: 88065 - DNA, 448 bp, Glycine max
  Clone ID: PAT_MRT3847_50530C.1
gccacacctccgggtaggcgcacgatacgccttggtttgcgtgcgtggcacagaataattaggagcgtctataacaagcatggcacacacactatacgaccttatgtctgcctataggttggagaaacttgatgagtacattatctcacgcatgtacatcaacgggtaccaagctgcaaaggatgatcttactgcatatgcaaccttgccaactgctacatcagatgaatatggaaatgtgtgcacgtggtacaagcacatcgatgctctgctgagacatctctagtgatcatggctagggatctggtggtatagttgagggatccctgggtgcagaacctgacacaactccgacagctgctgacactaaggctggtatagctgaagatgacgatgatgacgatgtcgatttgattagtgaatagacttatgaagacatgaacgcaac

SEQ ID NO: 88066 - DNA, 282 bp, Glycine max
  Clone ID: PAT_MRT3847_50531C.1
cacgcagtgagccaacccgtccgaacatgatggggagctggatacacgttacctgacctttgcgaggggtgaggtagcatcaacagaacttgctatacccgttatgtcggaagacccatcaagaaagcagagcataaagaataacgccatacagactaatacagaaggcatcaccttggagaacacaccttggatgacagaggaatcaagatgactccaaaatctgggagaacctggtggctcataccatacgcagcatagagacactgaaatataaggcat

SEQ ID NO: 88067 - DNA, 556 bp, Glycine max
  Clone ID: PAT_MRT3847_50532C.1
gaaagtttaaaaggaaaacaaaatagaaatcaccaaaaattcaaaagtaaattcaacactgcacctgattgacaagcagagaggaagaacaaaacacctctttattcaacgttattaaataaagtttagtatccaccaaacttttctctcaactctaaatcaaaagaaattagagacgcaaacaacatgaacattccaaatgtgttgattgtaccatatcccgtccaaggacatgtcaatcccttgatgaacttctcacaaaagttggttgagcatggatgcaaaattacctttgtgaacacagacttcacccacaagcgggtgatgaattcaatggccaagcaagaaagccatgatgaatcaccaatgaagttggtctcaatccctgatggtttaggacctgatgatgacagaagcgatgtaggtgaactatctgtttccatattaagtaccatgcctgccatgctagaaaggctcattgaagatattcatttgaatggggggtgacaaaatcacatgcataggtgctggtgtgataatgggatgggcattggga

SEQ ID NO: 88068 - DNA, 493 bp, Glycine max
  Clone ID: PAT_MRT3847_50533C.1
ggcttggaacctttgggctgatttatgtgcttgcatggtcgtgagaagatgatagacggggaccgagtaaaactcggaaaaaagcccgaagaaaggaaaaagaaataacctagcaaaaccgagcgcgtacacgcgccggcgcactcgtacgatattaaactagcggaagacatctataaaattcccattctgaaaccctctacccaaaataaagataatccgggagaaaaacctacactaagcggttacgacgggggccgacccaaccccttctcccctccttctctctcctactcttcacactctctcctctcgtcctaaaaaacccctaagaaaaaaaccctttcccaccagccctctcctctcatcctcacgccaggcctaagagaacttaaacctttccgttcccgagccccgagaccggggacaagaaccgagaaggatctacatcgtatgcgggccccctagaacctcgacccaggcgcaaggccct

SEQ ID NO: 88069 - DNA, 297 bp, Glycine max
  Clone ID: PAT_MRT3847_50534C.1
tcggtcgagttgcagatggatccactacccccaagtactctaaggctaggtatgatgaaatcgtgaaggaagtctcttcttactatgaagaaggttggttacaacccagacaagattccctttgttcccatctctggttttgagggtgacaacatgattgagaggtccaccaaccttgactggtacaagggaccaactctccttgaggctcttgaccaaatcaatgagcccaagaggccctccgacaagcctctaaggcttccattgcaggatgtctacaagattggtggtattggt

SEQ ID NO: 88070 - DNA, 1274 bp, Glycine max
  Clone ID: PAT_MRT3847_50535C.1
ctcgcgacgaaaccaaacacactcctaagcattgtcctaattatttccgcaacaacatcaaattttacaaaataattaaaaaaaagaaatggtgattattcattattcagcagcgtcttgttgttgcgtgccatcgctgcaccgctcttcgccttctcgctcgattctcgcacccgcaatctttttcttccgcgacgccgctccgaacctcaggctcgtctcggtttggtcccaacctccaggctcggagggcttcggcgaacccaacaaacactcttctcgtgatgcctccgttgggttctccgcttcttcttcgtcggtcattgattttctcactctctggcaccgcctcaagaccacaaaaaggaaaggatgggctaatcatgggataaaaggcgctgaatcgattgctgaccatatgtaccgcatggctttaatggccttggtttccggcgatgttcctggattggatagagaaagatgtattaaaatagcactcgtgcatgatattgcagaggctattgtaggagatataacaccatctgatggtgtgcccaaggctgaaaagagcagaatggagcaggaagccttaaacaaaatgtgtgaacttctcggtggagggataagagctgaagagatcaaagaactttgggcagagtatgaaaacaattcttctttagaggcaaatcttgtaaaggattttgacaaggttgagatgattctgcaagcgctggaatatgaaacagaacatggaaaagtgttggatgaattcttcctttcaactgcagggaagtttcaaactgaaataggaaaaagttgggctgctgagatcatttcaagaagaaaatctttatcagcaaaaagaccaagttcatatagtggctgacaagtgatgccatcttttgcttgagtgattatggttggtcagattaacagaatagctaagttaaccagaatcaataagcaagatttattgcaaaacctggttctggaattttgacatattctggggtgacatctatcagttgtccctgcctgataatttctttctttggaatcattttttgtctttcttggtgacgcatttaaacctagtctttcttcctattattttcttttgtcaacattggtatgtaaattaatatcaaatatttaggcaagttttaaaaacctgtaatttgtcttaagaaatagtttgaagttgtaagtaactatttgattttagagcaaaaaaaaaaaaaaaaaaaaaaacccaaagcggccgctatagagga

SEQ ID NO: 88071 - DNA, 785 bp, Glycine max
  unsure (1)..(785): unsure at all n locations
  Clone ID: PAT_MRT3847_50536C.1
tctcattctcactcaaaacacaaaatcctaactaaggtgaaaatgaaggcatcacgcattgctttgttcactttggtggtgcttctttttgtggctgaagttcaagtgtcaaaggcagtgacctgcagcccagtgcagctgagtgcatgtgtgagtgcaataacctcttcaacccctccatcaaacctatgctgctccaagattatggaacagaaaccatgcctttgccaatatctcaagaaccccaatctcaagaagtttgttgactctcctaatgcaaggagagttgctaacacttgtggaactcccttcccaaggtgtgttagtttggatggagatgctgatcggctggtttattttattgtgccacctcaaagcagtggtaggattgaccttgttgatggggacaagatactatccctgtttgccttatttattagggagcaactaagctttcttaatgagaaagaagacatgaaaaattgccaccaagcccatgttggtgtcatacagactgcttatgcaaatggggcatctactaattaccttaaactgttgggacttgaagtcaattttactccaactggagtgaaatatcggcatgaaaaagccaccgaatttgatattggtatctactttgaggcaaatggccatggaactgtctttttcagaatctttcatagagtcgttggaggcttagactaatgagatttctttaggatccaaaggttttgtctgaggttctgactattttcacttcacttancagattcaactaaacataa

SEQ ID NO: 88072 - DNA, 1076 bp, Glycine max
  Clone ID: PAT_MRT3847_50537C.1
gactctctagtgattccttctgatcaagagcaaggcagagttcttccttaactttgtctctcaagctcttcatactctcaagttcttcattttctttcctaagtttttcctctgtcatttttctcaggttcaactcctctgtatataaactttcagaagctttaaccttgcgtatagcttcaaaggcatctttttcagctttcctacgccttacagtttcttggtatgcatttagcgtagcattctcagcctcagctctagcctgctcaagttgttcgtagatagtatcatccattccaccatccagtgtactaggaggagatgaataatgaagatccctctataatccggcgactcaaagtcaactccaatgcattctcactgctttcattaatcaaacttggggtgaatgctagttcaactgcactgtcagagcatgttgacaatcccgaaggactcatccttgacagcctatctgattcatcagaacttacttctgtacccatcctgtcacgtggagttgaaagcccttcagtgtcttctggagaagaaacagccataaagcttgctccatgtccatcattgctcgagcccacacacaacacgcgcgcgcgcgcgacacacaacacaaagaaagtgtgatgtgaaaaaaccaagccattagaatggtaacaaggagaagggtttgacggtggtagcgtgcctcttagtttgataatatatgagagattccaaagtaacaagcttgtcttacctaataaggtttgcatcaaggagaatgttggagggttttaagtcaccatgcactacgctgtgaggtttactggaatggagaaagataagagccgagcatagttcagcagcaatgcgaattcgagcttgccatgacaacggaggggtgttatccttgcaggcaagacgatcttcaaggcttccattaggtaaatactcatagacaagagcccatgaatctgggcaggctcctatgagtgtgataagattgggatgccttagcttgctcaacacatcaacctcctgttaaactccaagggtccttgcatgctgcggacgcgtgg

SEQ ID NO: 88073 - DNA, 261 bp, Glycine max
  Clone ID: PAT_MRT3847_50538C.1
gtcttgggaacggacaaggagaattcaagtgtgaccctcatgaggcaacgtgttatgatgatgggaagacataccacgtaggagaacagtggcagaaggaatatctcggtgccatttgctcctgcacatgctttggaggccagcggggctggcgctgtgacaactgccgcagacctgggggtgaacccagtcccgaaggcactactggccagtcctacaaccagtattctcagagataccatcagagaacaaacatattgt

SEQ ID NO: 88074 - DNA, 1071 bp, Glycine max
  Clone ID: PAT_MRT3847_50539C.1
gagacgaccctaaacatcatgcttcgcagttcatttcttgttgttttgctaacctcccttgtactccttctcctcatcccaagatcttactcttcggagatcaatgtaacacaaacctacccgagcacaaaatttgagtatgctcttctggaatttcctctaaatatacaatatttggtggctgaattcttcttgattggtgctaagggttatggattagatgcttttgctccagggttagcccagggaggaccccctcccattgttggaggcccaaaaggccaatctggatcccctcacagaagaacttaaccttgcagagtggtttaactctaattggacgtttgaaggcttataaagcgcgccataaaaggtttccctaggccattaataaatctaaacaaggaattatttgctcaaattgtcgatcaagcctttggacaacctttgaatccaccttttgatccctatgccaattccttgaactaccaacttgcggcttacataactactgtagttggccccaatatatatgttggaatcattccaaagcttcaaaataccgagtccaaagaactttttgctggccttctaggaacagcaagtggcggtcgaacaagtcgtcgagcatatctatacgaacgttgggactcgccggtgccaccatataaagtgactgtggcagagttcacaaatcgcatttcagaacgagcgaataagctaggaatggaaggaatcaaaagtgagggtattgtagtatctccatggaatggtgctgaaggcaaagtttcaggtaatgtgattgagggcgacaaatattcactttcatatggaaggaccccagaggaaatattaaggatattatatgggagtggcaatgaaactatcccaggtggcttctaccctcatggagcaaatggtcatatagcccaatattactttaattaatatgccatagttatatagtctatatcttgaaagagctgtgccaggcaatggctgaagtttataataagcaatatacatgttgcattgaactgatctgaaaataaaattgccttatgtcgtaaa

SEQ ID NO: 88075 - DNA, 317 bp, Glycine max
  Clone ID: PAT_MRT3847_5053C.1
attgagatttagaaagcacttaattaagaatgtttcctatagaacaaaaaagttgccatatattagagcaaagtgggaagaaagtaaggtaggtagcgatggagcagtcagaaaaatcgcctaaaaaaacatcatcactgagatcatcatttccgagagatccacgtggctcactcgaagtgtttaacccaaacacttcaacttcaacttcaaccaacgtgcgcgtgcgttcacagcctctttggaaatcgtggacggagtcggaagaaccgcgccatgaaatcgccgcaacgtcgtggatggccatcaatccggcg

SEQ ID NO: 88076 - DNA, 1197 bp, Glycine max
  Clone ID: PAT_MRT3847_50540C.1
gctcattcttgtgcttagtggatttgatcccagctgaaaaatgtaagtttgatggggtgaacgacaaagtggtagtggatgcagctaatggggttggtggagtgaaacttaaatatttagggaaattgttgaatggtttgattattgaggttcggaacagcagtgaagatggaggtgtactgaatgatggagttggtgctgattatttttttaaaagagaaggttcttccaaacagctttggttctaaagacaccgggataaggaaagtggtaggattgaccttgttgatggggacaagatactatccctgtttgccttatttattagggagcaactaagctttcttaatgagaaagaagacatgaaaaattgccaccaagcccatcttggtgtcgtacagactgcttatgcaaatggggcatctactaattaccttaaactgttgggacttgaagtcaattttactccaactggagtgaaatatctgcatgaaaaagccaccgaatttgatattggtatctactttgaggcaaatggccatggaactgtcttattttcagaatctttcatagagtcgttggaggctagaactaatgagatttctttaggatccaaagtttcaggttcagaaggggaaaaagctgctctgagattattggctgtcagtaagttgatcaatcaagctgttggagatgctttgagtggattgctcttggtggaagtcatattacagcatatgggatggtcaataaataaatggaatgaactttatcatgatttacccagcaagcagctcaaggtcaaagttgctgacagaacggctgttgttacaacaaatgcagaaactgtggttgtgagccccccgggtctacaagaagccataaatgaagaaactgctaagtacccccaaggtcggtgctttgtgcgaccatctggcactgaagatgttgttcgtgtgtatgctgaggcatccacacaggaagcagctgatacacttgccaactgtgtggctaagcttgtggatcaattcttagggttcaatagctcctgacatcacaacagctcctccttccgtgtctttttaatttccatttgacattacaacagaatgtacttggctttgaaacttagctagccatcgtgattttctaataaattttctcgtgcattttactaagcttatgcgagagtatttg

SEQ ID NO: 88077 - DNA, 730 bp, Glycine max
  Clone ID: PAT_MRT3847_50541C.1
ccacgcgtccgaaactccgtgggctcgaggccaccttcagctctgagtgtagaatccaaatcctgaacctcaacaacctccggcatcacgatctgctggattatcatctgtgcaaccctgtcaccaacttttacttcaaaatcagtgtcttaatggttgaacagtatcacccctacgggacccctgcaatccgcgtcgatcacgcccgctcccacatcgatcgagtgcttccatgataatccagatcgcggtgctgaaaaacaaaacaaaacggggagatttaaagttagccctcggctgggaaagaaagaagggaggggaagagattgcaaattcgaattcccccaagtcattctaacaaactaacatttgcacaaaacacaccaaaaggagtgaagatctaaacaagcaatctgtgtgtgttccgccatgaacgaagaacaacagtgtttgcttctcagctcagcttctcacttttggccccccaaaggagtgaagctatcgtacggcactgcgggcttcagagccgatgcatcacttcttcatcgacggtgtacagagtgggaatccttgcagcccttagatcgctcaagactcgctccgtcattggtctcatgatcaccgcctcaacaacaaagtctccgataatggagtcaaaatcgctgacgcaagcggcggcatgctctctcagcattgggaacccttcgccgacgccctcgccaacgcccct

SEQ ID NO: 88078 - DNA, 967 bp, Glycine max
  Clone ID: PAT_MRT3847_50542C.1
gcattggatggttcgtgctagaaataagggtatgaaagcttcggagcaggattactttgaacagctttcaagctcattcaggtgcttagtggatttgatcccagctgaaaaatgtaagtttgatggggtgaacgacaaagtggtagtggatgcagctaatggggttggtggagtgaaacttaaatatttagggaaattgttgaatggtttgattattgaggttcggaacagcagtgaagatggaggtgtactgaatgatggagttggtgctgattatgtgcaaaaagagaaggttcttccaaacagctttggttctaaagacaccgggataaggtgtgttagtttggatggagatgctgatcggcttgtttattttattgtgccacctgaaagcagtggtaggattgaccttgttgatggggacaagatactatccctgtttgccttatttattagggagcaactaagctttcttaatgagaaagaagacatgaaaaattgccaccaagcccatgttggtgtcatacagactgcttatgcaaatggggcatctactaattaccttaaactgttgggacttggaggcaattttactccaactggagtgaaatatctgcatgaaaaagccaccgaatttgatattggtatctactttgaggcaaatggccatggaactgtcttattttcagaatctttcatagagtcgttggaggctagaactaatgagatttctttaggatccaaaggtttgttctgaggttctgactattttcacttcacttacaagattcaactaaacataaatgtgtgattgttagttttaggttcagaaggggaaaaagctgctctgagattattggctcttagtaagttgatcaatcaagctgttggagatgctttgagtggattgctcttggggaagtcatattacagcatatgggatgggcaataaataaatggaatgaac

SEQ ID NO: 88079 - DNA, 3841 bp, Glycine max
  unsure (1)..(3841): unsure at all n locations
  Clone ID: PAT_MRT3847_50543C.1
cttctgaaagcatctcacacgcttaaggtctgcgtggacaaaacaaaccctgaacctgatcaacctgcggggtcacgatctgctggatcatcatctgtgcaaccctgtcaccaactcttacttcaaaatcagtgtcttaatggttgaacagtatcacccctacgggacccctgcaatccgtgtcgatcacgcccgctcccacatcgatcgagtgcttccatgataatccagatcgcggtgctgaaaaacaaatcaaaacggggagatttaaagttagccctcggctgggaaagaaagaangggaggggaagagattgcaaattcgaattcgcgtccgcccacgcgtccgacggctgcgagaagacgacagaaggggattcccctttttgttaaaactgtatctattcctaaactccagtagtggatccgaagccagcttcagctctgagcgtagaatccaaatcctgaacctcaacaacctgcggcatcaccatctgctggattatcaacagtatcacccctgtaatccgcgtcgatcacgcccgctcccacatcagtgtcattctaacaaactaacatttgcacaaaacacgccaaaaggagtgaagatctaaacaagcaatctgtgtgtgttccgccatgaacgaagaacaacagtgtctgcttctcagctcagcttctcgcttctggccccccaaaggagtgaagctatcgtacggcactgcgggcttcagggccgatgcatcacttctccaatcgacggtgtacagagtgggaatccttgcagcccttagatcgctcaagactcgctccgtcatcggtctcatgatcaccgcctcacacaacaaagtctccgataatggagtcaaaatcgctgacgcaagcggcggcatgctctctcagcattgggaacccttcgccgacgccctcgccaacgccccttctccccaacacctcctcctattgataaatgaattcgtggagaaagaaggaatctcggtggatggggactggcaagtcgaagtgcttttggggagagacacgagaccaagtggagatgctttgcttcaagcagctaaacagggcgtcacttcaattgttggagctgttgcgacggatatgggaatcttgacaactccacaattgcattggatggttcgtgctagaaataagggtatgaaagcttcagagcaggattactttgaacagctttcaagctcattcaggtcatttattggatgtgcttagtggatttgatcccagctgaaaaatgtaagtttgatggggtgaacgacaaagtggtcgtggatggagctaatggggttggtggagtgaaacttaaagatttagggcaattgttgaatgacgcgattgtacggggcgagaacaacacagaagggggaggtgtcctgaatgatggagttggtgctgattatgtgcaaaaagagaaggttctttcaaacagctttgggtttaaagacaccgggataaggtgtgttagtttggatgcagttgcaacaaagctgctggtggtggaccttcacagaagcaattaatcatattcctctctcattctcactataaacacaaaacccttcccatcctaattaaggtgaaaatgaaggcatcacccattgcttggttcactttggtggttgtgtttcttgtggctgaagttcaagtttcaatggcagtgacatgcagcccagtgcagctgagtgcatgtgtaagtgcaataacctcttcaacccctccatcaaacctatgctgctccaagatcaaagaacagaaaccatgcctctgccaatacctcaagaaccccaatctcaagaagtttgttgactctcctaatgcaaggagagttgctagcacttgtggaactcccttcccaaggtgctaagtgttaataaattggaagaggttttaatttctctgcctgattatgcatcttgatatctatccaagtgtttggccagagactagagagtgaaagaaaattatgtgttaattgttatcatatatatatatatatggtgtggtttaaggtctctatatatgttttaatgttagtgagattaagtattagtcctaatggatatgtgatgctttggtttcatgtcattccatttcagttccttggtgtggtctcatctcacgtaacgttaattagttgttgcaaaaggctgtatttataattcaaagaagtatctgtttctgatcaagcgaataagatctggatattatcaatctttcttctacgcaaatcttggtacacctacgaaggccctccaacctctgggtcaaacggcgtattacatccaaaagtccaaaggcagtcttggacaaacaatttatagtcgctgacaagggctgaggcatgttctgtgatcagtggcaaattgcggatgtatttttctcaatctgcactatacaagcccatctcagccaatagtgtaatctgatcggtgtgaatgaacaaacttgcacagattgtggttgtgagcccgccgggtctcagagaagtcttagatgcagaaactgctaaggacccccaaggtcgatgcttggtgcgaccatctggcactgaagatggtgttcgtgtgtatgctgaggcatccacacaggaagcagctgatacgcttgccaactgtgtggctaagcttgtggatcaagtcttagggttcaatacctcctgacatcacaacagctcccccttccgagtctatttattctccaggctacattgttaccgatgccagtcagccaggcaactttggttgtcattttaatttgaaaaatttgttaatgccttaattttgtgagagatgctgatcggctgggttattttaatgtgccacctgaaagcagtggtgggattgacctttttgatggggacaacaaactatccctgtttgccttatttattagggagcaactaagctttcttaatgagaaagaagacatgaaaaattgccaccaagcccatgttggtgtcctacagactgcttatgcagatggttcatcttcttattaccttaaactgttgggacttgtagtcaattttactccaactggggtgaaatatctgcatgaaatacccaccgtctttggtctcggtatcggaattccggctaggtgctatccaggactctggttggcccttagtagcgtggggaattgggaggctggaactcttcagattccgtttggtttgccagccctcaaggaagttgcccttggagattcttcgatctgattgctgctcgaggaaatactaatggggttggtctccagctcttttgcagagatttagaaaggactctacacacttgccatttgattaacgaagtattgaagttggggcccaaagaaatggcgttttctagcataaaagtggtgtcaatgagtagcaagttgttacttgtacagtttataaattcatctttcgtcatttgtgtgtggactattgtgtagaactttatcagacaatcacaatcactgattaaatgaatcactctgtgtttttcgctgtttgggttcaatagctcgtgacatcacaacagctcctcctgccgtgtcgttttaatttccatttgacattacaacagaatgtacttggctttgaaacttagctagccatcgtgattttccaataaattttcccctgcattttactaagcttatccgagagtatttgaaaatcttcttgaacactcttacccaattgccagaaaaattacaaaaatagcagaaataaaaaaggcttaattttcttaaaattttgctccaaaattcccttccactgtaccagaatgctaatctgaacctgtagggtgccaag

SEQ ID NO: 88080 - DNA, 605 bp, Glycine max
  Clone ID: PAT_MRT3847_50544C.1
aaggttgggtttcgctgctttgaccttatctatcttagcttccgtgcctcgtcaagcattggcatcgagccatggctttcatgctagaaagatctttccagttgaaccgtcatcatttaaaggtttatgctcctctgcggtcactattcatggctacgagtgtcaggaacttgaagttactaccaaagatgggtacattcttagccttcaaaggatccctgaaggtcgaaggaaggttagtggccgtgagactatgaaacagccagtgataatacagcacggagtaatggcggatggaatgacatggcttatgaactctacagagcaaaacctgcccttgattctagcagataatggctttgatgtgtggattgttaattccagaggaacaagatatagccgcagacacacctctctggacccctctatcaatgcttattggaattggtcctttgatgaaatggtgacttatgatctgcctgctgtttatgattatgtgtccaaacaaactgggcagaagatagactatgtgggacattctttgggaactttggtagctttggcatccttctcaaagggaaattggtgatcaagttaaatcagca

SEQ ID NO: 88081 - DNA, 407 bp, Glycine max
  Clone ID: PAT_MRT3847_50545C.1
gttgtgtgtgattgagagagagagagagagggggggggaacttgggataactatagcgaaagcgagacaccgccaaaaaccgaactgacccgagatctgtctctcactctttcaacaatagatatgcaaacccctaccgacaccacactcaatcgagaacctacattctctgctcatctatggggcagaagtgtatgagctacgcgctcgttgtcgcggggaacagagattctcgcggagcacaccggatatagcggaaactgaaactacatcggctgtcaatgccttcagaagcatgatggcaccgacaacatgttcacctacaatagcgacgcacacaccttcaattgcctgggccacaatggctacacatattgtgctgctgcagacgaatcaatcggaagaca

SEQ ID NO: 88082 - DNA, 301 bp, Glycine max
  Clone ID: PAT_MRT3847_50546C.1
aacactcatacgacaacgcgtatcaactttgtaatcaacatgtacaggaagtgcgaagacctaatagagaaacgtcaagcgtactaggacatttctgacccacaccacttgtggtgtaactatatgattgctacactttgtctattagctgagtggaaactgtcaattgatttgatccggctcatgtttgctgtaaacgcactcatgtatcaattaaatctagtcactgtgacacacgctcgctagcatgtgcatgctgttgatcgatttgtaacgaacatgtatgcttatagtgctagga

SEQ ID NO: 88083 - DNA, 734 bp, Glycine max
  Clone ID: PAT_MRT3847_50547C.1
acgaaacgcgcttcatcagtcaaaagccaccaaaggtgattttatcaagtatggaagttgtggcacaatcaatgggatttaagacacatattcgcaactataagatgagaatagagagtatctcaacaaataaggcttcttatttctcagttatactagaagtctttgaaattgctcctacatttttcatggtggatattcagaaagcagctggagatgctggtgaatatctcaagttttacaagaatttttctagcaatcttgaggatatcatgtggaaaccgccccacgaaacaagcaaattaaggaactccaagaccaaagggcagtgagtttcatgaaacaagcaaattctgctctgattgtaagaacaaaaacatagttatggagaccctgagccttatatatatatctttaaaaggctgaaaagccactaagccagctcggctatgccacctccttagtatctttaaccaacccaagttttttttatccctatacaaatagaagaccaaattcaaattcgaaacagaaaataggaatcaggtataaagacagatatatctacaatttgtaaggttgatgtttgtacatctctttttagtttttatctccttttttttatcctgtcattacattgtatcccgttcctagtaagaagagtgctattgttgattgaattgtacgaatctgttttcaatttcagttgtctatctacctatataatttcagtt

SEQ ID NO: 88084 - DNA, 1185 bp, Glycine max
  unsure (1)..(1185): unsure at all n locations
  Clone ID: PAT_MRT3847_50548C.1
acggcgagaagcctaaggaaaacggaagagaataattcggagcgactaagaagaaagagaagagaataatatgaagagccactccagtgtctcagaaagggttcagccttttgccaagtgcctccagagttgagatcacctcggaataaaacttggagaattattacaattttcaaggtgacaaaagtgcatgtcagatttttttatccttataaaatcgaagacaagtatggtaatttacaacagccactatgctcaatcaagacctcctggtaaaggagatgtcatagattaaagctacacacatgctcaacaaagttcttactctcaatctcccttaattatgttgcaacccttcactacttgcttcacctttcttcataggaagaccaaattcttcctcaataaaccaagaatcaaggagatgatgggtgcatgctgcaagagaagacaatccaacataaaattattctcttcaagttctgacctgtcaacctcttctttccttcacatgaagctctccactcagtttcatcaagttttcaagcttattgacactaatggggatgggaagatctcaatcaatgagctcagtgaattgctctcaagccttggatacaacaagtgcactgctgtcaaggaagctgaaggcatggtgaaagtgttggacttcaatagagatgggtttgtggacttggatgagttcatgattgtcatgaatggcatggaagaagaaaaagaagagaaatttggaagtggcatggagcatgatggtggttacctcatggatgcttttcttatctttgacactgacaagaatggcctgatttcagccaaggaactgcagagagttctgatcaatctagggtgtgataattgtagtcttagagagtgcaagcgtatgataaaaggggttgataagaatggagatgggtttgtggattttgaagaatttcgatccatgatgtaaagtggatttgctaattagagcttgaaatgggtttttgctgtatttcaatattattaatttcttttggtttttctttcttttttctggaccccaaacaatatctttaaaaagcccagtgtgatatttgccggataatgatggtatttaagaatgtgaaaattgtgattaaaggtttcaccaccaaaanaggngaaaaaaaaaaaaaaacataccag

SEQ ID NO: 88085 - DNA, 517 bp, Glycine max
  Clone ID: PAT_MRT3847_50549C.1
attaccagagaagtctgtaaaggcttagagctattcaattacttaacaacaaggatggcagattcattcgcgcggttgatgctaatgcgcctcttggatgagaatcctgtggatcaaccaccatcatcgttgtcaccaccaccacaaccccgaccccgacgcaaccccagggatcgtgctcctcgccacaacaccccatcatctcaccactcacctccccaatctttcaacaacagtggcacactgaacatggagggtgccattaacaacgccggttgtgttcagggcaacggcaacgggtccatcatctttggcagctttgactccacaaaaaataattactactaatttgccatatatatgtaactctttaattatattatctaacgtggttatgttgtgccgctcaaataactggtgcagtagctctaatcatggtttgaaatgttgtggcctcagttgtgtcgcaaattgtaatttatgaccatgactctaataaatgtctgcaatttaccag

SEQ ID NO: 88086 - DNA, 286 bp, Glycine max
  Clone ID: PAT_MRT3847_5054C.1
accacgcgtgcgcgctatccggcatttggctatctggatctgtccactagggaacgtgagcctatacataggatcagtgtctaccgttcctgcatccgcatacgtagctgatggtgatcccacatgctacattgacatatcatctactcacacagcgtgcaacaatgatccaagtgttgctcaacgtgctaatcgtcaaaggcgatggatcgcatacagtgaaagccgttgtgccgaagagtatgatgaaatccatgatccttacattcgtagattctgatgcttg

SEQ ID NO: 88087 - DNA, 433 bp, Glycine max
  unsure (1)..(433): unsure at all n locations
  Clone ID: PAT_MRT3847_50550C.1
tttttccttagaaaatcttttatatacatcanaaatctatccaatgacagctcggggaaagggctaagttatctacgaatggtgatggactttgttgatatttgtgctttaatttcacatcaactttacttacaggaagtcatatcattttctttacgcatcaacaaaatatacattaatagtctttgtattctatcttgcctcgaaaattgtcagggatatctcattttgtgataaaaatttgcaagttttagatgaagatactgattcaggagtacactttcctggataaaatccaggagcctttggttgaggcattaatttctcaccattcatcttaggaatgacagaatacatatccggcctatctcctggtttttgttgtacacacaacaaacccagatttttgcatcttaatacttcaaaaggaatg

SEQ ID NO: 88088 - DNA, 412 bp, Glycine max
  Clone ID: PAT_MRT3847_50551C.1
acttactgtactcttgcaagccaccgtctctaagatcttgtttacaaacaaaggtagtagatcaaggccagtggcgagtggagtgatattcatggatgcattggggagagaacacagggtatacctgaagcagggtcccaagagcgagataattgtctcagctggtgcactgggaagcccacagcttctaatgttgagtggaataggagcagaacgtgagcttaggaaacacaacattgatgtggtgttgaatcagcccttggttggacagggaatgtcggataacccgatgaacgctatctttgtcccgtcccctgtccccgttgaggtatccctcatagaggtggtcggcatcaccaacgttggcagctacattaagccgccagtggtcaaatgttcacctctcgttctc

SEQ ID NO: 88089 - DNA, 401 bp, Glycine max
  Clone ID: PAT_MRT3847_50552C.1
gaactgttccatcactaatgaggactattcttcctggattgcaaacccatgctaacatgctggctgaaaattcactgaaattgcttgtgcttagtggtgaaactttttctttgaccttatgggagatgctttcaactatattaccaaagacattaatcttaaatttatatggaagtactgaggtttctggtgactgtacatattttgattgcaagaggatgccattgattttgaaggaagaaaagctaaccagtgttccaataggtttacccataactaactgtgatgtgatgatgcttcttaatgaaaatggtgcatcaaatgacggagaactatatgttggtggctcttgcatctttagggattactataatgaacctaatataatgtctgatgcatat

SEQ ID NO: 88090 - DNA, 209 bp, Glycine max
  Clone ID: PAT_MRT3847_50553C.1
aatttccttaccgacccactcgtcctatcaaattctttcactttaacacatcatcttttatttcttctcataccttaattacttgagaatgttaaccttataaaatatctaaatctcatcaccacaaccattcattatctacacatacttatttactctcctaaaacatataaaaatcaatcaaaaaaacattcttctcttaacaaact

SEQ ID NO: 88091 - DNA, 354 bp, Glycine max
  Clone ID: PAT_MRT3847_50554C.1
tcgactagcgctagatattactagtagtatgaccggacagagtgaaggtcacagtctgtgctgacacctctgaaaattaacaacgttgccttgtcctacatgagtttcctccgcaggttgtgcccctgtttgcacaagggcggcgcatccttccacgacggcgatgacgacgacatagatcgcaaccaccctggcgactccttcgacctaatcttcggcctccacactctccaactcgacaccaacttcttctccgacatcaaccggctatgtcatggaggctgtggtcctgttttcaggggattgatgccaaatggtcaagaagtggcggttaataagctgtcattggaatct

SEQ ID NO: 88092 - DNA, 671 bp, Glycine max
  Clone ID: PAT_MRT3847_50555C.1
gaaaccaagaaaataccgagacttcacagatgaacaatattaccggggccacaaaatctcaacatgacagatgaacagtcaaactaactacatgctcaccaatactcaaaactaaaagaatggggattagatttaaatgatctccaagaacatagcacatcttcaattcttcgcgtcaaaaaacaatgtcagggcagctatgttctcaatcaggaagaatttgctcactgtcagcatctacctcggtctcaaccttaggctttgaacgagcctggcctgctccaggggcctgcctcttcttgatcccactcactacatcatcaatccgcagaagcatgcaagcagcttcaatggcagtcttaaatgtttgtgctttcacattgtaagcatcccagatcttgcactctttcatgtcagtgatgtcaccagtatttccatttatgcccatccatgcattttctccatttgcatgttttccttgtagtgcagtcatagtgcggatcacatttactccacaattttgtgccaaagtacgggggattgcctcaaaagcaatggcagcagcttcataaggccacttctgtataccttgaacagatgaactcttctgcttcagtgttgctgatataggcaactcagtagcacctcctccaggaacaagtttttgaatt

SEQ ID NO: 88093 - DNA, 1406 bp, Glycine max
  unsure (1)..(1406): unsure at all n locations
  Clone ID: PAT_MRT3847_50556C.1
ccacgcgtccgccaaacgtggccaatacatttagtattttgcccgtaggctgtcatgtgaatattgttgttgtagctaattatgcagcttatgttagacccatagaatggtgctttcacggtttgtttgtaggtcagtaaaataaattgccactanncattgnctnttntttnattgacctacnnacaaaccgtgaaagcagaggcaatgtttactggttttattatcatgacctgcgtccacaccgtgaaggcaccgttcgatggggcgaacaatagccgcgtaattagctacaattgccgtatgcacatgcatgccaacgggcnnatgactaagtgcattggccccgtttggcggtcgcgtggtttgacatgggtaactcgatccggaacatgcaggcgctccaggcgtccggtgagatatatactgacattttggccctttgatagaaggtggtgcaaaactaaaagatggtgcagtctagtgttcccctctgcaacacttgtggggaacaagtgggacttaatggtaatggggaagtgtttgtggcttgtcatgaatgcaatttcccaatttgcaaggattgttttgagcatgagatcaatgaggaccatagggtctgcatgaggtgtggcactccctatgaagagagaacaaaggaggaggatgatttccatgagataaaggttcacgaaaatgaggatgatgatttccatgagataaaggttcatgaaaatcaatccgcaacaccttccgaaatcagtaactctcaggatgttggactccatgctagacatgtcagtacagtatccgcggtcgatagtgaagtaaatgaagaatctggaaaatcaatctggaaaaatagagtggaaagctggaagggaaaggataaaaagaacaagaagaaaaagtctgcacccaaggaagaaaaggaggcctcaattcctccagagcagcagatggaagaaacacggcccgcagaggctgctgctgcaccactttcagtagttattccaatgtcaaaatccaaaattgcaccgtacagaactgtgataatcatgcgattgataatattgggacttttcttccattatcgagttacaaacccagttgaaagtgcttttcctctttggttgacttctatcatctgtgagatctggtttgcattttcctgggtgctagatcagttccctaaatggagtcctatcaataggcaaacttttattgacaatttgtctgcaaggtttgaaagagagggtgaacccaatgaacttgctgctgttgatttctttgtcagtacagtggatcctttgaaagagccaccattgatcacagcttatacagtgctttctatccttgcggttgactatccagtagataaagtatcctgttatgtgtcagatgat

SEQ ID NO: 88094 - DNA, 496 bp, Glycine max
  Clone ID: PAT_MRT3847_50557C.1
agaaaaggggcgtggggggtcccttatcacaaaaaaaagagccgatcttggttcctttcctttgacaaaaaaaatacggttcaaattccgctctaattacacataaatgaactagggaaaaacgagccaccgtaacaaaacaaagctaagtatgtttgacaggtttttctcaaagcctgagccctccacaacaaaccgtgacatgggctactattctaccaacatgatgtttagaacctgaacacaacgaatgctacctaacaaacctagccacggacttggaaatttgttaaaatttctacatccacaaggaaacttgtcactaacagagaggggcccatgaaaagcctccaattggacaaaaacagtgaaggaggttttgcagggaaaaaaaccgcccgaattccatccgggtggctgaaaaagggaaaattcacgccgttcctaaaacaccgacgggggacccgaagccacccccgccgcggaacggcccttt

SEQ ID NO: 88095 - DNA, 193 bp, Glycine max
  Clone ID: PAT_MRT3847_50558C.1
agaaagggtatgcgctttttttatttcggctaaacaataaaatgggagtggctgtttttacccctgaagttggagttatttgatatttaaataacttggactgaccggggtgactgggattgtgaatgtcgatgttgcgtgctcctgattgtggttattatgcatgacgggcttaaagatttattttttaact

SEQ ID NO: 88096 - DNA, 244 bp, Glycine max
  Clone ID: PAT_MRT3847_50559C.1
aaaaaaccaaaaaaaaccccattttccattaatcataataccaaaccaaattgcaccccaaaatatggaccaaattaccatatcctgaacttgttggatctttaaaaaaaacctatccatcatgacattgtttccattccatcctaaaaaggaaccaaaaaacacagttggaacaacatttttatgaaattaaatcacccaaaaaatgccgggtcatagccattgctattgggggccaaaattt

SEQ ID NO: 88097 - DNA, 261 bp, Glycine max
  Clone ID: PAT_MRT3847_5055C.1
acggctgcgagaagacgacagatgggttccccgatgattccagcagctgtctgtcaaatggaaaaaagaagggaaaatggagtaaatcaataacaacattgattcaatcctagtacaaattataccaaaaataatgccttccaacatgatacccaaatatttcattttagttacaagttacaaattacaactaacaaaagcgaatgattttcaatagtaaaaaaacagaaacaagatttagcaccaaataagcagagaacg

SEQ ID NO: 88098 - DNA, 274 bp, Glycine max
  Clone ID: PAT_MRT3847_50560C.1
atttaaaattaatattataacccttttggggggtaaaattttaatgtggttcacgttttttacgatacataatctgtatataaaaaaagtatatttattttatgacaaatgaagtaaaatttgaaggaaaaaaaataataagaaacattgtcagttggccgaagtatatacagttttattttttccttcatgaccttaaaggatattggtgaaatcttgacactgctacgagtcattatccaatttttaattattcatacgaaagcgtatgcaa

SEQ ID NO: 88099 - DNA, 379 bp, Glycine max
  Clone ID: PAT_MRT3847_50561C.1
ctagtcgctgccccctttttttttttccatacatattttttttttataaaatcaaaataaaattggttccggtttcattattaatatcaatccacactctcccatataatataatgtttaactcaataagcactcactaactctttaccatgcatactcaccgaaaaaagagcaatcccatttctgatacacaacctgaaccagatcaaggaacatatcccatcaagggccttttcattctcgttcacccctaaatattttatcttcctatattattaaattgttgtaatatcctattaaattactaacttaaacgcaccataaaacttatgtaaaacttcaactgcgtcattccactgttcaaataaggtcctaaaga

SEQ ID NO: 88100 - DNA, 266 bp, Glycine max
  Clone ID: PAT_MRT3847_50562C.1
cacataacttttacacacagtttatcaacccgaaacatctacactcctttacgaactttttaaactccaagaggagaatcacaatttatcacaaaagctaacacaagcataggaaaaactccaaaaaatccaagcaaaaactatccgaacctgataaacaactcactcctctcggacaacgaataaccatctaatctaaactgctaaccaccaatgaaacctctctgcaccaaacacagactaatcccaacgctgctcaacaaaca

SEQ ID NO: 88101 - DNA, 558 bp, Glycine max
  Clone ID: PAT_MRT3847_50563C.1
aaatatagaaataattctaaattaaatcagctagaaatgaaaataaggaaaaaataaatatctcatggtataacgttattaataagtggaagcagtaaattcatctgtagagtctacacataactctttggaagatgttttgccatcaaaattttttctttccacatagaatgctggtcttcggggtaaggtaactggtgcactttcatttgttaacattgatatgacattagacattgtaggtcgatcatttgcatagtgttctacgcataagagaccaacatggatgcatcttttcacttcatcaggatcaacagagtcatttagtgatgggtccaataactgtagagactcaccttgattccataattcccatgcatgtccgattaggtttaaaaggtggtcaacatcatagaagctagtgttttttctcccactgacaatttcaagtagcaacactccaaagctatagacatcagattttgtcgagaaagttccttccatggcatattcaggagacatgtacccatatgtcccaacaatcctactagtagttcc

SEQ ID NO: 88102 - DNA, 2082 bp, Glycine max
  Clone ID: PAT_MRT3847_50564C.1
acgagggaaaagccagacgcgtccgctcgagtgagagaaaccctagagagagaaacagagagaggaatggaagagcaaatcaagtccgaattcaaaagaagtggtttcggcctcgaagacgaacaagaaattctcagcaaatgtgtcacttactgcatcaactacagtctcactccttccgatctcgtctcaagctgggaagtttattacctcaatagacagctgaacgaaccaatagtacaaaatactgaaattgatggctttctgttgcatctacaaaatgagaagaaagagactgttataaaggaaaaggaggaagctggcttgcatatttactctatcggagatgtagaaatgatcttaaataatgatgatgatacaaaggataatactcccggaactccaataaatcatcatcaagatcctttatctcctgcacttgatacaacatctttaatgtatgagaatgttttatcttctggaaaaccatcaaaatcaaaactaataacacccttttcaaagagaacagataagtttgtggtgaaatttagcatcaacactgtccctaaagtagagaaggctgaaaatgatgaagatgatgttcttacaagagttccactccatgaaaggtgttcattatccattcacagatcaggacccaaaccaggttgcagatttttgtatgatagaacagaggataggcttaatgcaatagaaaaccgacttaggaaatatacaagggcatttgtagcttctgggctctatgaagaaccaacagaccctacaactgcttcacagagaagcatttttgctgttggcatgatttgttgtgatggagaaggccgtttaaatgagaagtctgtcatgctgcagagcagtattgagcattctggaggagaatgtgttcgcctagatttgcaacgtttaagccattattcaatttttcctggccagatagttggtattggagggcataatcccagtgggcattgcttcgttgcaactaaattggtggattctatacctacctacattgccaatgaggattcaaatcctgcaaagaagcaagctgttgataaggagaatcagccaactgatctgctttgtaaagaaagagaattatcaatgattattgcagctggcccctttactacaacagacaatttgttgtttgagcctcttatagcactgctgacacatgcaaaactaagaccaccacagttgcttgtattgctgggaccatttgttgattctgagcacccagacattaagaaaggaactgtagacaggagttttgatgaaatatttgaggaaatcctgaagaagttggaagaatatgtagattcagctacgcgtgttgttcttgttccgtctatacgtgatgctaaccatgattttgtttttcctcagcctgcattggacatgaaatctcagatagtcagtctcagtaatcctggaatctttgaggcaaataaggttaaggttggttgctgcaccgtggatattctgaagcaaatcagtggggaggagatatcacgaactgcagcagatggaaaacccattgatcgcttgagtagactagcaaaccatattcttaaccaacaaagcttctatccactttacccaccagcagaaggtgttcccttggacttttcgcttgctccagaagcccttcaactgtcgtcgattccagacatacttatactaccttcagacatcaagtactttgtcaaggtgcttagtagcgaaaatgaagggattaaccacacgaaatgcatagccgtcaatccgggaagactagccaagggagaaggagggggaacttttgttgagcttgattattgtgggggttccgaccaaattaacgcttcagttgttggcatatgaatattgaagatgtgttttttttaaggtaaccatttagtttagctatagtcgctgaggcacagaaactgcttatgactcgtgcaccgttatattatatagtttgtaacctgcataatttaagtttgttaaacgaaaattgtaaagttaattccttcaaaaaaccacacaggccggaccagccatttaattgacgaa

SEQ ID NO: 88103 - DNA, 426 bp, Glycine max
  Clone ID: PAT_MRT3847_50565C.1
aaaaaaaaaaacgggattcccctgcaaattggggggccaaaaaaaaggccccttttggcaacggggttctttttattttaacaaccgctaatccccgggaacaaatttgaaaaaccctaacctaccctttaacaaggcccggccctaaaaaatttacccctgccccaagggccctcagggggaggggggggaaaaacttttccccgattcaccccccccatttttatgctttaaaggaaaggaaaaggaaaggggccccataaaaaaattttttttggcccccccccccgagttactgggggaaaacaggggcccgttgggaaaccccgcctttgacaacccacaaggattcccacccggaaaattttgggaaaatccttcaaaaaaacgggaaacggaaaccttgggaaagttgaaacgggccca

SEQ ID NO: 88104 - DNA, 899 bp, Glycine max
  Clone ID: PAT_MRT3847_50566C.1
tacggctggagaagacgacagaaggggatactaaataataataatagatttatgactagacccatgagactcttgctagctatataaatactttcatcttgacatttctaaaaccatagcccactcatatccataaacacaaataagcactggtgaccttggagagaaaaaaaaaattaagatcaaaatgcctgtgttcatccctaggattgagtacaagactctgggtccgaatacaatcgtcaccgaaaatcaaataagggaaatattgagaaaagcagatagtaatggagacggtcgtttgagcaaagaagaacttaagaaagctttcaaagaatttggatccaagatgcccggatggagagcatgtcgtcttctaaggaaagctgacaccaaccacgacggagtactcaccatggaagaacttgacaccattgttgattttgctcttgctaggtacacattcaggaagtaaatatatatgcatgatatgatatcatcacgcccatatgccttaatcccaaagcatctaaatgaggcgcatgtacgtctataactaattatttatggtagaataatatgagctagcaggctatatgatcggcctctactttgtataatcaaaactaggatataatggaagcatgtttgcttcttggtcgggtagatatctttaccagtattaggtttaggtcatgtctgatcgatcaagtttagtcttatttactatgggtgcatttggaagttggatcaagttaagtctaacttatgcacactttatttgagcttctcttatcataaaacactcgtacgtgtaagtgtttatttgtgattatattaataagttattttcagttgtttttttatccaaaaaaaaaaaaaaaagacttaaacaccaa

SEQ ID NO: 88105 - DNA, 263 bp, Glycine max
  Clone ID: PAT_MRT3847_50567C.1
tcttgatctatggtagaacaagaacataaaaggatgtttctgttgagagctggtgttcttggatgatggaaccactatcctgacattacttgagccaaaaacaccagctctcaacagaaacatccttttatgttcttgatctatggtagaacagggtggattgggggtttgctggggaaattgtgtgaaaagcaaggaattccgtatgaatatggcaacggtcgcctagaggaccgctcctcactcttggctgatcttcagaa

SEQ ID NO: 88106 - DNA, 437 bp, Glycine max
  unsure (1)..(437): unsure at all n locations
  Clone ID: PAT_MRT3847_50568C.1
cttctnctatgcgataacccgattatatatatactcaaaggactactcaaatagctgtgatagaccaaggcaccacctaaacgagagagctgcttaatctattgtccaacactggacaacccaacaacgacgttatacataggaatttgaaactatcctccagaagaaggtgttgcacgaacaaaaaccactttagaccaaatattaataccactacgggcgttggtgaccagcaaatcccaaatagagtcttggggtgattatagtgaggactatcagccagaatcacagggccaaacaacattgcaatccaaatacccttgacttgcaaaagaataaagataccaagcactaatcccaccgggaaacctatgagggaaaaacaccctatgcgcacatgcgctacaatgctgtgccaaactgctccaacagccact

SEQ ID NO: 88107 - DNA, 136 bp, Glycine max
  Clone ID: PAT_MRT3847_50569C.1
aaaaactggtagtcaagactgttttccaaaccatttattacataattggtaattcttaaggacctcaaacaaaaaatcccctgaaaaccaaggcttttgaatttcacacaaaggattccctttaaaaacctatttt

SEQ ID NO: 88108 - DNA, 619 bp, Glycine max
  Clone ID: PAT_MRT3847_5056C.1
gtactgacaactagtgtgtatatcttatttattaattataaatttcatggctgggtcaagtaacacataggctgaactatattattgttgccattatctctttagtttgtattaacagctgactaattttattggaagcatgcagatacttgtgggtatgatatacagaaggtacaaaaagacttcttatgcggggttcatatcagtatctacatatttatatattttttgcgagaagacgacacaagggggatcgaaacaatgtaaatttgacaaggatacttttcatttgtttatttttcctggtttatcaagtaaaatgacatggagattattaatgatcatggagattattaagcatgcagatacttgtgtttcctagtgtcatttctaatttccatggcatcatttttgtgcatttagaattagcacttgttacctaagcctaataaaatatttattgcaatcatccagagcttgaggaaactactagatcgatcaaatatggcttcaggcaaaaggacagctgttgttggtgattcggctggtagagtaagtatgaataccaagattatttatttaagttggaagctcagcccagattaataatgctactttc

SEQ ID NO: 88109 - DNA, 734 bp, Glycine max
  unsure (1)..(734): unsure at all n locations
  Clone ID: PAT_MRT3847_50570C.1
gacaagaaatatcaatcatatattatgaaaaaatgggcatacaggttcacatgtcagttactgagagtagaaataagtaaagaaagatatatatattaggggngggggactacatacttcatttctctagcttctaatcagctgaacaagtagttttacattggtctcagttaaccaaatcaaaagttgatgcctgtgagttaatagatactaagccttgtgccctctgaatcttgaatgtatgtcagcatacttccccttctccgtcatttgtcttatcacttcatgagcatcagcagtctttccagcattcctcaaacaactcgctaatgtattatagacaaatgaatttggactacaacctttggtcttcatttccttgagcattgagcacgcttcatcaaattttcctgccatacataatccctgaattatggaattgtatgtaaaaacatttggaacttgttctctagaaatcatatattgatacattttcagtgctttctcaatctcaccagccactacatatcctgttatcattacagtgtaagccaccacatctgggatgcatccattctttatcatttcatcaaaaaagtatttgcaagcatccagattcccagctctgctgagtccatctatcaatgtagtgaaatgaagcaccgttggttctatacccatttctctcatgtgatttaaaagattgagagctgcaaacggtttgtccctcgtgc

SEQ ID NO: 88110 - DNA, 318 bp, Glycine max
  Clone ID: PAT_MRT3847_50571C.1
ggttgtgtattctttttatccttaacatgcatcgcctcataccctgggggaaagcccgcaccccccccttaaagcataaaaaattccacatcatccaattttctaaggggggtttttttggggggtaaaaaaaaacggcctgaaagcttagccaccccggggtgggcccattaacctctttcttttaaaatctcccctttattggggcggggggggaaaaatttcctccccggtttttagggcccctttttttagggggtggttttgatgtccaccaacttaattgccttttgggtccctccctttttttttttgggt

SEQ ID NO: 88111 - DNA, 320 bp, Glycine max
  Clone ID: PAT_MRT3847_50572C.1
gcaacaatccaccaccctactaacacacccccccacaaaagagacaagcggggggccccttggaaaagggagcggggtttactaaggaaaagccacaaaagcaaagaccaactcccaggccacaggacggaacaccaccaagctccaggaacccggcagagcccccgccagaccaagccaaatggaaacacaaacgaagaacccctacccccacagccggaagcaaaagcgcagacgggaaatgcacaagctgaaacacaaaaagggaagccatcaccaaccgccgcacacgagaacccggcggacgcataagaaacccg

SEQ ID NO: 88112 - DNA, 1080 bp, Glycine max
  Clone ID: PAT_MRT3847_50573C.1
gggaagaagtgagagagaagtaagatgagaagaaagagagtgagtttgaagataagaagtagtaagagacttagcaagaagcttcttccaccttatgcttcctatgctctggtagccattgtgctgtttttgttaggcgttttcttttactctgtctcctctgcttcatctccgccaaatcacccttctaattctctccccatcaccaaccactcttctctttccacttccacggagcttcctcattccatctcattcaccaaccactcctccctttccgcttctccgcctccaccagtttatgtctatgagaaaccatgtgactacagcgatggcagatgggtccgtaccaaaagaggtcctctatatgatggttccaaatgtctccagatgaaagcaaagcagaattgtattgccaatggaaggcctgatttggggtaccttttctggaggtggaaaccaagtgaatgccatcttccaaggtttgaccctaacacttttctccaactcataagcaacaagcacatagcttttattggagactctctggccaggaaccacctagagtccctcctttgctttttagccactactgaaaaactacaaggattcacccaattccaagaaggttatactcggtggctctttcgttctcacaaggcaaccgtgtccttctattggtccccttttcttgtagatggtgttccaagaaaaaatccgggactcccttataacaaaattcatttggatcgtgctaatatgaagtgggaaaaggatttggatcaaatagacatcatagtgttgtccttagggcattggtttttagttccttcggtattctattggcgtgacaaagttataggatgtgtgagccatcctgtttctaattgcaccaaagacattggtgtttatgttccaataagaagggccttaaggactgctcttaatagcataattaagaggaaggtgaaaagaggaaatggaattgatgtaattgtgagaacatactcaccttctcatttgaaggtggatgggataaggtggtacttgtgcaagtctaagcctatggagtgggggaga

SEQ ID NO: 88113 - DNA, 420 bp, Glycine max
  Clone ID: PAT_MRT3847_50574C.1
ctggtatgggaattaattaccgggccgactagctgcacggccggcctggtcgtctttttttttttttttgcttgtttaaattctaggaaagtaatagctaacgattaaacagtgttagataacggaaccgtaagaattaaggccgcggggaaaaagaggtgatagactggaaaattaaaagcaatactctgcgatacatgcgcatggcgcaagagagtacctgagatgagttggaccatgagaagtaaagaacaaactagcgaacttcgacatagcgctattggaccaaacagcttagttctagaccgagcaaatgctaacggacgagaccattcctgaagcggaaaattcaccatctttggacgcacggtgacccaaccccatcctcatgtgccagccgccaagaaacaggacctaaac

SEQ ID NO: 88114 - DNA, 234 bp, Glycine max
  Clone ID: PAT_MRT3847_50575C.1
cccacgcgtgcgctgacgcgtccggccacacgtccgatcacgcattcgggtcgatatgccctgccgtcaccagcaagatcgcgtattcgagatggactacgaaaacccttgtctctgaaatcgacagccgaatagtgaagtgtactaagcgaagccattgcaggcttgagaacgggcatgaaagccgaagggacaaggaatggttagaaggcatggacggctgacattatctcc

SEQ ID NO: 88115 - DNA, 261 bp, Glycine max
  Clone ID: PAT_MRT3847_50576C.1
acggctgcgagaagacgacagaagggattcatccactctgcgtgtgaaacttagttcttctcgaatcccagtgttttgaacagtttggagcttaatctcgtcataagtatctttaggtatgcaggaacatgctaacccaaattctgcacatctcccgacttcatccaaagcacaatctactgcattctgaaatgcatctgaattgctctgctttacaacattagagaaatgagtcctaaagagctttagctgagatgactc

SEQ ID NO: 88116 - DNA, 250 bp, Glycine max
  Clone ID: PAT_MRT3847_50577C.1
agttctagatcgcgagcggccgacctttcttttttttcacttttttttcttttttttttcttaggatttccatcacttaaagcattaccaccatccttttttctttcctctctcatctctatctctttccattctccatcaaccccaaagtggcacggaaaacatggaaaccaccaaggtctccaaaatcaaccaagcgcattctttcggctgcccctaattgcatgactacagccctagcacacacact

SEQ ID NO: 88117 - DNA, 391 bp, Glycine max
  Clone ID: PAT_MRT3847_50578C.1
gaaacatgaaaggttcaacaaatactattgggggccctttttgttcaaacattaaaccccccttaaactgaaaacaaatttaaaaaaaaaagcccagtaacttttgacaagggttttacccatccggggggtttttacttttgcatatggggctaaatttaatggttacaagggatgggaaaatttttaaaatgaaaattgcataaacttacaaccaacagttaaaaacaaatcctaaaaccctaaatttaagccatttctgcattgatacctgattccaaaaaaaaaaagcccctttgcacaaattaaatccctaccatgtatctttggggatatatgggttgtaataaaaagtaacaaccctgccgtttaaaccattggttttcacact

SEQ ID NO: 88118 - DNA, 368 bp, Glycine max
  Clone ID: PAT_MRT3847_50579C.1
gaaacataaaaggtttaccaaaaactattgggggccctttttgttaaaacattaaaccccccataaactgaaaacaaatttaaaaaaaaaagccaagtaacttttgacaagggttttacacatccggggggtttttacttttgcaaatggggctaaatttcatggttacaagggttgtgaaattttttaaaaagaaaattgcataaacttacaaccaacagttaaaaacaaatcctaaaaccataaatataagccatttctgcattgaaacctgataccaaaaaaaaaaagccccattgcacaaattaaacccaaaccatgtatctttggggaaatatgggttgaaaaaaaaagtaacacccctgccg

SEQ ID NO: 88119 - DNA, 482 bp, Glycine max
  Clone ID: PAT_MRT3847_5057C.1
ccgacttcgactatctcctggtttggacgagaactgccactctacatgtgtagctacaatgctttccttttggagcatgcatagccagaacgcatccaattgtaaatcatatacttagagtttgcaatgaactaactcacacggaacgaacaggggttgctttgaaaccgcataaccctgcaatccaatcacctacattgaattggttaattgacaacccacgaacgccgaggggggttattccttgaccgccctcttggacaaaagcataatggccaacatggcattactggcatgcttaaccccatccaatttcaatctttccaggttctctgtatccgcattggacactccatccttgatagcgcccgcatagcccaaaggtacaaaaaagctgcctcctggagagcctggctcaccagcggcatgggcacagatgctagctgtgcgctgacatggagagctccattccactgaccgtg

SEQ ID NO: 88120 - DNA, 249 bp, Glycine max
  Clone ID: PAT_MRT3847_50580C.1
gtttagatcgcgagcgttcccctctatgtttttttttgaattggggtgattatcaataaggatgaattaataatgcatggggggcgatgtacgtaacaaaaggtgacagtaataacatccatgcgtgtaactttggaacgactgagtccagacatcaactatcataggtgcggcactcataagtctctgcattgaccttgcaataattttcaagcaggtcaaaccgcttctgcttctcaatagcgtggc

SEQ ID NO: 88121 - DNA, 141 bp, Glycine max
  Clone ID: PAT_MRT3847_50581C.1
ggccggcctttttttttttttttttttttgtttcggtaactggcgctgcctcagtggggatcacgactggaacgttttccacctggcacctaacggcaggcagaatatccctattctaatccttgtattgtcggtaagtta

SEQ ID NO: 88122 - DNA, 299 bp, Glycine max
  Clone ID: PAT_MRT3847_50582C.1
acgtggacgcgtgggcggacgcctgggagcagaatgtgatttcttcaagagaaacttgaagcagatgtctaaagttatgagggtggttacagaggacaaggtgtgtttatggaacacaacataattatgtatcgagtaataaatctggaaaagctagaaacttaatcttgccaatattcgtaaatgtgtacctaagaaatggtatatgcacagttcaaaaggaagttcgccaatttgtgaaggaaaagctctcttctctgatttgtaaggggctgcaaaaagcttatgatgtcctacca

SEQ ID NO: 88123 - DNA, 452 bp, Glycine max
  unsure (1)..(452): unsure at all n locations
  Clone ID: PAT_MRT3847_50583C.1
ggggggggggggggngccgccgaagaagacacgaggggggggggcggcacagaaaaaaaccggaaccgccaacaaaacaacaaaacgcggaacaaaggaaagaaaaccngaggggaggggaaggggcaaaaacacagaaggcacggaccagccacagaggggggggggggaaanncannnannnnaaaaaaaannaaccacncaacagagggagaaaaagaacaaccaagggccaaaggcgaaggcagancgggcnaaacaaaacaaagcaaacggaggcgaaacacgggaagaaaggagcangngacagacacgcgcccaaaagcaaacacgccaggaagaaaaangggaggcagcaacagagcaagaaaacnccgacgcaaaaggggcgaaggagaacaaaacgggggaggcgcggaacgaaaaaccgacagagnaacaggcaacccagg

SEQ ID NO: 88124 - DNA, 354 bp, Glycine max
  Clone ID: PAT_MRT3847_50584C.1
gttcttgcgcattcattttcagcttatgatactagaagaagggtgtgcgaaaatgcagttgtttcaggcatctaacgatagagaagatgagaatgcaaagattgacgaagctggcgtggatctgaaagtgatgattgaagaaatggaatccatggctgagccttcagatggcatatgaccaatctgccttgaaccaatgcaagaccctgtgacccttcgcactggtcaaacctacgacagatacaacatccttaaatggctctcacttggtcactgaacatgtcccacagcaatgctagagctgtgacacgatgttgtcactctcaacagcacactttggcacttgatgttgac

SEQ ID NO: 88125 - DNA, 253 bp, Glycine max
  Clone ID: PAT_MRT3847_50585C.1
ttaatttactatattcatttttgaaaaacgatgttattatcttcattttctatcatatgcacactcaatcacaagtctgcatgccttttatatagaaactaattctatcagttaacttacattcccatgttaaatacaatattttcaaggtccaaatgaaggaggtagaaaagagaaattctctcataatcatgaacacggagcagtgattagtgcatgctccaagaattagttagtagcctaaaattgatgt

SEQ ID NO: 88126 - DNA, 160 bp, Glycine max
  Clone ID: PAT_MRT3847_50586C.1
aacaccaatggcaaacattcttcttttataaataagaaatacgtaaaatggttgcactcatttttactatgtaccagggaaaccaccgacggggagcacacctcacaaaatttctcttttactaatgcaagagaggggtagtccatcagcaatgagtgac

SEQ ID NO: 88127 - DNA, 418 bp, Glycine max
  Clone ID: PAT_MRT3847_50587C.1
tgggaatcaaagataatattagaagtttacactaactcatgtaactatttaatcaattgagctaaatctctttacactgtgaggtgtttaaatagctatttgtatatcaagttaataacttaatcaagagtgagactaactaaatatattgggtttacaggtatgaatttcaaatgcagtatggatcaataggttggtcggttggtgcaactcttggttatgcacaggctgctccccataagagagtgattgcttgtattggcgatggtagcttccaggtcattcattcaaattcactgcttgcatttatcatataaatttattgcgtataactcatgacattacctcattcttttcctgaagaataaagacccttctgtcgtcttctcgcagccggacgcgtgggcggacgcgtggg

SEQ ID NO: 88128 - DNA, 796 bp, Glycine max
  Clone ID: PAT_MRT3847_50588C.1
attttgaatgcagtactggatataagaaagagactcttctagagaaacacttggtactctcttctttccattcctctcatggatttcctcacacttgtttatatgcatgaattaggactatacttacacacatggaccaatagactccattgagatctatcaaacaccaaattttcagtaaaatgatttagagcaaaatcttttttaatgggataaggattaattgttgttcaatcaacattatgccttggagaatgagaactaggaaatcatctgtcaaactggtaatgagacatgcagcgtttcattgtagtgaaatcatccttctgaactgctgaagtcagataatgaacttgaacattcaatgaaacttcttgtcttgaagaagttcgttttggttgcagtgcttatgatcttggtcttactgcaacattcattaaccttgctgccaggactattcatcatagttagttttttcttcaggtaaagcgggaagatgttttctggcgaactgggataaagaggagcacaagaagtcagtcaaataaagtagttgatcctgaccacaatctgaggcacatattgacattgccaccgaagctacaagctgaaacagacaaatccttggaatctgtttctcttggtagtagttgctcacctgctccatctggccagaagattccactttacagtgtagcacacagcagagctggagataaaggaaatgacattaattttttccctcatcccacatttttcctcctgattatgagaggttgaaactaaatattacatc

SEQ ID NO: 88129 - DNA, 443 bp, Glycine max
  Clone ID: PAT_MRT3847_50589C.1
cttgttggtattggacttggtggttaacccaccaccccttggtttaggtctgcagttgccttttttttaggagatataaactaaaatatttgttcagaaattggaaaaggcaccaaagtcgcttttcttaccgaattttacccttttcaaaaaactggactgcctgagggtttgggggctaaaaaccaaaaatttgtttctttcgccccctaaccaatgctgactaaacttcttgaaaactgccaaactttgaaataaaaagcattttattgccctttcccattgggggagcaattttttttgttttattcggtgagcgaaggtccattgctaaattcatccagcgcgggggggtgtaaccgccccgttccttaccgaattgtcattataccacccccgtttttgaagggaattgggtttttcctgggagtggggcttgcccc

SEQ ID NO: 88130 - DNA, 352 bp, Glycine max
  unsure (1)..(352): unsure at all n locations
  Clone ID: PAT_MRT3847_5058C.1
gaantttgggctgattgatgtgcttgcatggtcggagaagatgatagaagggaagactggtgcgtggagaagtcgaaaacgaacagcgaaggagacgacaccctaggcgacgaggaggtcaaatgaacggaccactactaaagcgacagcgcagccatattactcgagtaaaagaagttcgagaccgaaccgtggaataaggtctccgaactttctaaagtaaagaagggtacgaacaatcaaacgtactatacttaagccccacgccgccccgcgtcccaaaaatccaccgagaaacactccagtccgcccaagaaatccggccccgtaaacgccacgcccacccacctac

SEQ ID NO: 88131 - DNA, 1552 bp, Glycine max
  unsure (1)..(1552): unsure at all n locations
  Clone ID: PAT_MRT3847_50590C.1
ctgttaacggactatctacagagcagcgcaaaaggttgactatttctgttgagctagtggctaatccttctatcatattcatggatgagccaacttctgggctagatgcaagagctgctgctgttgttatgagggctattaggaaaatagtggacactggaagaacagttgtctgcaccatccatcagcctagcattgatatatttgaatcttttgacgagctttttctaatgaaacgaggaggacaagagatatatgtggggccacttggacatcattcttatcatttaatcagttactttgagggaattaaaggtgtccgtacaattgaggatggctacaatccagcaacctggatgttggaagtcacaacttcagcaaaagaaatggaattggggattgatttcgctgagctgtataaaaattcagacttatacaggagaaacaaggaacttattgaagaattgagtactccagccccgggttcaaaggacctttatttttcttcaaagtactctaggtcctttattacccaatgcatggcttgcttatggaaacaacattggtcttactggcgcaataatgaatacaccgccctaagatttctctttacaattgctgttgccttgttgtttgggagcatatattggaaccttggctccaaaatcaaaaagcaacaagatcttttcaatgccatgggatccatgtatgctgctgttcttcttcttggtattaagaattctaattcagcacaaccgttggtggcagttgaaagaacagtgttttatagggaaaaagctgctggaatgtattcagctttggcatatgcttttgctcaggttgtagtcgaactacctcatgttcttctacaaactgtggtctatagtgctatagtgtacgcaatgattggttttgagtggtctgtcactaaatttttctggtatctcttctacatgtacttcaccttcctctactttacctattatggcatgatgtctgctgccatgaccccaaacccatccttagcgggtataatttcttctggattctatgaagtatggaatctcttctcacggttcataatcccacgaccaaggatgcctgtctggtggagatggtattattgggcaaatccagtagcttggactttgtatgggctggtgacatcacagtttggagatatacaagaccatattgagtttaatggtagaagtacgacagttgaagactttttgagaaattactttggttttaagcatgattttttgggagtagttgcagctgtacttataggatttgcagtaacttttgcattgatctttgccattgccataaagatgttaaatttccaaagacgttaagaatgacattcaacttttggttaggatattctggttaacatgcaataatttgtacaggaaaaaaagcatggttttctcacttttctgtattctcttatttctattaaaaagtgtatcatataatatcacttttgaatacatttgtaaattaatccattggaagaaattgctanntcaancataatcttttg

SEQ ID NO: 88132 - DNA, 483 bp, Glycine max
  Clone ID: PAT_MRT3847_50591C.1
ctgcttgggggggggggggggaacattggacaataatgttgttaaagggttaaaggcgggagttagaagcaaaacaagcagcgaaactgagcgatgacgaggatgagtattacaccaaacagaatacaattaaacgcacaatgcaattagggaggtagttggtgtaaaagggttgaaagtttgttagaacaagctggcacgtgaggaattaggggccggccgcgtattaagtaaacgctggctaagcagccgcctcagcgtgagcggtagttaactttaactatgctataatacccgaatagcgcataaatagctattgcttgagattgtccaatagctatcggctgctatcatacccctaatcataatagagtaggaatggcggctctggcggtatgggatgatgatgtggttgtggtagtgttggctgatctggtgcttgtgtaatggcggcagttagggtggcaacgtggcaatggggcc

SEQ ID NO: 88133 - DNA, 300 bp, Glycine max
  Clone ID: PAT_MRT3847_50592C.1
ggccagaaacattttaaaacctaaattttcaaaatgttgcatcataaaaacaagatcaaactgatgagtgagagtttcaaatgccatgtcaatagaaacatcgaattaaaagacctaatcatccataacctgtattctttaggtggaatatacttgcaggatccaatatgcatgtattcctgaaaactagaaagacttggatgacattaacaaacaaacttgcccaataattttgaccaactcaaacttttttggtggaaccgacaaaaagattgtgtaggatatgatacacataaattt

SEQ ID NO: 88134 - DNA, 232 bp, Glycine max
  Clone ID: PAT_MRT3847_50593C.1
gcgaaatacactgaatgcagcattcatagtaatgtctgtaattataaggctagcatatcatactagatcagggtgtcatagtactaccatgcgtcgctgacacctcatttgtcgcataaagacgactgttgacagaagactcctctgacgtaacatcacctgattccgaatagtattcttctaacccctgcatgatacactactacaaccctgtttaattgttcgacctcat

SEQ ID NO: 88135 - DNA, 166 bp, Glycine max
  Clone ID: PAT_MRT3847_50594C.1
tctaaaatccaagtccacacgggattaatatagacattatagcttaaaaatccaagtccacatgcgagtccgatagtaaattatcatctatatgatcacaagatttgtgaggaacagaaattgcttatgcttaatactttagtagtctcatagtccataaggctaa

SEQ ID NO: 88136 - DNA, 273 bp, Glycine max
  unsure (1)..(273): unsure at all n locations
  Clone ID: PAT_MRT3847_50595C.1
cttattacnactttccttagttcaatatggcncaagcccttcttcantctntcnctncnntccctttggcttgctantcttgtncgagtgcatgntttgctattacttccagcaagtncaacgacganccaantcaacaacctcaanggttggaacccgancaccgcgtngagtccgaaggtggtcttattgaaacatggaatctcaacaccctgagctgcnngcgccggtgtcactgnttccanacgcncncnctgaacnacggcntccanc

SEQ ID NO: 88137 - DNA, 636 bp, Glycine max
  Clone ID: PAT_MRT3847_50596C.1
taggattcactttagtaaagtgctattgaagaaggaaaaaaaaagacaaatttctccaaactttttttaattttaattttttatattttggtttggtgagtgaaattactagattagcagcgaaattgataatgacggcagcataatccagatgtgaaagagggaggggtatttaggtcattgtgagagtgaccgaaggagggtggttaccgatttgattcttgtcttcctcgccactgttcccctgtctccataaccaaccaaccatacattaacaccaacactcaacctcactcagtcgctcgctcgctctcttcacaatttcgagatctgaaatcgaaatcgaaaccgaaactgaagagagagacaaaaaaatgagggagccatcgtcggtgggattcgaaggcaacggcgccgtttcttcgccgccgcaagctctcctcgagagactgaaagactacggtcaagaagacgctttcgccctctggtacgagctctcttacgaggaacgcgagtttctcatcaaggacattgagagtttagatctttcgagaattgaccggattattcggtgctcgctgcgatctcaaggactgccggcggcggccattgagcctgtgccggagagcagtgtgt

SEQ ID NO: 88138 - DNA, 486 bp, Glycine max
  Clone ID: PAT_MRT3847_50597C.1
atgactaagtagcagttaatgagtaaacatctggaaatacacaaaccaaagtaaaacctttttcaaggaccaaaaccaccctagtacccctaggtcaaatactaaacttccaaaaacactaaataaataaaaactagaaaggagaaacaaattttaaaaaaagaaagcataaaatgcaccaagaaagtcttttgcatagtaatacacaaaattaaaatttgttgcctcaggaaatgtagcaagggataaccataaactaatgccaaataatacaagggtcgtgtaatatgattcgggacagttatacacagtcattaagatcttcaaattggaatcataaagaaataaaaaaaataaaaacgctgacagttgttttatcctaaagacatccttaataataaataaataaataaaaccatttatgtcatatatcaagatttttttttttggtaaccatgttatgttattgatatggaatgtccattg

SEQ ID NO: 88139 - DNA, 391 bp, Glycine max
  Clone ID: PAT_MRT3847_50598C.1
cgaagggagagatactttctggtgggataattcttgacaaacctatgacgcgctgcttcactattctacctatggagtttaatctgagtgagccgtcagaggggtgtaaattctgagaggtgcattgtgaagaaaagggacaagcttagttgtcaagtaggattcaacccatactccatggaatggactgggttggccaatagattactgagtaagggcaacgatattctgtgttgcgattatgctagatttgaaggctcgattaccatgcatgtgatgagctactgggcagaactgatactcagtgtttgtggtggcgatgcataattgatgcgtgtaatgtcacacctgctggtgacttgatgttcaaggatggcaatgtgtaagaaag

SEQ ID NO: 88140 - DNA, 385 bp, Glycine max
  Clone ID: PAT_MRT3847_50599C.1
aatctctacacacccaacaaatataacttccatccctaaatccacacatctttatgaaacatgttctcactacattcttcaacattacttcacttcacctataaaataactaacccttctcccacagctctatttattaccactcctccatttcaaccaaaatttaacacagtccttttttaccaacccacattcttaccacattaattaatatatttcctaattttccaaccatttattcttaaatttatttaactccaacccccctttaatttttttatttagatcaccccctcatatacaattacaaaatatttcccataaattaccatttttaacttctaatcccacacccccccctcatatttatataaccaacttttaa

SEQ ID NO: 88141 - DNA, 590 bp, Glycine max
  Clone ID: PAT_MRT3847_5059C.1
gggccaaaccaaacccccccgcccaattaaattaacccttaatgggaaaaaaggggcaaaaaggggatggacatggaaaaacccaaggccctaggggggggaaaaagagggcccccaaaaacacccttggaaagccaaaaaaaagggaaatcgggaaggattagggaaggccccaaaacattaggcagtggcaggatgggggggggacgggcccattggggcagggaattccccatgggaaaaacattttttacaggggggttttacccccaaaaaacaaaagcggggtcaacaggggccgggttttaactttaaaaaaaggggtatagcaaagccccctttctttttaaggggaaaaagaggggaggccctaaggagcaaaaggcccgggctttcggggaaccaaaaaaatttctttccataaaaaaaaaaacccccctaaaagcgggggggaaccccccatgggaatctttaggccccccaatttaaaaggcaagccagcttcaaatttagggccgggatattaaggcaggaaaatcggaatgggattgggagcccaagccctaaaaaaggaagggaacacgggaagc

SEQ ID NO: 88142 - DNA, 704 bp, Glycine max
  Clone ID: PAT_MRT3847_505C.1
ggtaccctccgagtttggccgggatgatctctgaagcatttcctgacttgaaatgcgttgtgcttgaccgtcctcacgttctggagaacttgtccgaaagcaacaatttgacatatgttggtggggacatgttcaaatctattcctaaggctgatgcagttctgcttaagtggattcttcatgattggactgataaagactgcataaagatattagagaattgtaaagaagctatttcttcaaataatggcaaaagaggaaaaataatcgtcatagatatggtgatacaagaaaagcaagatgagcataaagttacagaactaaagctcctttgggatgtagccatggcatgtgtattaaatggaaaagagagaaatgaagaagaatggaagaaactcttcatggaagcagggttccaagactacaaaatatctcccttgaccgggtttctgtctcttattgagatctatccttagataattatgttttatttttttattttttattagtttcatgttatgaactgaattatgttgttgtaatatgtatttcttttggtacagaagttgtaatatgtatttgatattagttttagaacttatgaatatggaagaactagtggagcaaaggcactgggagaataatatctgttgttgtgcttctctctccgcacaaattcacatcatttgaatttggattgcgat

SEQ ID NO: 88143 - DNA, 272 bp, Glycine max
  Clone ID: PAT_MRT3847_50600C.1
ctctctgtctactctgtttactatttttggaccattacaacgaaacttacagaggctttgttcataatttccaaaaaaatattattaggttcacaaggcagaggatttgaacatttctggaaatgagggggaaaaaatcatttacatgttataagaatggatttgacgacatgcaataaaagacgtgtacttgagagaccaactccagtcattgttagcacgctacgttgatgatttagttactgatagactggctaaaagatggatcgcgt

SEQ ID NO: 88144 - DNA, 403 bp, Glycine max
  Clone ID: PAT_MRT3847_50601C.1
tttttctttttttttttctttttgtttgtgatttacttttttttttttattttgttatcttttgttttccccttcagctaacaatcccaggggggctccctttctttaaccaactttaccaaagaaaaaagtccttctcattctggtcaaacccggcaaaaacaaggggcacacgctcaagctcattttctcctcacgcgcctgcctcttcttctcccgtttctccaccgacttcttctccaaaaacatcctttaaaaaaatgccaccgccgttgtaataaaaccccgccccactaaaaaacaaatgccgaggatccggacagacctccacccccggtgttaagactctctttttttgcgccgcttttggagcaccagacccacttcttcctgctctggtaca

SEQ ID NO: 88145 - DNA, 1014 bp, Glycine max
  unsure (1)..(1014): unsure at all n locations
  Clone ID: PAT_MRT3847_50602C.1
ccaaagtatatgtatttgaccatttttatatgctggttggcgatcttaagtcaggtagagcaagttctagttccttgcccctctttcattttcctcttgcctaagtgtccttttttggaataaatctaatataggacgggttcctaattcgtagctttatacattgcattgatgtacacagctaatatactttaatgccacctcataatcttataagctaaaatgaacttataggacttaggagggtcataagtcacttttaataattttaaccaaaaacttccgattgttagttcaagtacttaaatgatgtatgtcatagagtcagttgatttggtctcaaatcataaatgtttgtaagatcttaactgtcaatcaaggttacaatgagctggtagtttcactacaccagcacagaaagaataaaactattataacagtaaacaaatagggattttgagctagagaaggaagggaattttgtctcccaaaagagtgttggagtagtttccagtgagaacttgtgatgccacatattgatttgcagcctcggtgtaatgagtcccgtcccagtttacatacacactgctgtcattgcaaccttttgctgttattgtggtcccattcaagatctttgttagcccacaagaaactcgactgtcaaagttcaatggtggacctccatatccacaacaagccataatgggttgttcaaacccatattttgaatagtctgcaatgtttaaccgtgtttgcccccaacaaatacaaaagaaactaagtcattttggcttatcctgatccctatattcaccactgacttggacacacttctagcattttaaggattgtaaacatatgctgcgatcaaatgattacagggtaaaaagaggaaggagactcttgagaaaacaaagctcnnnagaagaagaaaatgaattctcatagagtgttatgtagtgtatgtgcaagtcgttcttttatattcttccattgccaaatcatgtcacagtg

SEQ ID NO: 88146 - DNA, 309 bp, Glycine max
  Clone ID: PAT_MRT3847_50603C.1
cccacgcgtccgaggacgcttgggcggttgcgagaaaacaacagaaggggatgaaaggctggttgggcactccactgctggggctgctgctggaggattggctgttgtgggtaccacaccgcttgatgttgtcaacactttattgcagggttctggcgtctgttggtgagataggttcacaaacggatcaattggggatgttattaaaacaataatgaaaaaatatggttacctaaggctgatgctagggtggattcctaggatgctctttaatgctcctgcaggtggtatatgatggtcttcttatga

SEQ ID NO: 88147 - DNA, 381 bp, Glycine max
  Clone ID: PAT_MRT3847_50604C.1
tcggttagaattcctcttgccatatagtccaaaccctcaacaccattaagtggtgtacttggtgaaaaaggcaaaatgtgatatgcttcaggggatggtgtagagatgatctttagttctggcacacagtgttgtagaggctgacatcaagctaatagttgtacgtgacaaaagtgttcctacattggttggtactgaatttcccaaggatgagaaactttcttgttgcaaaatttttgacatacttaatatgcgcttgttcactatactgcctatggagattaatcttgtggaccgtcagaagtttttaaattttgcgaggttcataatgaagaaaaggtacaagattaactttcaagttggaattaactcatacttcat

SEQ ID NO: 88148 - DNA, 391 bp, Glycine max
  Clone ID: PAT_MRT3847_50605C.1
gccgtgtgctagcttttgtggcgtctttgtttgtgagcttgaacatacagtgtgtttaagtgttgacactccgaaaaacacccgaagcaaaaaaactcttatttttcagttcctcacatcccaagcctttataaataagttttaggcttgttttggggtacacaaggaacgtgtttcgcttgatcatttactagcatttcggggtgaacattttgttttcagcaaaaaagaaaaggagagaaatcaagaagaacatatggtggtgcctgagtctgagatgaattcccaaaacgaggtcgaatcgccgctacaattggagcagcagcaacaacaacacaacaacaagaacgatccattttcatcactgggaagacaatcttcttcgatatac

SEQ ID NO: 88149 - DNA, 465 bp, Glycine max
  Clone ID: PAT_MRT3847_50606C.1
gtttttggcagcataacaaacaaaatggctttcatgatttccagagctgaatcagaggcagagaagtctagccttaaacacatggaagacaaggactcgaccaacacacttgatggcgtctcaagccagctccagttgaagtcctcattgtcatccaaagcctcggcgcaaaccctgaacaaacaacaagttctcaatcgcattcgacaccgtaagtccttaaacagaatcaaaggcgcttttgagggtcttttgggcaactccaaaggtaatacaacttcagcacaagaccagatttggctccaacaagatgacgctttctcttctccttaaatatatgtaacccatcaactaagattattcccatatgactatcaacttatcgctttatctctgttactgttactttctttttgtatattgaatatcttagtactaaactactcaagttataatttatcgtca

SEQ ID NO: 88150 - DNA, 1422 bp, Glycine max
  Clone ID: PAT_MRT3847_50607C.1
aattaatattgattcgttaaattctgcaatcttgaaactttgattgtacaccagaccattatactttataatcttagcagttgaaacctaggacactgccaatggcatacaacatgatataatgtataattataagataaatttgcaacttgacaatgatatgatgtaaaattgcaaatacagcatgatataatataatgtgcttgaaaaatactcaataaacatggtgtattgtgcagaatcagaaactgaaaccatgataatgatgtgatccaaatacaacataatataatgttcttgaaataggcttaataaattgagaagcaaaagcaatgcatgttgccctcaaaccatgaaattgcattcctaatcaaaaggaagccacatcactccggtaatagaaaaggccagatggactaccattgggaagcaatgctagcctcacaggactagctgcaccttcttcaactgttaagaggccagtgttggaagttatatctgtcttgacataaccagggcaaacactattaatgcagaatgaagggtatttcttagcaaggattctagtatacgcattcatagcagctttagagacaatataggcacccagatgtcttggccacccattactttctaatgaaccttcttggaaatctctcaaaaacttcttcaatatttcatccactttctcttcagtgatgatattggcatcactgaagacttctctagcccatgatccttttggcaacctctctaactgccccatagttggatgatacattcacaattctcggtgaatcaaataactggaggaggggcagaagggattctacagttgttttagcaccatagtaatttatttgcaagcattcttcagccaactcatatgattgagtgattgcctttgtcacatcttcttctggtgctgccccacgcttcaagagaagtgaagtgaatgaatctgtgtctttaattacagctccaccaatccctgcattgttaaccagaatatcaagttttccaaatttagatttgataaaatctgccagagaagctacacttgttgcatcagccacatcaacttgatgaaacagtacaaggtgagatagacctgagtccttgagtgtttgcagtgcttggatacccctctcttcatttcttgcagtgagcaccaccttgattccagctgaagctaattgtctaactatctctaatccaattcctttatttgcacctgtcacaactgcatacctgacaaactcaacccccaccccaccaaggggaaagggttcaacaaatgtaaaatttaagttcagcagtagaattggaatttgggtgtttaaaaccaaacacaaaaaagataaaagaagaagctagaatgccaatgtgctacacctttctgtagtttctcccatcttcagt

SEQ ID NO: 88151 - DNA, 353 bp, Glycine max
  Clone ID: PAT_MRT3847_50608C.1
aataatggagattaatgacatgattacagggggctcactgggaaccaggttacatatttaatgttacttcttatgcaaatttccctattaaggccatcttaggcaaccaaaaattgactcggatgcaatcttaagccgatctgataaaatgcaaaaacctttccaccagtagagccatttcacgctttacatgcgacaggaaaacttggttgtcttattttagtcattccgaatgtttattccacagcaccaatctgctctgcactaacaattcttacatgaaatgcttcattaattccactgctcattccacagcacaattacttaaaaaattcttaatgccaaaatcattt

SEQ ID NO: 88152 - DNA, 439 bp, Glycine max
  Clone ID: PAT_MRT3847_50609C.1
cattaaaaatatatttcttcggcatagcaataccaaaaaaatcaggtaaaaaaaggagaatttaaaaatcatcatcgcccgataatcatcatcagaaacaaagcgcggggcggggaaaatcatcatccggggaagcatcataaaacggcagcgcgttgaaatcaaacggcaggggaggtcaaaacgacaacaaaccgatgttgccgcccccgtcgtcaacaacggaggaggaaaagtcccagtcactggggcagtcttcagggacaaaagggggagggcccgggtatctccgcgtaccaatcaaaaacggcgtcccatttgtaattgtggtggaagtggtggtggtggaaggccggcccccactgaaggactcaacggggctactcatgccatttgaagggggtctttgagggttgttaaggttgttgttgttgggggg

SEQ ID NO: 88153 - DNA, 1045 bp, Glycine max
  Clone ID: PAT_MRT3847_5060C.1
gcccaaggtaagtgcaagccggccaccctgcaaataagttatacatagacgaaaatgcaaagttgtcctcatctaatctaaagctgccaaagttgactgcatgccagccaccctacaagtaagaagccaagattttgcttgtgattattggttatttagatgcctgaaatggatgccgagaaagtggtgcatactggaggctgccattgtaagagtgtaaggtggaaagtggttgcttcttccagtgttattgcatgggattgcaactgctcaaactgctacatgagagccaatactcacttcgttgtacctgctgtcaattttgagcctttgggagattctgggaagtttcttacaacttacacttttggcactcacactgcaaagcacacattctgtaaaatctgtggcataacctcattctatcatccacgctcaaacccagatgggattgctgttacatttaagtgtgttgaccctggaacgttgactcacgttgaaatcaggcatgctgatgggaagaattgggaaagggcagttattgagacaggcatcgcttcacattcaaaggtgcagaagtaactcctccatgactgaacatccataggcatttggctttgcttcttcttttgaagcttggtttcttcggctttatctttctactcttctttgatcatcactaggtctccgaaattatgagctcttgtatcactgatgggacttgaaccattagctcgaacaccacttatatgctatatttgtgtatgagttatagttgtaaaaggaaggagatatattatatggaggagcttctctcaatatttcattcatagtcattacaaggaaaacttgtaaattctaaaaaaactaaaaatatcatacatatattttaatactgtgtatcaaaaaggtacaacctaattattatagataatcttgtgtcttaaacatacaatcatgattcgattcttcaaagagatcaactctttaaataaatttcaacatctcgaaaccctagtcattgattttttattaagggatatct

SEQ ID NO: 88154 - DNA, 467 bp, Glycine max
  Clone ID: PAT_MRT3847_50610C.1
cccggctcgacccacgcgtccgctaaactttagatcagcaaaattatggtcgggggagggtttgattatagtatacggatcacttgcacgtgccggtaagggtggaggactatccctacgcgtgtccatgcaggatatgaagaagaacccatgtggtgcacgctcacaataggatactggtttatttccgtttctttaccgacgagctgggaggtgggcgagaagaggggacctaactcgcatgaaaagtgagactgacgcttaaagaatatgtcactactctatatttaattaatctgtcttggctattaattagaatgatttcatctgcgttctgtgaacggtttttgttagctttaatatcactcttgaacttgtcaatacagtgatgatcctatttctaagctacttaggtcagttcgacagctaaaaaatatagtgtttatgtctcagtttaaacaatctgt

SEQ ID NO: 88155 - DNA, 558 bp, Glycine max
  Clone ID: PAT_MRT3847_50611C.1
attacactccacattttctttagaatatgttggaaacaaaaccttcactttccatgacaacttaatcaaagcctcaattctcttcatagcccatcaatggatggacttgtaaagtctcaagttcctcatgaacgttccctccttgctctcttcaaatcatcaccctcttcatcatcgttatcttcctcattctcttcttcttggacctctgaagtagtccttcagacaaggtccaagattcggcgtgaaggtgagcctaacaatgtagcagacttgagatcggaacaaacacgttctcacataatagaaaatgaagcaattcaaggtgtgggattcatcaatggcattgatggtcacagtggaatggagtggaaggatttggagaaacggttcgaccaggtggcacgaaccggaagtggagccgaaccggttgtgacatggtccgaatttggcttctgcattgggatgcactcatcaccagagtttgccaacgaattactcaaagcactgagacgcgggaagggctggaaatccaatatcaccaaaactgatttgtac

SEQ ID NO: 88156 - DNA, 817 bp, Glycine max
  Clone ID: PAT_MRT3847_50612C.1
ccaaagaaaaatggataattttttgggaaactataaagaattcacatgtacatatattattgtttcattaaaaaacttatcaagtttggaaaattgttttaaaaactaaacagaaacaactaggacatgttttctcatctttttgttttctgtttatttagcctcccttcgatttcacactatgctccatgtcttgtttcaccctttaccagttgtatgagcaaaccttgtttaattatattttgaaaactaaaaagttaagcacacccaaagactttcaactcaagacaacttcgctgtgcacattgccatcctccatccttatccaagattgaagggaaaagggtgtctgagtgatctctaaaattcgtgctcctctaggccaatctccatagccaccataaccagtgtgcctagcatagcataaccatagtttctcgtaagggcagcaccagtccaatccatggttgtgtccaacaaaaattgccttgacagaagttctgttcacaagaagggccatcatacccgtttaacttcttgagcagcaacagtgcccttgttgattgttttcccgcaaggctttggtatgccaaacttgggggccaccaccttataagctgtacttggaatgtgccagaaaataatctcgggaacccttgagtcagggttaacttcttcagctttctgccgaaaccattctacctggccactagatatgacttccggataggaaccgcctccagaatcaaggaagtaaaggaaagccactggtgtttgtggatcatttggtgatgaaacttgaaggacataatctggt

SEQ ID NO: 88157 - DNA, 786 bp, Glycine max
  unsure (1)..(786): unsure at all n locations
  Clone ID: PAT_MRT3847_50613C.1
tccggaattcccggctcgacccacgcgtccgcagcactattttttgaattgaaattccaagaactagacaaatttttaattatcaattctcaataatctgaaattcttcagaggctgtctggtaggtacggtgtggtggtgtttcttcatcaatctattatcatcagccacctaagacaaattcacatttcattagacttcctactttctagggtttgtcacgtattcatatttatgctattaaattaaatggccggcaccggcgaccttgatgccgatgcggtactcagcgacgtcgaggacgacggcggcgatccgattccgctcgagacgaaggctccctcgccggaagacgtctccgtcgagaaactccgggatgttctcgccgaactcgatagggagcggcaagcgcgcatcgccgcggagaatacgaagtcggaattgcaggtttcgttcaacagattgaaggcgctagcacacgaggcaataaagaagcgcgatgagttcggtcgccagcgagacgacgccgttcgggagaaggaggagacggcgaagcaattagaagaaaccgcgaaggaacgcgacgcgctgcgatcggagattgggaattcgagccacatgctggtcacgggtatggagaaaatctcggcgaaggtcagcagcttcgccggcaacgcgctgccgctgccgcggtcacagaaatacatatagacttgtatattggaaaaaaacgtaatctagcgcgcaaaaaaaagggtggcggagcttttgaagcanaacgaggcg

SEQ ID NO: 88158 - DNA, 668 bp, Glycine max
  Clone ID: PAT_MRT3847_50614C.1
gtcatttatagttatgccttgtagctatgcttgttacttattttaatttaccataaatgatgtgtagttgaaagcttcattttcatgagtctgccgattttttttttttttttgctgcaggatgcattatctgtaccttggagggcacttcacaggagaatgtcaaagctgtactatgctatgagaggtctggtaaacagtaaactgtagagttctgtttagtgagtaaaatacataaaatgaaaataaatgattctaatcaattggaaaataaaacttttagttgagaacatctgccttattgattgggtccctagactgtgttacctgagaagagatagagctggagaccattgcttacatcttaatgctttttgttgtgacttgtgtttgaaagaaatctgtcttcttcctttctgctttgcattttgtgatgggcctgatctatagaaaaattttctgtcagttacatgaaattatctattgcagtaatagaaaagtttgaagaggctgagggacgtagcacaggggaagtttcgattgcagatttctctggtcttctcaactgaaaaaggagatttgtactgcacagtctctcaatgaatctcaagtgcctgattctcttttaaaaagattggtgacaaatgcaacagaatttccccctgttt

SEQ ID NO: 88159 - DNA, 493 bp, Glycine max
  unsure (1)..(493): unsure at all n locations
  Clone ID: PAT_MRT3847_50615C.1
gcacaggcttggtgcatttggtccattgatatttacatttctttctcttttttctcttcacaaggaaatacccaaactacccacatcttcaccttctccctgcccatgcttacttctctgttctaaacccttgcttgaatcccagcgacgggtttatcaccgttccaaagctccaaaatgctttcaggtttctcgttttacccatttcatgttaaatggtactctctgttcagtgtttgttacctggcattccacatgtttgatgaattccctacttgaattgattttgtgataatcaaacagtagtttgttgcgagactcatttatactgtagtgtaggtactgcatatgcattgcatatggtcgtgttgctgtagactgtttgactagtttctctggatagaagaagtagaacaaaagatntattgctctgtcaatttgtagggattggaaatccccaaatttcttatattcggtgttatcctgttcacac

SEQ ID NO: 88160 - DNA, 254 bp, Glycine max
  Clone ID: PAT_MRT3847_50616C.1
gcagagaatcacttgctggcgtaaaattttcagattgttcctgatatgacctttgcccaatggtgaagtggatcatgttttgggtatgagcccatataagccatccacttagaaagtatgttctagaagaaagaaaaaggctgagtgggatggaagtgacttagtgatgtagctaatgagaggagagggattggttggtgagtaacagtttatagggagcatacttggatagtggtgggggctggggaggatat

SEQ ID NO: 88161 - DNA, 334 bp, Glycine max
  Clone ID: PAT_MRT3847_50617C.1
tcgagggaaacaagaggaatattattcaaacattttcgatcttgcctgtcattacccatagagaggagatttgattttggaaccaaaatttcctgagtgtgtgcctgagagctaacatattactttgataccaaatgaaccaagatatgtttttgtttaattcagctacaaaaactggttcgggtcgataacttatttatcgctattggacataacatattggaaggcctccacgggacatatgaactatctgataaactgcgcgccgcgaatattaaaaatgatagaccggcagatttgatggacgtcatccttgttctaactttgagaatta

SEQ ID NO: 88162 - DNA, 185 bp, Glycine max
  Clone ID: PAT_MRT3847_50618C.1
ggctcgagctaaaattcaggcttctcagatcaaaggactaactataactcaagaactgctacagggtacggaaacagtaataaaggcagtgtacagccctaatgaccaggacgacgaagatgaaacataacacaaaacgctcttgagttcttcgtattccagaagcaaatgaggcgacttgttaa

SEQ ID NO: 88163 - DNA, 459 bp, Glycine max
  Clone ID: PAT_MRT3847_50619C.1
cgctcatccgctctctcttgccttcaaagctggctgccaacccgaaactgtattcatctgctcataggcaaccgaaccagaacctgtaacccacgttcctaatatgcacgcctttccccaatatggtaagacatattgatcagagacatacttactcaactctctctttcaacaacatgccaccacacactatcaccaactccatccacagctcgatgactgaccataactaacacctctatcatcaatcactagaaaaagaaagatttttaccctgatcacatgatctcataacaatgctcagatttaacaatagctaaatttaaataaacacctgaatatgaaatagctctgctctatacatgcttaacatgtgcgtcacactatacaatagaaaaacaccacctccctttgctttagattttctataactagccaacgaatcagccttaatttctt

SEQ ID NO: 88164 - DNA, 298 bp, Glycine max
  Clone ID: PAT_MRT3847_5061C.1
cggagatagattatttaggtttacattatcacatccatgcaagtttccaaacctacaaatgtgtagtatatagacctcctccctttttcgacttgcttgttcaagagatcaacttagtacttgttattataagataatatgttgacagtgtatatgtaattgattgtagttgtaatattttagatgaattttagttgactatgtagatattctggtaagccatggtcattatttgttagggttggttgacacttgaaataatttgactctggatatatatataaaatcattttttttc

SEQ ID NO: 88165 - DNA, 371 bp, Glycine max
  Clone ID: PAT_MRT3847_50620C.1
tcggaattcagcgtcgagccataccgtgtttatttctcttcatacactcttcaccttcaactacgtctctggaggcgggaactataattctttttttctttttaaacataaaaaatgcttatattgattaccacgggaacccgcaattttgcggccatacgactgtatcgcgtacctaatcacgtgtgctcccgctgacttttacccgcggaggagggccggtaactactgtgattattattaccacagcaaccacgttgccccattcccaatcacccagccgccgaggggccgtaccgggaaaaacaaaaacgattgctccgacttatgacctcccgttggtgactggcccccatgttgtatactcgctg

SEQ ID NO: 88166 - DNA, 1277 bp, Glycine max
  Clone ID: PAT_MRT3847_50621C.1
taatcatgttgcagaactattgaaggctgtcaatgggattagggtaattgcaagaaaatgctcgtggtactatgtctctgtgcattgtgattgcaattaccctaatcatgttgcagaactattgaaggctgtcaatgggaacttccgtagtcatccttgtctcaataaacagaagctactatatgcaccaatgggtaatctgctgattctgcagccagatgagaaattttcaccaagccatcatctcctaccatctggcagtggtctatatcttttgtgttgtccattatcagaatccgatgacacagagaagcggctccgagctgctcagatggtcttcttaaactcacctcatccacttgagatattaagtgaccgatctgcttatggatctggaggaagtatacaacgagatcatgacatgaactcttacttaaagtctttgagaactgtgattcgcaaagaacttaaccagatccgtaaagctaagagggagcaacggcgtaaggtgtggtggcctcttctgttatctcgtggagctgataccagcattgttgctgggaggtccatgatatcaatcaatgtgggtcaacgccagtcacccttctccagcgtgatacaaacagggagagagtccctgaaaaggttcagtaggattgttacatcccaacatatgcatttgtttgtgttgcttttgttccctgctcggttgttgctcttgggaacatatagcgtaattaacctcaaatgaatttataagatgattcattattaagcatgggggacacaattgtatagggcgagggcacatgctttgtaggacattacacatttagacgattctttattcattgatttcaaaattgaaatattgcgttcttacgtgggtcaacgccagtcacccttctccggcgtgatacaaacagggagagaatccctgaaaaggttcagtagggttgttacatcccaacatatgcatttgtttgtgttgcttttgttccctgctcggttgttactcttgggaacatatagcgtaattaacctcaaatgagtatataagatgattcattattaagcatgagggacaattgtatagggcgagggcacatgctttgtaggacattacacatttagacgattctttattcattgatttcaaaattgaaatgttgcgttcttacaagtacttcttgtagaggaatattgcccaaatgttaattaatatttaaaaatttaattgttttttctttcaaaaaaaaaaaaaaaaaaaaaaaaaa

SEQ ID NO: 88167 - DNA, 412 bp, Glycine max
  Clone ID: PAT_MRT3847_50622C.1
ctcacgcgtccggatagacatttcgagagtctgctatctctatatgaatggtgcgagtctgatgcttgctacgatggtcttagtatggccattcacagcgataccatatgttagcagctttgaatgaatatgtgtcatatctgccaatacaacgttatgagcaaatgcgcaaactgtaacatcgataggaaacacacactatactcttggcttcagaccatgcgatgaaagtcacggtaatcggcttgggctatcataaattccacagttcatatatcagagctcacgatgcttaatcaagatgcttactctgatgtcacagaccatgcagtccatgcacttggcacatctgtgttaaatatatatggctccgtactgtctagtattatatactttaaaatacatgcttttt

SEQ ID NO: 88168 - DNA, 748 bp, Glycine max
  Clone ID: PAT_MRT3847_50623C.1
aaaagaaaaaacctgaatagtaaaactcaattcggctcgagcctttctccgccgtcgcatcgttgctgtcatacaccgctgcccccgcccatgttgcacctccttcctccatttttcagtttttctccactgtgcatcagaatccacttttcatgtattctagagcgttcaatttgaagagttgcatttgagaaatggcatcggctttgatctcgcgttcttcgcgtaggtttctcaaaccttgttcttcttcggtatctctttaccctgccatcttcaatcctgtgatttcttctcaacaatcggcaagccaaaacccctctcaaaatcccccattcaagctaccccagctccaaagtttcaattttgagttccgtaaaactactgggtctctctcaagtttccaccttgttgcgcacgtgtccacgtggccttccaaggagaacaagaaccaccaaagtggtggtaatgtgagtagtagttgggttgaattgtacttgcctaggaaggttcagccctatgctcgccttgctcgccttgataagccaattgggacatggttgcttctatggccttgtatgtggtcaattaccctggctactaccccaggtcaccttcctgattttaaaatgttggctctgtttggatgtggggctttgcttttaagaggtgccggatgtactattaatgatctccttgatcgggatattgatacaatggtagaacggacaaagttgagacctgtggc

SEQ ID NO: 88169 - DNA, 374 bp, Glycine max
  Clone ID: PAT_MRT3847_50624C.1
aggacgcgtgggtcagagcaacgctagcattagcattcgcctatattatgcaacgctgtgctcatccgatatcaaccactctcagacaaaccgaacactcgtgctgtgtctatctcattccatttattaaacaatgccattgctgatcaacataattctgacaccctctatagcaatggagttggacctctgattactctaactctagctaggattgagaaacatgatcaatatcaacgactacgagtcgaagagagtggtttgtttcaactgttaataatggctgacgagtatcagcgtcgtgaaactcagatgatcttaccgatattgataattctgctgcttgtgttgatgctggatcgatgtcagggctc

SEQ ID NO: 88170 - DNA, 425 bp, Glycine max
  Clone ID: PAT_MRT3847_50625C.1
acgagccacctagatgtatgtagccttagccctataagcagagagcctaatttctggatttgagcttgtgacctccaggtcacagttgcaccaggtcaccctcttgtcaactgtcaatcaaatactgattttaatttatccttatcatatacttatatttaactatttagttatgctcaaacttactgcaattagagtttggcatcatattagaccttgagtttttaaagttaatgtgatttttgttatgtaaatttgttatgcatatggaaatccttatctgattgactaagacacactaattaagatcgaaattactgatatgtttctgaactaattcttttttcctccagttcccctcctccccccctcactatgatatattgtttagtttcacctattaaatcaatgtttaaaactattat

SEQ ID NO: 88171 - DNA, 231 bp, Glycine max
  Clone ID: PAT_MRT3847_50626C.1
ccataatattttttttataaatttttgttgagcagtctatgattgttttctccaaccttttacaaaaagggagaccataattttttctcacagtttccccgactgtgtgtgtagcaatgacactaggaataagcagcctcctccttttgtcaaacagcagggaaccacaccttgaaaaaaaaattcccactaataaacgagaaaggtcttggctgcatttaagctagggaa

SEQ ID NO: 88172 - DNA, 1014 bp, Glycine max
  Clone ID: PAT_MRT3847_50627C.1
ccacgcgtccgtttcctttttacttcgctttcaaccccctccttttcaatttccccaatcttttgaaatctttcttcgaaccctaaaaacatctgtccccgattttcgtttcccctttgcaagttcaccgtttaaatttaattaattttcttaattttcaggttcttctgaaaagatgtctcgcgtgtatgttggtaacttggattcacgagtcactgagagagatctcgaagacgaattccgcgttttcggagttattcggagtgtttgggttgcacgtagaccacctggttatgcttttattgactttgatgaccgcagagacgcacaggatgctatccgtgaattggatgggttttcctcaactagctagttaagtcttctttttggcctatggggcaagcagatgctgctctctctttcttctacttctgccttggcctgcagtaatggttttttcttggttgtgtcttcgtcaaagtctgctgctttgtacagtttgactacttctactactactgcatgtaaagagaattaagaatgtgaacacaggggatttgcactgctatcgcgagctacacttctgttgcataatgggtttgttttatgagatatgtgcttctacacttaacctatggggaccatgtgcgtgctgcctctgtgctgtatatgttccctgtgggcaatttgtgtgctccaataagttgttagcgaccaatgaacttctgaaaatattatggcaagaatggttggagggttgagctttctcacaacctgtggtcgtggtggtcgcctgatttgaaatacacaatcattgctttactgaatgaacaactattgcctggatatgcctttatgatgatactgcatgcccgtgaatagtgctgtattttaattcatgcattatttgttttccttccacttggaatcgaaaccatcaagaggatcgtagactacaaggatttgctgcaaattttgatcttgatatactcatgatgtcatttgatctggata

SEQ ID NO: 88173 - DNA, 412 bp, Glycine max
  Clone ID: PAT_MRT3847_50628C.1
tttctgacggcgaaagagcgtattagaggctgagttgccaacactcctcaattctcggtaatcatatgacaactaagacccattttattttgcataaatcatatttctgcatttcaaaatttagtcatataaacaatgaaatgataaaatccaaagaataagccatctgcggacgcttgggcaaaaaagcttaagagctcttcttttttggatcaacattctaatacctcttttgattgatcatcctgattgaccactgcgatgccaatcttgttgatcacgtcggattatcagttttcaggatactcctgcaagttacaaggcctaaaacagtaatgttggggaacatacctgcgacaaccacatattgaaatattcatcattatcatgaagctacaagaatacctggttt

SEQ ID NO: 88174 - DNA, 834 bp, Glycine max
  Clone ID: PAT_MRT3847_50629C.1
atcttgggtacacaccccggtcctggtccggattcccggctcgacccacgcgtccgccgattttcgtttccccttcgcaagagggtggttcaagctctcttctctctgcatcgcttcaggttcttctgaaaagatgtctcgcgtgtatgttggtaacttggattcacgagtcaccgagagagatctcgaagacgaattccgtgttttcggagttattcggagtgtttgggttgcacgtagaccacctggttatgcttttattgactttgatgaccgcagagatgcacaggatgctatccgtgaattggatggtatgtttagaagaattatgttgttggaatgtaatagaattaaaatcaaaattaaaatgtgcatatatatgtatatttgctacattcttcttatctgctaatgtgttattgtttttcccccatgttttttccggttgatatgttgaagggttttcctcaactagctagttaagtcttctttttggcctatggggcaagcagatgctgctctctctttcttctacttctgccttggcctgcagtaatggttttttcttcgttgtgtcttcgtcaaagtctgctgctttgtacagtttgactacttctactactactgcatgtaaagagaattaagaatgtgaacacaggggatttgcactgctatcgcgagctacacttctggtgcataatggggtttgttttatgagatgtgtgcttctacacttaacctatggggaccatgtgcgtgcttgccttgtgctgtatatgttccctgtgggccatttgcgtgctcccattagttgttagcgcccatggacttctg

SEQ ID NO: 88175 - DNA, 404 bp, Glycine max
  Clone ID: PAT_MRT3847_5062C.1
attttcttatgagctgggtaagaaggtttgcatttagatcttatgtttaaactctaaaaaatgttttttttttaggaagacaaccatatttttcatttttttctctataaatttttatatttttatttgtcattttaatatacataacatgtaacatgttttgatttatgaggtttaagataatgatacaaaagtttggttcaatgtgtagatgcaggagatttatagagcttatgtgtgtttgtgttcacttttttatttttaggacaaaactttggtgcagttttgtatatgcttttagtgttgttctttaattagaataggagtttcaccttggtaacaaacattaacattagatggaaacctttactacatggtttacgtgagtaaaactcaaattttga

SEQ ID NO: 88176 - DNA, 1784 bp, Glycine max
  unsure (1)..(1784): unsure at all n locations
  Clone ID: PAT_MRT3847_50630C.1
gaagcgcgaactcggctcgaggtggctctgtagatttagatggatattttactgtatactatcctttcaatttaaccctttctttctccgctccgaacgcggaaagtcccttccttttcaatttccccaatcttttgaaatcattcttcgaaccctaaaaacatctttcaccgattttcattttccctttgcaaattcaccgattaaatgtaattaatttgcgacgatgccttagccaatatggcgtgtgaaatgtaacatgctaatattgttattttttttagcaagttcctagcagcttatgctatctgatgctttcctgggagtctcccttcctaaaattgttcttgtgtaattttttgttttttggcttaggtctagtctatttaaaaaaatatccagaaaaaaaatataactatttatttttattaaaaaatctttttgagtttaaacactcttaaaaaaacaaataaaatttaaacaaatgtgcgtgacagatatcaattttcccatattattcacagaaaggaaaaaagggccctataaaactaaacgctccccttctcgaagaggccgctcgctctgtttcttttttgttctcaatgcaccgcatgagtttcttcagagagctcgtcttctagggtttttctttctctcttctcactgcatcgcttcaggttcttctgaaaagatgtctcgcgtgtatgttggtaacttggattcacgagtcaccgagagagatctcgaagacgaattccgcgttttcggagttattcggagtgtttgggttgcacgtagaccacctggttatgcttttattgactttgatgaccgcagagatgcacaggatgctatccgtgaattggatggcaagaatggttggagggttgagctttctcacaactctagaggtggaggtggtggtcgtggttggtcgctctgggtggttctgatttgaaatgttacgagtgtggtgaacctggtcattttgctcggtgaatgccgcatgcgtggtggttctatcaggagccgtagccgtagtccgcccagattccgtaggagcccaagttatgggcgaaggagttacagtcctcgtgggcggtcccctaggcaccgcagtttgtcacctcgtggacgtagctacagcaggtctcctccttatcgtgggcgtgaggaggttccttatgctaatggcaaaggacggaagaatattaggcatgatgagtgatgactggagtagaaatggccttagggaacgacgcagaagcagaagttgattttgagagtttggtattgggtatctgtgattgttaagagaatagtcagattttgttaatttagtggtgctttgactgaagtatgagtctgttttgttgggcaaggccctgagtttctactcttggattggaatagttagtttattttatgtctcagcttgtgttgaatttatctttgcttgtagtttcattgcaggtaatgatcttgttaaggttgttgttactagtttgttaaatatagttccagatctttctgcactngttttcctcaactagctagttaagtcttctttttggcctatggggcaagcagatgctgctctctctttcttctacttctgccttggcctgcagtacatggttttttcttggcctgtgtctttcgtcaaagtctgctgctttgtacagtttgactacttctactactactgcatgtaaagagaattacgaatgtgaacacaggngatttgcactgctatcgcgagctacacttctgttgcataatgg

SEQ ID NO: 88177 - DNA, 403 bp, Glycine max
  Clone ID: PAT_MRT3847_50631C.1
caacatgttaacatctgtttcccttactatttaaccaacagggcatacaccggtactggggcgagaattttaaccatcttcttcaccttttatttaagcacttgttgcacttattatttaacaacttgtggcacttgttattgaaatggaactctgtatttagtcaacacttaaagttcccacacttaagcaggatataggaatgaacatcgtcagcatgaccaatctcattgtgatcagaacgagaaaaaatggattatttacaagattaacgagaatctttctttatgacacacttacaagtatattcatcgtgcatcattcattcatgcatatatataataattttgtcttttaataaattttcttcacatgtacttacttacttacaatgaatttttca

SEQ ID NO: 88178 - DNA, 1780 bp, Glycine max
  Clone ID: PAT_MRT3847_50632C.1
gacaatgaggacccatcaactcagaagaagcctcgagttgtttggtctgtggagctgcaccgcaagtttgtttctgctgtcaatctattaggcattgacaaggctgtacctaaaaagattcttgacttgatgaatgatgaaaagcttacaagggagaatgtggccagccacctccagaaatatagactttatctgaaaagaattagctgtggggcaaaccgacaggctaatatggtggcagccttaggtactgcagattcatcttatttgagaatgggttctctgagtggcgttggacatttgcagacattgactggtccacaacagtttcataacaatgctttcagaccctttccacctggtggaatgattggtagattgaacacttctgttggtctgaataatcatgggttgtcttcttcagaagctcttcagttgagtcatgcacaaaatttaaacaactccataaatgatccacttaagttccaatcatccatagcttgtggtaatcaaaatgctatccagggaatgccaatgtctataggccttgatcaattgcaacataataagggtgttagtgttagtgttggtcctattcaaaacatgtcccctcttattgatgccagaccaacttttgctgtgtcaaatagactctcagatcaaataccaaaagtaacaatgggttgctcaccctctccggtcttggacgtctcaaacaatgccttggtattgaaagcagatagtgaaaacacacaagggagaggagtatatgagaatttaacttcagtagcatctcagcattcacaattttcgcttcctttgctgggtcatggtaggtgtagtgatatttggtcaagtcctatgcggtcatctgggacaaattcttaccctccaagtgaaactttgcaaggggggaatctgagtggtgcttcatcaattacttcactgtctaatcaatcccatgattcacagacggatatgcactctcaaggactcatttttacaaataattcaggacaaattagcaataatgtgccatttctcgggtgggatgaccataatcatgatagtagttaccattcaaatgttattggtaactcaatagactctctgattgatccagaaggtcatacttctattaactcaacctacaacagaaacttggacttcaatttctgtgatcccttacaaatgaagcatgatggaattatgggattgagtgacgaaaactcattgaaacaacaacacaggtacatcatgaaccagcagaagtctcaaaacagtcgcgcccctaataatattggttcattggaagactttgtcagttcgatgatgaaacagaaacaagacaaggtgaaattcttggacggatcatatttatgcaacaataattaccctgacggaacatccatgtgatatgaactttggcagtatatttgcgcatcatgtcatgctttgttgatgaattttgtagcgtgacaagtcttggtttaccactcttcccagttttgtcttcttggtggtattttctaggtctagggtattattattactttcagcaagggctttctcaatttgtgaaaatgcgttgttttatggatggggccctctagtgcattatggagttaaccatgtttagttttgtgcagacatgcttttctagcaatttgttagtggtccataagcaagaataaaataattttagtggcaataaactcggggtcttccctttatgaatgcaaataatggccgacgaaatagcattcatgtttttttacac

SEQ ID NO: 88179 - DNA, 779 bp, Glycine max
  Clone ID: PAT_MRT3847_50633C.1
ccgggttagtggtactcctaagctggagcagatgtgtttgcaagtcttgagtatgtacgtaattcctggcatctcatgtatagaaatatctgaggacaaaatgcaagacgaggaccaagaagtctgcctctctactggtaaaggtgttgctagtctaatatctggtgtagctgtcatacctgactcagacctacccataattgtgactactattcaaagttgttctcagggtatgaataaagttttggtgtctttgcaacagaagttcccttctgtatctaagtccttactgaagaataaagtgcgtgaagtatctgactatgttgataaccgtttgcaggtgaagaaagaagttctggataagcttggctcggcagttaaacctgaaaaaagcagtgggggaccaaggagcattgctgcatttttttcaaaaaggtgcttgcccccgactggggaaggttcgaaacctggtgaaacttcaccactgccacccctgaaatcatcttctgccattgatgaacgacctcaaagttcatataacatataatctctgacatcttgttgcccagtggcattttactattttcagatttcttagtaccgactctttaaaagttggagatagtgtgggttgcacttgatgctcgtttaccactgtaggcaagttcctgattaccattgttatgctcccttaacttgctggcttgattactgaactatacaatgctccctcgactttgttttgctagcttgtacttgataaaagtttatgttaactt

SEQ ID NO: 88180 - DNA, 425 bp, Glycine max
  Clone ID: PAT_MRT3847_50634C.1
gggaaaatgccttaaacctttttccattacttttttttggattggttcaaaaacccaatttaacaaaaggggggtttagaaaagccttttacccctggtgaaacattttggttcctaaaagaggccaaatagcttgatccccccattatttgccctaattttgcatacaaaaattttccttaaccccaaccaatgaaaataaattttttcagcccaaggcaagtaaacctaagggcttattaagccagggatacctgcttaagaacgggggtggaaacaccttttggatccccggttaagcagcaaaaccccgttaaaaaggggcccaagttacctttacttgcctttatttggaccggacaagaatttaatttggaccccccctttagcttcattttaagccaatgaccaaactggctgtaccc

SEQ ID NO: 88181 - DNA, 568 bp, Glycine max
  Clone ID: PAT_MRT3847_50635C.1
ctgttagtcttactgctggattctcagcttcagttgctgctgctgcttcccatagttttgatactacaagaagtagatcgcagtgtactgtgctgccaaagtacatctctatggagagaaagattctgaagtggaaacgaccaggaaacaagtttgaaagaattactgggatccatccttctgacaggggtgtcttgttccgtggtattggttggcgaatggctcgctctgggttggcttcattcattattgtaggaagttatttatttgttgctgatcagcttgcttctagtttgacttaattaccacttgataccccctttttggttaatatgtaatgtttactatttttctcctggagaagtcacatttgggatgctgctctgtactagttagtaaagaaaaatagaaaggagacagtagaaagagaggagactgcatttgttctatacatataaaagatccttgatgtggggattcactatgggaatttgatttttaaattctcttatacaagagtttgtaccttccaatgactggtaattaaataagagtatgcattttctgt

SEQ ID NO: 88182 - DNA, 505 bp, Glycine max
  unsure (1)..(505): unsure at all n locations
  Clone ID: PAT_MRT3847_50636C.1
gaaggtttccgtcatcactgtatgacgtcctccttctttggggggggggtggggggagacgctagagatgaaaccaaccagtgcaggcaataaggcgttaagaagaccaataaaaataaagcaaaacaagggatgcgtagtaaggtacgtaatggagggaataatatagggggagtagagaaaatcaccatattcgaggggtgggtattacgttattggctaataggtacaagtagggttgcgcgataaggcaaccattanttgtagtagatgtagttggggtaagttatagtgcggccaacgcgtggacacaagttaacagacagttattaagttacatatgcggatgggtgtgtaccgccagtaattattggaagtggtacgtgatgccccgttacgtgcacagggttgcatgtaggtgcgtactcagattgcccaatagccgacagttattatgcacaataagcgggttagataacgttggttgaagcgtcatagtatatgg

SEQ ID NO: 88183 - DNA, 564 bp, Glycine max
  Clone ID: PAT_MRT3847_50637C.1
gtaaaagccacaaagcagctatgatattggtactctattaaataaaacccccaatactcatgatcgacgcaatattgataaacacactctagggaaaaccaacactcatgaacaccatctcacacaagtatagcttactgtgctaaacttatactcacaaatgccctcgaaaaaaattttttagtcctcttttccaaacaatgtgagaaggatcttcctccaattcctcaaaggttaatcttggcaatagcatgcctctagaagaacactgcctcttttgaacctaacctatgatataatcttcaattccttctcattcgggaagacaaccacacgggtgagtgcattctcataaattccaaactttttgattgcattccgcaccacctttaccaagtacttactaggaaccttgatgcccaaaatggcagtgtgcaatgcccttggaaactaagacaacccttcatccacctgtttcttacacctggaaccgccatgcatttctctcatgcaattgaaagaagccacaagttgggtccttttccttgtgcaaaaaaccctaat

SEQ ID NO: 88184 - DNA, 1558 bp, Glycine max
  Clone ID: PAT_MRT3847_50638C.1
tgaagaagcagagagtatgtagggtttaagatcgcgttccgaaactctggcgaagtttctccattaattcttcttgtgcgtttctcccacactttagatgtgaagatgaaggagttatctcagacccagagtgttgttgtccatgggattgctggtgctggttcagtggctttagccactgtcttcacttatcctctcgacagcatcaaagtcctcattcaggttggttccagcaccggtaaagaattggaccctgcccaggctttgacgagactactctctgtgtccggcaatgcaggtttgtttaatggttttggctggttgttggctggaaggatttttggtctgggagcacgatttggggtttacgaaatcctgactgccttttataaagatggtcgggaaaataattatttgtttgcttctgaggctcttttggctggcgtggtagctggtgccgttgaggcagtcataagctctccattcgaactcatcaagcttcgtatgcaagttactgctgcttcatatgttccaagctccaactttgctttggaaaagggggctcgttcacctttaattgcaagattacttcatggccgttatccagacaagagggcattggacctatatgttggtctcatctccatcctaaaaaccaaaaatacaaacgtgaccagtgccttgctagagtatccatggacaatgacaggatctgggaggccaccatcagtttccaatgtcaggagaccatctgacattatatctttggaaggatggaggacattttggagaggactccgtcctggaattgtccgagattctgtgtttagcggcatatttttttcgacctggcaatttctgcaccaagcaatgctagattggaaggctgtagggatggatcctccacccaggttaaatgaagaagtcggtccattgtctcctttgattgttagtcttactgctggattctcagcttcagttgctgctactgcttcacatagttttgatactacaagaagtagatcacaatgtactgtgctgccgaagtacatctccatggagagaaagattctgaagtggaaacgaccaggaaccaagtttgaaagaattactggcatccatccttctgacagaggtgtcttgttccgtggtattggttggcgaatggctcgctctgggctggcatcattcattattgtaggaagttatttatttgttgctgatcagcttggttctagtttgacttaattaccacatattcataccccgattttggttaataagtaattgtaatgtttaatatatttttttctggagaagtcatgtaatttgggatgctgctctgtgctagttagtaaagaaaaatagagcggagacagtacttgatgtacccggattgtagtccagatagaaaaagataatttgttcaatacatataaatgatccttgatgtggggattcacaatgggaatttgattttttaattctcttgtacaagagtttgtaccttccaatgactggtaattaaataagaatatacattttctgcttaaaaaaa

SEQ ID NO: 88185 - DNA, 136 bp, Glycine max
  Clone ID: PAT_MRT3847_50639C.1
tttatattcacgacaacagagtttcgacagagatcataatgaattcgtagtgcatgatcaattgccaccttttaattgtgaggaacttgtaaatcgtagaaacaattttcactcatccatcgaactatgcaaggga

SEQ ID NO: 88186 - DNA, 534 bp, Glycine max
  unsure (1)..(534): unsure at all n locations
  Clone ID: PAT_MRT3847_5063C.1
tcctctaaattcgccgcccttggtgtgtggttttagaaatctacaatgaattggatccactagaatccaaggaatccggcgcagtcagaaagcaagcgtcagcaaccacactatctaggataccgatacccagctagtaggattaattacaagttaattatactattatattttaggggggggtaactaactatatgcatatgcncanggtgacttgcattgggagcgaatgccggcgctgctgaaacggtggtgcagcaacaggtgggatgacgacnacnaacaagcttgtgcgcggntgcacaagttgatcgagatgcctntgcgagggatggagatggcctgcacccacatgctgcagcagccatgttggcctaacactaacactatcagcagcatctgcacgacaccaacatggctgccgcacgctaccgaccatgtacgcctggttttgctcacaaaacgcatttccaagttgagcaacacaagcacaggcagtatggagatggccaaactagcgccggtctcttgttg

SEQ ID NO: 88187 - DNA, 397 bp, Glycine max
  Clone ID: PAT_MRT3847_50640C.1
aaacaaaaggagggacaatgcttttttggagtctttttgcccttttgtcccccaaaaaaattttaacaatttaatcaaaagggtgttaatttttggcagttttccctgcctgcatttttccaaaaaagcttgaaaaaaacaaatttggggaaaattaaaaaaatctcccaaatgctaatgtttaaaacttcagctggtgaaaaaaataaactttggaggaaaaaaaaaaccttcaaaaaattgatatttaccttaaaaaagagggaagcggtttaaaaatccttccaagttccaaaaccttttatttttattggtggtgaaaaaaaagggcttccattttatttataaaagcgttataaaaaaaaaagtactgatcctgggtttaaaccattccaaa

SEQ ID NO: 88188 - DNA, 434 bp, Glycine max
  Clone ID: PAT_MRT3847_50641C.1
cgtgttttcaaccctcgtctcgactagtcgtcgcccttctttagcatgcggctttgatagatcgcatacacactccctactcggccgtgccgatcacataactacaactatcgtctcagccccgatctttcgttgttgctttcaccttgtcatcccgactgtgatcaacccgaatatcaagtacaacttcacattcattacataagtcgactgccgtctcgggaaacactaggtttcatcgatctttacccaaatcgccttgattaggaataccagtcatctcagtcaagatgatcgccaacaagctcaccatccttaccgctaccgccgctcttcttgagccggctctcgctcttgggcaccgtcacgctcaccaccagcacgcccagaagcgtggtgactgggtcggtgctaccattgacggtcaggtcgtc

SEQ ID NO: 88189 - DNA, 254 bp, Glycine max
  Clone ID: PAT_MRT3847_50642C.1
ctcgagcaccactctagcgttgttgcattgcagcagcgtctccatcatcttccacgatggccgcgcgaggcctgttgatcagaaaaaccctatacaccgttctccgcgacgacgacgagcacataatctgagctggcatagctgcagctacacatcactcgcgggttgcacgtgtacacgctctccgatctcgattacgacaatagcgctctctagccaccatcatcggcgagatcatgcagctgcaccaccag

SEQ ID NO: 88190 - DNA, 372 bp, Glycine max
  Clone ID: PAT_MRT3847_50643C.1
attcggctggagagcaagcacgctctactctgagccataaaaaaggcaaacactctaattcatgtctagtctcttccccaaagttggctgccagggccgcgaaagatgtgcagacactacccccgcaggcttggagggtcagccaagacgaaagagaaaaggaagcgtgccgtgcttggagagcccatgggcccgccagcaccgggtggaggtcgtgagtcccatagatggcctgcccacgactacactgactggcgaagccctcgggtgactgcgggtgggacactactgggcgctcaggggagccagaaaccaagatcaaaaaccgggagcttgcaacgatccacgccccgtggggcatgcacctggcct

SEQ ID NO: 88191 - DNA, 546 bp, Glycine max
  Clone ID: PAT_MRT3847_50644C.1
gggattaaaacttgggattaatcattacaaaaaaaaatcagagtcatacatgactacatcctaggaaagcccgcgctacattatgggtatatgtgtaatcccaaataaccaatagctaaactaagatggacttctttttcacaaaattagtctaacaattccattcactaatctcttcccattttcctactctaagaaagaaaaagaaaaattagatgcaggccaatactccagcagtagccacgggaaaaatggcttggatattgttgctaggccaaacccagcacccatagtaaccactaaattgaatcccacaaattcttgccgtgttccttctaggtacgtatatactctttgcacatatttgccaatagaccaagaaagacaaaaacggatcaattttcatcctctgttaaggaggcaaaggaaaaagggttgaacttgtagccatcaccgctgtagaatttattctgaaattctacccagggaagacgcaaggcgtgaagaaaagcgctgagagtctccatcattagtagtataaaggca

SEQ ID NO: 88192 - DNA, 323 bp, Glycine max
  unsure (1)..(323): unsure at all n locations
  Clone ID: PAT_MRT3847_50645C.1
agtagtnagntcggaattcggntcgaggagntgcnatangngcatgaccgnttancggttnngtncttaaggagntggntgngggnaggagcattngtgtnggtnanntgatcngntntnntnatnagtnagcatgcctgtgatcgncaagnttnactgngnagcggnngaaancnnaaacggtgngnnnnnnggtngncngnaagagatannnanngncgntnncngtggttgttctnncttgagtcagcaaaggtgtgggagtggtgnngaattaggnancgngaagatgtnctgnggggggnncttnaagtcnaggcgnt

SEQ ID NO: 88193 - DNA, 408 bp, Glycine max
  unsure (1)..(408): unsure at all n locations
  Clone ID: PAT_MRT3847_50646C.1
ctctgtctctcttcctatcacatcataaattctatcatgattcatgcttatgttttttttattctctttcgaggtattgcatagagatttggggtgttcattatacttttttcaatagttttgcatagagatttggggtgttcattatacttttttcaatagttttatcacttgattgattatatatatccaccatgattcgtgcttaagtagttgattaacaatatgtcattttctgtgttgaaggtaaaccatgggaatctagtgaagttggagggattttgcatagacccagaagaagcaaattgctatctagtctatgaatatgtagagaatggatctctatactcatggctgcatgagggcaaaaaagaaaagttgagctggaaaataaggctangaatagcc

SEQ ID NO: 88194 - DNA, 352 bp, Glycine max
  Clone ID: PAT_MRT3847_50647C.1
gcccgctgaactccatatgtgctttggaaaggttgagttctgtggcgacgaacatcccacattccctgctaccacaactgatgtgcgaatataccaactagcccggcctgtgtctagcgggattggtggagaagataacatagaattaccactcgctgtcacagggagagaagattatacattttacttgaaagaggtacccggggcatttgttcttggggacacacgaaaccagaagagtggatccatacatgctgctcatagctcttactttatcattgacgaagatgcgcttcccattgaggctgcgttgactgcagcatgtgctctgtcataccattcatattcaaca

SEQ ID NO: 88195 - DNA, 944 bp, Glycine max
  unsure (1)..(944): unsure at all n locations
  Clone ID: PAT_MRT3847_50648C.1
gcacttacgcaaagaaagactggctacgccggctaattctttttgttctttgttctttatttattccattctactttcttcattcttccttgcctatgaggcacaagcctaccccccagtagtgaatggactatcatattctttctattcccaaacctgtcccaagcttgaatccattgtgagaaaccatcttgagaaggagttcacgcaagctagttggcaagctgcagccttactcgtcgttttcttccatgattgttttgttcagggatgtgatggatcgttgctgctggatgggaatccaggtgaaagggatcatccactcaaccgaggcataagccttaaggttctgcggaccattgatgatctaaggaatgttgttcacaatgaatgcggcaggatcgtttcttgtgcagatatcactgtcttggcagctcgtgacgctgtttacctttctggaggtcccaattttgctgtgccacttggaagacgagatagtctaaactttagcttcgaagaagtaaataatcttccattaccctacaacatcactagtgtgacactccagacatttgcatccaaaaacttagatgtcacaaatgtggttgctttagtaggtgcccacactcttggtcgtgcccattgtcacacattctacaataggctttctcctctagaccccaacatggataaaaccctagccaaaatcctcaacacaacttgcccaagtacatactcacgtaacactgccaacttggacataagaacccccaaagtgtttgataacaaatactacattaacttaatgaatcgccagggtttgttcacctctgaccaagacttgttcactgataagaggacaaaggggctagtagaggcctttgcacacgatcagaccttattctttgaganattcgtggatggatttataaggatgagccaat

SEQ ID NO: 88196 - DNA, 301 bp, Glycine max
  Clone ID: PAT_MRT3847_50649C.1
atttaaaatttaaatatttttatgaagaactgacctcacgcttaagacatgatatggtcaaaattattacattaaactgatacatttgaaactttggcccctcctgggacaaattgatgactcttgaaaattgagagcgaaatctcgcttgaaccaatgctgtaatgaaagttgagctttttatgaaaaatggatgatgattctgcatccaacaaaggcccctatttattaaatcccatgccattgttcttaaccaaccaagcaaccgtagcagcgtgggatccaacactggggacttgtt

SEQ ID NO: 88197 - DNA, 517 bp, Glycine max
  Clone ID: PAT_MRT3847_5064C.1
cccattgttccaaagaaaacaaaacgccaaccccaaaacccacaaactcaccacacatacacaaaatcgagaacgcacacgaccaaataagaggaagttgttgttaggagccataacccaaaccaaaaagcaaaaacaaaccctaatggttggttttagtctttttaattaatttaatttctttctctctatatgttatttaaaaaatataataattaagggattggatttgaagaggctcgcgggtgtttggaagagaaagtttatggttaaaccgcaatatcttatttttctttttcttttcttctttctcgtagcgtatggaaaaccaccaaaaccacaaggtagaaccagaacctgacatatagaagaaccataaccaccgtcaccaacagcaacaacaccgtaacgaagcgtggggcacctgtgaggagctgttgctagcgtgcgccgtgaaccgccatggcttcacggactgtgacgccgtctccatgcaggtacagtcgtgcaccacgcg

SEQ ID NO: 88198 - DNA, 305 bp, Glycine max
  Clone ID: PAT_MRT3847_50650C.1
ttttgtttcggttggcaaaatgactggtaatggtacaccaagcacatggagtagagggttaattacatattgggacagtacctatcagtatatgaccatcttcagcagtcacataccatacattgaatctgtaacacgatagcacctttccatcatattttccgcggaaggacctgtactaaatacctgctgattctttttcctatgatgatcctcactgcattggcttacctaggcactgttaccatgatctgggacccgtttgaggtcagtgcaattaatgcctgtacaagtagctttcgact

SEQ ID NO: 88199 - DNA, 437 bp, Glycine max
  Clone ID: PAT_MRT3847_50651C.1
cggaattcccgggtcgacccacgcgtccgcccacgcgtccggcaagctccctcctgtgctcaagactccaaccactctttggtccagagccatgggccctcccactcgccagctcctcaatgctgtactggtcctgctcctcctgctggccaccaaccatcagggtacaggggttgttgtggccagtgagctgcgctgtcaatgcctgacgaccctaccaagggttgacttcaagaacatccagagcttgacggtgacccctccaggaccccactgcgcccagacagaagtcatagccactcttaaggatggtcatgaagtttgtctcaaccctgaagccctcttggttcagaagatcctccaaaagatactgaacaaaggcaaggctaactgacctggaaaggaagaacatgggctcctgtacctcaacgggcaga

SEQ ID NO: 88200 - DNA, 653 bp, Glycine max
  Clone ID: PAT_MRT3847_50652C.1
gtagtcttcagaaggtatacacttgaaaattccatgaagtttgagacttctcagaatactgatcaccttgaactcagacaaccactggctatggaaatttgggagtctataatgcaaacactggaaccagaatctaaaattacagtattaaccaatggacccttaactactttggcaaaggttgtatcaatgaaaaacataagctcaagaattgaggaggtttatgtaatggggggacacatcagcaggaatgtctgtgacaaaggaaatatattttctgttccttccaaccaatatgcagaatttaatatgttcctggatcctttagcagccaagacagagtttcaatcagaagttaacatcacactcattccactcagtgtccaacagaaagcaagttcattttcacatatgttatgctggttgcgtaggatagaacaaacacctgaaactgtgttttccaagtgtgtgctattaaggctacaacgtctgaagcaaatccaccacagatatcaccatatggacacattcttaggggaaattctaggtgccattgtcctagctgacggcccttcatctctaaaagaaaaatttgagatcaagggcattaaagtgttggccgaaggagacgagtccatcgatggagaaatggt

SEQ ID NO: 88201 - DNA, 151 bp, Glycine max
  Clone ID: PAT_MRT3847_50653C.1
gcagatcttcgtcaagactttgactggcaagaccatcacccttgaagtcgagagtagcgacaccatcgaccacgtcaaggcccagatccaagaccaggaagggatcccttctgaccagcagaaggtgaattttgctggtaaacaactggaa

SEQ ID NO: 88202 - DNA, 440 bp, Glycine max
  Clone ID: PAT_MRT3847_50654C.1
tacggctcgagaagacgacagaagggctctcatgtttgtaggctatgtggatgagttgcatctggctggtgtttctttggcttcttcatttgccaatgttactggtttcaacgtgttggtatgctgacactattttctcttatgttatgttttacaccaactttcaaaatctgtcagatctgtctgtgcatcttgcatcatattatatatggactatagtctatgagggtgttaattctttgtcatcaatttgattaatacccattaaatagagaaaacaacaaaacataattgtttggcttgatttaaaacattgaatcaagatttaagggcgtgactgttgttttcgatttggagatgtgacaaaataattaagttggaggagatgacgtttactttatgatttatatttttaaacgacataaagatcctagtggttt

SEQ ID NO: 88203 - DNA, 143 bp, Glycine max
  Clone ID: PAT_MRT3847_50655C.1
ttcaatctgtccataccctaatagtacttgccagacccacatacctatgtggttaactccttgacaaccaccaagaatcttagctatgataacactccgacacataccatttaactatacccgggatatctttatagtttctt

SEQ ID NO: 88204 - DNA, 1883 bp, Glycine max
  Clone ID: PAT_MRT3847_50656C.1
gcttttaatttggaagagagacaaaccagcaagagtggagatggcgacgtcgacgtgcttcctgtgtccgtctacggcgagtttgaaaggcagggccagattcagaatcagaatcagatgcagcagcagcgtgtcggtcaatattcgaagggagcccgaacctgtaacgacgctggtgaaagcgtttgctcccgccacggtggcgaatctaggtccaggcttcgacttcctaggctgcgccgtggacggactcggagacattgtgtcggtgaaggttgacccacaggttcaccctggcgagatatgcatatccgacatcagcggccacgccccaaacaagctcagcaaaaaccctctctggaactgcgccggcatcgccgccattgaagtcatgaaaatgctctccattcgatccgtcggcctctccctctccctggagaagggcctgcctttgggaagcggtctgggatccagcgccgccagcgccgccgcggccgccgtggcggtgaacgagctgtttgggaagaaattaagcgtggaggagctggttctggcatcactgaaatcggaagagaaggtgtcggggtatcacgcggacaacgtggcgccatcgataatggggggttttgtgctgatcgggagctactcgccgctggagttgatgccgttgaagtttccggcagagaaggagctgtatttcgtgctggtgacgcctgagttcgaggccccgacgaagaagatgcgggcagcgctgcctacggagatcgggatgccgcaccacgtgtggaactgcagccaggcaggtgctctggtggcgtcggtgctgcagggcgacgtggttgggttggggaaggcattgtcctctgacaagatcgttgagccaaggcgtgcccccttgattcctggcatggaggctgtcaagagggctgccattcaggccggtgcttttggctgtaccatcagcggcgccggccctaccgccgtcgccgtcattgacgacgagcaaactggacacctcattgccaaacacatgattgacgcttttctccatgttggcaatttgaaggcttctgcaaatgtcaagcagcttgatcgccttggtgctagacgcattccaaattgaaccttctcttctctatctctatgagaggcttgtagatttcaagaaccggatttcttccaacttgctcgtaacactctaagtgctgaccggtcacatgtatttgaaatttgatctgatcaatgaagcagcattctagtgtggaggtctgaataaaaagagaaacattaaacccaagctgggagctctgtttgggtggtggaaatttaaatagatgaataattatgaaagacctagatcaggtcagtgttatggtgaactctgaagcatgttttagattttctttgctttgtttttatcatatttttatcttgctacttgagttgacaaagctcaaaaagaagtcatttttagtattttcttgtttcattatgctagttaatcttagcttttgaatagcatgtattgttccttaatatttctctttatcatttcactgtcaatgttttctaattctttcttggttaaaatctaagagtttatgtggatggaggctttcatcacggatttcaattcgaaagctcgttcctaggatatatgtatggttgctcaaagaaccattgctttatgatgaactgaagatcgatcattgtttatttattaccgcgttttcctttctcctgttttctttgaataagtttgaaaaagaatctgtgcactttttcctgcccttgtttgtattaaagattttgttgaacttactgtatttgaactttgaaggaaggaaaaaggtatatatgtaaacattatctaaaattatctt

SEQ ID NO: 88205 - DNA, 155 bp, Glycine max
  Clone ID: PAT_MRT3847_50657C.1
cctctcttttggttgggaagttgatggggactgattgattgttttctctagtttacggtgtagacattgataatcccgagaaatgtatcttaattattcagagttataaataataattatttatttttagcgccgttctagaagatcatgtttta

SEQ ID NO: 88206 - DNA, 553 bp, Glycine max
  Clone ID: PAT_MRT3847_50658C.1
ccacgcgtccgagcaccctcacagaacgcgtgcacgcattcttttacctatagattcagatgcaaagaagtgttgttgattattgtggagccttctttggaattgaagtggttacgttagtgggagacatggatccgttttttatgggtttagatagacacgtgaatgattagttgggattttcgtttgagtttcagtttcgtcataatttttgtttcacaatgccttaacatgatttcgaactaacgaacactgcctcatcattaaataaatattggcagcgatcatcgtatgtgggaaggcgcactgaaacctcattttcacaccacgctctgcctctgactcttatggaactgcaacatactatcgtcatgttagagatccttcctctgatggttttgctgagataatgatgcttcaagggagtctactaatgggtggacaactaaattcacatgatcatttcaaagactggagacttgatgttgataacatgtcctatgagcaattgctagagcttggtgagagaattggtcatgtgaacactgggctt

SEQ ID NO: 88207 - DNA, 2626 bp, Glycine max
  Clone ID: PAT_MRT3847_50659C.1
tacttcgcatgctctccttatagtttttggaaattattgaggtctttgcagtttgcaaaaactctaaacatttgatccatcaccatcttcttagcagtgaggtgaagtgaggtgactgcaatggtttctgtttgtgtgacctagaaataccaaagccctaagatttttcccatctttgctcttcttagagatctactgaactaacaagtcaataacagtacccacatacttcaacttcagcagcttttttatcgaatccactgtctagtgatccaccttcattttctttttcctataatttaaaccacactctaatcagttctctggatgcctgtttgcatcatattctacaattggagcttcatagtacaaactcttgctatttggatgataattagatggcttcaacagaagtgtcccttgtcattaaccagttggccatccgcacctgaggttcctttaggttgatgctacaggcttctatagatccctatgagcaactgcctcaacagtggcatcaacaaaatatttgtgctgacacagttcaactctgcatccctcaaccgtcacattgcccgcacctattttggaaatggcatcaactttggggatgggattgtggaggttctggcggctactcaaacaccaggagaggctggaaagaattggttccaaggaactgcagatgctgtgaggcaattcacttgggtatttgaggatgccaagcatacaaatgttgagaatgtattgatcttggctggagatcatctatatcgtatggattacatggaccttgtgcagagtcacgttgatagaaatgctgatattacagtttcatgtgctgctgtgggtgacagccgtgcatcagattatggattggttaaagtagatgacagaggccgcatcattcaattttcagaaaaaccaaatggtgatgatctgaaagcaatgcaagcagatacctctcttcttgggttgtctccccaagatgcatagaagtcaccatatattgcatctatgggggtttatgtattcaagacagatgttttactcaatcttctgaaatggagatatcctacctccaatgacttcggatctgaaatcatgcctgcagctgtgagggagcacgatgtccaaacgtatttttttgaagacaatgagtgagaaattgagatgacaaaagcggcataatacaattatctggaaaacacaagaggtgatgatcagttagaattttatgaccccaagattcccatttacacatctccaggattcttaccaccaacaaagattgacaaatgccagattgtggatgctattatctcccatggatgtttcctgcgagaatgcacagtccaacactccattgtgggtgaacgttcacgtttggattatggtgttgagctcctggacactgtaatgatgggagcagactattaccaaactgaatctgaaattgcttctctgctggcagaggggaaggtcccaattggtattggaaggaataccaaaattagtaactgtatcattgacaagaaagctaagcaccggaaagatgtcctcagcggatacatatattcaactcagatggttgtttaagaagcaatataccagaaattggatttgagattatgtccggtctcacattccaaatggagaggcagccatagaagagggcatgatcgtataattggataccttgttttgaggctagttaaccataagcactctgaatgcgaaattccttcctttgtggcaagagggaaggttgttattagtattggatggcaaacaaaaattaggcacttcaccatagttactattgcaaaaatagagagagatgtcatgattcaatacagagataatgttcatgaagaagataaagaagaggatggattgtgcataatatctagattaaaaggcagatcatagtatggatcaagagatggtggtcccgtctattaaatagatgggagctaattattacctaattgaatccgaaattgcttctctgctggcagaggggaaggttcccattgggattggaaggaacaccaaaataaggaactgcataattgacaagaatgcaaagatcgggaaagatgtcatcatcatgaacaaagatggcgttcaagaagcagatagaccagaagatggattttacattcgatcaggaatcacagtcatattggagaaggcaacaatagaagatggcactgtcatataaaggggtgaaagtacttatttcatggactggtgaggtggccagcagtagctcgaagaagcattccaaggaactttggggacagaaggttacaattgaaaaatcagcacccccttttgctatatatgcaaaatagaaggctctcccactgcatataaaaatatagaatgaatagtgtatgaaatcaaaatgcataaacgtaaataaaattaaaagctggatgtgaactgccaaactattttgtcctttaattagtatcactgaagtattttactattaattacttgggataatgaatttaagtgcacaaaagaatttgagggattctttcaaaaaaaaaaaaaaaaaaaaaaaaaactaaaaaaaaaaaaaaaaaaaaaaaaaaaaaaaaaaaaaaaaaaa

SEQ ID NO: 88208 - DNA, 834 bp, Glycine max
  Clone ID: PAT_MRT3847_5065C.1
tggaaaatctccacaaatctcctaaagaatgtcaaattacttgttatggtctttttaagttccttgcatattatcccgaagttggagttacttgaaacgacatcgtttcagggaagggagtgaagtgatagaggaaaccgtagaacagtggtggaaaaatgaaggcattgggatggtggctgatagcggtaggcacgcttcgattggcttccgtgtggttcggtttcttcgacatttgggctcttcgactcgccgtcttctccaacactacaatgactgaagttcatgggcgcacatttggaacttggacactgttgacctgcaccctttgttatatctgcgcattcaaccttgaaaataagcctctctacctggctacttttttgtcattcatctatgcattcggtcatttcttgaccgaatatctaatttatcatacaatggagattaagaatctgactactgttggcatatttgcaggaacatcgataatatggatgctattgcaatggaatgcacactcgaaagtccacttgaagcactcttagcctgcaaaaagagatggggcaaaagtgctctactgtgattggtggtattggaccgttaggtacaagagatgcagctctagatatctcatccttttatttgattttgaagacatttcatgttgatacaaatatgttcgtttagcaattgcggtttaaaaatcatggatgcagtgcttcaccatgttttttttaggtatgccaaggtagaagggggaaagtatccccactatgttggcaccctaacccctcaccacaaaacaacaaaactgatgatagcatggctagc

SEQ ID NO: 88209 - DNA, 389 bp, Glycine max
  Clone ID: PAT_MRT3847_50660C.1
cgcttattgtttgctctgcttctaatgaaatgtccaactcgcagaagagaggcggaaacgataattgtgcgcttttaggctaacttgctcactgtctcggagaactaacaccacttggatgcagctgagcggaacaagctcactcaatggcggcagtacagccatacgcagaggccagggctaacccacgaaacatcttgagacctcaaagccacctcaaagcgatgaaccaaataggggcctcaacggggactgcaaggatacgctccccccgaaagtcgatgctctctctaatcaaccctaaagctagaagtggcgaatcccgacttgactactgggagcaacgccttagcccccgtgaaatacctagcgcgctggtgggttccgac

SEQ ID NO: 88210 - DNA, 494 bp, Glycine max
  Clone ID: PAT_MRT3847_50661C.1
ggctcgagaccgttctttgcggctgtccacggttgggctttgaaagtcactaagaagatgtccgtgtctttgaaccccaccgtcagccttagctcaacgaatcgggagacagaggatcacgatgcatcatgatcttcctggggggcttctttaccaaacgcatcccactctacacctttgttgatcgtgtctagatcgtgaaagcttggcacggaaagaagatttggaccttgactgtcagtggcagatagggatcagctcgctgcagacaacagtagtagcaaggattgcgacaatgctgaaaattctgcgaccaatgatcagactgcatacgggaattccgcagatgaaaacttacaatcgcaaaccgaagttaatgctgtgtcaggatctgcaacattagaggcttccatgtccaatggttcaattaaccaagagcaatggtcagaagcatctcctatgtcacaatctgcaaccaacgagctttcctgact

SEQ ID NO: 88211 - DNA, 751 bp, Glycine max
  Clone ID: PAT_MRT3847_50662C.1
cttagccgctaaaggcagaaaatatcaaagagaaacactattctcctttgaaaaatgtcagacattctcaacaaaaatgaagccccagaaaaccagaaatttgaagtcacatttagtaggaaaagtgttgtaaaagcactcaacccttcactagagccattttcaatcactctctcaaatcttgacctgctctcaggtcgttttcctgttacatacttgtatttctaccgcaaactagaatcagataacttcaaagcctttgttgatgctcttaagaacactctagcacaagttcttgatcactactatccctttgctggccaaattgttcaaaatcccaaaactagtgagcctgaaatcatttgtgacaacaatggtgctctagtcattgaagctcacacaaatatcccattaaagagtttagatttttacaatctcaatgaaactcttcaagaaaaggtagtctcagttgaaccagacttccccttgcaaattcaggcgactgagtacacttgtggaggcatttccatagcatttacttttgatcatgcattaggtgatgccacttcctttggcaagttcattgcttcatggtgcgaaatagctcaaaagaaaccactctcgagcataccagaccatactagacaccttcgtgcgcgttcttctcccaaatatcaaccatcccttggatcaaacttttatgaagtgcaccatgaaagagtacagaacatgccaatgaatcatgtcttgc

SEQ ID NO: 88212 - DNA, 221 bp, Glycine max
  Clone ID: PAT_MRT3847_50663C.1
tacggctgtgcgaacaggtgagagggggctgcgagtggcattcctattgctgattcctagcgtatactgctagacagcatacagccatgttgtagaactaaggcgcatggatctgtaatatgtgtcggcgctcgctccacttttgacacatgcgtttcctactgtgcacactgtgactggcatcctagggagctagttccttgtggaggatgaggaagttg

SEQ ID NO: 88213 - DNA, 360 bp, Glycine max
  Clone ID: PAT_MRT3847_50664C.1
ctcccaatttcgctatacaagctctcgattccgacgcagcacattacgactcgagctgcgtcgtgaaaaatgatagttaccagtattggtatgctctgacggtcaaagtttccgatgccggtaattttgactccctgttactgcgaatgcgtcatatcgtactcaatgccttaaatcaacacctcgaaatatactaagtgtatacgttggcccttggctcggaatgcttactagttggctcggaatctcgattttcatgttatactctgtctaaaggaaaggatgggaagccatgtttatccaccttttccatgacattgcaacctacgtgggcctgaattaattggtatgggatggaac

SEQ ID NO: 88214 - DNA, 255 bp, Glycine max
  Clone ID: PAT_MRT3847_50665C.1
gcgggccccggggaaaaaaaaccccccagggggtggaaatagggggttttttaaaaaaacaacccctccaggggcttcccaaaggggagatttttcaaccccccccccggggggaaaaaatttttttttccttgggcccaaaaggggttggtaataccccctctctcttcccggggggcggaacaatcccttggggggccggctcttcctctggcagggcccccgggaaggttcttcacccctggccccctgggg

SEQ ID NO: 88215 - DNA, 320 bp, Glycine max
  Clone ID: PAT_MRT3847_50666C.1
ggaaaaaccggaatgaaaatgcaatttttttttcaccaaaacaccagggggaatgggggaaaaaacaaaaccagccaaaatccccccccccgagggggaacccggagcaccgggggacgttgccggccaccatcgcggcgggcaaataaagaagacgattctgggaaaagatccccttagggcccaggggaaccccacctttgtccaaaaactccccctttaggaattaaaaacgggggaaacttggtgcaacccaacccgggcctcggttgggcaggggggagcccaatccctaagggcccccactaagcctggggggc

SEQ ID NO: 88216 - DNA, 327 bp, Glycine max
  Clone ID: PAT_MRT3847_50667C.1
gggacgcataggcaaagtttcatgctttctctgaactctgacttctataacacatgtgagggctcttgtgtgcatttgagcctaatccaagcagggatatcagcgaactgacatgtgaggttgctgaccgtggctccttttctgggagggagtaccactacccttcaacagcacgactcattgatgcttaagaactgacatagaggtgctgatacaggactcgtatcggtagatacatagacattttgctatccgtatacattactgagcgcacaggaatagggttcatgcgccgaacagatcatgcttgggcgacctgtgaatgca

SEQ ID NO: 88217 - DNA, 346 bp, Glycine max
  Clone ID: PAT_MRT3847_50668C.1
tttcatttcagagccattaggtatatggaatctaccagatctatactcactcctctagtgctcctcgtcctcttctctctagccaaagggcttcacaatcccgcatgtgatgctgcctatctacatgaccatgatggcgcaaccctccaagtgttccatgtgattcagccattgttccccattcatgccctctaaaccaatgtcatgggaagagattgtcctatagctacaagccaaggaccaagccatgatgcagtaactttctaaattagttgctacaagatcgcctgtctaactgcctcagggagacatatcagtcagattcctacatatatagtgagggcca

SEQ ID NO: 88218 - DNA, 452 bp, Glycine max
  Clone ID: PAT_MRT3847_50669C.1
atagccgatgtgcttgtcttagtgtgtcagtcattcctgttcctcaagtcaaggtcgatttttttttctatgatcctccacttcactaatcaaactattgtttgctaattacgcatctgaattaggatttatttgccactaatcaatcctaatccatcaatatcagtgattgtttagttctgtttttttttcttttcgcatgacggctttcggagttggaacggcgacgtttgagtcagggtcaatgcaaagccccaatttagattattattaatttattattggtaattaaatattaaatatagtcagaatgtcattttctttatatattcacttaggcactgatatttcacgcaaaaagtagtaaattttctcgattttgtgatcctcctacttggttccgagaaaggtgatgtcaagaaaatgttgaaatatagtatttctttctagcc

SEQ ID NO: 88219 - DNA, 1365 bp, Glycine max
  unsure (1)..(1365): unsure at all n locations
  Clone ID: PAT_MRT3847_5066C.1
gtcaactgtattagatgaaacaaatagtgataaacaaccccgtagagagaaaagcggctcgagaaaattagttcgtcgcataccgaaggaaggtataaaaaatactatgaatactgagtcatctgtattagatgagacaaatagtgataagcaagtttctcgtagtaatgaattgaggaaattatataggcgaaaaactttgcaaatttctacagttagaccatcaattgtgtgtttgaagaaaaagcttattattcttgatctaaatgggctgcttgtggacatagtttctccccctccaaagtaccgtaaaccagatgcaatggtaggaaagaaagcaatgttcaagaggcctttttatcttgagtttctgaacttctgctttgagaaatttgaagtggctgtatggtcttcaagaaccaagaaaaatattaanaatgtcattaatcgnnngatgggaaacatgaaagaaaggttgcttttttgttgggatctttcttattgtaccaaaacaagtttcaaaactcttgaaaacaagcagaagccactggtttttaagtgatttgaggaaaatttgggagaaacatgattctaatcttccatgggagaagggatacttcaatcaatcaaatacattgctgttggatgattctccatacaaggcattgcttaatccagtaaacaaaatccatacaactcagtgttcccgcgcacgttcacatttcagaatgaaagtgacaattcactagctgttggaggtgatctgcgacaatatttggatggattagcaaatgctgaaaatatggtgaagtatgttgagcagcacccatttggtcaagaagctatcaatgaaagaagtcaaagttggaacttctacctcaaggttattgatagtctttctacctgttaacctgaagagtgaaaaccgtgttcgtcaccttggatatcaatgtttactttgctagctaaacaagtcacagtggttttccaaagaaatggaactataaaagtctttttattttttgttaaattattcaatcggtctctaaattatttggaaaatttcaaacaagtccctaaagttctttttttggatccatagactaaaatagcaggtccctaggattagtttataccagctaagaaaatggcaatttatggaagttataagttttaggaattcaactaaaaaaaacttaatttagggacttgaaaattatcaaacacttaaccaactgagtaatttaacccttatttttctcatcaatagcgcagcattttttttttcttttcatttttgaacatcttgtaaaacatctgtaagacaagctgtaacagcaagctggctattggaaggaatacagg

SEQ ID NO: 88220 - DNA, 568 bp, Glycine max
  Clone ID: PAT_MRT3847_50670C.1
ggataataaaatctagttgcatccattaattatcgaaacacacaaacatgctcctaggccctagcatattattatacatttatataataaaagtctgcattctgcaaagttttctaaaagccaacaaagagcaaatgcaaagggccggatatatatctagttaacagccctacagttggtttttatttgcccctgggatcctgggagtacccctatgcgacccattttctccataaatattccaaagtctctgaaaaacataaaaggccacttgctatacgtgttgaccagggaagcaggggggctgtcacccaaaaaagcctggtctgactgaagcacccccaaattggtcacaatgtttttggaatacatgttatcaaatggggggggggggacgggatccaagggagccaaattggggtcaaagtcagcttgatttggacacagtttcactaaattttggaggagggaaacatcaagggcgggatcagatttaccagagccaccaaagtcaaaaagcctaggcttgaacgggaagcattgagcaaagccaaaagggggggcccct

SEQ ID NO: 88221 - DNA, 458 bp, Glycine max
  Clone ID: PAT_MRT3847_50671C.1
ttatttttttttgttggaaacaaatgctcatgcttcaatctcaatcttattcgaccaggaggttacaaactacacccttgcattcttcttgctcttatttgggagacaaggccaccattataacttttgtcttgcttttgcttgccaccaaccttgaactttttacattgctgactagtgggttcttttttatcacggagtagatatttcatacagattaccttccatattcttactcttaagatgctacacgaaaccttcataggcggcctccaggtctacgattttgatgaggtcttcttccacttgcgcgggggtcatctgaacgacatactattagaccctctacctctccaaagagggggtgctacaccaggaagtttgtagaatggctagagcgcaaatctctgatccttgggcgcatccttaagacgtggaaacgtgcgtgctcattccta

SEQ ID NO: 88222 - DNA, 436 bp, Glycine max
  unsure (1)..(436): unsure at all n locations
  Clone ID: PAT_MRT3847_50672C.1
cccacgcgtccgaattgatctgtgtcaagtcacttggtttataattttttatgctcatttgtaaattgaaagtaccctgtactaggatatgttgcttgtgtctgattggaatttggaaaaggtgtaaaatataacttctttcttgatgctgtttgattgatacattgccataaaaattgagaaaaagttgaatttggtttatcaggtagaaaataatgtgatactgctgcttctgtgttatataatgagctaacaataaacatacatgcttttttttatttgntctttttctcaattttcttttctcccatcatcgtaattatctgactccatttgatccacctacaccaccgttatctctgacccacacttcatctgcttgaaaacccttgctattcgtccttctgcatactaacactcacatctgacaatgttt

SEQ ID NO: 88223 - DNA, 1066 bp, Glycine max
  Clone ID: PAT_MRT3847_50673C.1
cctattctacaccatcatttacgttggatagaatatatagcttatgcatttatctgcctatttcactcattagcactcatatctgttcacaaaggttggtagacgaatagcctccatctaacatccaactagaagacattggtagagcagggtcagtccatctaatggccaaccacattagagttacacgtcgacctatttcacctggtaaaaattcccatgcactctaggttaaaaatttttatcctttatcacatacccaatataatgttagagtttataacttgaagcaaaaaattgatactttcaaaataagaatatcattcttggttttcaaaaacgagtatatgtattgtgtcttgcaacttcatggcatgtactagacgaatctcatatctcttggtttactactactaggtaggcatgcatattttttttaagcaattctagcttttaagccaaaagggtaattttagattagagactatacaatgttggattaatagttgctaacggaacagatttaaagcaaaacagatattgtggattaaatttttatattataaatggagtttagatcgaaatgatgaatgaaaatcaaaagaattaaaataaaatgactaagacaataatgaagattaacagaaaaccagagaaaatgttcaacattgttcatatcaaggatcaagtcaagaatttcaagattattctcaaataaacatgatatgatataacacttaaattagtttactttaaatgtagccttatgatgaagtgaataggtcctttgttgtaagattgaaggatcaactaaaacatacttggtatctgctaaacagtaatgaccacatgcaccttgttacaaacaatcaagatttggtgaacccaactatactagttggatggacaaaactcaaagatttctatggactcacaggaaatcatcaagtgatcatgacctatttttgacagagtattttcttccttaccatcttcgaaagcacatctcaatcaaaagtttatcttaaatgacattttttgtactaccaaattcccccacaagtcc

SEQ ID NO: 88224 - DNA, 502 bp, Glycine max
  Clone ID: PAT_MRT3847_50674C.1
aattcggctcgagagttttgatgcgttggatgaacaagagaaatgtatattccttgacattgcttgtttgtttgtgcaaatggaaatgaagagggaggatgtggttgatatattgaatgggtgtaattttagaggagatatagcactgactgtactcactgcaagatgtctaattaaaatcactggtgatggtaaactgtggatgcatgatcaagttagagacatgggaaggcaaattgtgcatagtgaaaaccttgcagaccctggtctacgtagcaggctctgggatcgtgatgaaatcttgattgtcttaaagagtatgaagggaacaagaaatgttcaagggatagtcgtagattgtgttaagagaagaatgtccactcctagagatcgctctgctgatgaaattacttgggaaaattttcgacgtaagcctagttgtaaattggcattagaatatattaaagagaagtataaaaagtatgtgcgggatagagaagag

SEQ ID NO: 88225 - DNA, 255 bp, Glycine max
  unsure (1)..(255): unsure at all n locations
  Clone ID: PAT_MRT3847_50675C.1
aagggtggtgcggtgangtggtgtggcaggcagcacggataaaggccgaggcgatggcccaagtttcaaagtttggaaaaagcacgacgccaaagccaatggaagtgaaggaggagtctctagcttcaacaagagaagggcccaggcagagacaaaaacgacattccaagaagaacttctatcaaattcgcanntcaaccaatcatacatctctatgttcagatatgggatgggnggntatcagntactctcctc

SEQ ID NO: 88226 - DNA, 177 bp, Glycine max
  Clone ID: PAT_MRT3847_50676C.1
ctctgcgactagaacatccagaaggagtcaaggcttcagctgatccaacgtctcagtagtggcatacatatcttcgttaagactctcactggcgacaatataactctagtggtcgtgaattctgacaccattgactatgtctaggcaaaaatccgggtcaaagtctgtatccccccg

SEQ ID NO: 88227 - DNA, 153 bp, Glycine max
  Clone ID: PAT_MRT3847_50677C.1
tacaggtgtgagaagacgactgaaagggctataagactacaaaatggtgtcgactaaaagtaatgaatgtgcttctggaggaacatagtaggagatgctctgaactttcaaaaatggtcaaccattatgaagagaagaagaatgttcaaaagg

SEQ ID NO: 88228 - DNA, 651 bp, Glycine max
  Clone ID: PAT_MRT3847_50678C.1
gagcgcaccacaatgggcagtgcattttctgccctattcggccgcgggtccaccgtcgccgattttaaggtggagagtttacacgtgttgccgttccactcgtcggagcgctggcagctacacttcaacgaggtcaaagagacctctaagctcgttgtgatagatttcacggcgtcgtggtgcggcccttgcagattcatagctccggtatttaacgagatggccaagaagtttagcaacgctgagtttgtcaagatcgatgtcgacgaattacctgatgtggctaaggattttaaggtggaggcgatgccgacgtttgtgttgtgtaagaaaggaaaagaagttgatagggttgtgggcgccaggaaggacgagctccagaacaagattcagaaacattatcaataaaacgtggaatcaatcaccacatgccatgctagctattcaaacaagcctatgtattcagctatgttatatatgtgtgtctatctatctttcttttcaagggaaaaaatatagaaaaaaaaaataaagtacaaggcttgtgatgatgatgatgaagttgtacaatttaaacttattgggttttatgtttcttcgccaagatgatgtttgtttcagttatatataattttccaaaatactttctca

SEQ ID NO: 88229 - DNA, 2014 bp, Glycine max
  Clone ID: PAT_MRT3847_50679C.1
atggcgtcaattactttttctcttcttcaatttcatcgtgctcctattcttctgctaattctgctcgcgggtttcggtcactgccatattccgtcaaccctcgaaggtccctttgatcccgtcaccgttccgttcgaccccgccttgcgcggcgtcgccgtcgacttgccggaaaccgatcctcgagttcgccgccgcgtccggggtttcgagcccgaacagatttcggtttctctctctacctcccatgactccgtttggatatcttgggttacaggggagttccaaataggtctcgacatcaagcctttagaccctaaaactgtatcaagtgttgttcaatatggaacttcaagatttgaattagtgcatgaagctagaggccagtctctcatctacaaccagctctatccttttgaaggccttcagaattacacatctggaatcatccatcacgttcaactcaaaggattggaaccaagcacactatactattatcaatgtggagatccttcattgcaagccatgagtgatatatactatttcaggaccatgccaatttctggttcaaagagctacccaggcaaagtagctgtagtaggagatcttggtcttacttataatacaactactaccatcggtcacctgactagtaatgaacctgatcttcttctattgattggtgatgtaacctacgcgaatctgtacctcacaaatggaactggctctgattgttatagttgctcgtttccactaactcctatacatgaaacctaccagcctcgatgggattattggggaaggtttatgcagaatctagtttctaacgttccaataatggtggtagaaggaaatcatgaaatagaaaaacaggctgaaaacaggacatttgtggcctacagttctaggtttgcattcccctctcaagaaagtggatcttcatctacattctactattctttcaatgctggaggcattcattttattatgcttggggcttatattaactatgataaaacggctgaacaatacaagtggttggagagagatctggaaaatgttgatagatcaataactccctggcttgtagttacttggcatccaccatggtatagttcttatgaagcccattacagagaagcagagtgcatgagggtggagatggaggacctattatacgcatatggtgtggatataatatttaatggacatgttcatgcctatgagaggtcaaaccgagtttacaattacaatttagatccatgtggtcctgtatatattacagttggggatgggggcaacagagagaagatggcaatcaaattcgcagacgagcctggtcattgtcccgatccattaagtactcctgatccttatatgggtggcttttgtgcaacaaattttacgtttggtacaaaagtgagtaagttttgttgggatcgccagccagattacagtgctttcagagaaagtagctttggctatgggattctagaggtgaaaaatgaaacttgggctttgtggagttggtatcgtaatcaggactcttacaaggaagttggggatcaaatttacatagtgagacaacctgatatatgccccatccatcaaagggtgaacatagattgcattgcttcgatataagagccacgaggaggagttcatttgctgtcattgatgaaaatgtctcaatagctgaatataaacctccgtggaaaacctaatagtgctaaatgtcactactgggttgagtagagtaggcagacgatctatctttcaaaagatgttaacgctcctactagtctactactagggcccaatattacagtaaactgtgttgtttgttaactatcaatatacagagtgtgaaacattaaaattgtaaatccttaatattttgctaaatgagaatgaaaattgccttggcgtaaaaaaaaaaaaaaaaaaaaaaaaaaaaaaaaaaaaaaaaaaaaaaaaaaaaaaaaaaaaaaaaaaaaaaaaaaaaaaaaaaaaa

SEQ ID NO: 88230 - DNA, 768 bp, Glycine max
  Clone ID: PAT_MRT3847_5067C.1
ggaagtgatagaggaaactgtagaagcgcacagagagagctaagtggaggaagaaaatgaaggcattgggatggtggctgatagcggtaggcacgcttcgattagcttccgtgtggttcggtttcttcgacatttgggctcttcgtctcgccgtcttctgcaacactacaatgactgaagttcatgggcgcacatttggaacttggacactgttgacctgcaccctttgttatatctgcgcattcaaccttgaaaataagcctctctacctggctacttttttgtcattcatctatgcattcggtcatttcttgaccgaatatctaatttatcatacaatggagattaagaatctgactactgttggcatatttgcaggaacatcgatagtatggatgctattgcaatggaatgcacactcgaaagtccacttgaagcactcttagccagcaaaaatagatggggcaaaagtgcagtactatgatgggtgatattggactgttttagatacaagagtcgcagctctagatatcttatccttttatttgattttattagaagacatttcatgttgataccaatatatacggctacccattgcagtttacaaaattatggatcgatgcagtgcttcaccatgttagcctcgttttgaaaatgcaaatcattattggctttgctccgttttgcactaactgattttgaagagatgagatccctggtgtttagaattttgtataccaaaggggggggggggggggggggggg

SEQ ID NO: 88231 - DNA, 393 bp, Glycine max
  Clone ID: PAT_MRT3847_50680C.1
aagaaaaagaaattttttaatttttttggggaaaaaaaaaaatattttttcccccggcaaaaaattttccaaacctttttcaaaaaccgtttaaaaagagggcctctttccccccccctaaaaaaaaattttccttcctttatttcccaaaattttaccccccccctcattttttttcaattttttttacatttttacagaaccccatttttttttttttaaatccttagggggccccccttttttcaaaattaaccttgtctttttttttagtgggggggtttgctacctgccccacatatttggggacaaaatattttaaggtccccctttcgggttgggcctttaaaaaattacccttttgaaatttgtttgcccatttccctttttttt

SEQ ID NO: 88232 - DNA, 154 bp, Glycine max
  Clone ID: PAT_MRT3847_50681C.1
ctcctccttcaatcataacattatataaaatatatggtgcactcagtacattcataacggggtaagcgtactcttgagtgcacaatctctaacctttcattctcataccagaatgtgctgccttaaattcttactcaataatcttttcctcttt

SEQ ID NO: 88233 - DNA, 408 bp, Glycine max
  unsure (1)..(408): unsure at all n locations
  Clone ID: PAT_MRT3847_50682C.1
gaaaatagtgatcctccttctcatagaagggttggaatgtgttgtttatcgtgactatgagattgacatttcatttcgttatcctctatcctctatttagatttaaaccaaggaattgcatttaatcatgacaaaaaggatcaactgagtgggcactttctaatttatgcatgattaaaataattatgataaataatgaaatgaattatccacaagttgttggtttggatcatactgaagtttgtccccttaagtaatttttcgaatttgaatcttatggatgaaaaaaaatgtaattggaacgggagatcccatagtgtaatgtcatgaggtaaaagtgagagtaattgaaaagacaatgaagaagttagtangttacgaagattgtgcttatgtggtctaaaagta

SEQ ID NO: 88234 - DNA, 113 bp, Glycine max
  Clone ID: PAT_MRT3847_50683C.1
aacggttgcaagaagacaacaaaaggggcccctgttagaagacgacttaagggctcgtttgtaaaaatacgacagatggcgattcacccctctatctaagatggtcttccagg

SEQ ID NO: 88235 - DNA, 398 bp, Glycine max
  unsure (1)..(398): unsure at all n locations
  Clone ID: PAT_MRT3847_50684C.1
ctcaaaagagcagtgaaggcaaagntgactgngantgactgtacatctagtttatatccttcagagggaattcactagcgtctaaatgctactaacacattgttatggagcataattgcatgattggtatatgcgcacaatgcaagacaagttctttaactctcctcnctgagaaggagtgtgagggccccgcagaaaaaanggacaacaaaaacatacacaccnagacaaggcgcgacaccgaaacaacattattgcatgaatcgccaaggcaccaacctcctgtcgcattgcgaggatcttgtgatttctctcttacaatagggaaaccatcgaatgagtgatgcaactatactgatccttatgctggaggagacgtctatgcagaatcaagaccc

SEQ ID NO: 88236 - DNA, 166 bp, Glycine max
  Clone ID: PAT_MRT3847_50685C.1
gaaattgtgattgcctatgccctacgaagtaatcatcttggacttgaaggtgccagcgtaatcctaaacattctaccactagcactcacttatatacagactggctcactagtgccagttgtatatgcatggaatctgagctctaatgatcactacttgcatcaca

SEQ ID NO: 88237 - DNA, 616 bp, Glycine max
  unsure (1)..(616): unsure at all n locations
  Clone ID: PAT_MRT3847_50686C.1
aagctgggatttggtctcgagagagcacacgggcggcgtcagcaacaaaactaaagaaagcggtttcacagaccgagaaatcccaatcctatggcagaggaagggaaacccgatgaacagctctttcagcttctctccaatcttctccaccaggtggaatcactgacgaatcaagaagaagttgagctgcgttctaaaattgaaactcttggattagaggttacaaaagttccttcaaagtcaacgcagcaccttaacgagttggaaatagctgaggagttggataaattatcagcaagattggataatcttgatgagatgatatcatcatcaatggcttcagatccacaggtgcagtcactcttgagtgatacagccgatgtgtggatgccagttatcactgctacttctgaggaaaggcgcaacttcacagcggctactggagacagcaccctccaaactgatgtggaaaagtctaaatagtttcctattttcttgtctttgaatatggacatgtttctattgctttacagtatactaattcattttatttgtaatagactgagctacataatagtaaataaaggggttcattatatttgggtctttttnnnaa

SEQ ID NO: 88238 - DNA, 537 bp, Glycine max
  Clone ID: PAT_MRT3847_50687C.1
tcctctagagcggccgctcgcgatctagcgccctttttttttttttttccacacaaagatatctttattattttgaataaaggtgatgagcgcgctttcctatttacaatctaactgagcgcctattacagaggttttagcaggatcagagggatctaggggaattttcttggtcttggggtcgctttctccgttctttgacatcttggttgcaggcacttctccttcggttgcagttgacgcggccagtcggatttcttctcgagcgagcgtgatctcgcgggactgggccatctcgcagctttccttgtcgcaagtgacggcttgtttgatattgctccgcagggatacgactcctcgaggacctggcatattcatcatcatgcaggtgtagtgtgggacagccatgaacttggctaatgcggggtgttcgagtatggcgtggtacgctgtctcgaaatctgcaactttgaaacaaatgttctctgtacgaaagttctcccaagtgccaaaggtaactggcaaagtgatctgacc

SEQ ID NO: 88239 - DNA, 904 bp, Glycine max
  Clone ID: PAT_MRT3847_50688C.1
aagaaagcggtttcacagaccgagaaatcccaatcctatggcagaggaagggaaacccgatgaacagctctttcagcttctctccaatcttctccaccaggtggaatcactgacgaatcaagaagaagttgagctgcgttctaaaattgaaactcttggattagaggttacaaaagttccttcaaagtcaacgcagcaccttaacgaggtgtttttcacttgatgcagagttctcttatccctgttgaaatgtgctagaacatatgaaaagattttttcatcttatattatcctgtgaattagtttttcgatttcctcgttatctcttgggattagttattatattttctcaacatttttatttcctcattgaggattagctatcatattttcttttcttatcatgattttttttcttaattaattaggatcattattagtatagataagggttagtgcttaagttctatgaacatatcaaacacataatttcaacaaaatgaaataccattctctcattttgtgttcttatttttttaatacattatctacacagttggaaatagctgaggagttggataaattatcagcaagattggataatcttgatgagatgatatcatcatcaatggcttcagatccacaggtgcagtcactcttgagtgatacagccgatgtgtggatgccagttatcactgctacttctgaggaaaggcgcaacttcacagcggctactggagacagcaccctccaaactgatgtggaaaagtctaaatagtttcctattttcttgtctttgaatatggacatgtttctattgctttacagtatactaattcatttatttgtaatagactgagctacataatagtaaataaagtgtttcattatattgttcttttta

SEQ ID NO: 88240 - DNA, 254 bp, Glycine max
  Clone ID: PAT_MRT3847_50689C.1
aagtcaatatacctgtattgcgagttctggaaatcaagattcatactggataactattgcatgctggttacgctataaattaaaggagatgctatctagatttaccaaagatttgtgtcaagcttacttcttctctaggagtatagatgttactaataatcacgttgaaagttaagaccccttttatgaccaaattcgcttgtctaattcattttatactgttggaacttaaaaatatgtatttgcatcataat

SEQ ID NO: 88241 - DNA, 467 bp, Glycine max
  Clone ID: PAT_MRT3847_5068C.1
gcggcgggcgggcggtcgtccttttttttttttttttttttttttttttttttcgcccatgacctaattttaggggggcgtgagaactaaagctatacataactgaaaaacatgcttgtttgacacacaccgtgttgtgtttactaaagtaaaaacaaacattcagtaaacagaccccgaataagcaaatggtgtccagatcaataaagaaaacgcacagtttcacggagctctaatttagccacccttgactaccagagtgtcatttctgcccccaaatattccagactgtggtgttatgactttttcgcatttgcttttgcaaaggatcagatcaggcagcaggcattggagggggcatgcaacacctgaaccgaaccttccgaactggtggcatgatctcattctctgcataataaagcatttccacaatttcagcaaatggtggcctgacatgagggatggga

SEQ ID NO: 88242 - DNA, 775 bp, Glycine max
  unsure (1)..(775): unsure at all n locations
  Clone ID: PAT_MRT3847_50690C.1
ccacgcgtccggcactagagcatacctaagcacaaaaggaaaaagtgagataactcttactcagctggtgcaattggaagcccacagttgctgatgctgagtgggacttggtcctgctaaccatcttcaggctcatggaatcaaagtggttttggactcagcccttggtgggtcaagggatggcagataatccattgaacgttctattggttccttcccctgtgcctgttgaagtctctctggtccaaacagtgggcatcactaagtttggtagcttcattgaagcagccagtggattgagcttgggccattcttggtctgaaaggcttcaagggatttttgaatttgtgtcaaaccagtctggccagccttccatgtttcccccagttgcagacaccattagatctttagcaaatccaattctcaaaggaggagtgctacttgaaaagatcataggaccacggtccacgggtcatttggagctcataaacacaaaccccaatgataatccatcagttaccttcaactattttaaggacccagaagacttaaggaagtgtgttgaaggcatgagaaccatcatagatgtgataaactcaaaagcattctcaaagttccgctaccatanacatgccggtccaatctctaatagaacttgatgttgcacttgccagtgaacttgaggcctaaacatgctaatgctgccttttctttagaacagtattgcatagacactgtgctaacaatttggcattaccatggggggtgccaatct

SEQ ID NO: 88243 - DNA, 462 bp, Glycine max
  Clone ID: PAT_MRT3847_50691C.1
cgtgaacccgagggacatctatacttactaaagatgtctgatgggagagtacacatcactattctatacaactatgtggttggcatgctcataatgattgctcgactagactaataccctggacaggattagcttgttgattctcctactcatgcatgtgaccatcgctctctgcacagtaggaccatacatgctcgatctacatcagcacgctgcgactatccagacgctattctggctcactgcccataaacgatctccccagtatacggaccttgccaactgtagcactactgacaaaagctgggatcatgcctagcgcgttttactcagcaaattggcattcgaatgtacatgcatatacgtcctgttcccctttgactcatccagtggaacttgaatgctcaggaaaaaccgccatcttaccagtgagaaagacactggttaagcttatgacactcc

SEQ ID NO: 88244 - DNA, 567 bp, Glycine max
  Clone ID: PAT_MRT3847_50692C.1
cccttctctattatattcatccattcccttcttataattttgaatttcggtaatgatattttgatatcttaatattccaaatatctcattgacactctttatttgtttttatctcttttttttgtcacatcaaattaagtatttattacatcatctatttcaatgacttttcttcatttctttcaatttttcactctagtttttacaaggacttatacttctctatctctctatttgttcctaatatataaagccaaagggtattaaagggtaccaaactcttgtcttcatattttctacaccttcaaaacccattatggtcatgagcagcatcacatttcctccaaacagtgacgactacattggcactgagagctgcacggacctccaaaacatagaccatgtcattgataaccaccagtcctttaaatccaacgatgcaggaaacaaaaccaaggtcaagaacaacatcaaaatgaaagagaacaaagtgttccctccccctatacccttactagctcgaactcagaacctggcctcacacatgccatgggtgttgaagaggta

SEQ ID NO: 88245 - DNA, 297 bp, Glycine max
  Clone ID: PAT_MRT3847_50693C.1
tctctttcgttcgttgacgcgtgggcggacgcgtgggttaggactgagaatacgtctgagaactacatcaaccttgatcacaaggatgtacccactttggaggatgaatgaatcatttgatgatgttgacgtggagtagggtaaggattccctgatatagtataagatcaaggaggtgccataccactgtcaaaatttaatacttcactatccaatttgcgttgcaatgccataagagatcaccaaggatgaatactcttgatttctacaagagtctcactatttgactgagaatag

SEQ ID NO: 88246 - DNA, 262 bp, Glycine max
  Clone ID: PAT_MRT3847_50694C.1
aatagaaatgaatatattaaattaaaaactaaagtaacattcagaagaaaaaattataaaaatggcataagtgaacttgaacttaacggaccgtaagctttttaaaataataagttgcaagaacgttcccattggatgcctctgctatggtggttacgaagaagttgagtcacaggctttgtttaccctttctcttttatggtggggttgggaaaatggggatggggtggagaacccttatttttaaaaacgtttttattag

SEQ ID NO: 88247 - DNA, 654 bp, Glycine max
  unsure (1)..(654): unsure at all n locations
  Clone ID: PAT_MRT3847_50695C.1
tttcgtnccggccgccaatgtctactacaactatacaggcaaagcaacgtgtttcgatttggatgacaattctgatcctcacgatcttggaggatggcaatggcaggcttgtacggagatgataatgcccgtaggtggaagcaataaggagagcatattcccagaatatgagtggtcatacgaagcaagagcctcttggtgcgactttttctacaacgtacagccaagaccacactggattactactgagtttggtggtcatgctattgagagagttctgaaaaggtctgccagcaacattatattctttaatggtttaagagatccttggagtgccggaggggtgttaaagactatatcaaaaacaatagttgctattgttgcaaaaaaaggagctcatcatgtagacctaaggtactcgagtaaggaagatccacagtggcttaaagatgtaaggaaacaagaggtaaatatcatagcaagttggatctcacaataccatcaagacctacaatccaatagctaagggttgttcttattttttgggcatctttggaggcactgcaatcgttgttattgtcaaatgaaacaaatataaattatataatggataccgaaaattacaataacatatgagtgctggttagtcaaaaa

SEQ ID NO: 88248 - DNA, 777 bp, Glycine max
  Clone ID: PAT_MRT3847_50696C.1
ccacgcgtccggtggtataatagaagatgaagcggaagaagtagcagttagtttctctctcatcactctctctctgatgtctagctagcagtgccaccaaaaaaacccactgaagcaaattatcatgatgaaactccctctgcaccctgcactccgaaaaagcgattgccatcctcatcaaaaccttccctcccttaaatttacccctttgaacaccacccccttctcatccacaactcggaacaccccaaaaccatgaaaccttttcttctctttctcatcacattctccttcctctgccaaacacacctactcctagttctctctgccacaacccccttgtccctccaactcatcgccctcctctccataaaatcgtccctcctagaccctctcaataacctccatgactgggacccctccccctccccctccaatccccaacacccaatatggtgttcctggagagccatcacatgccactccaagacatcacaaatcaccaccctagacctctcccacctcaatctctccggcactatctccccccaaatccgccacctttccaccttaaaccaccttaacctcagtggaaatgactttaccggcagtttccaatacgccattttcgaactaacagaactgagaacactagacatcagccacaattccttcaactcaaccttcccaccgggtatatcaaaactcagattcctcaggcacttcaacgcctacagcaacagcttcaccggacctctccccaagagttaaccaccc

SEQ ID NO: 88249 - DNA, 828 bp, Glycine max
  unsure (1)..(828): unsure at all n locations
  Clone ID: PAT_MRT3847_50697C.1
aaaaaaattaaatctttcattgcaaggaaaaagaatcatttgttacatttgtggtaatggtatcatcctaggtgattcttgtctctaacagaggcaaggagaaaagaaagaatgatcaatgatgataggaagaatgtttaatagatgcaggaacctgcagaatgtatgaacttgtaaaattatttgaatgtttatttaataatttctctttgagaaaaaaaaaaaaaaagttatcttatgaaagagactgtatacaaactagagtctgattggtatacgaagcccatcatagctcagttgtgcatcaaggccttcagactccaatagtttcgcaagggagtcattcacttcttcatgatccatcagatgcatcataccggtaaaaagtgttcttttgggttgaatttttcgcacttcctccaaggccctttgaagtccaaaatgtgtagaagtagagcggtcaggcctcaaagcatccaggattagaatttcacagtcttttagaagtggataagtttcttcaggaatgtcactgacatcactaatgtaacatatattaccaaaacgaaaaccaagggaccgataattctggccgtgccacactggtaatggggtgaacttcagttcatgtacaaaaaatggttcttccgatatgatattgaattgcaactctgagactttggccccaggtaagataacactagtatctactaaataataatgggtcttcgtcatcacctcgaagtcgcgcttggctacatatattggaatatgnnnctgaacattgtttgtccaatctctaagatcatcaagacctcngattgcatc

SEQ ID NO: 88250 - DNA, 295 bp, Glycine max
  Clone ID: PAT_MRT3847_50698C.1
cgcgcgcacgctaagctaagaattcgaatcgagcttgggctctctattactttaaaaccaaggcgaatgccccaccgctggggaaattaggagcgactcagggaactttttatttggatttgttcaggggggagataaatcagcttggtattgttatgtgcgttatgaatcatctgatgggggaagagggagaacaaattgtgagcaagcaaggacaaaagggtgttgattgcaatacaaggtgcttgtttaattggttacaagactgcaaccattgacgctgtgattgcataca

SEQ ID NO: 88251 - DNA, 346 bp, Glycine max
  Clone ID: PAT_MRT3847_50699C.1
gtgagctataagctattctatcgggaggataatcttagatgaagaggtgcgcatgatcttgagcaagttctacaagaacggccatgccatgatctagggctaccaagctgaacgatgatgataatgaaaactggcattcaagacactcttaggagtgaacccacgagcagactggtcggaacccacggatccttgacctgaaagacattcctgagtagcattggaaccaacgcaacactacgtatctgccgaacgcgttagatctgaccctactgcacatgaccggcctgatctcttttatggtactgcactccaagatgctcacgacgacgtagatatgctccct

SEQ ID NO: 88252 - DNA, 418 bp, Glycine max
  unsure (1)..(418): unsure at all n locations
  Clone ID: PAT_MRT3847_5069C.1
cgcgctcagctcacgcgtgcgctcacgctgtggtcttactcacatgaccgtgactcctctcgatctcatcaagtgcaatatgcagattgatccagcgaagtacaagagcatctcgtctggttttggaattttgctgaaagagcaaggagtcaaaggctctttccgtggatgggtacctactctttggtgtacagtgctcatggtgcctgcaagtttggatnctacgagtactttaagaggacttactctgaccttgctggacctgtgtacactgtcaaatacaagactctcatctaccttgctggtnctgctncagctgagatcattgccgatattgcactttgcccatttgaagcatgtgaatgttcgtgttcagacacagcctggatttgcttggggggatgtctgatggatttcc

SEQ ID NO: 88253 - DNA, 356 bp, Glycine max
  Clone ID: PAT_MRT3847_506C.1
cccgaattgactggacacagcttacagttctggagacccttgcgagctacacatgaacagacccacttaaagcttgtctgcttgtcatgactgatatctgagtaacatctaccagactgagaagacttacgcttcctacagatttctagtcctgccaaaagaagcttcatctgattcatatcaatgagtaaaatgtgatggaaagccatggaggatgcctcaagaagacaatgttactgaggagtccacaagaattcagagttctgttggctgtgagagatccttctctgaaggcccatgcaaggctgctccgtacagcaagaattgaagagccgtggcatgatttccaggaatag

SEQ ID NO: 88254 - DNA, 836 bp, Glycine max
  unsure (1)..(836): unsure at all n locations
  Clone ID: PAT_MRT3847_50700C.1
cttccttttactttacctatttatgggggatggaaaatgttttacttccatgttcgagcctgtacatcctaatttttaattgtcatgccttactgggggcaatggatggtcttaacaagacaaacaattttgtttgattgtgaacaaaattgattagaattggatatggcaacatgtttcaattgttaatgttttggtaaaccgaaaatttctatttggagatagccataaagcttctgtacttatttgaaattttccatttttttaagtaaagccaatataccccatgattatagcttggaagaagaacataaataggaattttttggtagaaataaaatatcttgtgaaatattatttaacatactttgaaagattgtctgttttgatgtttggatatcatttagtatttggattttagagaagtctgaaaccaaagtttaatattaagtgaggcctgtctaatatattattttctggtgtttaatgtcttcaataattattagtttaataatacttctccattgagtttttatcatttttgtagtgtgtttggatttatctcactttgtgttaacaaaagcttataataaaaaattctcaagacagagcttttcactgaaaaactattttttcgtaaaaattaagcacaaccaaacatgtcagaacaatgacatataattaaaattataaatatgcattctgatattcagctgcccaagctattnttaaacaagtttatttgatttatcatggtttattaaaggtaacaaattttgtgaagccttctctgctttccctgangaagctaggttttgattcttttaaaattctgc

SEQ ID NO: 88255 - DNA, 344 bp, Glycine max
  Clone ID: PAT_MRT3847_50701C.1
tttttctactgggtctctgctcggaaaccccaccttccatggcggtagcatctaacatctttcccatctcctttttactttttctgccgcgcttttttctcacgccttcttcaacataggaagaacctcctgccccatttccagcagagttggtcattttggtctcacactcagtatcgaaatccaaagattgtatttcttcgtgactggaaagacttgggtttgcatccacacgagtgtctgtgctcccttgctccattggaaacagacaaacaagttcaaaatgtgaaccctagctttgtctccccttctgtcgtcttctcgcagccgtacggacgcgtggg

SEQ ID NO: 88256 - DNA, 106 bp, Glycine max
  Clone ID: PAT_MRT3847_50702C.1
accattggtgaacagcgacggcagagagtcctacaacctttatcctggtgatgcccgaagaataccacctgggaccacctactatttggttgacgctcccgaccac

SEQ ID NO: 88257 - DNA, 424 bp, Glycine max
  Clone ID: PAT_MRT3847_50703C.1
gcggtatttgaaaaacatgttgctcatgaaagtctcaaggatcaaattactgctgttgcaaacttattaaccttagtagaatacaacttgcaaacagcaggaatttgtattctactaaggtttatagggttgcaaaaattatgaaccttatacacagagtcgttggtgatcttaaacttcttactgatgagaagatgtgtgaggcacagcatattcctgaatctgacattgaggcaggggaaaactatgtatgtcatataccactaatggtgcaagtggaaagtctgagttgtagagcaagtgaattcagacttgcactgtcctgtaaaaattgcgagcctgaagctacagtaatgtatgtgtgagctatagaaaacattattgatagtactgcacgcgcctgccgcaacataggtggtgcaat

SEQ ID NO: 88258 - DNA, 272 bp, Glycine max
  Clone ID: PAT_MRT3847_50704C.1
ggaaacagatattgctctcagtgagtgatcggtgtccatctcatctcatcatactcctcagtgttaattgacggctgtgctcatcgtgtccaactgcgtcgcaaggttgggtatgacgagtcggcccgtacgttgacatgggtcgtgtgctgagttgaattcagcttcgacgtccgtcaacgccggtctgggattcggcctcggcaacactgaccgttacttcaacaacggttcgtatcctgagcgtgtcagtagcggtgctcacgtttact

SEQ ID NO: 88259 - DNA, 296 bp, Glycine max
  Clone ID: PAT_MRT3847_50705C.1
ccgcccacgcggccgcaagaaggggggggttttttaaaaattttcgtttttttcccccaataacacacacttaacacaacattacaactaataaaagaggtggggagagaattaaaaaggcgaaacttattgcaacaagagggtcgtgcctaaggtggcttatggggtcaaagaaaggaacaagcgaaagaaattacatatttcagatcatgcagaggaaaccgaatttgcagaagatgtgacagcagccagtggaacagaaaaagttggtataagaggaataccagaatgtttaa

SEQ ID NO: 88260 - DNA, 410 bp, Glycine max
  Clone ID: PAT_MRT3847_50706C.1
ataaaacagacatatataaggaaccctccggggttcattcatttggctgtatttttattaaaccaaattgggtatattaaaaaaatttttattacagaaaacccatgaaagcccaaacctgggcccggggttaaccggcaaacccggtctggctccacacgggataacaaacccggttaaagtttcggcccttaaacgggcggcccactccttaaaacaccgagttagccaccattgtttggctaccccccaaatactcatgcgggggcaccatttccgattcgttttcggcggtgaaatcggcgttcaacgaaacgaccgagtcgactcggagtattttgctccagtccggaacgttaatcggggccaacgttgccatgggccgcactcgcggggtaaaccccattttt

SEQ ID NO: 88261 - DNA, 766 bp, Glycine max
  unsure (1)..(766): unsure at all n locations
  Clone ID: PAT_MRT3847_50707C.1
gtgagtaattaggttgttgatcgagtgaagaaagaatcggaggaggagtgtaataacaaaaaatgctgcaaccccgcgcattccgtccctacatacccatatcttcctccaccagcgccccttccttctcctccccaaaccctaacgactccgttacttcgccgtcgcttcacggccatgccaacaacgccaccacctcttttctatccctcaagaaccctacctccttctgccacaactaccgtatcgccatcgccctggtcccctccgccctcttcctccttgacctcggcggcaccaccgtggtcgccaccctggtggtgggcctcatgatctcctacatccttgactccctcaacctgaagcccgccgccttcttcgccgtgtggttctccctcatcttctcccagctcgctttcttcctctccgcctccccctccctcttctccgccttcaactcctcccttgccgtcgccgtcctcgcctccttcctctgcgcccacaccaccttcctcctcggcgtctggtcctccctgaacttcaagtggctcctcctcgaaaacccttccatcgccgtctccctcgagcgcctcctcttcgcctgcctccccatctctgcctccgccctcttcgcctgggcctccatcgnncgccgtgggcatcaccaacgccgnctactacctcgccgncttcaactgctgcttctacttgctcttctccgtcccccgtgtttcctccttcaagccaaacacgaggcacgctacca

SEQ ID NO: 88262 - DNA, 126 bp, Glycine max
  Clone ID: PAT_MRT3847_50708C.1
gaaagatatacatagtgggtaaagttacttaggtatttcaacatcacttccaccaccacaaaaattgcttgttgaagcaattggtcgcaaaccagggtgattctgatctaaaaccggacgcgaggg

SEQ ID NO: 88263 - DNA, 363 bp, Glycine max
  Clone ID: PAT_MRT3847_50709C.1
aaggaagaaaggtttatgtcaacaaaagtggggaggagttgacaggccgcaatgcttatagacaatatcggaaggtacatatacttgcataccattctgatgttttgttgtccttttggttgtgatgtagcactgaatgcctttgatgtttacaggagagtggagcaggattcaagaaatcaagaaagaaaaaaggtgccaagacgacaaatgccaagaagaggaactgaacacttgatggcaagacatttattccccgcctggtccacaccccataatttacttgtggatcttatgactagcaataccctatagggtcaattatgctcaaatgccctaaactttcgtatcatgtgttgaatg

SEQ ID NO: 88264 - DNA, 408 bp, Glycine max
  Clone ID: PAT_MRT3847_5070C.1
gaaatgtcatgatacattatgtatctttacaaataagacacaaactaacacctataaccagtgcattatatctacatggcaacaaattctaaaggataaatataagtcattatcacagtaaagcattaaaaaaaaaacagaaaatgtgaaaaccccttcattaatccaatgttgtttgcttaagcaacaccttcttgattaattttgtccaagcttatgtttgaaccaccaccgggcctggtttccccttctgtcttttacttcaactccatgggtctttagaccaatcttctttgctttttcttccaccattaatttatttaccagtttttccaactcctctcttttggcattggtatcaattttcatcccaatttccccttctttgcaaataatatcttacagtat

SEQ ID NO: 88265 - DNA, 667 bp, Glycine max
  unsure (1)..(667): unsure at all n locations
  Clone ID: PAT_MRT3847_50710C.1
gtcgacccacgcgtccggagcgactgtaccataatagttgtattcttaaaagaattcgctgagtgtgttcgttgtgctaagcgatctaacctgtagaggatgaacattcatcctcttgataagtacttgtggctaagtgaggttgattcgctaagcccaagtaatgaagaaaatttttatattgtgatgatagctgcgtgctaagccaatatccctgtgccaagcgaatttccttgcggcagttactgagttgagcaacccagttcgctgagctcccataacttagtaaaatttgtgaaaattttactatgtaataccgctaagagcgactcagggagagctaagcacatatcattgcggctggtcttaggcttagcgggatctataggtcgctaagcgagtataagctctcttgaaaactcgctaagcgacttttacttcgccaagcgatatatattgttttgtgaggaccactaagcaactgctatttcactaagcggccttatcnttttcctggtggcttaatttttgnnaaaatgttcacatttcttttcttacagatggcctcaagaaagagagcaagaagctgaagacatccctttcatcatccaacccacctcctccgacagcaaccatggaaccagatgcccaacatgcaccacccata

SEQ ID NO: 88266 - DNA, 365 bp, Glycine max
  Clone ID: PAT_MRT3847_50711C.1
agcctcgtccttttttttttttttttttttttttttttggaaactatagcaccctctctttgttgcttccttcgttgttaaaatatatgttgcaaagcctaaacccaaattatgctactgccaacgctaccttggattatcttataacccactttcacacaataaaaacggaagtcaagacagccggacaagcttatttaacactgactgttttacatgcaactcccagcattactcataatagtgttacttgccaaagatcgactgaagtcaccactgggtccagtttgaatacttcaaagggagctcacaaaccctagaaggtatttggagaatggatgcaaacttgagccacaatgctggcc

SEQ ID NO: 88267 - DNA, 346 bp, Glycine max
  Clone ID: PAT_MRT3847_50712C.1
aaaaaaaacccattatttatttttaacaataaactactttttacccatacaagggtttctagtttagccccctaaaacacgagcaagttattctggggggcgaaacccaacttctccaaattcggggggactggaaattgaatcaaagggggggggccacaagtcaatgccaagggatcaggagaagcctttggaatatgctccggcaggatactttcaggggggaaacccacactgttttcccacccttcttttatgcttttttggataacgaaccaaacctttaacctaaaatactttttagcccacttataaaggttttcctttaaaaataaaaaatcctggg

SEQ ID NO: 88268 - DNA, 514 bp, Glycine max
  Clone ID: PAT_MRT3847_50713C.1
ccttttctatggaaaagagaaagaaatttgggaaagccaacttgaaaggcttaagaaagtgcaaagcaaaaagggtcatgatattatcaaattgagctacaatgatcttgatcaggatgaaaagaagatatttttggatcttgcatgttttttcgatggactgaatctgaaagtaaacacaataaaaattctattgaaagatcatgattattcagtggctgcgggattagaaaggttgacggataaagctcttattagtgtttctcaagaaaatattgcaaccatgcacaacatcatacaagaaacagcttggcagattgctcgccaagaatccattgaaaatactagaagccaaagtcgactattggatcctgatgacgattatctagtactaaaagataacaagggtaactaggctatcagaagcatagtcatcaacttggcgggaatcaagcaattgcaattaaaccctcaagcatttgctaagatgagcaaactattatttttagatttt

SEQ ID NO: 88269 - DNA, 211 bp, Glycine max
  Clone ID: PAT_MRT3847_50714C.1
caaggcttgggggatggaacgtgagagacacatcttgttcacactgtccaatcgtgctgctttaactctagtcattgccggcacctctatctcatcacctaggttgttgagtgataagagtctggttgtgtctgacagtactctggtggctgtgggaatcattcgtgcacgtcgtgaagatggtacatccttttctccttctgataatcct

SEQ ID NO: 88270 - DNA, 1760 bp, Glycine max
  Clone ID: PAT_MRT3847_50715C.1
aattaagatggctcagcctgatacctctctttggattaaaagctctgatggcaggaatgaagtactgaaccatgatgagtatgcaagactgttttctccttatattggatcaaaacctgctgctggttatgtgactgaagctacaagaggaactggagtagtatcagccagcagtttgggccttgttgaaatattgatggatgcggatcaatggtcggagatgttttcatctatgattgctagtgctgccactgtggaagtactatctagtggcacgggtggaaccagaagtggagcgttgcaagtgatgcttgctgaggttcaattgctttctccactagtccctgctcgtcaagtgagtttcctcaggttttgcaagaagcacgctgaaggtttatgggctgtggttgatgtttcagttgacattggtcgtaatgttaccaattcacatccattaatgagctgcaggaggcttccctcgggctgtgttattcaggacatgcccaatggtttttccaatattacttgggttgaacattcccaatatgatgagagtgtcatccaccaactttatcgcccattggttagttctggcattggttttggtgctcagagatggattgccaccctcctaaggcagtgtgactgcttggcaatcctcaggtctcctcaaggcccatctgaggaccccacagcccaagcgggtaggacaaacatgatgaagctcgcacaacgcatgaccgagtgcttctgctcagggatctgtgcttcatctgcttgcaagtgggacatactgcacattggtaatctggctgatgacatgagaatcatggcccggaaaatcgatgacccaactgaggctcctggcattgtgctgagtgcttcaacttctgtttggatgccggtgtcacggaaaagggtgtttgattttctgcgtgatgaaaatttgagaggtgagtgggacctgctgtccaaagatggaccaatgaaggagatgctccatattgctaaaggacaagaccgtggaaattgtgtttccatccttcattctgctaatagcgagtgcaatgtgctatatctgcaagagtcatggagtgatgcctctggctcgatggtagtgtattccccgatcaacatgcaagccttgcagatggtgatgagctgtggagattcatcatttgtccctctccgtccatcaggctttgctattctgccagatggcacttcaaacaacggtgatggcagtgacggtggtggcagctgcttgcttacagttgggttacaaatgttgccaaatggcaaccaccaatcagccaagttcacaatggagtcagttgatgctgtcaataacctgatctcatttaccattcagaaggtcaaagatgcacttggagttgcatgatccatttctttaattttagacttaaatatgatcacaaacaaaaagactttttttttcttttttcttttgaaagaaaacataatagagtgttttatattttgggtgtatagagtattcaagagtagaggctgaggctgaggcagaaaagggtttgagtcaagaacgaaccaaccgtgaatgctttgtggtggttcgggtattgactcgttacctgttacaagtcttagcttttactttgtccaaaaggatatgctgtgtgttattcttacaccctttacttaatagtaaagtgaaactgctcaactttgctattagttgttaatcttcatttcttgaatgcattttcatattttagttc

SEQ ID NO: 88271 - DNA, 551 bp, Glycine max
  unsure (1)..(551): unsure at all n locations
  Clone ID: PAT_MRT3847_50716C.1
aatatggatagcagaaaggacacattacatattaccgtgcttctgctcagatggcgtcgctgctttcgctcctaccatatgatgagtacatttctttttcgactattagaattcatttttgtaatgcaaatctgagactctactagagttaatccagtgaacactaataatagggacaaagaattactcaaattaagaattaactaaatgaacaagtaataagtaaggcaaagacatgccacataaataatcaaggagaaggactttgtgaaatagatcgagtaaggcctcatcattccaccgctagtgttcatattatatggcacatagtttggatacggagttcccggtggaaagtacaataccggtgggtacggtggccggggcactggtccttgtccttgtggcacttcttcacaattatctggacatggtgtctttggtggtggagggcattcaatattaatgaccgatggtggcggtggaggcggtgacggtagaggtggaggaggaggtggnccgcaggggttggcatgggcggacgcgtggga

SEQ ID NO: 88272 - DNA, 427 bp, Glycine max
  Clone ID: PAT_MRT3847_50717C.1
gatttgatgcattatcgtccttcaaagggggggcaacaaatgtgcatatagattcaagaagaagttctatcacattaacaaaagtttgagtaggctttttgtaacttttggcattctttgagtttgaatcatgaagttttccatgaacatatcctgaagctgctgtggttgtactcccctaaacaacttttccatcattattatgcgcttttcctttctcctatgacttatccttctccttggatttctctttatcccgatctttcaccttgacattgtaaggtctttcacccactatttcaacttggcaaacagattgatcaacctgcatcaatatgattggatcctgttaaatcacagaagctaaacttagcaggatatatctctgatttatctttctatttgtatggcggttgatctccttatc

SEQ ID NO: 88273 - DNA, 829 bp, Glycine max
  Clone ID: PAT_MRT3847_50718C.1
cctaacactatcaaatagtagtatgatttattattcagtaattcaacctgtacatacagaaagtaaatcatacattggaagaataacgcaacagttcaaaatgaaattatatgggacgtcttcttgttgtccctaaatgccacctgtgttcaattcaccactttgcatgaccgcataataactaatccaacctatgggatctaacaatcataatgaactgcatctcctagacctagaaatcagacgcaatgagcactctaaaattgccttttgtacagtctatttaatttttttttataaaaacagggaaagtcacggtggtaccatatcaatctataaatgagatgaactgctataatctgccaaataaattataaaatgctctggcatagcaacaaaaccagccatgccaagatcactgacatactatttgcagaagaacagctctttccccacatttctgtagttcatatttgaatttaccttcttgcatttgctatcctatgcctccgtcgtcttctagaccttcctaacaatatcctgtggagtccgcgtccagagacagccgcagaacctgtagatgcaacactctgcaaaccaaaatgatcaacatcaaaattatcagcagcacggtcctgattatacctgatgtttggcaaaaagtggccagttctccccaaaccaatggacctcaccgagaagaaatcatcctctagatattcctcatcagaatcatactcgtcactataaaaagcatggtcatttggctccagcacataatccccaagtaccatagcccctggtgttgaagataaaattgtgctaatca

SEQ ID NO: 88274 - DNA, 1614 bp, Glycine max
  Clone ID: PAT_MRT3847_50719C.1
ttcttcccacgcgtccgtacggctgcgagaagacgacagaaggggatcattgatattggcttaggcgctgcatctgcaaaatctcagcccaaacaaacatctctgtacctctctccctctttccctctctttcgcttatcaattttcgttttaatttctctacgactcgggtcgacctccgatcactttgggtctatcggcggggacttgggtcgaactcgcatgactcaatttactgcgaggtacggaatccgtgaattttcctgcgaggtaagattccgttgaaattttgctttggtccgagggggagggtggaattaggatcgatttggcttcagatcttggaattagggtttagtattggttgcaggtgacgttaattttgtgataggggctttggtagatggaatcgggggtgggatcgggtggttctggggttgtggtgaagagcagaaactcctcgggttgtttaattgtgcgaaagaaaggggatgggttgggtgctactgcttccacctctcggaagctctatgaatccaagaaaaggccaaacatcaacgtgcctgtgtccttgagtgattctggatcaagcgacgagttgctgatgcctcctggtagaaggcttggtcccgagactattcgagtttgcaatggtttggctgcctctgagcggggtgggagtgaaattagtcggaagagggatagagtggaacgaattagcggtaatggggagggcattgctgcggagaaagggttggagcagtgggaaaggaagcgtagtaagttgggtgtgtacgattttgatgattacgatggcatggatttggagaacatgaggaggaggcatttggatggtcatggaggaggaagctttatgggatcagtgcatgctgctagaagtggcattgatagggaattcataacaggttcaagtgtacgaattcttgataagagaaagaactcttacggtgacagacctagtggcttgtatctgggagataatgttgatcacagtaggtacaagataaacagggatggagtctgggtacctctacgcttgcagagggaaaagtttaattcagatgagtcgattagggttcaggggaagaatggtgttttgaaggtaatggttaataagaagaaggtgggtggtccatcagaacaggattatgatcatcacaaacctgtggaaggcaggcaaaggttgaagactgaagagactgctaagaggttgatgactgaagagactgccaagaggttgatgactgaagagactgccaagaggttgaagactgaagaggctgccaagaggaatgttccaattcgtcctttgtcatacttggaaacaaaacctgttgagaaaccaggattactcaagaggccagagaataaaagggtagcatcaagaaaatcgttgtcaagcaaggacagtaagggcgatgagggggattcagataacagtgacacatcattgaatttgggaataagaaatactgaagcacggaagccagcaaaaaatgtaatgtctgaggatgagcagactcctgtgcatgaaaaactcccaaccacaagaacaaaagaaggaaaaatcaagcgtggaagtggtacagaaaa

SEQ ID NO: 88275 - DNA, 401 bp, Glycine max
  Clone ID: PAT_MRT3847_5071C.1
cggacgcgtgggatgctcccagctgtggtagatccttcaacagtgcagcgcttctctgaccgggttgttgatggtctttcagctctttttttggcattaaagcgaagaccagtaattaggtatcaaaggacatctgacattgcaaaaaggatagcacaggaagcagctaaattgatgtaccaagaggaaagtggtctttttgattttaggcgaatggaagtttctccactgctgttagtgattgacaggagggatgatcctgtaaccccattactaaatcaatggacctatcaggcttatggttcatgaattaataggaatccaagacaacaaagtggacttaaaatccgttggtaaatttccaagggtcaggaggagaatgtgttgccatcagaacaaga

SEQ ID NO: 88276 - DNA, 838 bp, Glycine max
  unsure (1)..(838): unsure at all n locations
  Clone ID: PAT_MRT3847_50720C.1
catgcctcgcgtttttctttcgagtagaacgagttgagaagaatggcagaaggtgtgagtagcagtttcgtgcagcctgcaattccaaggtttaatggtcattatgatcattgggcaatgttgatggagaattttctccgctccaaagaatattgggatctcattgagaatgggatattgatggtggcagatggaatagagcctacggaggcacaatgcaaattgatcgaggagcagaagttgaaggacttaaaggtaaagaattaccttttccaggcaatagatcgtgaagtccttgaaacaatccttaagagggacacggcaaaaaatatatgggattcaatgaagcaaaaattccaaggttcaaccagggtcaaaagggctcaactgcaagctttacgcaaagattttgagattcttcaaatgaaggaaggagaaacagtgaatgcatatttttctcgtactttaaccatagccaacaaaatgaaggctcatggtgaaagtatgagtgaaacagtcattactgcaaagattttgagatcaatgatctcaaaatttgattatgtggtatgctcaattgaagaatccaacaacttagacgtgatgactattgatgagttgcaaagtagtcttcttgttcatgagcagaggatgagaagtcgtggagaagaagagcaggttctgaagatctcccatgaagacaaagcaagtagaggtagaggtagaggtaatggttcattcagaggaggttgangaaggggaagacaatcattcaataagctgntatttgatgtttcaaatgtcacaagttaggacactatcaatatgaatgtcctga

SEQ ID NO: 88277 - DNA, 338 bp, Glycine max
  Clone ID: PAT_MRT3847_50721C.1
tttttgttattttttttttttttttttttttttttttttgtttttttttaatctgtttaaaggggagaaccccgcaaaccagcgacaacaaaaggaaaaaacaaaaacaacaacaaaaaacaaaaaaaagggaaacacgcacgacgcaaaaaaaaaatgcaagcaactccaaggcatcaaaaaacaaaaacgttaaacagaccgcccccgccttttaacaccaacccatccacagcaaaatgcctttgggcagggggtcgggcgattaaatgactaggggggataggaccaaaacaaaaaccgaggggccaaccccagataaacaagggggcgggaaa

SEQ ID NO: 88278 - DNA, 232 bp, Glycine max
  Clone ID: PAT_MRT3847_50722C.1
cccacgcttccgagaatgttcaactgtggacaagtgaaaaaggctaagacatggtagagcttcttctacgagcatcacctcctccacttcacccttcttcttatccgagacaatgcaggacagtgtcaggaaggacattggtgaagtgctcattggaagccccaagtaccggttcatgacaaaccctgtcttatccgttcttgctgtcttccttgacatttatctctccccc

SEQ ID NO: 88279 - DNA, 1287 bp, Glycine max
  Clone ID: PAT_MRT3847_50723C.1
gattaatgcatttacagtccgtgcattacgtgatacttttccacctgctagaggagcaggcattatggctttatgcgccaccagttcctactatgacatcactgaagttgcaacccggattcttcctaatgttgttgtgctcacaattgatcctgacagtgatgttagaactaaggcatttcaagctgttgatcagtttttgcagatagcaaagcaacattatgaaaagacaaatgcagcagataccactggtgttgcaggtgtgggaagctcatctgttccaggaaatgctagtttgcttgggtgggctatgagttctttgaccttgaagggtaaaccttctgatcatgctccagttgcttctgcaagttcgactgcaatcacttcaacatcttctaatggcaccgcaggtatagagacgccatcaacagcaccagcccgtgtaagctctaccgcagatttggctgaacaccctgtccctacatctcctacatcaacagatggctggggggaacttgagaatggaattgatgaggagcatggaagtgacaggatgggtgggatgatctggaaccgcttgaggagacaaagccacgctcttgcaaacattcaagcagctcaaaggcggcctgtttctcaacctatttcacatacaaagcaagcctcaaatttgctatccaaaagtacaccaaaattgaacaaggatgaggatgatgatttgtggggatctatagctgctcctgctccaaaaactgcaagacctttaaatttgaaatcagctcaaactgatgatgatgatccttgggctgccattgctgctccagcacccacgaccaaggccaaacccttatcgactggcagaggtaggggagccaaacctgctgctccaaaattaggtgctcagcggataaaccggacatcataaggcatgtaatccaaatttccaaggaaccaaaggaacagtgaaagagttaatcttagtgctagttgcccttttcttatggtggcagtgatcatgttaaaatacaagacccgtctctatgatatatgaattacatttgtgattttgttgacaaaattgatttgtaatactattcttttgtatgtcaagaattttacttgaagggaaatctttggggcagcatcttctgaattgttgtaaggcaacaaggctgtggtatatctgctatatttttgggtgttttaacctttttatttgacgaacaattaacaattagatgtaatataattagtttgatcatatgcagggaagttttttggtactgg

SEQ ID NO: 88280 - DNA, 251 bp, Glycine max
  Clone ID: PAT_MRT3847_50724C.1
gctcgcctattttctaaattcttccctccctgaataagatcgcaataggactaccaaggtattgcatcaggcatcatcaggtcggccagaggtcatcactagcaagtctgggaggtctgtcaccaagtatcctgttcctgagtgcaagtgccatgatgactcgcaccatcagtctacctaaatttcacgtatctataccaaagcggttagtgtgaagattacacgtgcatggataaacttacacgggagcg

SEQ ID NO: 88281 - DNA, 546 bp, Glycine max
  Clone ID: PAT_MRT3847_50725C.1
ggccgggccgggcatcggtaaagcatctcatatttttcttgctagctctttagtgtttgctgcttattttcaaataatgtctgcactggtggatatatggtcaagggaactgaccaagatcagggaaaaggagcaatcccttaattctgctgcccagcccctccaggaaaatatggacaagagctcatctgggttcgctgtggttgctgccaaactcatgcaatttaacaagcctaggtttctcttttcggatgcttcaatttccatccttgttgaatgttttagcccttgatgagaaaagaaattaatgcttcagtgagactttagttggtttcttttaacccatagaaatgatgtgtgcatagtctgtctagtagagccagagggaaagatttattagataatatgtataaagtcatatgttccatttccagtgacaccattattttctatttgtgtgttttgtgtacagatatatttgtaaaagaatgagatataatatgcagagaagacacttgaatatttcattcatgatcatgataaaaa

SEQ ID NO: 88282 - DNA, 683 bp, Glycine max
  Clone ID: PAT_MRT3847_50726C.1
ttcgccttagctcatccacaaaaaggttagagcgttgcttacgacccatggccgaccaataggcgaccaagtccacagccaaagggaagcgaagtactaggtccgtgaccgacaagccatcaagcgtccagctcaagacgttaaagaagcgctactaggaggcaaactagtaccttttaaaatctctgcttgttatttgatcacctttgtttctcaagtcatagcaggacacacctagttgctcatgatcctaggaatttaaataaaacaagcacaacctcggaaggtagtcataactcacaaaatatatatatgtatgtttaggtagcaagataccttgaatatgcatgtatgtagcaaaaatacttcacaaaatatatatatgtatgtttaggtagcaagataccttggatattcatgtatatagcaaaaatatctcacaaaacatatatatgtatgtttaggtagcaagataccttggatatgcatgtatatagcaaaaatattatacatatgtttaggtagcaaaatacctcatggaaaaaaaaaagagtaaaaagagagcgagcaagaaaagaataagaagaaaaaaaatatataaaaaaaaaaaaaaaaaaatatatatatatatatatatatatatatatatatatatatatatatatatatatatataaaataaa

SEQ ID NO: 88283 - DNA, 778 bp, Glycine max
  unsure (1)..(778): unsure at all n locations
  Clone ID: PAT_MRT3847_50727C.1
aggatggcttttgatgagttctgtgcagctgcacttagtgttcatcaactgaagcactcggccggtgggagcaacatgcacgctgtgcctatgaactttttgaaaaggatggaaatagggccatagtcattgaggaactagcttcggagcttggccttggtccatctgttcctgttcatgctgttcttcacgactggattaggcacactgatggaaagttgagcttccttgggtttgttaaattattgcatggtccatctcgaagtcttgcaaaacctcactaggagtttggaagatccaagcatgctcaattatacttgtgataatctagccaatgaaattctggtccacacatcacagttctatatcatatatcaaagggtctttgccactgttggattatactcaacataaatcatccgggattctgtccctcgttttatactggagctcttctacagttggagcaggattcaaacttgcttctacaggcatttatgttttccactgtaaagttgtagcatgtttaaggtgcaggtgataatgtttttgtgattgttgttagatggttactcttaatattctaacatggtctgtaatgcaaactcaattcattgcactgcttctgagttgaatgaaaggtgttttaagaacaaaaaaaaaaaaaaagannaaaaannaccacttcnaaattcatcctttcaaaataattgagcttgtgatgaacaaaaaaaaggtgtggcggacacaaaaaaaaataaaaaaactgcccaggctt

SEQ ID NO: 88284 - DNA, 1463 bp, Glycine max
  Clone ID: PAT_MRT3847_50728C.1
cccccccttttttttttttttttttttttttttttttttttttttttttttttttttttttttttttttttttttttttttttttttttttttttttttttttttttttttttttttttttttttttttttttttttttttttttttttttttttttttttttttttttttttttttttttttttttttttttttttttgaggacgaagcccaactctctttgaggtttcgtttgtaatgtgggttcttggtagttttcccttcaccagttatcccaaattcgtgaacattaatcagtgcacgcttcgtgttcgattaattgcctctgagcctaacttgcgttcatgcttaatggacaaagggctaactggtgtatgtggtgcctaatcacgtattgaaaaccctaagttgattttcgcttagtaaattgaaatagggttggattaagtggttgactgttagggacgaattctccataacccaggataagagaatggcttctgaatcagaggaaacaacccgtttttaatattagtagtctcatattccagtttacttgttctgctctttaatcacaaaacaaacaacccccccccctatcgttattgttactgcgcaagtatattatgaacatttggtttgtcattgctcgttgggaaacgacctaggatcacttcctagttactgcattttcatgtttatttgattcgggtacggcctcgatcaaagacccgaagaagtccaacagggtcttggagttgtcaagctctaattacgggtctctgtcagttctacggagtacctgtcacctccagcaagggcatcaggccccctactaatcgagctttcatcaagaagtactgcgtccccagacaggcgcagggcgaaacaccacagcagcattgggatggccggtagcgggcaatagacacaccgtcaccacctctaaagttcacctcagctcatccacaaaaaggttagagcgttgcttacgacccatggccgaccaataggcgaccaagtccaaagccaaaagtaagcaaagtactaggttcgtgaccgacaagccatcatgcgtccagctcaagatgttaaagaagcgctactaggaggcaacctagtaccttttaaatctctgcttgttatttgatcacctttgtttctcaagtcatagcatgacacacctagttgctcatgatcctaggaatttaaataaaacaagcacaagctcggaaggtagtcatacctcacaaaaagaaatatgtatatatgtatgtttaggtagaaagataccttgaatacttcacaaaatatatatatgtatgtttaggtagcaagataccttggatatgcatgtatatagcaaaaaatatctcacaaaacatatatatgtatgtttaggtagcaagataccttggatatgcatgtatatagcaaaaatattatacgtatgtttaggtagc

SEQ ID NO: 88285 - DNA, 632 bp, Glycine max
  Clone ID: PAT_MRT3847_50729C.1
cggccgctcgagcggcgggccggcttttctaccggaaagcatcgatcatatcgtcgccggcgagaggccatggtgaatcccttggtggaacgtgccacgagcagcatgctcgtgggccctgattgggccttgaacatggagatctgtgacatactcaatcgtgaccctgggcatgcaaaggatgttgttaaaggtttaaagaagcggattggaagtaaagttcctagagttcaaattcttgcactgactctgctggagacaatcataaagaattgtggggacattatccacatgcatgttgccgagagagatgttcttcatgagatggtgaaaatagtaaagaagaagcctgattaccatgtcagagagaagatattgattcttatagatacttggcaagaagcttttggagggccaagggcaagatatccacagtattatgcagcataccaggaacttttgcatgctggggcagcattccctcagaggtctaagcaatctgcacctgtattcacgccgctacaaacacaaccattgtcatcataccctcaaaatatacgagacactgttgctcagcaagacgcagctgagccctcagcggagtctgagtttccagcccttagtttggctga

SEQ ID NO: 88286 - DNA, 224 bp, Glycine max
  unsure (1)..(224): unsure at all n locations
  Clone ID: PAT_MRT3847_5072C.1
aaacccttgaatgatagagtcctcataaaggtttaagatcctgatgtcatcagtttcgaggataccaacaatgtcatcaaggatctaaaccctngaatgatagagtctcataaaggttgctgaagtgagaaaaacctctgcgttgtgttacgagcaacaggcaacctgntgacggatagtgttggcggcttgngagagcacaaacgtgcggatcggacngttga

SEQ ID NO: 88287 - DNA, 497 bp, Glycine max
  Clone ID: PAT_MRT3847_50730C.1
gagggcccaactccatcttctgaagatgaagtttctgagatcagaaagctgtttgaaaatgaatgcaataggagaaaggcagcggaagcagaggtggaacatctaaaaattctactggggaaaaatacacacacacaggctggaggggatgcagaggttataaaggttcacagcattctggaggatgaggttaatcagaaaaagaaacttgaagaagaaataataatattaagaagtcaattattgcaattgaactttgaagctgagcagatgaaaagatgttgaggaagtgaaagatcagtaaatgcctcctctgccatggattctttcatgtctcaagttaggcattcccaactcaaagacactgggaatggccagaaagcatatgttgctacactctttgagcaagctggattgcaaaagattttgtcgttgctggactctgatgatgcccttggacagattcatgctgctaaaatggtgggcaatcttgcagc

SEQ ID NO: 88288 - DNA, 302 bp, Glycine max
  unsure (1)..(302): unsure at all n locations
  Clone ID: PAT_MRT3847_50731C.1
caccccggggggggggagagggagaaagaagcaagtttnttaaatcaatatttatattgtaagcaaattagtaattataatattttagatttgcagcatgtaatctaatcaaccagcattctaaataattgaaacctttttcaaatgaaggatagcccaatagagcagttagtaaatgggccagcccgtttggataacaggttgagaagttgaacggtcccaatgttgcatgcatcaagcagaagcaagagatgatgagatagaatagaagagagttgagtttgagtgaacaagccttcccc

SEQ ID NO: 88289 - DNA, 274 bp, Glycine max
  Clone ID: PAT_MRT3847_50732C.1
ggctctggaaagagaatgccctgcagttgctccatgtgctgattttctgggtctctgtgccagagatggcattgtttcactaggaggtccccatatccctcttaacactgggacaagggatggtagaaggagcatagctgatgtggatgaacagtatctactataccacaatgagaccgtttctggaatgcttgacgagtccggtgccatgggaatggacacccctgacgtccctgcactgtttggatcacacagtgttggtcgaacccattgt

SEQ ID NO: 88290 - DNA, 312 bp, Glycine max
  Clone ID: PAT_MRT3847_50733C.1
cacggagggtggtggctgtgggatagagagagagagatagaggtggagattgctaatactgggccaagcttcacctgatgctactaataaagttatatcctgttatcttgatgatttaattcctccacctgagtgacccatcttcttctacacttccaagcgatagttatgcaattcccatttttattctcattctgaatttttaggtttgtcctctgattctttgcaaatcactgtttcagtaattagatcatcttctgtaattttctccgcaaacctttctctggatgtctattattgctctatatttaa

SEQ ID NO: 88291 - DNA, 235 bp, Glycine max
  Clone ID: PAT_MRT3847_50734C.1
cttggagatctacaatgaggtggttaatgacttattaaatccagcaggacagaacctaagaatcagataggatgctcagggcacctatgttgagggaataaaggaagaggttgtactctcccctgctcatgcactatcccttattgcagctggagaagagcacaggcatgataggtccacaaacttcgacctactcagcagcaggagccatacaatatttatcctgactatagag

SEQ ID NO: 88292 - DNA, 416 bp, Glycine max
  Clone ID: PAT_MRT3847_50735C.1
tacgtgctgaagtcctttcagctcagcagggtcaagtggctcagccatcaaatgttgagtctcaaaacactggggatattgacccagagttcctagcagctcttccagctgatattcgagcagaagttctagctcagcagcaagcacagaggttgcatcagtctcaggagctggaaggtcaacctgtggaaatggatacagtctcaataattgcaacttttccatcagatttacgagaagaggttctcttgacatcaccagatactatccttgccaatcttacacctgctcttgttgctgaggcaaatatgttgcgggagaggtttgcacaccgttatagtcgtaccctctttggtatgtatccaagaagtcgtagaggggagacttcaagacgtgaaagtattggttcttgtctg

SEQ ID NO: 88293 - DNA, 419 bp, Glycine max
  Clone ID: PAT_MRT3847_50736C.1
cagctctctatactacttaaagacgcccgcgcggttgtataaccctagtcgctatgtgctatggagagctagagcacacccactctcggcttgcttcgcacacaaatggaatatttatgatgtcttcctcagttttagaggcaaagacactcgtcaaaatttcactggccatctctacaattctctattcaaaaatggaattcttactttcatagatgataaagggcttaggaggggggaagaaattacaccagctcttctcaatgccattaagaattcaaggattgccatcattgttttctcagaggactatgcatcctcaacttattgcttggatgaacttgtcacgatccttgagagcttcaaggaagaaaaaggtcgatccaattatcccatattttaatatggggatccatcac

SEQ ID NO: 88294 - DNA, 251 bp, Glycine max
  Clone ID: PAT_MRT3847_50737C.1
ctgaaaggctgtctgcgtctgcccttgcttccttgttaaagcagcggttatgttcgtatgccgtgaatgcagtgaccgacatccaggagggggctagttttaacataagttactgcgctacagccaaagctccattgatggatggaaagagcttggacgatgatggttataatcctctcgcttagaagagggaagatgtcatacgaattcttgctaccactgtacaggtgagagttcaggatatctctggc

SEQ ID NO: 88295 - DNA, 534 bp, Glycine max
  Clone ID: PAT_MRT3847_50738C.1
gaaagaaaatccattagtgagatgatgattgtttaaggaaaaaattatcagattaaaaaaaaaaaaaggaattagctaggggaatgagattaagttttagatcttggccttctttatattaaaagttgataatcagatttgatggacatgagagagcaagataaggttatagagatgcctagcactttgggttataataactcctcttctggttccaagctatcatcaccaataggtgaaagaagtagtgaccaattacctcctcatcaatctcacacattagttttcactgatccaccccaaacttcttcacatcatcataatctctatcccccttcactcccaccaaaccctcttcaacttccacaacctcatcacagacccagaagagatccagatccaagttctattattgctcctcctatcataagcaccaccccaacaacagcaccaccacaaccacacacaacaacaacattattcaaataccgagaatgtctgaagaatcatgctgcaagcatgggaggtcatgtc

SEQ ID NO: 88296 - DNA, 388 bp, Glycine max
  Clone ID: PAT_MRT3847_50739C.1
tttaaattttagaccacgtatggaaaaggacaataactttcatttttagcgtcgcagaaagacttactctctacctgatgttaatgaaaacggcgtaattgacccacacgtttctgtaagagaaaccccataaatgcattagccgttccactgctgatatataatagctccggcatatatccacaggtacaatgggagtatgtggacagactctggtggatatcatcaccggttgatcatgcagctgcaccgctcaaattaccgtgcgccactattacttatgccacctagcattttacactgctgcgggaaaaaagtactatggcatatacgtagagggatcaatctgctcaggaagctgctttatattcaccttaaacctatactg

SEQ ID NO: 88297 - DNA, 353 bp, Glycine max
  Clone ID: PAT_MRT3847_5073C.1
atgggaacaaaaaattctcaaaccatttttaaaattttaaacgccaataaaccccctaaacaaaatacaaactcccccccccccttttatttacacaaaccaaaggccaaaggggtattttcaaaacaagcgaaccccccctttaaaaccccctaacccttacaataaaaaccccccctcctaggggggaacaaacaccccccaccaaaggtcccccaaaaaaaacccccaaaacgggaaaattcaggccccaagaaaacccaccgtctggaaccccccccaaaagacccgggattaaaaccccaaacccggcccccaattggggcacccccccgaaaaaaaaagggcccaac

SEQ ID NO: 88298 - DNA, 277 bp, Glycine max
  Clone ID: PAT_MRT3847_50740C.1
caaccgaaacaaaatgatctcaaaagaaactaaaaataaacatttcccaagtgaatttatggggtttccaaatgattaatcaacccttttctacctgtccctgttttaaaaagaaaaccatcccccccccgcacagctaccttctaaaggacttctgcttgcccaccgaatgtcttggtagaggatgtgatttctttgaattgaggctaattcgagtttaagaaagcacgtacctcaacaagaactttccttacctgcccaattactagtgaatcaa

SEQ ID NO: 88299 - DNA, 354 bp, Glycine max
  Clone ID: PAT_MRT3847_50741C.1
aaaaaaataactaaataaacaaaaaaaacaaattaaattataaccaaataaactaaaaaccaaggtaatatttcaaacgttcgtgactatcaccacactataattactcaaaaccattcatccatattccctccttaacccacaatgcatacattacaaccattcatctatcaaattttacctcctaacttaatcaaatattgtagaccttctctaataacagaatcttggatacaaattatcaaccttctatatcaacatccaccaactgcagtaaattctacacactctagccagctacaacaacacctcccactgtgcaccctacctcaatatctcccatttccattactc

SEQ ID NO: 88300 - DNA, 502 bp, Glycine max
  Clone ID: PAT_MRT3847_50742C.1
agaacaatggcagcatcaaagatgaagttgttcttggatccggtgatagccatgttggcgatggtagcaactggggtttcacctgctgtggcacctgccccagatgctttatacattgccaccacctcatttgtacacactgctgctgctactgtatgatgacctgagcttcaggtcttctatgactagttagactatcaacgaccgttagttgtctgctgcattacatacatcagtattaacatctggaccatgctggagtgcatcctaggctagctattctgtgaagatacaactcagcctgagaaatgtccggtgactactctgttgtgactaccagggtggatgaaccagacgatgcatttagatgcagatgtagattgatgcacgagagcagtcatgtggaagccattttgcttcaagtagtgtgaccaaaggacttgaaattagatttcactgttataatgaaacaaatacattacactgcccatgtggtgattct

SEQ ID NO: 88301 - DNA, 151 bp, Glycine max
  Clone ID: PAT_MRT3847_50743C.1
gaatggtacttttaacagtatccgtaaggggagatgtggttgtaagagattaattattagattaagtaaagggattgtgtagttagtgcatatagaagagtttgagtagagggatttgttaaaatagtgattgggtttaatgaaggtattt

SEQ ID NO: 88302 - DNA, 171 bp, Glycine max
  Clone ID: PAT_MRT3847_50744C.1
gaatggctcgagctagccattcgtgagatgcagtggttgaagttatgctgttatgacttggccctagagttatcattttgccctgagaggtgaggtggggaagctgttactacctgaagctttaagagctgtggattgaccaaaaattggttatcataggtgtgcaaagat

SEQ ID NO: 88303 - DNA, 560 bp, Glycine max
  Clone ID: PAT_MRT3847_50745C.1
ccggaattgataacaaatataacggctgattcattcaaaattgaatcttataacctatcagctaaatatttagctaattgtactattttgactgccacacccaagcatggagcttcttatgtatagagaagtattcttaaagctatgggagagcttcatgcaggatttggccctcagttggcagctggaaattcatctttctggttagaaactggctggggtttgacccaactaactacttttttctttttttttacacattaaaagtaattaataatgcaggtactatgttaccaagaaagttaaatctcaattaaatgcgagaaggattgctgaaggattgagcggtctaatgtcaaaggctattgacagagggctctataggggtttcttagtgggcacaaagaaggttgaagttagcatactccagcaggcagatgacactatatttttgggagaggcaactatggaaaatgtaagagcaatcagagcaatcagagcaatattgcgtgcttttgagcttgcattctggctaaaagattaatttgctaaaagtagct

SEQ ID NO: 88304 - DNA, 141 bp, Glycine max
  Clone ID: PAT_MRT3847_50746C.1
cttacaattagcatttattatagtaatagtaaaaagcataacttagtttgttgtccaaaagtcgaacgattaccacatgtatacacacggcgtactgtttgtagttaactcgacaagtatagatgtctaacctcattattt

SEQ ID NO: 88305 - DNA, 550 bp, Glycine max
  Clone ID: PAT_MRT3847_50747C.1
ggctcgagaagcaattaagactgtagtgactgctttaaaagatggaaaacttaaagagacaagttctccaagaagaagcaatcgcataacggttggtggtgtgttgacacataaaataaatacagagacagcatccaatttgcccaaacccaattcctggtgctgacgatgtgatgcctaattcggaggtgccaactactgcaccttctaaaacaactactgattccacatatagaatgccagggtcaaacacttcaaagcatcagtgaccaatgatagaatccacaccatatactaaacctagacatactgtgattacaccttctggtccaatcaaacaagtataaggacgtgaagttccttccaagacatggcaaatgactcctgcaagcttacttaaaccaccttattttacaggacatgtgaagcacgctgggtacgatgttctaaaagcacgctattatactggaaagacacgtccacagaaaatggttcgagagcctaacatgagccatcatcagttgaccaactgcattgtccacatgttgct

SEQ ID NO: 88306 - DNA, 114 bp, Glycine max
  Clone ID: PAT_MRT3847_50748C.1
gtgggggaattccattgccatgccactgtctgctgcactatggctattgttcgacagctttccagcaggcctatacaaactatgacactatgggaaatgcagatggatgtcctc

SEQ ID NO: 88307 - DNA, 1173 bp, Glycine max
  Clone ID: PAT_MRT3847_50749C.1
gcaaaatcgtggcgccatctgctctatttaattgatcatcaacgacggcggcgacttagcttatcatagtctgctacactgatgtaaagttgcaagtgcaataattgtacagatcactgtacattggctaatacaataggtcaatgagttgcacatgtgtggataaattatacataagggttcttatgtaagctgtttgatcccaaaaaaggggtaaagaacaaaagcttatcctagtcaaactacttgactaacaaatatgtgccgcatcaaataacaatcctatttctcctattctataacagaaattgtcgcaccatctgctccatttaattgatcatgaatgacggcggcaacttagtttatcatagtttgctatacagatgtaaagttgcaagtgcaattaattgtacagattactgtacattggctaatacagaaggtcaatgagttgcacatgtgtggataaaatatacattcgggttcttatgtgagttgtttgatcccaaaaaaaagggggtaaagaacaaaagcttatctatcctagtcaaactactcaactaacaaatatgtgccgcagcaaataacaattctatttctcctattctgtaacagaatacccccaaccaatttgtcgggacttataaatacaaattcaacaagactctgtttcccaccggttatacctgtagatcaagaacagcttccccatgcattctcttgacaaatcgttcaaactctacaaagttttgttgttccataagaagtggactaagcctcaggtaagtaaaggatgaaaagagccttccatctggatcattcatgggcttggcattatccaaaaccttgttatagccaactctgtttaggcaaggaaatccattctgaccggtaactggtaggtcaacatcccacccggcattcaacaattgccagactattccctcaggatctgcaaatgtctctggaaagccctcatgttgctggttaaatgtgtgcaagtcaacacaaggaatgtttaagttgactcccatttgtctttaacattgtcataattgcagcataaccatcacgattgcatgggttataatacccagcggttaattcggcagcatgacttgcagtcttgtaccaccagtaaatacccgataactttgcagcaatgcaagatcc

SEQ ID NO: 88308 - DNA, 423 bp, Glycine max
  Clone ID: PAT_MRT3847_5074C.1
ctaaccggggagatatcgtgtctgtgcagctaaaggtgaagcttatcatcatcttgcgtatcactattgtgagtggaacctgtgcaatgtgctgtagctttattgcaacttatccatgggctgttttctttacttatctcttcccaaggcaaacttattatgggtcggttaatcatctaccagcagtacaactacaacaaccactcttcccacatgtgagacactgaatgagaaattgtgatgaaaaagcgtctagctcttggaggatgatcacactcccatatttgactttacatagagaaatgggcgctcctcgaggctgaagatacctgatgctcatgtgacatcatacaaaccaaaagttaattggaaagatgattgatttcaggaggttctttacacaatttctgcaactgaaactgg

SEQ ID NO: 88309 - DNA, 495 bp, Glycine max
  Clone ID: PAT_MRT3847_50750C.1
cattatggcattgactatgaccacccttgcacgcccagtgtgagtgaggcggcctttacccgatcaccaggtccgactccaaaccgaccctttgctgcaccctctcttcccacccttttaagagatagacacgaccgtgtatgatagggccgacggggattgacgccggtattggaggagatgccggagacgctcagcctgtggctcgcgcactctcctcgacgttgattgccttatctatgaccgtaacgtgcttaaagcagcactgctatacggtccaatgcctaatgcattatatgtggaaggttatgctctgggccgctatgacacaagggttatggggcattacattcctgtagcaccaaaacatgctgggcttaggtatagatgcaggaaaataggatgaactccaggcttgaccattgcaagcagctgaagctgcaaggactatcataggattgcctgatgtggaatacatactcacaaacatcccga

SEQ ID NO: 88310 - DNA, 249 bp, Glycine max
  unsure (1)..(249): unsure at all n locations
  Clone ID: PAT_MRT3847_50751C.1
agcagaattcatccctggtcatttcctatnctctctaattttagagaaaataattaaattcttttcataattagttttgaagttagagatcaaattgagtagctctctcaagaacttagctactactaacgttggagcaatttattagttattagtattaaagtggagtgatcttaatttgcgtgattgtacaaatttcatcttgtattcgttttttcgaaattgtatctcgaaattttgaaagcattg

SEQ ID NO: 88311 - DNA, 382 bp, Glycine max
  Clone ID: PAT_MRT3847_50752C.1
tcggtccggaattccgacgctacgccccacgcgtccgcttatggtagtgccgtagtggcactttgtttacttcgaagttggcaatgctacatagattatggttatcattgcaagctagtatgaatacatgtgaaaaaaatcggtggttttgtaattaatgcttatcatataatatggtcattgaggtattagtacgcttacattgcggtattagtccttgattttgtttgatgtaaaatgctagttttccataaaccaaagattgtggaactttcatcacatttacctggggtgcatccatgcttggagaactctaggatgatctcgactaagcccacgtgtaagctcttaatgaatagaagtttgacctattgtacctttt

SEQ ID NO: 88312 - DNA, 343 bp, Glycine max
  Clone ID: PAT_MRT3847_50753C.1
gattgttacttttttttttgggactaaaatactgggccattttggtggggttttgaatttaaaaaaaatttacaatttttacccatgccacaatgttaataccaatgatgcattacctgcaaaaggtgggcaaaaaggtcgcacaaaatgaatggtaaaattcaaagggtaatttttggctttcaaaaataatgtagaaaaaaccttgttttttttttcacaaaaaagtttccactttccagtgatgtctctgaatgaaacttaatttcattcctttatggttctgggcgggcgtacaattttcttggccaggagcaaccccttgccttgaaattttatacaa

SEQ ID NO: 88313 - DNA, 503 bp, Glycine max
  Clone ID: PAT_MRT3847_50754C.1
ggctcgaggggatacagctcaaagtttcattctttacctcctatgtcactctaggctcgcattgtcgagccttcgacgtctgggcctgcggacaccgtttctatagagaccatcgaaggcgcttctttcgtgacttgcagaaaggcatcacttgaggcagctccttgcatggaagctgagactgtcctatctgaagccaagactactgtcaccaaagccaaggttcagatgcctacgtagcctgatgagatgtgtgatggtcaggtacaggttccgcaaggcgactgtatcacgcttatatgtgtccccatctcaagacagcttggagggctatctatagtcccatatatgacacagatgactatcgaggtacgtctgaatgtgcaggcttcgcaagaggagctaaagacgaggccatgtacacctgatgttaacaaccatgactaatgtggtgaccatggcatgctctcatgtcgggttgtgatgacatagatgccattgct

SEQ ID NO: 88314 - DNA, 499 bp, Glycine max
  Clone ID: PAT_MRT3847_50755C.1
ttggggtcgtagtttattttcatccacaccacagagtaaaactacaacctcaggaggagaatgttcctctgaatccgaagcccgtgctctacccagcgactttgccagaagaggatatctggtgtaactgaaggtgtcccaatctcattttggagaacagtactatttgtgtgccactttctggattgattaaccatcttaggtagcagaggtcctgtaatttacttctttcatgtctcttgaataacttcttttatttgtttttcatttttcctttaaaattgttagacttactcgcttcttaaggtagcatccaagttgatgatgcaagctttcttatcacattactctctctctccaacagtccaccatttcttgatttttggaggttaacagtgttcatattcaacactttgctatttcttaactttcagtgcaagagaacaaagagcataaaatcctttagagtgtcagcagtcaagaatgcatacaggaatgg

SEQ ID NO: 88315 - DNA, 480 bp, Glycine max
  Clone ID: PAT_MRT3847_50756C.1
tttattggagccgcttagaagttttcatcattcgtctctatctccgttcagaaacatcatgaatcctctacctcgtgatgccctccctggtgcttcgctgataacctgggaactgctgaaggagttgtgcgtccaaagcacgaagctgtgggcatgagagtgggccaagaaggttttgcagtgggctggtcagaccactgagggcaccgagaagatctggcttggcttgtgcggcgaattgataggcgaggcaggcaaagttgtttccctcgaggaggttctggccgttcatgacgccgccgctgaggtcggtgatgtcgacgccagtgaaagtgttgacgccgatggtgttgactccgatgttggcaaacttggggtggagacggatggcattggcagcatcgccgaggaagtatgtgctctcgtatggagcagtgagcgatcgactggtccagttgtctggatgcgctctgcacctgg

SEQ ID NO: 88316 - DNA, 626 bp, Glycine max
  unsure (1)..(626): unsure at all n locations
  Clone ID: PAT_MRT3847_50757C.1
acgagggcagtgccaggaaaattcatcaatggcggagttgatggcatcacaggcatactgctgctttaagtgccagaaccttgttgcttttcatgatgatattgtctccaaagatttccagggtggatgatgaagatgtttcaagttccggtttaaccaaggattctcaagagttatggctcgagggcaagcaatggcagagcttttttattcatgcaatgaacattattttgggtcctaaagaggataggctaggcagcttatcactggtcttcacacattggttgatgtgttttgctcagattgtggagaggaacttgtttggaaatatattaaagcttatgaggaaacacaaaagtacaaagaaggaaaatgcgtactagacaagttcaagataatcaagagcaatggatagtaaatgtattttaccatgttagatccaagccatatgatctcaattgctcataggttggttgtgagtttcttgcaaagatcaggggggaaaagaaattgaatttgttcaaatttcaaaacattattttaaaaaaaaaaaaaanaaaattatagaatttgattacagtgggcttcaactcttcagggggtcaaattggtgattggatcttagt

SEQ ID NO: 88317 - DNA, 457 bp, Glycine max
  Clone ID: PAT_MRT3847_50758C.1
ggaaaaaaactaaaaaccccttttgtttacccatatgggccccaaaaaattgccgggggtaaaacgccggaaaaaacatataccccttaaacgcggggccccctccaaaaaaaaccccccccaaaaactcccgcctttttaatttgccgggccccaaaccggggggttaataaaaaaaaacccttctcccaagggcccccggggttttcccccccctttggggaggaaaaaccccattccccggggggcccggggggccccaaaaaaaaaaacccgggtacttggaagggcaaagccccccctccccggtataaaaagggcggggggctataaaaataacccccggggaaaaacttcacctccctccccgggtctggggggggaaaaaaggtaccctggtcacccgggagttttttggtagacacccttacaaaaaggggggggccccccccccccc

SEQ ID NO: 88318 - DNA, 237 bp, Glycine max
  Clone ID: PAT_MRT3847_50759C.1
ggccatggatcagattggtagatatagatactttccatcaactcaactgcatacagcatctggcgcgtttagagcactcaatgtttatcacagatctgtcatcccaatcccttatccataacctgatggagaatttacttaactcgtcggtgattggtacaacaccaaccacaagaacctctacgacgcacttgatgtccctgatggccaatcaggtgctgtgttagtaaccttaaa

SEQ ID NO: 88319 - DNA, 565 bp, Glycine max
  Clone ID: PAT_MRT3847_5075C.1
gttcctgcactcgctaatagcgacctggggaatacagaccctgaatcatgtgggatgccatttctaactcgtattagactgccttagacagttaacacgctttgcagatacttggctaatgctatagccgcctctgaagaatgggccatggattatcgaattgcaccctaggctaatactatatcttcgctggacactgatgagagatgatgacgggctacatagggtatagaagctaacaggtctggacctgatctgtaacaagatcgcagcagcaaaagctttaagccagctggtggctaactacaactcacttcacgccctgaatctgcttgcaaactcatgtcaaagcaacatcagggatgatcagcgtgcgcaaagcagtgctgaggtcatcctccaaagcttgtatacctgaacgaactatccatcaagactcaggaggggacaataaatactcactgatagtgttgccaaagctgcgcttggcaacagagagcgaacctgctacgctacagcactaaccgaaggtgacggacatggagggtcaacgtccatggtgcat

SEQ ID NO: 88320 - DNA, 132 bp, Glycine max
  Clone ID: PAT_MRT3847_50760C.1
aatctatacaattgatttcactttctatttctatgcactgaagcattacaagggccatctaattggtaattatcgtatccgataatctcaactatttattggcacccctaaaataaaccaccatatttctgt

SEQ ID NO: 88321 - DNA, 305 bp, Glycine max
  unsure (1)..(305): unsure at all n locations
  Clone ID: PAT_MRT3847_50761C.1
caaaacaactttaaaacgagggacttaattgcatgtggaatgcgtnnnaatgttcaactgggggccattataagtttcgggtataaccatttccaaattcaaacctttccaataacaaagcccaacattggccggtttttctttaaaacacagccaaaaagatttttttttagccccaaatccaattcctcccccctatttcttttttaccacgggatgcagcgaaacttgttttcctcagactttatagggttggttccccgtggctttgggtttcggcttttttgggttctgttgggcccttt

SEQ ID NO: 88322 - DNA, 306 bp, Glycine max
  Clone ID: PAT_MRT3847_50762C.1
tggacgggtggtaacttgcctgcccaacaccaagatactggaaagagagtccaattgtctgacaagtacttgaacgaggcctggactgggaaatgctaactacgatgctgtgaacagaggaactctctcacaatcttgaatcggaggcagaggcaacgtgtaccgtaaatgtgtacgtgactgagagatgtgctgacccacgctatcaaagttgagatgggactctgcgttgacatgcttagaattctgactggcttatgggcatagagaatatgccgagctggagacgataacactatattgatg

SEQ ID NO: 88323 - DNA, 209 bp, Glycine max
  Clone ID: PAT_MRT3847_50763C.1
aaatgccacaaagcagctatcatattaatgcaccataagataaaactgggaggtggggggatctaagaaaatggaaaacatactcaatgaatacccacgcactataaaccatcacacacaagaattagctactgtcctaaaaacattatcacaaacgccctcagagaaaagaggtcaacatttttatcccagcttaataaaaaaggaac

SEQ ID NO: 88324 - DNA, 475 bp, Glycine max
  Clone ID: PAT_MRT3847_50764C.1
gggaaaaaaacgggccaaattccttccccacttaagattggaaaaggagccacttatcgggacgggaccctaaaatcccatcccaacaagggggccaaaaaaaaaggtcgaaaaaccccaggggccaaaaatggacccatcattttgggaacccaaggacatacataggcaaggccccatgggtcacaacagggggggggaaacccaaggtgggggtccaccaaggcttccttaccaaaaaaaaatcttaaaagaatggggatcggctgggcagttcaaggcggattcaaaaaaaaaaaggggttacccccctggccttggaccctttgagggattaccactatcttcactaacatggggcccaagattggcggaagcctgaatttaaggagcatcctggttttaaaccatttccaaggggctttccccaacggggggacggcccttagccaaaacaacccctgacttggagggg

SEQ ID NO: 88325 - DNA, 338 bp, Glycine max
  Clone ID: PAT_MRT3847_50765C.1
cgaaacctctaacctcagtttaacgaaacgaaacctctagcctcagaaaaacgaaacctctagcctcttccattaccttattttggaagtgagcatcgagggatcgacgatgatccaggtggcggtggttccaatcggaacggtgccgtcgaacgtgctgcgggactactactctatgctgctcccgctgcacacgatcccgctctccgcgatcagctgcttctacaccgagcaccaaaagtctcccttcgccgtccagccctgggactctggctccctgctctttaagttcgtcctcggcggcgagacgccaagtccatgggaggacttccagtcgc

SEQ ID NO: 88326 - DNA, 1437 bp, Glycine max
  Clone ID: PAT_MRT3847_50766C.1
acactcaaggctggagtgtgacagatgagccactctgtaagctttgtcaaaagcagtgcctgtaagtcctataccaatatatattgcttatttttttaccagtgtttaataattaataactctactttcagggctaacaatgccaagacacctgaattttttgaagatcttttttgtaaccttgtctgctatgaggtgtatcgaatgagaactagcaacagattcctccgtgaggtcagaacattgaccctctgcatgctttgtcagatgcggtgcccggctttcgctgccttggcacctgcattctttgaagctcttttgtgtagccttgtccgctctgtgggctagcgtttgaggtcctgcaacagattcctccgtgaggaacttttcaaaattgaacatggagtgtgcacaaattgccaattcgactgtcataagctcgttgaggatataagacctttgtcattggaaaggcggcgtgagtacatagagaaagtagcaccgaaagttgctaaacggaagaaaatgtttgagaagcttgtcaatgaaccaactgaaggcaatgcatggcatgctgaccatattgttccagtatatgacggaggaggtgagtgcaagctggagaatctgaggactctctgtgtagcctgccattatgatgtcactgctgcacaatgtgctgaacgacgcatagccaaagcaaatgccaggaaacaactaaaagcgttaatgaatagcatgaaaaatggtattaagggtgctactggcactaatactaaggaccataagcttctcgaggaagaagggagtatggtagaagatgagcttttagttgaggttcctggcagtgcctattctttagcagacagctaagtggagatgccgtgtggaagggattgcaaacagctacagaaaatttccatcgtcatttcaaccgagttttttttgtagaaagtaaaagcaaaatttggcatccacctgatggcaacttgtacgtcagtgcagttggttttccaactggactttcctggaagaggtcgactgtggtaacgaaggagtacttacttacatcatagtgtccatttttttattgcacaggctaccaattaggtggttctttgtagaaattcttttgaacagatatttgtgttgttgtctacttcaaaagcatgcagcattctcaacatatatacttagagaatgcccttaaacctaagatagataatttttgcaatgtagtgacagtttggatcatccatttgtaacctatcgttgattatggattggatgctggaagcaacagcctcctaccaattatttgcgggcaattgttttgtataaatgtaatgattgatgatttggcaaaacaagaaccttttattttgtcatggttcttgtttggatgaaatattagcttgaatttggatggtttgagat

SEQ ID NO: 88327 - DNA, 254 bp, Glycine max
  Clone ID: PAT_MRT3847_50767C.1
cccctctagtagtcagtgctgggaagctgctcgtgggtgtggctgatgaaaacaaccttgtagataaacccaacaatttcaccttcgatgaaagggcccgcccaatagatccaatggttggttcatttttttcttaagaaagcaagcccaaatgtcacaagagggttcatgggtgcttccgaaaaagccccacccaaccaaatgttaacgccaacaatgaaacccatgggcatgggagcaattattcccaaatt

SEQ ID NO: 88328 - DNA, 362 bp, Glycine max
  unsure (1)..(362): unsure at all n locations
  Clone ID: PAT_MRT3847_50768C.1
tttttnttagagggatttttttttggggtttttttttttgccactggggctttttttttaaatgctcaacaaagaaaatctacaacaaattctaagatgccccattttggggcacagcttacatattgcagcaggcaatttactacatttcttaaaccttggtttttgaaaagccaaaacaggggtggaagtggctaattttagtaggtaaataatcagcagcaaactcaggaaggggggggaaaaaggtgcattgctaacctaatgggtcttactttgaaaatacgttttcaaaacatccataaccgacccaaattcagcctttacttgcatgggggggttagcattgcggcaagccatgt

SEQ ID NO: 88329 - DNA, 670 bp, Glycine max
  Clone ID: PAT_MRT3847_50769C.1
ttctgtcagtttgctctgtttcatttgtatgaggttgctggtttatgattcacaaccttcaattttctgcatcatcttacagtctttttccttggtcgacaatctgattgcatagtctgatcattctgttgcatgtctgatgcacagtctaatcagacttatagcatagtctgatatccttttttgttatgtcttataccttgtttcatatgctattttctaacagtaccacatgaatatatttctggatttggccaatagagatgaattaattgttacaaacaggaagcctgtacacccccattgtcgtgcaattgacaatgatgattctgtaacaaattaagaagagagaaggtacaagtgtccaaggcaggtacacactaacttttagttttaggtttgattcgttccatatggtttgcacatccataatcaagtgtatcctcaatgactgtttacagaataatagttgttttgtgcaatcagaaactcataattttaataaaatgtagtcttgtagaaactatacttttgcaagacttattattagcctattttacttattccttcaacagtgtaattttcattgagattagtgcttgcagttgctggactggctcttttaggttggagctatagtggggtggataaaacttctgttttcttctga

SEQ ID NO: 88330 - DNA, 253 bp, Glycine max
  unsure (1)..(253): unsure at all n locations
  Clone ID: PAT_MRT3847_5076C.1
tnaaacgaggcattaataatttctttcagggtagagagtagatacaatcaaataatttcttgagaactaatataaagaattgttatattttgtagattgcaaccgctaaatcatatatttttttctgccttctaacccccttccttaacactattattttagattataacccactaaaattcatcatttatatttccttgccaactggtaaaactattcttttcttttttttttgtctaaaacaatttaaatt

SEQ ID NO: 88331 - DNA, 269 bp, Glycine max
  unsure (1)..(269): unsure at all n locations
  Clone ID: PAT_MRT3847_50770C.1
cnaagaacacagttggannaaccattntgcgtagtgatntattggnaantttnntgacagagggcaattttagagcaagtgttgatttgcagcgcacnccatcgtattaaaggaatgnttaaaatggtggctacagttggtatncctgagaatacaggtcntancattggcntntgntangaatagttctttagggggcgcgccagttctgatatttacaccatnngtntnaagactgtgagttnaggagtccngcttgcacaaaagna

SEQ ID NO: 88332 - DNA, 835 bp, Glycine max
  Clone ID: PAT_MRT3847_50771C.1
cacgcgtccgtttaaggggaaacatggcattggcagctaatgctactccctctctggccttcgcttcttcctccttactgaaccacaatccccaatttggtgctgctcccaaacgattcgtttcttcttcttcttcttctttgtgccttgccgcggggctcagctccaaggctagggccttcagtttctctgcctcggctgcggcccttgacggagaagaactcgcggtggaagaaacgtggaagctagcgagaccaaccgaagtgtacgtctgcaaccttccacgaagctgtgacacggagcaactacttcatatgttcaaccctcacggaaccgttctctctgcccaggtttgccggagtgcggaaactggtgaaagtagagggagtgcttatgtcacaatggcttctattaactcggcaagaaaagcaattgcggcattggatgcatcggattttggtgggcgtgaagtgcgggttagattttcagctgagatgaatcccaagagaaggaatcttgaaacaatgaactcatcacccaagagagttatatactatgaaggtcctcataagttgtatgttggcaatctttccaggagtgcggggcctcaagacttgaaacaactttttggtagatttggtattgtagctagtgtaagggtgttgcaagatttgaggaaagggaatcgcagggtctatgcgtttgtctcttatcattcagagtcagaacgtgatgcagcaatgtcgctcaatggaacagaattttttggtcgtgtgctagtgattagagagggtgtagagagagaggactgagacctaactggatattcatattt

SEQ ID NO: 88333 - DNA, 496 bp, Glycine max
  Clone ID: PAT_MRT3847_50772C.1
tacggctgcgagaagacgacagaagggggtatgagttcacacttttatagacagccaggtccaatgaaattatttcttccttctgttttctggtcgattaggatattactccaacatacataagcaagagttaaatctaatccttatccatccaaaggatcaacaaaatcattcaaggtttgtaattgctttacaatgatctccaccggtcattgatttctggtcaaagatcataaagtagaaaacaaagaatgaatgtcatatgaccaagtatagatgaaattgctttatattcatacattctcctgcttcctctcttgtttagtatctgttaatcttatcttggggatctgaagttgttgctttactttgtttgtcttttcgtttcttttttcttttctctttccagttactttgtggctccattgttaaaggttgtaaggacaaataaagatcccgagtgctcttgttcccaagcaatggcatattcttccgg

SEQ ID NO: 88334 - DNA, 2628 bp, Glycine max
  Clone ID: PAT_MRT3847_50773C.1
cccacgcgtccgcccacgcgtccgggcattggcagctaatgctactccctctctggccttcgcttcttcctccttactgaaccacaatccccaatttggtgctgctcccaaacgattcgtttcttcttcttcttcttctttgtgccttgccgcggggctcagctccaaggctagggccttcagtttctctgcctcggctgcggcccttgacggagaagaactcgcggtggaagaaacgtggaagctagcgagaccaactgaagttaagtcgatcaatattgaatgattgataatcttattaagatgtcacaatgaaggtgaactaaatcattgtttacaatagattaagcaccagcacaaatatgaagaagctcttacaatgatcaatttccatgtcacaaaaagttattaaacggtagtaatgcagggggacaatcagtcctggtagttccatgatggcatattgattaaaccaagggtgttaacagtggatttccaaggaaatgagcgtctaggtttccaaggacaaggtcagccatggcagttcgagtttctattgtgccacttccgacatgaggcaacaagacaacattttcaagcccaaatagctcttctggaacagtaggctcattttcaaacacatctagcccagcaccacccaaacgaccttctagcagagctggcactaactctgcctcatcaacatgcttgcctcgtccaatgttaataagataacccttgggacccagtgcattgatcacctccctgttgatgatgtgatgagtttcctccgtcagtgggcaagcaactaccagtatgtcgcagttagatgccagttctacaacactaggatagtacttgtagtttgagtctcttttttgagttctagagtagtagcatatggggcagttgaatccttcagctctcttagcaattgcttgaccaatcctccctagcccaataatgccaacagttttcccagagaacttagtggtcagtttgtagtcccctttcttccacttgccgctcctgacataacgatcgcactcgcagatcctcctgagcagcgccagcatcaatccgatagcgaggtcggcgacttcatcggtcagcacgtccggcgtgttggtgacgcgaattcctttctccttgcacctgtccaggtctatcctgtccactcccacgctgaagctcgacacgatctccagcttcggcagcgcctcgatcagctccgcgtcggcgccggcgttcgagtttccgaccaccgcacggatcgagctcgcgtgctggcttagaacctgcgccgtctgcggctgatcatacgcccgaaacagcttgtagcgcttgtccagctcttgctccaggtacggtatcacctgagccaccaggagtaccccaattgatcccatttcgccacacaataaattagggttagggattccacagacactcgaaacgcaacaaagacagactcggagtccgccatctgccgtgttctcgcagccgtatccacgaagctgtgacacggagcaactacttcatatgttcaaccctcacggaaccgttctctctgcccaggtttattgcttatttaacatcctactatcttctgttttcttgttcttttgtttatccctcgtgatttctctttttcaggtttgccggagtgcggaaactggtgaaagtagagggagtgcttatgtcacaatggcttctattaactcggcaagaaaagcaattgcggcattggatgcatcggttagtcactcccactccctgcttctatttcgttcatatcttctggctgctgttttatctgaaatttcggttttttacgactcaaggattttggtgggcgtgaagtgcgggttagattttcagctgagatgaatcccaagagaaggaatcttgaaacaatgaactcatcacccaagagagttatatactatgaaggtcctcataagttgtatgttggcaatctttccaggagtgcggggcctcaagacttgaaacaactttttggtagatttggtattgtagctagtgtaagggtgttgcaagatttgaggaaagggaatcgcagggtctatgcgtttgtctcttatcattcagagtcagaacgtgatgcagcaatgtcgctcaatggaacagtataatctgcctctgccattttccatttttctgcttcttatttcttttgcttgagttgtgtctgatacccggtctggtctggtcttgtgctagtgattagagagggtgtagagagagaggactgagacctaactggatattcatattttccatagagattgttgcaattttgattgttttgggaggatgctctctgttctggcttttggggggcttataggctcctttgaccaaactaagcttgatgcaagaacattcctgagctagaaaatgtcagcaagcagagttgacctactttgaaaagtccattaaaattgcaatcagcaatgtctctgtatatttgaaatttgaaacatgcttttctgagtgacaaagtattcaacttaaggtcaagaacaaagactgccagacctgataaggaacttctcttccattgtttttacatatctataaatatttaaatctactgttgacaag

SEQ ID NO: 88335 - DNA, 425 bp, Glycine max
  Clone ID: PAT_MRT3847_50774C.1
gcttgggggggggggggggaaaagatagaaagatttcggtaaaagaagataggacagaaaacaggaggccaaagaacgctaacgttgggaaatatcagtttagaagatagacacgaagcatacgagaggggaacacagggcaaccgtaaactcaagggagtgctgggtattatgaaggtcggggagacggaaaaacaacaaaaaaatgttgggatattgtggaaagcaacctaaaataaaggggtaccaggaaaaaaaaaaaactagttacaatagcgctaatgtactactattagaggtagacggtaacttggccatgtttagccggccgattgccgttacgggtgtgctttgccaggaacgctagcgttgggccaagcagacagagatgcggtattgggtttacatagaggggtgggcgcggt

SEQ ID NO: 88336 - DNA, 477 bp, Glycine max
  Clone ID: PAT_MRT3847_50775C.1
atattattcttttttgttattttttgtagtttttatttttgacacccttggatgtagaaatgtttttttttttttctgggacaaaaagaacaccaccgtaaaacatttgtagcgaaaaatatcttcggaaaaaagaaacggatcccatcctctttttaaaaggggacacccccacagggaaaaaaaaaaaaaccccccccttgttcaaagggaaatgaagagaaacagtttttttttctataaacgccggggggtgaaaaaaattatgcagaatcacactcccccccctcaaaagaagaggaactaaggagtgtacgtgtgctgcctataggggcggcgtcggaaacaccccccgcggaggggggctcactttttacctccccataaaaggagagcgtggggggtaactagcggtaaaagggggggggcgcttgtagcggactcgtggaaagacacaagggggggggtttttttttc

SEQ ID NO: 88337 - DNA, 255 bp, Glycine max
  Clone ID: PAT_MRT3847_50776C.1
gtagttatactttttttataaaaatgcatgtatattttcagattactatattgacagatttcatttaactcactttcatatagccataaataaatattctatgaaatggaggttcccaattatatatatatttataaggaaatactagattttgatatactattatttaataattttcctactcgactaaaatgaaaaaaaaacactaaaataatgatatcactaatattattagctggttttttttttttggtt

SEQ ID NO: 88338 - DNA, 1105 bp, Glycine max
  unsure (1)..(1105): unsure at all n locations
  Clone ID: PAT_MRT3847_50777C.1
gtcgcatggcaccgccgtaccgtanagccttgggatccctcttataaccggcccgccctctcttttttttnntttttttttttattagtgagtaaacnggctatataaagacaatatataatataaaggagaaaatgtttagtgactaaataaataccattgaaaatcatgtgaaaatacttcacaaaacagctatcacattctgcagatacttcttcggctaattaatacacaatataaaagacagatatatatcgaactatggactaagcactgtccataacaaacctgaaaaaaatggtacagcaaatctctggtcagaattcctgtattaagatttctagaccccttaccatgaatcgccttaaaatatgaatcatctggattgatgaaattatgcatattgacttcctcagtttccttggagttgagattcgtgttgtgctctgtagctgcaataagtgatgagacagaatgacagatgaggagccatgaaaacctcgaaaagtaacttcatcccagattccatttagaagactgtagggtgtgataagagaataacaatagaaagcaaagacaccatttacacctcggattttaaggaatgtctcacacagactagatcatccaacttattgccatccattttatatacagagaccccttgcatctggttataatgatcctgtgcttctttcctcaaactctcaaaaggcatgacttcccatttactataacttgaatatctcctgacatcactcatgtctggtgatcccgagacaggtccacttttgtcaggatcaacattcccccacaccttacaattgccaaactgacctaaatcaccaccctgaccagcttgactccttttcaagcgcaatgctgctgcatgtgcttcacttatcatttctcgactaggtatatctgaccagtctttcatcctcttagacctcatgggagagtgaatcctaattaccccaaggcattctaggagttggtagtatgctcttccttgaagtggattgtgtcccttcctaggctgagagaagtatcttgtccattcagtgtatcctggatcaacagtgaagccataatactggacgcg

SEQ ID NO: 88339 - DNA, 249 bp, Glycine max
  Clone ID: PAT_MRT3847_50778C.1
tcctaagaaaaaaaacagcttaataaatcaatattttaactaaggtggttaatataaggggaagaaaaaataattactcacttttggatgggaaaaatgacttacttctggatgaatttaattaattaatcgttttaatagtgtatctttcctcaaaagataaataatataagctgaaaaaacgtagtaatattaatagtaacatcttatcagtgtattgaaaaaaggaaaatgttctgttcataggtg

SEQ ID NO: 88340 - DNA, 531 bp, Glycine max
  Clone ID: PAT_MRT3847_50779C.1
attattttaagtttcttgttttgaactccaactgctttcatggatccattccctctagcattaccaatattactagtctagtaaatgtaagtttgtcttttaatgctttaactgggaaaattcctgagggtttttcaaggtcgcctaatcttactttcctgtctcttacatccaacaaaatgactggggaaatcccaaatgacctctataactgctcaaaccttagcactctaagtttggcaatgaacaacttcagtggattgattaaatcagatatccagaatctctctaaactcatacgcctgcagatgaatggaaattctttcataggaccaattccaccagagatcggaaacttgaatcaactcgtcactttatccctttctgaaaatacgttttcaggtcaaatttctccagaactgtccagactttttcacccttaggggatctctttctatgacaatgaactacaaggtacaatacctgataagctctctgaattaaaagactaacagaacttttgctgcatca

SEQ ID NO: 88341 - DNA, 430 bp, Glycine max
  Clone ID: PAT_MRT3847_5077C.1
cctacacatccacgaaaattttcacacacactatctcacacactataaacattcttaaaaacatagcaattagaatagaaaccacaaaaggaacaccaaaaagatcaccggacagaggaacagacagagtagttcttacaaatggtattacgaactggaggatgcgctgcgggaccacttgctgggccagtcggtatgcatattcggcgccataaattgcgcctcgaatcggagctccagtctcagctgctggtactcgagcttgagctacagttggagcgagcttccgtgcaaggtggacgatacagaggacatggcagatgacatggtgctgcgcgacgcccttcacgacggctgggacccatgtttggatgcctgtctggacgacagctgtgcctcgagcttttcggcgggtaatctggaggcggac

SEQ ID NO: 88342 - DNA, 295 bp, Glycine max
  unsure (1)..(295): unsure at all n locations
  Clone ID: PAT_MRT3847_50780C.1
gttgaangaangagtangtaagataggaattaggatagaggtttntttattnaaggtttnnatgatagagagatgntaatnatgtntgaagnnataatttgnnntgatttngatngaaaatnnnaannnaaaatgttgnggtggaaaaagntnnngaaaangnntnagnagatagngnnnaggaggngaaggaggaganaaanatgaagnnaaggataagaaaaannaaggagnnnaaanntaaaaaggtttnnagaantngnaanntnnnatnatnttnntangaagagatggt

SEQ ID NO: 88343 - DNA, 273 bp, Glycine max
  unsure (1)..(273): unsure at all n locations
  Clone ID: PAT_MRT3847_50781C.1
tgcnatattccanctggaaggngaaggangtaccatgacgacgtgaccgtnattgtacttcatgctanggatgactncagaggacttcaaaggcatcancttgcatttaagatttgccagttcttacaaaannaataaganagttgnacanancaaancaaaactttgtacctatgtagcttttccacaggacgctctcgtgttaagnagnattncctaggttcaagttgtggnatttggtaagtatataggncgtctnacagaaccantagt

SEQ ID NO: 88344 - DNA, 873 bp, Glycine max
  unsure (1)..(873): unsure at all n locations
  Clone ID: PAT_MRT3847_50782C.1
ttaattgttgaaagattgtattacaggtacttcctcaatctgtttggattaagaggattgtttagtctcatattgggtgaagaaaatggttagttataacatgaaagctgatttcttttatatgtatatntgaattaattcatcaatttcatgaatatgatttttactacttttcagtatgttgtcgtttttccatgtaagctggaatttgttgtgatgtgtgctgttttttatgcagctgtagatgatacacaacgtatgatgcaaatgggtggatttggatttgatccttcaaaggtaccattacaaatatgagtggttcactctagatttttcataattttgaatatcaatcattgaaaattattgtatgattcacttgttgactctcctcccccccccattgacaaaaacgaaatagacgcagatttcaaacaccccgcattccatttgatccatttggaactgaatgctgttctttccagcaaatatggcagaaaattccaagacacagagtcataagccttctcgtagtctactttgaactcaaggcaaggttgactgcttcttttggcctcttcaatcaccttatttgcaatgaggacactatgtagtagatgtcttccttcaataaaagcagattgtgtctcatctacaataaaggacatcaccttcttcattcttttagccagcaccttaaagacaatcttgacataacccagcatgactgggccttaccgaattttgagcagcgggctgaagctgtgttgaggaaagtcgtcagttaaccatgttatgatgtaggaggcttaattgcttacatttgctggatactctctggaaattctattgttgcggtaggagctgtacctt

SEQ ID NO: 88345 - DNA, 1254 bp, Glycine max
  Clone ID: PAT_MRT3847_50783C.1
ataattccagttttttttttttacaataaacgaagtgtattattagtattgagtttgttcctccatcgcgaaattagggttcgctcacttgtcttcaatttcccaaattcaccctgcaccatccttgaatcctccaattgacacgccttttggatccatttttctccgtgaggccgtgacgcatcgcgattttgttttgggaacccgcgaaactgaatcagatagtgcggcacggaaactaggaattagagcaatggcagaagatctggtgctggatactgcaatcagagactgggtgctgatccctctctctgtggttatggttctcattggggtgctccgttattttgtttctaagcttatgcactcttctcaaacccctgacgccaaaattgttaaagaagggcaagtgatcgttagagctcggaatttacgtgctgcggcgaattttattccttccaaggcttttcgtgctcgcaaaatttatttttgtaacgaggaaaatggtctgttgtttgttccaaagggccagggccagaatccgcaagcacagatgttctctgatccgaacatggccatggatatgatgaagaaaaacctttcaatgatcattcctcagactcttacttttgcttgggtgaactttttcttttctggatttgtagcaggtaattttttataactacttcccctatttgtttcttactggttgattggaatatttgtgtgaattcacattcttcaaaacttctctgtttatatatcattttaaagtttaaagtttctttgaataatgacacaacttgtattttgtattagtacatacatgtgttgacttatgatagtcatctgcttggcacaaccttggattcattacttttactatttatctcttgaaaatgtttaaaactttcttgcacagccaagataccctttccattgacacagaggtttaggtcaatgctacagaatggaatagaccttagcaccgtagatgttagctatgtcagcagtcgctcttggtacttcctcaatctgtttggattaagaggattgtttagtctcatattgggtgaagaaaatgctgtagatgatacacaacgtatgatgcaaatgggtggatttggatttgatccttcaaaggtacaattacaaatatgagtggtttactctagatttttcataattttgaatatcaatcattgaaaattatcgcatgattcacttgttgactctcctccccccaacccccgg

SEQ ID NO: 88346 - DNA, 348 bp, Glycine max
  Clone ID: PAT_MRT3847_50785C.1
tacggctgcgagaagacgacagaagggaagttaccaaagtttgtggggcattatctaaacaaaaacaataatcatattcacatattatatatagataagacggataaggtattttaatagtaactctgtaagaggtatttcttattttcatcattgaagctttgaaaatataacgattaagattagagaattaattagcgtaatcattgaatctcaaaaaatagatgatggaaataaataataactctaaaaaacagatctcttgaaacaattatatctatgaaaagaaatggagatagctagacagtgagaaataaacgagtgtggatagatgacaaagaaggccct

SEQ ID NO: 88347 - DNA, 152 bp, Glycine max
  unsure (1)..(152): unsure at all n locations
  Clone ID: PAT_MRT3847_50786C.1
tttttttttttttaaaaagcatatcctattgaatgcacccttttatttgggcgtanaaataactagtnggctataaatnnactccgnacnncacaagggnncctagaaagtatattgnntttgcacgcttgtgtgnncatcccacatacatc

SEQ ID NO: 88348 - DNA, 212 bp, Glycine max
  unsure (1)..(212): unsure at all n locations
  Clone ID: PAT_MRT3847_50787C.1
agntgcagcgtacgtaagctggaattcggctcgagcaaattntcaaatccaaatccaattccaattncaattcncaanctncnnnnaccntaattcctcatnttganaatgcncngaagtcttgnacatccagggagggcnatncgggaacnagatcggagcnaatnntnggaggtgatntgcgacgagcacggnatngaccacaccggaaa

SEQ ID NO: 88349 - DNA, 372 bp, Glycine max
  Clone ID: PAT_MRT3847_50788C.1
atctaaactaaaattgcgctctcaatcgaaacaatggaaggcacaattaatccagagccttatgaccaagaaattgcataggaggcatcgaccattatgactgagcgctatgtacaaccagatcatgaacgttctatattatataactttacacctttacctcaaatggctgtcattgacttgagcaaacagttgactgaagaccacatggagcatgaactctacaggcttcactatgcatgcaaagaatgggtgatcttttcagctcattaatcacagagtggactctacattggtggaaaaagtgaagagaggagctcaaggattattctatcttccaatggaagagaagaaaaagtctgggcagagaga

SEQ ID NO: 88350 - DNA, 340 bp, Glycine max
  Clone ID: PAT_MRT3847_50789C.1
gcagattcttctcatgaccctcaccggcaagaccatcacccttgaggtggaaagctcttacaccattgactacgtcaaggccaccatccatgacaaggaaggaattccccctgaccatcaccgtcttattttcgccggaaagcaacttgtggactgccgtacccttgctgactacaacattcaaaaggagagtactcttcaccttttcctccgttttcgtggtggcatgcagatcttcattaagacactcaccggcaagaccataaccctagaagttgaaagcttcgacaccattgattacgtcaaggtcaagatccctgacaatggaggtattccctcc

SEQ ID NO: 88351 - DNA, 351 bp, Glycine max
  unsure (1)..(351): unsure at all n locations
  Clone ID: PAT_MRT3847_5078C.1
acgcatcccatgactcgtccgggctaatttcatgatccgtttgtacacacactctctctcatagatgataggtttnaatattaggttctgacgtgaccagatctgcaatgatagaccactcactgaccacgctaccacttctaacgtctcatcatgaactcgctatgtgtactcaagcacccatgctcactgattacatgcaagacctaccaccgttccacatctttcatcaacccaaccaagcatttgcatgtaagctagagagcttcttcgaccctactcttcaagcataaactcgtctcaagatgatgaaccatgaactctgaagaaaatccaagtgatgaatttaat

SEQ ID NO: 88352 - DNA, 272 bp, Glycine max
  Clone ID: PAT_MRT3847_50790C.1
aaagaaaaacaggggcattttttaagtaaccccctttttcaacgggaatgagtatttgcgagggatgccatttacttcactgccaacagcttacttattactgcaaaatggttacaaaataggggcccatgacaaataaaggaaaaagggctgccaaagcacccatccagaggcataaatcttgaaaattggaaaaaaacattggccagacctccaaggaggtttaatgggggcaaaaaacctttaatgaactaatagcggttccagtaggt

SEQ ID NO: 88353 - DNA, 488 bp, Glycine max
  Clone ID: PAT_MRT3847_50791C.1
ttggggggggggggggggggggggggggggggggggggggggggaaaagaacattaggaaaacccggctggggcccggatgaccccgacagaagaagtggcgtacaagtataaaacggaatcagcacccgaaagctgacaaggagaacaaaaaaagcaggcaaaaagtatggcagatagccggatagattgacacaaatatgaaaaataaagtgggctggattacgttttttaatgaaacaaaatagatgaaggaaatgataaacctaggggctgccctagcttaactgataatagtggtcgaacttaccgggtttttaaaaagagttaacctatgctttatacgaataggtatatgtggtaggttacttcggtggagttgtgtgacagtacttagggtacgtatattattactagaacgaataccaagtcggcaagagggcttaactaaacttataactgtggtagtaaggtttaatggtggtttgg

SEQ ID NO: 88354 - DNA, 336 bp, Glycine max
  Clone ID: PAT_MRT3847_50792C.1
ggaacactacaaatagaaagttgacttttataaaccaaagctcccatcgcagcaaagaaaaaaaactctttgttcttaaaaagggtggtttcaagggtcccaacaaacactgggggggggaacacagataagtaaaaccaattttgcccccgttggtcaaaaacaaagttctggaaacaacagtagcaacttgttggcggttttttcaaactttggacgaaaaacaaccttccttttattgaagacacatgattactgaaaagaaaccaacgtgtatggaaaaaaacatcccctgatgaaccagcccgaaaaattcactaactcctctgggcagcc

SEQ ID NO: 88355 - DNA, 667 bp, Glycine max
  Clone ID: PAT_MRT3847_50793C.1
acattaacattaggaagtgcatcatgattccacaataattaatgatttaacatgcaaacattagtcatataatagagccctaatttctgtctcagacatcaacacctgaacaaccaaatttacaaaattccatggcaagtaaaaggttactaggtagcaaggtgctttctactatgaatgaattgaacagtgaacacaaggtgacaatgcccaaaaattggtcaagatcttaaatcaaacagtaaggcagctagctagtctaaacagacagcatcaccttgaactagtagtgattataattagctgtaacgatcgaaaccgaggactaagtgtgtcatgatcaccaaggttttaaattacagtcacagtgcaaaaacctcaaacctttatattgtggacaaatgcggccacaattgcaactgttgattgcaatttaaaccctgcataccaagttttaaaaaccggcctgcaagtttctgcaactgcaatttgtcgcatcaatcacatttatccatacttttctgcaatatcaaaagatcacaacaaaactgcaaccgtggctgccaccacaatgtaaaacctcaatgcggacttcattggccatgacaacagccaatgctgatgcaaccgtaatcgcaatttaaaaacttgactagttgttagtaac

SEQ ID NO: 88356 - DNA, 429 bp, Glycine max
  Clone ID: PAT_MRT3847_50794C.1
aaagctaaaccgtattgaatgctatagaagtatgaggctatttgtgggcaccaacagatacataacatagtgagcgagccatcacaatcttttgcaaacaatgataatgcaggcttagcaattataacgaataacccacaagaaacatgaaaagcttgaatacaattatacacagccataggttcctagtttccttccccttgatttccccattttgattctattgaaattgcttctgctatcattatgaaaaaaataaaagtaaaaatcaacctaaaatggagtgtaaaaaatgaacccattaaccatatgggaagcatgcaagctatgcacatacactaaaagaattagattcagcttcattttgcacagcatcataatcaggatgatgatcaaaaaaagcatgatggtaccaggggcactgttcat

SEQ ID NO: 88357 - DNA, 1511 bp, Glycine max
  Clone ID: PAT_MRT3847_50795C.1
actggccgccctttttttttttttttatcactgaccttgaccaaagttccattaatcagtaagtaagaccagtctagtgaaacagcttaataacaagaacttaaatagccaaaatgcacacctacagagtccatacatgttctggggcgtctttccttctcccaaccagtgttctatacaaatacgtcttctttactttctggccatcgtccacatcacgatctaccttttcgtttccattaaagatctccacatttagtcctggcatcttcttggcaagtgccttgcaggctccaatggtgacatcgcaggatgacatccaaagggatcgcatcgtttcatacttccctacgtccatgagaagcgcggagtcaccaaaagggctatctcttatctcaagtttgcgaagtttcttgcatccattcagcacatagagcatagccttgtcactttctccagcaaatgcaatagacagcatctcaagctgctcagcatacaccccaatgtaaaggaaaacttgatcagtcagctggccggagagtgacaaccgccgaagttgcttgcaagactgcacaattgcgccaaaaccttcgtcgagtggctgcactgtatcagggtcaggttttgttgggtcaaggatacacaacctaaagcggataaaatttgggcagtttttagccacagttatgagggcggcatttgtcatctgctggcagaagtagagcaatgagtgaagcttagggcaacccatagagattgcaacaagtcctttctctgtgactcctgcagggtcatttctaccaacacgaacagacggaaaaacccttagttcttgcaaatctttacatgtggaagccacaacatgtagtccaaagtctccaatgcaatccattatccataatcgctgaagtttcccacagcggcaaattagttttattagctctctgctctgaatccctgctgcatagctaaggttcatagctgtcaagttcatacaaacaggatatatagctggaaggcatcgaggagtaacctcaaaaaaccctgacaaactggttattgacttgcactctataatggtgttcattagcttaatgaagacatttgaatttggatcagggataaatgacccaatacccaagtccactatttgaggtgctcgcctcaatatcctttggagtgcattgaggggcacggtatgatttaaccttaagcttttaaggttaggagatctcgccacaagtctctcaagagcccccagattaatctgtcctttaaggcaagcaaaattaagagaaacaagtgatgtacagcaatcaggaaagcagcttagccactggcctctgtggtcatcaacttcattttcctgcaaatccagctccttaaggaacctacatttcggacgcgtgggtgcaagtccatcggtggtgaacccttcacaactaacaagaaccaaagacttgaaattcatgaaagaacgcgaaagtagctccaggctcttatccgtgacc

SEQ ID NO: 88358 - DNA, 186 bp, Glycine max
  Clone ID: PAT_MRT3847_50796C.1
gctcgtcctttttttttttcaatagaaaacggaaactaacgtgaccgtggaatcctgggagcttcaagaaaccccacgtctaaggatgacatgtggtttgacacatccaattagcatatagacatgaaactgcaaaacgagatatatcaaaactcgtctagtggaaaggaggttaaatgtccaatt

SEQ ID NO: 88359 - DNA, 300 bp, Glycine max
  unsure (1)..(300): unsure at all n locations
  Clone ID: PAT_MRT3847_50797C.1
ctccttccaccggaatgcttaggctgaaatagaccccaaaacctcgagagcncaaaacccctcagtctttgggctccacaacactagggctcaagtgtacattaagtccgtgagttcgttccaggtcctccaagatgcttgccactgacagattcctcctctacgttattgctaattttttttggaggggggggaactaccaacaagccaccccacgcacctgtaggtctgccccgcaaagaggtccaagaccaacgatatcccccgacccccgcacaaccccataaaaaaaatcgggac

SEQ ID NO: 88360 - DNA, 170 bp, Glycine max
  Clone ID: PAT_MRT3847_50798C.1
gtctcttttgtttcgtcctttcctacaccactttgccctgttcattttcaggatgacaatacaacactccttgcaggattaaacttgacttcaattgatctaacctgtctgtgggttttttgtagattgattcagttcaatggctccagtaatgccacatggaactgaaa

SEQ ID NO: 88361 - DNA, 617 bp, Glycine max
  Clone ID: PAT_MRT3847_50799C.1
aacgccgccccctcagtataagtccccaactcccatgtttttcaatcacagcatctatagtctatacagttaattgtagataatcatgatgggtaaattcttgatcttggaagaggaggttgaatattgaattgctcagatgtggttggacgttgcaaattttttcatgctgcaactattttagtgtatgagtaaaagatatttcaattttttatctgataagctctgttcttttgggttatgtgcagttgttctgatgatatgtgttactagagttgccaaggctgctttagataaagccttggccgaaaatgaagatattgatgggattacttcctcgccagatttacctattgttgctgaaccatcagcagatcttaaccaacctctcataattaagatagattcttctgaagacagtcatgaaaagtgaattctattttgtgtaaattctttcttcactctaccttttataaaggctatggttttaattttatttatagcggtagctgcttgcttctgcttatttatgatttgtacagttttggcattagaggtgtagtttgtgacacaaatggttaataatacaatcaagatgacgttattgaatatgtttt

SEQ ID NO: 88362 - DNA, 386 bp, Glycine max
  Clone ID: PAT_MRT3847_5079C.1
tttcaattttccttctctttccaattaaacccttatttttgtcttcagaaatcttcacataactttcacctatctcttcttttaaattcaaaatataaccacacatcattatataaaccaatctattactcttcctctcctcaatcaccaccaccatcatcttcaacaacatctattccctaaccttcttatttcaatacatttcaatttcaaaaacctatttctttcttaccatctacatcttcaatttcaactcatacacttaatataactaacttatttcccataattatttaaaattcttatccttacttctatctctaatattactcttcttacttaccacattaaaacatttaatccttaaattcttaatcttaaaaatt

SEQ ID NO: 88363 - DNA, 492 bp, Glycine max
  Clone ID: PAT_MRT3847_507C.1
aaggaaaaatgggtttcattgctttcgacttcaaatgcacttattataatacatggtagtcatgagtttcattaatgctgcatccttgcatgatgtgcgaataaaggcacaggccatccacaagcaaaacattgcccctcacgcgttggctcgcgggggttctgaatcttgagaaaaacaaaagttgatggatgagaagagaatgaaacaactgggggaagctgctcaatctggaagcattgacacgcgtcattgatcctccatctcccatcagacgacacgtgaagtgggagctaacccgcaccaagaaaactggtcacatgacatctgaggcaacatgggtaatgactaccacgtttgctgcgcttgacgagcacgcctcatacggttccttgcgcgcccatggacgtcatgaagtactggctgctgccgttgggagaccacaacaccctagtcatgtgcatgctgtaagagccagtctaaccatcaagc

SEQ ID NO: 88364 - DNA, 1460 bp, Glycine max
  Clone ID: PAT_MRT3847_50800C.1
agcgtgaaaagtccgttttaatcaagagaatcaggaatggttcatagcatgaacttttctgctgtcaaaagaaataaaacacaaagtccataatgtcatgttggttgtaggaattaggattaaacactcctgtcacaaactatatttctaatgttgaaactgtacaaatcgcgaataaatagaagcaaccagctaccgctaaagcttaaaattaaaaccatagcctttataaaaggtagagtgaagaaagaatttacacaaaatagaattcacttttcatgactgtcttcagaagaatctatcttaattatgagaggttggttaagatctgctgatggttcagcaacaataggtaaatctggcgaggaagtaatcccatcaatatcttcattttcggccaaggctttatctaaagcagccttggcaactctagtaacacatatcatcagaacaaccgatatcacaagaccaagaatgataaacgcccaacgagtctttgagaactcgccccaaccatgtgtaacatcagaaagatctttaagagttgttccaacatatacaagtgccagtgttattggcatcattcctaaccaggaagccagcatgtattcccctattgaaacaggagtcaccgataagagataatttaacatgttaaacggtacaaatggaacaagccgaaggagtaatgaaatcttaaaaccagatcttcgaattgcaattgccactgatctaaactgtggataatccttcaacctagaaacaacaaatgatttcccaattgttctaccaagaagaaatgcagctccggcaccaacagttgcaccaatagagtcagcaacaaatccaattggaagcccaaaaagataacctccaccaagagtaagcactgaagctggaacagacaagacagtcaaaggaatgtaagcaacagccagaacaagtgggccccaggggccaagatcgtgatcgacccataataagaagtccttcatcatcttttcgatggggagagtgaagcacgcgacgatgaccgcggcgaggaggaggaggaggatggtgatcctaagggtggaggaccaggagaaagacattattaaccttcgacgccaaggcctgcactcctcctcgtcgtcctgcaaatcaggggaagcttgcttcgacgaagaccgagccctcaaccccacgagatttgccagatttgattttatactctttctttctttttctctgtcctcttagcccatcaacacaaacacgcacctattcagtttcacctttgtttgttttgcctgatcgatttttccgtgggatgaaaacaaacaataatgtgtgtttgttcacaacagatttttttttggattagagagaaagagatggtgaatatcggaaagacagggcctgttcctggctagttttgtaaattcgcgcagacgcatgggtcgaatcgggagttcagg

SEQ ID NO: 88365 - DNA, 325 bp, Glycine max
  Clone ID: PAT_MRT3847_50801C.1
gtctaattaacgacatagtatatatgtcttggtatttgagcttgttttattttttggttattggggctcatgagcgaaccacgcctatagtgtgagtttggatgacctttttgtatacaaagtcacatgtgacgtcttacagcttttgattattattaagatttacctatatgagcccttatctttagacacacgaagtattagatctttacggtacaactagcataaagcaaacgatactagatgatagggggcggcggcccactatggggccttgcaacccggaatttatttccggaccgttgcctgaaggcgtacaaacttt

SEQ ID NO: 88366 - DNA, 627 bp, Glycine max
  unsure (1)..(627): unsure at all n locations
  Clone ID: PAT_MRT3847_50802C.1
aactgccatataaaccagacccgtcagaaggaaattctgagaaaaaggtgactccaatggaagaaatgaaatctctagatttgaaaacgagtaaggggatcactgaagcattacgtttacagatggaactccagaagcgacttcacgaacaacttgagatccaaagaaagttgcagattcaaattgaagaccaagggaaacgtcttcagatgatgtttgagaaacagggagagatgggtgacaacaaggttaatggctcctcggacacaaacgaggaaggcgacaaatttgaaagcattccaaaagccatgcctgaagagaaggattcaagcacaagaaaacaaatagcaggtgaagctgaagaagtgatcaatgaagatgaagctgcaccacccacaaaacgggtgaaaagttcataacagcaagatcgttttatggttctagatttgtttaatattcttagactggtttggactgcatggaacttgtaaaaatattatggatccaaggatgtttcaacttgctcatttatcactgccagaagtaaaatcttgttttatatttgttatcatatacaaaatcagaatggaagaatgaaagaaataatacattttcaaaaagttcana

SEQ ID NO: 88367 - DNA, 1848 bp, Glycine max
  Clone ID: PAT_MRT3847_50803C.1
caaaagcaagagcctatagttgacggcgttggttggggttctaagattgttttgtttgagttaaacgcgacaaactcaaatacgtgtgcattacaactcctaacccctcaccatcctcttcttctctctcattcatacccctccttttttatttgtattctcagctttttagattccgtttctggtttttcccaattccatagtactctgttatcatcgtcatccctttataggacagacaaagctgattcacttaggagcctcgagagctatgtctacatcttctcgtgctcttcccactccattggaaaacaagtatatgaaacccccagattcttttcagctttcgccagtcagagatctgactgcaaattctgcctcatcaaattcaatcagaagtgctgggaagatgttttcttcaccttctaaatgtcccgatgacttccctttttcctctgtttcacagcatgataggcaatatcaagatcccccctttgtttctcagacaattggtgatagcgtgtcttccgaaatacattcaatgacattcatttctcaccctcaagaaaatgaagatctttcctggggaccagatccatgtcaggatattcttggctttcctgaaaatgtttctgtccagcatgatcaggtggaaaacaatggttgttacataaatgatgataatgtcaaaagatctgattttggggagtgggttgatcagttaatgtcaattgatgattctcttcacccgagctggagtcagcttcttgctgatgacaatgtagcagaaccaaaaccaaaggcatctcaggttcctccgcagcagcatataccatctggagaagttgttggtaattcagcatcaactgcatcgcagactaaggctagaatgcgttggactccagaacttcacgaggcctttgtggaagcagttaatcaccttggtggtagtgagaaggctactccaaagggtgtgttgaatcaaatgaaagttgaagggcttactatctatcatgtaaaaagccacttgcagaagtatagaactgccagatacaaaccagagccatcagaaggaacgtctgagaaaaaggtgactccaatggaagaaatgaaatctctagacttgaaaacgagtaaggggatcactgaagcattacgtttacagatggaactccagaagcgacttcacgaacaacttgagatccaaagaaagttgcagattcaaattgaagaccaagggaaacgtcttcagatgatgtttgagaaacagagagagatgggtgacagcaaggttaacgtctccttggacgagccttctgctgctgcaccatcagacacagtagaaaccacaaatgaggaacgccacaaatttgaaagcattccaaaagccatacccgaagagaaggagtcaagcacaacaaaacaaattgcaggtgaagctgaagaaatgatcaaggaagatgaagttgcaccacccacaaaacgggtgaaaagttcgtaacagcaggatcgttgttttatgccttctagatttgtttaatattcttagactggtttggactccatggaacttgtagaaatattattggatccaaggatgtttcaacttgctcatttatcacagccatttcctatgaaaatatggcatgagtgccacaagtaatggtggctcattgtgatggaaattttgttaccatcctcttagtggtccttgaggtttttttttttttcttttctttttcacatgtaaactagcatttatttatacctgtgtttaatgtattatatagaaaatcagaattgaaaaataaaagtaatattaagactccaaagaaataatacattttc

SEQ ID NO: 88368 - DNA, 243 bp, Glycine max
  Clone ID: PAT_MRT3847_50804C.1
tgagaaatacataatctgataccttgtcaatggttagatattcaatggtaagactaaggtgcataaagatattgtgcatcagtaatttacctaccaaccctcggagagcccttttagttcacttagtgaaagaccagaagggcatctctaagtttagtatcttaacaagtttaaaatgctatgcaacaataaagtgattccatgacaagggtaaattaaagtttatgtcaacaagttattaaa

SEQ ID NO: 88369 - DNA, 387 bp, Glycine max
  unsure (1)..(387): unsure at all n locations
  Clone ID: PAT_MRT3847_50805C.1
ctgatctccttattnnnatgngcataaagnngggttctttcaatccatctattgaagcacttgtttcacaaggtttctattgattctttttttataccattttgaggtctagcaatggaagggagcattgaccctgcaacctcaagccttctgtgtctggaaaacaatgacatgtgctttgatgattttgattgtaatgttgcagatgaatctccttcattggaccacaaaaatcttaactttaacaatcagtatctgattaaggacaatcatcatggatcggaacatttgttggatttttctgtacagagcgatgaaactgttttgggtttggttgggagggagaaggaaaatttgccccaagatggttacctcaagagacttctt

SEQ ID NO: 88370 - DNA, 198 bp, Glycine max
  Clone ID: PAT_MRT3847_50806C.1
ctctggtttcaagaacgagtgcaatgcgaagtgatagatattggtggaggttactccatcatctcattttaccatacatgccccccttatgactacccgctctgacagaatgccagaatcaactcgaccagaaggactaccaattctctgctcctgccctattggtgcccccttgggtactctatttcctttacatag

SEQ ID NO: 88371 - DNA, 244 bp, Glycine max
  Clone ID: PAT_MRT3847_50807C.1
cttttctctttctctctactttatactcgagtgcttgatctcgctcctttaaataaaaagctatggaccacaacatctaatctaatctagtcagacaaacaatcactcctcttcaatattcttttgattctaaaattcttactcggatttaatcccttacttttaggaatcattgagtataagatcggaggactgttaaccttatcgtacggacgatgctaccgtggaatcattggcttcgctg

SEQ ID NO: 88372 - DNA, 418 bp, Glycine max
  Clone ID: PAT_MRT3847_50808C.1
gcagacagataaaggaatcctgcatcaatggatttctcgcttcgacatttacccctatcttgagaggtttactcaggatgcaacagccaagattcttgagttcatggaagggaaaccagatctagttattggaaattacactgatggaaatttggtagcatcactaatggctagaaaacttgggataactcagggaactatagcacatgctttagagaagaccaagtatgaagactcagatgtcaagtggaaagagttggaccccaagtaccacttctcgtgtcaattcatggcggatacagtggcaatgaatgcatctgatttcatcataaccagcacataccaggaaattgctggaagcaaagatagacctggacaatatgaaagccatgctgcatttaccctccagggctgtgta

SEQ ID NO: 88373 - DNA, 260 bp, Glycine max
  Clone ID: PAT_MRT3847_50809C.1
ggctcgagtgcatgacttgcacagtggcctttcttgaagttgctcagacatacctgcctccatggggcagggacccgtattcggtaccgagattacactcgtcgatacatagccattggttgtgtggaaaaggttccatgtatgcttgctatgccgggtggaagactccaacagcgatgcctttaagaagcctcttgccagggaccccacttacctatgggtccttgaaaatggaatgaccatgcaaagttttggtagtc

SEQ ID NO: 88374 - DNA, 425 bp, Glycine max
  Clone ID: PAT_MRT3847_5080C.1
gggggaggattcaccccttgggacataaacgagaaaataaagtttaaaggaccgcagggggcctttagcaaatgaagatttataataacccccaacttctttttatgggggtcccaggggtcacttgaaaactaggacattaaggggggtattaaatatccctctaaaatcaggggtttcagagggggttaaggcttttactcttggtcataaaagggcccaattaaaaggggtttttcccttttcaaaaagaaacaaaatttggtcctggtttacttttttttaagggtaaatattcccctaggggcccttacacccaaaacaaattttcctggccatgagggggtgagggggggggaatttctcaagcgggaaccccagagggaacagcaaaaagaattctcccttttcattcttggaaaaac

SEQ ID NO: 88375 - DNA, 250 bp, Glycine max
  unsure (1)..(250): unsure at all n locations
  Clone ID: PAT_MRT3847_50810C.1
gataggggtggagtncatcgctcctgctgctctctttgaagcctatccttccgaggagcagaaactatggcgtcctcatgcttatgagattacatcaggcctctcggagaagcctatagatctggatgttgctgccatgcctgagctctaaaaccttgcccaaacttacggcatatacttgagtacatcgcacgttgacagacgggatatgcttcctatgggtgctcctgccctgatgatgtcgtcacac

SEQ ID NO: 88376 - DNA, 1570 bp, Glycine max
  Clone ID: PAT_MRT3847_50811C.1
cgccccacgcgccgcccacgcgctcgagccgctcgagccccagaaatatcatatatcgtatcatccttaatataagctttattttgtgtcaattttgcactgtttaatttctacaaatatcaaagatcccccttcctcttttagtcaaaccatatttcatatttgcaccaaattttttttaccaagatttgtaagatcacaattcacaagccccagagaagaaaagggaaaataaatccttgaaagtttcatttttgacaaatacagttgaagcaaaattgaattaggtaatagttatccttcaaggacatagggagggctatataaacctttcttctgatgttggtgtgaaagtggctttgtgaaaaaggacaaaggcttgttcagcgatcataacattgaagattttgtattcacacgtatgaagagggataataatattggtggtgtctcgattgaaatggagcagggtggagacagagttggacatgttaacaaggttattggttatgggaaaagggtcattgttaagaagaggaaaccttaccatcatcatcatcgtaggattcataataagaagacagtgcctaataaagtcccaaaggcacttcaggagctatttgtttcatgcagggaaacattcaagggtcctggtggtactgttccctcaccacaagatgttcagaaactgtgtcacattcttgatagcatgaagccagaagatgtagggctaagatcagatctgcagttcttcaagcctgaaaatattgtcaaagagaaccaaagggtcacgtgcacaaccatatatagttgtgagaatttctcgctctgcctctttttcctacctgcaaagggagtcattcccctccacaaccacccagaaatgactgttttcagtaaacttcttttgggtcaaatgcatattaagtcctacgattgggttgattctgaggtctctcataatttgttgcaccaaccatctcagttcagattggcaaggttaaaagctaataatgtgttcacagcaccctgcgacacttcagttctgtatccacaaagtggaggcaacatccatgaattcacagctataactccatgtgctgtgcttgatgtccttgggccaccttattccaaagatgatggcagggattgctctttctatagagatcacccttatactgcttttccaactgcagatggagaaagtggtaaggtgaaagaagagaatgatagttacggatggttagaagaaattgagatgccagaaaactctcaaatggatggaattgagtatttgggtcctccaattatagagactgccctatagataagatcaacatttgacacatattccgtagcatgtcctcttagctgttcttattgtgcataccacaggcatatataaagaaattttccacctctctcaatgtgttggtttttgttctctagctagcgcttaaattttactatgtttaaaataaagctctaataccattattttactgttagttgttacattttggaatgttgtacaaccaaaatttacattattatatatgaggctgattct

SEQ ID NO: 88377 - DNA, 327 bp, Glycine max
  Clone ID: PAT_MRT3847_50812C.1
aaagaagatgtggaggctgtgcacatcagtggtgggccctgctggttaggaagcacagctgcacccacttaacgacctaacgatggtgaattaagagttgctgactctgactcgatgaattgttagcagaaggaagcgagggaagattcttattttagaatccattttggcactaaatggaccatgcctcaatcaagcaccttgaccatgaacttgcatgatatgctcaacaggcttgcaggtaactctgaacaagctgccgaaagcgatggcatgattgagcgctctgttagagaacattcagatgtcatgtcgatccttgatgcc

SEQ ID NO: 88378 - DNA, 3603 bp, Glycine max
  Clone ID: PAT_MRT3847_50813C.1
taaatgaaacaagcatatggattgttgaacttagagaagtacatgcagcaactcgaggtggtcatcatagaggcaaagtaatttcttctactgtcgttccaaatgttcagccaccaatggatgctgtggagtatgctgagtgtgaagctgctgtaaaagactttactacatttcgtgaagcaatgaagaggagagggatagaggatatggatcttgtgatggtggatgcaatccctgatgtgctggatatcatagtgaagcgaatgctactagccgaagacttgctaaaccactaatattttgtacgactgagagtgactgcccaatggaaaatggctatgcacgtactgtagagatatacgacatgcaaaatatggttgactaatcaggtcttttaccatctcttcaataaaaaaagatctcttagacaaaggataaagaaaaaaataagccacagctaataatattttgttttgtttttctttataatgaaaacacaacctattgtgattccattgggtaggtgttgttatttctgcaagtagtggtggtggcggcggcggacagcggtggtggcggcgaaagagtggaaacaacaactggcagcattattgttgctgtatgtcagtggaatattattgcagtgggatttactacgctgagcttgctaaccctctccaatggccacagctcaggaaaaaacgacgccatgttgcgccacccaaaataacaacaaggtcgcactcgcagcacctccaacttcttcttcttctgcgccacaacaacaatcacaatcacaacaacggccctctgttgccaccttcatttccgccatcgattctcctccctaaaaccgcttcttgccaaaggtatcactgtcatggtgagagctcaaaccagccaccctttggatccactaactgctgctgaaatatcagtagctgtagcgaccgttcgagcagctggggcaacacctgaggtgagggatggcatgcgctttattgaagtagacctggtagaaccagaaaagcaagttgttgcattagcagatgcatatttcttccctcctttccaaccatcactgctccctaagacacaagatggacttatgattccaactaagcttcttccagggaaagcaatactagttgtttacaataaaaagtcgaatgagacaagcacatggatagttgaacttagagtaagttcatgcaacaactcgaggtggacatcataggggcaaactgaattaatttaatgttgttcctgatgttcagactcaaaaggatcctgtggagtatgctgagtgtgaagctgttgtgaaggacttttcttcctttggaagcggatataattctttggtaggtatttggaatatcgctctcgtcatggattatccctggtgtgccgggttttgcactgtggctgatattgctatcatgcttatgcgctatgggtctttcctttgctaggcctgtgtgtgagtgccatctggccaatgtctatgcccgtacagttgagggaatccatgtacttgttgacatgcaaaatatggttgttcttgaatttgaagatcgtaaacttgtcccccttccacctgctgatccactaagaaaattatacttctggtgaaacccaaggaggagttgaccgaagtgatgtgaaacccttgcagattattcagcctgaaggaccaagttttcgtgttaatgggcacttcgttgaatggcagaagtggaattttcgtattggattcactcctagggagggtttggttattcattcagtagcctatattgatggaagtcggggacggagacctgtggcccatagattgagctttgttgagatggtggtcccatatggagatcctaatgatcctcactataggaaaaatgcttttgatgctggggaagatggcttgggtaaaaattctcattctctgaagaagggctgtgattgtttaggctatatcaaatactttgatgcgcatttcacaaacttctatggaggtgttgaaacaattgaaaactgtgtttgtttgcacgaagaagatcatggtattttatggaagcatcaagattggagaacaggtttggctgaagttcgaaggtctagaaggctgacagtttcttttatatgcactgtggctaactatgagtatggatttttctggcacttttatcaggatggaaaaatagaagcagaggtcaagctcacaggaattctcagcttaggagcattgcaaccaggtgaaactcgaaaatatggcacaaccattgcacctggactatacgcgcctgtccaccaacatttttttgttgctcgtatggacatggcagtagattgcaagcctggtgaagcatttaatcaggttgttgaggtgaatgtcaaagttgaaaagccaggagacaataatgttcataacaatgcattttatgctgaagaaaaactgcttaaatcagaaatggaagcaatgcgtgattgtgaccctttatctgctcgtcactggattgttagaaacccaaaggactgtaaaccgaactgggcatctaactggttacaagctagtacctggctcaaattgtttacctttagctggctcaaaggctaagtttttgagaaaagcagctttcttgaaacacaacctttgggttactccttatgcccgtgatgaaatgcatcctggaggagagttccctaatcaaaatccgcgcgttggagagggtttggctacttgggttaagcaaaaccgatcattggaggaagctgatatagttctttggtacgtatttggagtgacacacattcctcgattggaagactggcctgttatgcccgtggaacgcattggtttcatgcttatgccgcatgggtttttcaattgctcgcctgctgtagatgttccacctaacccaagtgatttggatgacaaagagaatggcttgccagccaagcctattcagaatgggctaattgccaagctttgaaaggataaaaaatgaggatctgccactttacgtggttatgttcaaattattaaattttcaatactattgtttgggctggtgttcaaaccttagctggataattaagaaacgcctatattgtataatttgtactgtataacttgtatgtacgtttgttgcatggtaatgcttggtaacttaaatgttcatttgatttgatgtggaaaaaaaaaaaaagggcggccgctatattttaaattttttccttgattatttttaccatcacctaagtgagtgcatcactttaattaattaaaaatcgtcacccccccagtttttctcatggtccacagaatagctatttaggtgatgcatttgatgtgtaattgtaaaatgatagtactttattggtttctctgaaatctaaattgatgcgacgttcctattgtgagaaattgaagtgtgttggatcatagtacaagatgtcgtcttttatgatcagcctcagtttttaaaatcactgttgcattattcttaggagcccctaaaataagaccctgtccatcgtacaccgttgaatgccatttattggatatattaatattaagttgaagagctagagttaaatcaaaaa

SEQ ID NO: 88379 - DNA, 237 bp, Glycine max
  Clone ID: PAT_MRT3847_50814C.1
acctccgaatcagagaaagggagataccgaactaagaaaatcctccacagccccccatgccacaagacgacacaatgggacgatgagtcgacttgataactaagatattgttactcctccagggtgatcgagtttgacatcatccacatctaatttataacactgttccattacttaacgatcacagatttatcatctctacgggattaaatcccgagttttctattggaaacttaa

SEQ ID NO: 88380 - DNA, 767 bp, Glycine max
  Clone ID: PAT_MRT3847_50815C.1
cttaacttgccttaaagttaacggttcttttgtcgaatggtcatgagtaaatatcccacgcgattcctgaagatgttactcgacagggttgctttgattcctcaaaggttttgtctgtacgtgaattggcaacttcagggattgtcctgtatatgcagagactctagaggacaaatgcaacacaagtaacatctttttgggcatcaattgtatgtttactcaatagtttcttgcgggttttcattatcaatataacaaaaggctaccagtatccgtaagaaaatgaattggaaactctagactctggtctatgttttgaatattgagttttacgtcgggcaaagacaacatagtgattggattttgtggattggaacttgattagattaagattttcagtgatatgaaaagggtgtgtttaatctgctgttgtgttaagggtgtgtttaatcttctgttgtgctagttcttacttgcacctatggagcagttttggatggttcttcgtaaaggttttggtaaagactagaaacgaaagggtgatggagtttagtgttgcagtgtggtttgtgttgtcatttggtgccatttagttggagaggcagaccgatctcatatttaaaggtgttttttttggaagcatatttaagggtgtttcttttgcctcaaccttgcacttttggctctaatgctaattcttatcaaataaatacttcattttgtggtgggttgctatataatatttaaaggatacattatgtattcat

SEQ ID NO: 88381 - DNA, 394 bp, Glycine max
  Clone ID: PAT_MRT3847_50816C.1
cggctcgagctcgagccgttctcttctccttcctcccgaaggaatctctctcatccttttttccttttccctctctacttcatacccttaatttctctacccacccatggctgcaccaccgacgaagtacacccaccacaccaaactactcataccccccggccccgaagaagatccacccaaacacccctatccaaaactcctcagaataaccgtcacagacaccgacgcaaccgactcctccagcgacgaagaacaaaccaacttttccacgcgccaccgacacagaaagctcatcaacgagatttctatcgccagagcttcagacactcggcgcggccagaaattccgcggagtgagacaaaggccctctgggaaaatggtccgcggagat

SEQ ID NO: 88382 - DNA, 357 bp, Glycine max
  Clone ID: PAT_MRT3847_50817C.1
gtcttaaagcaccacatactccggggcaagctcttcactgaaaattccatcattctgctcttgcatcaacggccttatctattccgtggcttactactacaacaccctgccataactaaccatgctcttcacaacattccactgttacacgctgacattctaattcaacctgctgcgtgaggtctatttcaatcaatacccttatgatcatattgctcgacaaatcatgatccttactcttcctttcacacacatgaacagtttcgaaagctccttgcaaccaatatagctatatcatgttaactacccaactgacaccccctcaacctatgatagtaagtacggtagcacccttac

SEQ ID NO: 88383 - DNA, 365 bp, Glycine max
  Clone ID: PAT_MRT3847_50818C.1
attaaagataaaattacatcgcaaacaacccaaataaccaacgagaacatgcttttattacactcaaatcaaagatcaaaaacactgaatagaaaaggggcgaggattgtccaaataacagaggaccggccactagaggggggaagaccggccaatgccaacccccaccctggagacggccgggctcaaattgggccccacccgttttcgggtcctccgccgtgggcttgaaaaacccttgccatgcaaatgcccataactttggatgggaaaaaaaggcgaggtgggatccgcgtaaaaactttaagcacgtttttattcgggagcctctgcaaaaaaaaccccccctcaagaagaacaaaagg

SEQ ID NO: 88384 - DNA, 755 bp, Glycine max
  Clone ID: PAT_MRT3847_50819C.1
cacgcgtccgatgagtcacacagaatttggtggagtaattgagggaaagatcaggatgaacactttgaagaaatggttcacttcttctcaggctatattgagcatggtactagtgcaactttttgtaactgggttgcagcttctgtcaagggttatattggttaaaggctctttcattggtgcacttattacttatcgtcatattgttgctgcaatttgtgttgctccctttgcgctttacttcgaaagaggcctcacaaagaagttcacttggaaggtttggttttggctattcattaatgcattaatggggatgaccctagcacaaggattgttctattatggtctgcgagacacttcagctaccttctcagtcaattttctcaacttagttccaataaccaccttctttacgtctatcatatgcagaatggagaaactgaggttgcaaacatgggcaggtaaagctaagtgtgtaggggcaattttgtgtgttggtggagcattagttaatagtctttacaaagggaaggagttttatcttggtcaccatagtcatcacgctcaaactgctactgcagcacacaaaaccaacatgcttcgtggcactttgtttttgatttgcagttgcttctctttaacggcctggtttattgcgcaagtgaagttgcttagaatatttccactgaggttttggggaacaatgatagcatgcattctcgcagcaattcaagcagcaataataggtgccttct

SEQ ID NO: 88385 - DNA, 847 bp, Glycine max
  Clone ID: PAT_MRT3847_5081C.1
gcggagtccttgtcccgcgcttctttcctttaaatttgtactcggttaaattttctttgcttctttccattaagagaatattttttatacataatacacaactcagtacactatatgcatatcccccgctatattacattgaattgacaaaacattcaaagagaaggaaatcaatatactgctaatttttcatttttctgctgaaccaatatttcctactctttgttgcaacatctaatttgatgacattgcaagattacatgacttctcccaaggaaaaacacttgatgttatcttccctccaattccggcctgacgcatcatctctcgcttcaaatcaagctcttcaaccaattcttccttccatttcctttgcctctcagagaagcttgacctccctccagtcccggcctgacgcatcatctctcgcttccattcaagctcttcaaccaattcttccttccattttctttgcctctcagagaagcttgagcttacactagatgattccagctcagcattatgaagagtctcctttgattgattaagatcagatggttggatttcctgagagaagcttgagcttacactagatgattccagctcagcattatgaagagtctcctttgattgattaagatcagatggttgaatttcctgcaaaggtcgacagtgagcaccactaagctttgatcggtatttggtatgactcccaccagggcttgcaacattagcactgccaaccattgagaatcgtctccaagcctgactagctgacctgcctattgatgatgttacatttgagacatctgacataactttactcttggcaactttgatgggagct

SEQ ID NO: 88386 - DNA, 241 bp, Glycine max
  Clone ID: PAT_MRT3847_50820C.1
cacgagcaggattgcatcgacccgcgctcccgcgttcaccaacaccatccgaagctacgccgccgatgcgaaggcctccccgtccgaggtctcctccatcttggagcagaggatccgtggagtccttgaggagaacagcctcgctgagactggacgtgtgcttaccgtcggtgacggtattgcccgcgttcacggcatgaacaatgtccaggccgaggagctcgtcgagttcgcctctggt

SEQ ID NO: 88387 - DNA, 664 bp, Glycine max
  unsure (1)..(664): unsure at all n locations
  Clone ID: PAT_MRT3847_50821C.1
agttactcttccaatttcgtcatggccaaaacctccttcaagcttcagcatcctttggagagaaggcaggctgaagcttctcgcattagagagaaatatcctgatagaatacctgtgattgtggagaaagctgaaagaagtgacattccagacattgataagaaaaagtaattgattttcttactacttctgtcccttttgattagtttccaggcctgataatgttgttttgctgcctgaagttttaatgattttgtgggtggggggggtactgatgttcatataaaataccgatcaagatttaatgattttgtattgttaaagctatgaagcatgtttggtatgaagctttttgtacgccactcataacttctttatcaaatggcatttgtaaaagattaacaagtgaggccagaatgtactaatggtattcttattgcaaaatctactttaccgaagtgagtgtatatggccaagccataagttgttggtcacggtggagtggcctaattggccactgtcactagagccttggatgctactgcttgatcttattaagattagtttgaagaacaattaatagaatacaaaatgtggtttgttaatactataaaacaaagtctcttgtttaggatgtctggaattngattctggatagggcatg

SEQ ID NO: 88388 - DNA, 222 bp, Glycine max
  Clone ID: PAT_MRT3847_50822C.1
ggaactagtgagatttcagctcattcttccttgtaacagtgtacttaatatgatcgtccttgatttcttcgatgctattcttcaggtagcatagcatttaccatgcgtagtatatgtgctcccaccaaatgtggagtggttatggtacccgaccgccgaccgcgatacacgcaaataggtcgcctgctgtctttaccaacatcatcttttgcaatgccacca

SEQ ID NO: 88389 - DNA, 264 bp, Glycine max
  Clone ID: PAT_MRT3847_50823C.1
atcacgcgtccggtgcattgttcagttcagatgacatgttaagacatgctatatatgcatggtccatttatagaagcaaagaaaaacgtagagatacatactcggagcatcaagaaaggtgcggacgtggtatacgatatatgctaactttgcctttaatacgaggcatgcactgtatgatgaagtggactgggaggggcatatcagggcactgggatggtcaaaatgaatgaagagactcctggcgaagttcaagtgactaca

SEQ ID NO: 88390 - DNA, 226 bp, Glycine max
  Clone ID: PAT_MRT3847_50824C.1
tagggccgtcaaaggggggtttaaaaggtaaatgaaaccgaaattaaaattccatgaaccaaattgtggaccaccacgggtccatagaaaggattggaaaggctcggttggaggtactaacccgtggaagcctgaaaaaaacgaagacgcacgatgaatcttggaagaccggccaaaatttgggtatactaacggaaacgtcgaacgtcgagcgcctgctgatttt

SEQ ID NO: 88391 - DNA, 338 bp, Glycine max
  unsure (1)..(338): unsure at all n locations
  Clone ID: PAT_MRT3847_50825C.1
tacttagttctttgagaactgaatgttggtaaagttgtttttatccttttttttgcaagatatgtctttaccgaacaaaagtcgtttaaggcgttggaccatttaaacgatcttttgattcttttgaaaggagagaaacatttaaggtgtttgaccattaatgatctcttgttttttttttaaagtagtgacaagtttacatgttgattttatgctttcgaaagtccacgtttaaccaataaaaagcaaagaggactgtttaaggcgttggaccttaaaacggtttttaagtgatttttatggacaaagcttgatttgtgagtngattttagccttag

SEQ ID NO: 88392 - DNA, 131 bp, Glycine max
  unsure (1)..(131): unsure at all n locations
  Clone ID: PAT_MRT3847_50826C.1
gatggtatatgtncctgtangattattgaatttgctggnaacttgtgagtttnagtgntagagnntgatatgggncnttgccnttccgtattgtntgntgcntggataggtngaatgtcgtttttttgttc

SEQ ID NO: 88393 - DNA, 359 bp, Glycine max
  Clone ID: PAT_MRT3847_50827C.1
acgagattgatttgcttactcacgaagaagaattttccttgcctcagagttactttgtcaaggaagaaccctgagcaacaatttttggagtatatacattttttgtttcaatcgttattcatcttttgatgtgtacagctggtgttctcatcgcttgtctgtcaagtttccccggtggttccggttggtactctcaatcaaaatgtatttagctaccctggttcggatataatgcattttgacttaaaggatattattagatcgatcgtaaacccatcgggcaatcgtaatctgtttattttttttttcccccttcaactaaatcattcaaatttatagataggaattttccctgccgg

SEQ ID NO: 88394 - DNA, 212 bp, Glycine max
  Clone ID: PAT_MRT3847_50828C.1
cgatattcccggtcacagctcacttcgggcgctttttttttttcaaatttgcattgtcacagaatgacggagggcataggcctggcgattgcgcggggcccatgccaagggagcagttgtgacctaggtgaccgcgacaacggggaggggaaccgacctccaggaagtagagggggggcatgctgaaacgcgaagtaggttagcttgacttc

SEQ ID NO: 88395 - DNA, 112 bp, Glycine max
  Clone ID: PAT_MRT3847_50829C.1
ggcagccggaacacgttcctctcacagagactgcgatggactccttgggtgctagaagacgaagctacactccgaacatagaaacctttaccactccgacatcaccgaaaaa

SEQ ID NO: 88396 - DNA, 850 bp, Glycine max
  Clone ID: PAT_MRT3847_5082C.1
ttcggctcgaggttactctcctttgtttcattctctaacttatcttttgtttagttttgctgatctgtgtcgtgcagtctctggcgaggttaccaaagactccgtggtgcccaacaacaacgtttgatacatcaagagacacataacataacagaatactcaaaacattctccatttctaatcaagaaaacaatcagaaatgttacctcaaacattagccatccctgcattactctttgtggtattcatatttattctatctgctgttgtgttgcaatcaaaacaaaatgagaaatatccacctggtcccaagaccctgccaattattggcaacctccacatgctagggaaactaccacaccgcacccttcaatcccttgcaaaacagtatggacctataatgtccttaaagctaggacaggtcacaaccattgtgatttcctcccctgaaactgctgaactattcctcaagacccatgacactacttttgctagcagacctaagtctatctcatccaaatacatttcttatggtggcaagggcttagtgttttctgagtatggtccctactggcgcaacatgaggaaactttgcacagtacaacttctgattgcatccaaagttgagatgttttctcctttgaggagtcagcagttgcaagaattggttaagtgtctccggaaaacagcatcatcacgtgaggttgtggatctcagcgatatggtgggggatctcattgagaatatcaactttcaaatgatatttggctgcagtaaggacgatagatttgatgtaaagaaccttgctcatgaaatagtgaacttggcaggaactttcaatgttgcagat

SEQ ID NO: 88397 - DNA, 280 bp, Glycine max
  unsure (1)..(280): unsure at all n locations
  Clone ID: PAT_MRT3847_50830C.1
tcanctcccaccatgtacggtatcactcgcgccctccgcacgtctaccccgctccgcctcgcaccgcgcaccgtngccgcgaaggcttacaacagtggcaaggtctcgggccccgtgatcggtatcgatctcggcacgaccaactcgtgtgtctccgtgtacganggnggcgcacccaaagtcattgagaatgnccgagggcgcgcgtaccacgccctcggtcgtggcgttnaccaaggacngngacctctcgttgggcanncgcgntccgccagcagtt

SEQ ID NO: 88398 - DNA, 365 bp, Glycine max
  Clone ID: PAT_MRT3847_50831C.1
cttatactgatcaaatagctggtatcctatcacaacacagttgttcagcttaaacattagcgttacagcagcatagattacttcttgggacttgaatgtatacacctctgaagggcctacatcctcttatgtcagaggcaatatactcatgagccgctagctgtatccaacatgacaacatgaacggcaatttctacaccccatgtttggagattccaaactttaccgcgtgtgtatcagtctacattcataagcccagcaggtacttattcatcgttagagctctacactatacaacctatgccaggccagaaatcagcaccaatttaggcatgccatctattatctcagccccttgacaatca

SEQ ID NO: 88399 - DNA, 369 bp, Glycine max
  Clone ID: PAT_MRT3847_50832C.1
caagatctggtcttcttatgatgcgtgcgtgtttgtttcaactttaaatgtttgaaattcatgtaagcctagatagacgcatctctgtaatcgatatatttttttttccctttcattttactgtgtggtgtaaattggttgttaattctgttaagggatgagagcttttgttttttttctggtaaaattgacgaatccggtgtatttttctgacttttatttgatagcttgagacttaaagtactcgaaactatgtttttggtccttgtataaacttctgagaaaaatgctaacaccaccctcaaagacactcttttttaacacacacactctattattgtatgaaatttattcaaaattacataaatt

SEQ ID NO: 88400 - DNA, 1656 bp, Glycine max
  Clone ID: PAT_MRT3847_50833C.1
ccacgcgtccggccgcgactttactaagcaattaaggcatatacccatctcatattgaggttgcagcgaagacgaagaggaaatgaaatgagcatatcctaatccagttatccataatttcataagcataaacgagaaattgagagagaatgtctcgtatctctacactctatcttctcgcttacaactcctttcaggccattggatggacgatttccttaactaagattttgtacaatcttctcgtcactgcatccatcaaaggaacctatgcttccgccgccagcttaatctgttttctgcaatgcgctgcattcttggaagttatacacggagccattggcattgtgcccagcggggttttgcttcctcttatgcaatggggaggaaggacgcactttgtgcttgccattgttaggaaacttgatgagcttcaggaattaccttcagtttttatcacttttcttgcatggagcatgggggaggtcattagatattcacattatgctttcggttgtttgggaaattgtccttcttggatgacctatctcaggtacactgcgtttattgtgctgtatcctttgggagtgggtcctggtgaaatatgggctatgtaccaggctcttccagttataaaggagaagaatctctatgcagattccttttcaagcctcccatttagttattatgatttccttaaggtggtacttatagtttatccatttctctggttcaaactttacctgcatatgttcaagcaacgacgtacaaaactatataaacgccatgacaagaaaagggcatgaggagctttacaaaactccattcatcttggtcagtgaatggagtcattgaattgattattgaacttccgaacttgtaattttagttccacacacgaagtattttgtgaaaaaaattaataactttcggagacactcgttcaaaatttatttatttgctactattttttttttttcttgactagataagagtgccaactgccaaataatggaattgttgctttcgattatgattaagatggtagtagttagaagaaagaccgtgatttgtaatatattgtcttttatttttatttttatttggtcttaagttatagactatttttaactcatcggatctggtagttgacatcaattatttatgggttttttgcttctcctattgattgggccattgatttccggaaacaagagaggaaaaacatataaataaaaaaagaaagcttaaaaatagttgcgtcaatgcatttgggtcaagagcttacttgaggatgtgtttggaagaacttacttaaactcaattttacaagtacttgtgtttgggagagcttatgatctgttcataagctgttttttcccccacttatttcaataaactctttaggatagtttataaaaaccacttagaacttatttgaaaaatgtttgacattatatctttgtttatggaaacaacttatatataaacagttatataataagcacttaatcaataactgcttagttgagctatttacccaaacaggccccaagttcttgttcaattagggcttatcatataagcatttagcataagttatttttacaattaaagaagaaataagattaaactaattgcctataagctgttgct

SEQ ID NO: 88401 - DNA, 299 bp, Glycine max
  Clone ID: PAT_MRT3847_50834C.1
ccatcacgcaccccgaatatgagtttcggtctccctcctgccggctcgaccccggccgaagaatggggcaataagctacttcaggccgtggatggggctctcgatcaagcgggtgcaaccgcttcgaccggcgggttcgtggatgccgctcccaaagaccaagactcgacctcgcacgacgttcaacaggataatctgcccagactcacaggcggtctcgcttcgagtgccaatgtccagtctatcgccaacgaggcaaagctcgccaagcacagcgaaggcttgaccaaggaagaact

SEQ ID NO: 88402 - DNA, 526 bp, Glycine max
  Clone ID: PAT_MRT3847_50835C.1
tgggggggggagtagagggggcgcagtgtgggggatgccacaacctgagaatgccaggggtagtgagtaaaattaaagacagacctagacgcgcttgcctgtggagccctagtgtagtcaggaagtttagatagctagcaaaagcaatcagcttgtaacaatgagatatggatgcttgtctccgataaggaagggtgcgggacgcaagagtatgggactgggccgataccaacctggagaacgagaggttgaatttaaatgtggggccaggtcgggtaattagttagccgcattgcggtaggagaaacgcaaaccggtttgcctgactatcaggcacaacaagcgtgtggctggtaaggccaaggttggcacgtgcaaacgacaaggtcagcaaaggaggagaggctaacaactaaaagggcgggctttaaagccgcaagagcatttgggcaaagctagaataaagaagaagcacaagtcaagatctggagagacgcacgtgtggttatagtcgacctgggtttgt

SEQ ID NO: 88403 - DNA, 435 bp, Glycine max
  Clone ID: PAT_MRT3847_50836C.1
tctagctatctcgatcgaactgtccaaggtcctgtcactactataaactcccggatgcgtgcggtaactgattagtgtgtgtgtgtgggtggacgcttgttggcttaccgctgcatatgtgtgtgggtgtgtgtggtagttggtgcggcccggccgacgccacgcagcagggtgcggcgctatcgcggcgtaggggggatttgtcttatacagtgcaacgcggtaacgggccaggggcactggtcgcaacggaaaagcctttacaaatgggttgaggtatagtgcaagtacgcaatcacccctatttgcatacgtgtgcacaattacagtgttcacgtcacgtgtcacgtacgtggccagtacgatttgcatcgtaccgggcttcgcaaattcgtattaacattaatagccgcagccggggtcacacagtataat

SEQ ID NO: 88404 - DNA, 196 bp, Glycine max
  Clone ID: PAT_MRT3847_50837C.1
acccacccaccccttcccggctgctagaagacaaaagaagggggggcaacaccaagacccaaccacaccctatcaaaagacactctcgtgagtgcatgaattataactgatcccctaattgttcatccatagacatgaacacctgaccttgtgcaaccgttgtctattggctaattcattggactaattgcaagca

SEQ ID NO: 88405 - DNA, 558 bp, Glycine max
  Clone ID: PAT_MRT3847_50838C.1
ggccgcgccccattctttcgtttgcgaacccatgcatgacccgtggatgtccttataatctaatacaccctactaaaggaacagcccgacctaacgttgtacctcaataactatcaacggacgagcttatcaccatcatatcaaggtgctgagacctgacttagtggacacggtgactcaagagacgtaaattccaccatagcccaaaatcccggtactacaacatattgaagccagttaatataaacaggaacaatgaggagtggtctcgaaatttggggcattgctgaaaaaaacgtgcctgtaccataccaagcattcagaccttagccgacacatcctgctacgattggataacactggcaatgatgctagctgtcctaaagcctgacgacctactgtcccatatttgggggtggctgatgaagactgacaccatagacctgcatcggttgggaagcaaacacaagggtcggcccggcaatttagaagcggcacccgcacgcgcaccagctttccatataatgagtcttatataagctcggcgaaatcaaggtc

SEQ ID NO: 88406 - DNA, 201 bp, Glycine max
  Clone ID: PAT_MRT3847_50839C.1
acgcctgcggccacgccttcggacttgccaaaatgtatcgaccatggttccgggcgggcaaaaaaacatcgtgtttgtgatcaacaatggtggatacaccatcgaaggtgaaattcatgatgggcccgacaatgtgattaaaaactggaattacactgggttgattgatgcaatccacaatggtgaaaggaaatgctggac

SEQ ID NO: 88407 - DNA, 392 bp, Glycine max
  Clone ID: PAT_MRT3847_5083C.1
ggctcgagcccggacacagacattagggaatgattgtactctgagaacgacgctggcctggacgggggtttatcatcctacaaatcatatggaatgacgtgctttgaataccatgaatgaaatccaacgtttaacaccggttgcaactcagggacgggtgcacactccacactcaccttgaagggaacccaggaaacctgcgcagcctatgatggttgtaaatgactggtagaggttgatccaggaactggaacctgtgcccacacgtgtgtctcagaggatgcaactattagagccgttccttttgatgcgcccactgtcactggagatgccctatgttatccatcattggcgcatgtagctggcgataccgttgcgagtgctacagaagc

SEQ ID NO: 88408 - DNA, 374 bp, Glycine max
  Clone ID: PAT_MRT3847_50840C.1
ggccccgtttgagcagacttaaaaccaccccaaagagggttactgtctgtccaacctaccatatctctatttgttttttagagactgcttggcagaacttaaaatggaccaagaaactcttctattcacatatgtatcactgaacgatgggcaccctgtcaagctctgagaccagatctacgatgctgcgctcgatgcatgcttggatcaagaccctgacagccaggttggctgtgaaacctgcaccaagaccaacatggtgatagatctcggagagatcacaaccaatgccaacgtggactatgagaagattgtgcgtgacacatacaggaacattggttttgactctgatgatgctcgtcttgatgcttaca

SEQ ID NO: 88409 - DNA, 183 bp, Glycine max
  unsure (1)..(183): unsure at all n locations
  Clone ID: PAT_MRT3847_50841C.1
ccgacaagaggagtggacaaaaattggcgggctaaacttccaggttaacatggaatanccaatacaaaaaagattttgaaaaaacttaagaatattcaaactcggtatcaatgttgcactttaaacacatggggtttacttattgaccacagcttcattatttttccatatgcattatttttt

SEQ ID NO: 88410 - DNA, 218 bp, Glycine max
  unsure (1)..(218): unsure at all n locations
  Clone ID: PAT_MRT3847_50842C.1
gacactgcaatctagaaaaaaaaaaanggttcgaactnctgatgcacnnaaagccttcangtccgatcatgacatgtaccctttagntcacaaggacgaagacggttttctttgangaaattgtggccaaanccatggggggttttgggggatgctgcncttgatggatatgagaggcttactaaggngactgatanatcggggggtcaagcaaaaag

SEQ ID NO: 88411 - DNA, 235 bp, Glycine max
  Clone ID: PAT_MRT3847_50843C.1
aaaatatgcatcagaaatcgattcaatattttttacttgagatgtatacaattataaaatattcatcagaaatcgattcaatattcaatttgcaagttaataaaatagaaatgtgaaggggggctccgccgaatgttggtctggtttaccgggcttttatttccgacctggtgctgtaggggttcccgtgttcccctaaggtggtcgtaggaagtgtttggtgtgtaatgtggta

SEQ ID NO: 88412 - DNA, 494 bp, Glycine max
  Clone ID: PAT_MRT3847_50844C.1
ggctcgagaaagaaaataaaattgttcattgcttggcttttccaattaggaaagctagggcctatttgggtaaccctctttagaagcacttttaagataaataaataagaagaaaaataagacggacttcttcataaactaaaatgagttcttcattagctaatttgtagaaactctctcatatagcttctctaaaagatgagaggacatctacaaattagctaatgaatggctattttagtttatggagaaactaattttttttttttttatttctttatcctagaagtgcttttagagaaacttacccaaacaggtccgtagtctgagccattgatgaggtgaattaagggagtctttttcattgggcaagaccaacttccctaaaaaggaacaggttaaatttgcagacgctggttagctccatttgagttcattcagaatgtacatgctataatggcggttccattcaagaacttcccgcactgatgtaa

SEQ ID NO: 88413 - DNA, 392 bp, Glycine max
  Clone ID: PAT_MRT3847_50845C.1
cagagggataaaataatggttcttatgttgatttggagtggggtggtttaatttgttggggctcccctagtagttggaatagtccagagtgttagagttcttgtattatatttgttttagccctatcgataagtattctagttaaattactctttaagtgaataaaaaaaaaaaaaaaaaaaaaaaaaaaaaaaaaaaaaaaaaaaaaataaaaaaaaaaaaaaaaaaaaaaaaaaaaaaaaaaaaaaaggggcgcccacttaaaaagagcaaaaattaaaaatcccatttaaaggggggccccttttaaaagttccaatttttataacgcgggtttggggacgataattttttattttgggggcccaaaaaaaatttggcgggcccgtttt

SEQ ID NO: 88414 - DNA, 467 bp, Glycine max
  Clone ID: PAT_MRT3847_50846C.1
cacattaggacacctgctaagaatttgtcttcaccccacgggttgatcagatctgatgctcaaactgtgaagtataccatgcaaggaaagtataatttgctatatgaggaaaaaagggaccaagatttcatgcgcccatcaccatgtcgtgaaaatatcagcaagcacaccgccagtgaggcttgactgccatgaacaggaatagtcaaacaatggtaagatctgtagccagtgccacataggagggccaaacagttgggtggatgaccaggagaccaggcgccaatgaagctcttgtttggaaaggcccaacatctacaggcatggcatgatttacaaactctaaaagaggtgctgaccactttagcagcgatatcacagtattgggacatggacaatttaagaccactgggaggttcaaaaagaccaacacatattctggtttcttaacgagaaaacgatgagtt

SEQ ID NO: 88415 - DNA, 1171 bp, Glycine max
  Clone ID: PAT_MRT3847_50847C.1
ggaccctcaggcctgccggggggactcggataggttctgcacaggcaaaaaccctagccttcgaaaaccctaatcctgaggcactgtgatatggcaagagccgtttcctcttcctgcgcgcgcctcacaatgcgcctcttctccaccaccaccaccaccaccaccaccaccgctgcgttcgccgttacattacccaaaccctcgtcactctcagtctcaacgcgtcgattcctcttccctctctcccatgccatcgtccctccctccacccgcgtcgccggaatccggtgccgtgtcaaccgcgccggcgactcagcgtactcgccgctgaactcagcttcgtcatcgtcgtcgtcgttcagcgaccggcctcccacggagatggcgccgctctttcccggctgcgactacaaccactggctcatcgtcatggaccatcccggcggcgagggagccaccaagcaacagatgatcgattgctacatccaaaccctcgccaaggttctcggaagcgaggaggaagctaagaagaagatttacaatgtttcatgtgagaggtactttggtttcgggtgcgaaattgatgaagagacttctaataagctcgaagggttgcctggagttctgtttgtgctaccggattcgtatgttgatccagagaacaaggactatggcgctgaattatttgtgaatggagagatcgttcagagatcacctgaaagacagagaagggtggaaccacagccacaaaggcatcaagacagaccaagatacaatgatagaacaaggtatgtccggcgtcgagaaaacacgcagtgaagaaccaatttgtgacagggagagggatgtgttgtacatactctatgaaagtactttgttacatgcactattttagtcttgccttttgagacatttgatatatttctggtggggggtaactcaaataattgtagttgaacttctatggctgtatcagatggacatctcgttgttatcatgttcagtataaacataatcttttactcttttcacgtcattttctccccaacttatagttgccatgggtgatttggttctgatgtgtttcaaaaatgatttctctcaagtggacaaggagaggagaaatctaaaattgtatttagtgaacatgatgttggattgtctgcccttg

SEQ ID NO: 88416 - DNA, 492 bp, Glycine max
  Clone ID: PAT_MRT3847_50848C.1
gttcagtttccctcctttccccaatacacgacaacgcacaccttaattccccttcacatccaccttgtcccaatctccaactccttcaacctcctctcctctgttttcttttctatctccaacaacaacagtgaccaaaacgacgccgtttccgaggcttccaaaaaccgcaattccgaactccacacacacatattctccagttccattcctttttcttcttccttttctagctctttattccgcgtgcgcgaaactattattataacgctgattgcgacgcgaattaatctttatccgttgcgctgaagcaattaatgtggcgtccacttcacatacgtggatttccaatcccgcttcattccgaaatccacactacatcaaagttgaaactctattaatctgattccattgttggctggttattcattcctccaagttcagacaaatagcaaaaaacaacacagtagttagcgcgcgcttatttctaga

SEQ ID NO: 88417 - DNA, 445 bp, Glycine max
  Clone ID: PAT_MRT3847_50849C.1
taagaaaagaataacaaagaaaaagaaaaaaaaaaaatggaagaaaagctaaaatagagaaaaaaaaaaaaaaccaaaacaaaaaaaaaaaaaaaaaaaataattaattaaaaaaaaaaaaaaaaaaaaatagaaaaaaaaaaaaacagaaaacaaaaaaaaaaaaaaaaggaaaaaaattaaaaaaaaaccgaaaaaaaaaaaaaatttatttaacctaaaaaaaaaaaaaaaaacctcgggggggggcccgggccccaattccccttatagggagtggaataacgcgcgctaattggccgtcgtttaacaacgtggggacgggaaaaaccttggggtaaccaaattaaatcgcttggcagaaaatccccttttcgccagttggggaaatagcgaaaaggcccgaacggatcgcctttccaaacagttgcgaagcctgaatggg

SEQ ID NO: 88418 - DNA, 214 bp, Glycine max
  unsure (1)..(214): unsure at all n locations
  Clone ID: PAT_MRT3847_5084C.1
aaataacaacaacacncacagctctgtcactgacggctgggaaggcgtggggtccacccacaccacgacccactgcctccactcgatactttgatctcaacatccccgctattccgganntccgaccagtgttgtagatgacgatgttgaaagccctcaccctgccataaacaagcgttgttggttctctattcccaagatccaaatccctcaa

SEQ ID NO: 88419 - DNA, 483 bp, Glycine max
  Clone ID: PAT_MRT3847_50850C.1
aattcggctcgagtacggctgcgagaagacgacagaagggggaaaataggagttcccttgcagcccaaaacaccctgcatgaacttcatgttgttttggaccgaagggagccccttcttcttcactttcaccatcttcagtctgcaactgcgattttcatattttcaaatatggaatcataatactttataatttccccatctcctttttcatgtagcaaattccatcacaaagggatgttttaacgaccataatattcacttcagaacattttcgaagagacttgtttttctttacttgctcatggacagaattaacggggattgaaggcaggcatgtcattgcaacttgtttactacattggtatcatttgttgaatctgctgctggtgattttgaatattgcaattgaagcgtgagcatgaccatactttgtcctctgttaaaggcaccacagggatgttgtcacagttgcagatttcaa

SEQ ID NO: 88420 - DNA, 522 bp, Glycine max
  Clone ID: PAT_MRT3847_50851C.1
aattcggctcgagcttcttcgttcgtcgtgattgtgttagggttcgcaaaattgcagcttcccttcacagttttcgtcccgaaaaatccatagtatcgcgtgacacgcattgaagcacttgaaagatgcagaaattgggagagtttaaattaccacctttcttcaattacccaccttacttcactttgcagccagtcagagacacaagagagaagcagatacagctatggaaagatcttattttagatttttgtaaaacacagaagatatttataattgggcttgaagaagaatttccactatttacaaatcatggaattgaaaggtctcttactcatgaagccagagaagctttcctttcagcattagtgtctgaagggcgtgcagaatggatggataaaggacataggaaatgtcttattctctggcatcggaataaagattgggctgatttttttattacagttgcaaagattatgggcttgaagatggtgtttgcacaatagaaaaatacgatcaggc

SEQ ID NO: 88421 - DNA, 375 bp, Glycine max
  Clone ID: PAT_MRT3847_50852C.1
catccaaaaaaattctggtctattgaagttaaaaaatcgcaaaggtacatctatggctacatgctctcactttcaaatattatcctctcacggatatggaatgcataaatgttctcagtttaacaatactaaaacacagattttcacaggcaaatctccccatattccatttacccaaaatccaaactatcgctaattcactagttagatcaatgctgactagaacgttgtattccataagcttccatgatccccgagggaaaaacaggatctgtagcagctttaacagcaacttttgccaccgcagtaccattgacaggaggtgtcaattgaggcccaccatgtgggatctgatacaacggtttaaccacttgg

SEQ ID NO: 88422 - DNA, 967 bp, Glycine max
  Clone ID: PAT_MRT3847_50853C.1
gttcgtcttctttcttctacggttcgcaaaattgcagcttcccttcacagttttcgtcccgaaaaatctatagtatcgcgtgacacggtacgctattttatcacttgtctgagagtaattaggagaaaactatttaagcttctgagaaggctgttaatttctgtgcatagcattgaagcacttgaaagatgcagaaattgggagagtttaaattaccacctttcttcaattacccaccttacttcactttgcagccagtcagagacacaagagagaagcagatacagctatggaaagatcttattttagatttttgtaaaacacagaagatatttataattgggcttgaagaagaatttccactatttacaaatcatggaattgaaaggtctcttactcatgaagccagagaagctttcctttcagcattagtgtctgaagggcgtgcagaatggatggataaaggacataggaaatgtcttattctctggcatcggattcaagattgggctgatattttaatacagtttgcaaaagataatgggctggaagatggtgttgtcacaatagaagaaatacgatcaggcactgaatctcaaggaacagatcttcatggaatagatcgaactattttgaatcgagcactgaaactattagaacagaagggaaagcttgtggtctttaaaggaacttcaactgatgatgaaggagttaaattttctttataattgttttgtgaattaatctattgaatctttggggattttacatgtcatcaacaggggaatcttttgctatctatttaattagtttgttgatgtgcaaggtgtgtaagaacaagctgtagtaaattgctatcaattttcatttcgggagctttgctgtgcaagtgcttagctttgtggctattgtagttaaattagtgaaactacgctccctgtgaaatcatgaaattcgtaaataggag

SEQ ID NO: 88423 - DNA, 479 bp, Glycine max
  unsure (1)..(479): unsure at all n locations
  Clone ID: PAT_MRT3847_50854C.1
gctttttatttcaaatccaacattactttaactgtcttccacataaatccaccatggccgactcttcttcttcttcttccaaacgccaaaagcaacatgatgatgatgatgatgatgttgaagaacaacaacctctgatcccaggtctccccgaccacatagcagaattgtgtctctcctccatcaaccattctctcttattctcaatctcccactcctgccgccgtctcatatactccccttccttccctccctttttctctctctacgccattctctcccactcctccgccaccatccacttccacaccttcgaccccatctccgcactgggtctcccttcccttncgcaccctcccctccaccacctcctcctncgccgncacccctccttcctctcccgcagcctctccgttcagtgcgtctccttctccaaccgactcgtactcctagccgtcaccacccacaacctctccccg

SEQ ID NO: 88424 - DNA, 372 bp, Glycine max
  unsure (1)..(372): unsure at all n locations
  Clone ID: PAT_MRT3847_50855C.1
aaaaacaaanttaaatttttagtaggtgggggggcgggccaattaaaaaaacattaccctttctaatatttccaatccctttctttttaaaaggattccatatattttaaaaagcagcccccaaagcccccttggggggaatgaagaaaggaaaaatattgtatacctagataatacccacctatttccccaaaatatatataactttacgtgcatggagcaatatgggagggcccaaaacccccatgtttttgcttgcccaacacaaagggtttttgtttttgaaaacctcctgtgactatttcgatttgatttggttttgcaagttttggtggtcaaaaaaaacccaccccccttgcttttgaccctttg

SEQ ID NO: 88425 - DNA, 209 bp, Glycine max
  unsure (1)..(209): unsure at all n locations
  Clone ID: PAT_MRT3847_50856C.1
cccaaacacnacaacaggtgagagtaccgtcagaatgttacattcacaaatttggctagtcttaatcgttgtataagcaaaatccttaatcctgccatgcaacataatatctatcgacacataaacatccatcaaaaccatcatggtgacccatatcttatcaagattctctatatctcaagatatcactactctataactcctacctc

SEQ ID NO: 88426 - DNA, 339 bp, Glycine max
  Clone ID: PAT_MRT3847_50857C.1
aaaaaaacagcgggctccccattaaatcaaaaaaaaggcgactgcttaaatataaaatataaagggggttgcagaagccttatttacaaaaataccggggttaattttttgtaattaaaccaaaacaggggttttaaataaaaagaatttccctttttaatccaaaaaccataacgttcacgctggaccggaaaatttatgaatcccacgagcttgctttaaagggggaaacaatcccaataatttttgttaaaaaaatgcgaccgtccacataaagctttggttacgggcttttcccgcacttttgcgcttggttttggagttgctaaaagagggggg

SEQ ID NO: 88427 - DNA, 387 bp, Glycine max
  Clone ID: PAT_MRT3847_50858C.1
tcagagacatccgacttcggctctcgacaaggtcgacagcctgattgtgtgcggcgggatggccttcaccttcaaaaagacgatcgagggcgtgtcgattggcaactcgctgttcgacgagccgggctcgcagaaggtgcagggcatcatgggcaaggcaaagaagaacggcgtcaagctcgtctttcccgtcgactacgtcaccgccgacaagtttgacaaggacgccaccgtcggagccgccacggacgcagagggcatcaaggacggcctcatgggcctcgacgccgggccagagtcgtgcaagctctttgcagagaccatcaaggcgagccagaccattcttctggaacggtcccgcgggcgtgatcgagtttgagaactttg

SEQ ID NO: 88428 - DNA, 108 bp, Glycine max
  Clone ID: PAT_MRT3847_50859C.1
gtgttaaggaataaaattgcaacatgtatatttatacaaacaaaagtgaacatagagatgtaaaattgacagctgaggtattgtacatgcattatagggattaattct

SEQ ID NO: 88429 - DNA, 2038 bp, Glycine max
  Clone ID: PAT_MRT3847_5085C.1
atgggttctccacctgcctccactcctcctccttctcctcctcctacttcggacgcatcggcttcgacgtctgccgtgaagcgaacacgcaaagcctcacgcctacgatcgttgtccactagaccacctggtgatgagagaccaatggtgcatgttgatcctgctacagggaaggccgacggtccccacatgaagaaattaagaacatatttggggattgtggcacgtgataaggtggacatcacctacgagaactggaaggaggtcccgtctgcgccccagcacctgatttgggaggatattcaggcggaatttgatatcccagaggcttctgacagtaggacgaaaaggaagttacttcagaccgtcggcgagagatggaggcagtttaaatcagacctcacgaggaaatggagcccttgcagccgaccaggacggtgtcgaggacactgtctatgacaaatacggcatcagcaaggaaaagtgggcccaattttgccagactcgcagagacccttcttgggaggatgtgcgcatgaaggcacaggccatccagaagcacaatactgccccccacgttttgtctcgtgggggttatgattatttggagcagaagctcctggctgagaagaccaagaagaagatcgcttcctccctgcctgctgacgaattacagcagctgacccagcagatcagggaccagctagaggagttcatcacagagaaagtgacgaggcagggagttgcagtgcctcttgagcctgtggttggtcctggtccctccggtcctcgagtgagcacaaaggggagttatgttgatccctcaggaaacgatcctgagaccggtgactctgacaggtgcggcttgtacatagaagcagatcctgcacgcctggttgccatcgggagagtttatgagggatccactgttgttcataacactcctttgttgcctggccaagtaaaggtgagtgtggaggaggttagagatgcagatgctccagttcctgtacccactgatgaggtttccttagtggggcaggcacttcacaccttccttgcttggccgacacatctggtcaagtctttatcacaacaggtagctgtgtctccggcaaaaccacctccgaagctcgatccggaggtcgatgatccgctttatctgatgacattgaccatcccagagcttttcttgaggcctttatcaggttagatgggatgccaccgtgttcggggtcgttaaccttgatttccccctttacataaagcacgaagacctctccgaaatcgcacacggtggtcaatgtctcagcatatcagtgttacagttgtggattttgcatttcactgaaacatgtatgcgagtggggaattctgatatctatggattcctcgagccacagtccattcagaggtctgggcaatcgcagtttgagtctgaaagttacataaagagttggatgcagagttcacaacgcgatgtatatcttggagcctacctaaatggcggacactggcagatggtggtcatcctgcccaaggaacacttagttgtctggttttgttcattgcataacaggccagacaactaccttaaggggattattaatagtgctatcaagggtcttgatgatgctccacagcctaaatcaaaggctcctgctaggtggattgtcgtcaagtgtaatagacaaaaaggaactactgagtgcggctattatgtgatgcactggatgtccaccatcattttaagaacttttagaaataattgggaagcgtattttaacgatcctagaccattggagcttgagagattaaaagcattgcggatctagtgggcacagttttatctccgagttggagatcaggcctaggatttagggacattttttaacatttttgacattttttacattttctatttaacatgaacattgaattcatttgttgattgttctttataatatataaatcaattatttcatgtttattatcattaaaactgcttgaaagcagaataaaatgtttatttgctatg

SEQ ID NO: 88430 - DNA, 466 bp, Glycine max
  Clone ID: PAT_MRT3847_50860C.1
ggctcgagctatgacatatatcagaaacattaaagattatattatattggtaagaaaaaaaaatatcaaggtagactacttgcttgatgccctgttggctttgacatcaacatgggtctctgcctatgaccctagacctctgcatgatgttcgcgtggcatgcaaacataaatagggtgtatttgtgaacagtaaaccctgctctgaccccaagcgtggtaaagcagaagatgtcttcagacatgtagcacctgtgaaaactgacgacaccactatggtcagacgtgactgcggtgttcgatgaataactaccgggactaaacacgctcagaataagtgtggctacacatagatgctgctccaaaggggacgtacgctatgcacactcacccatggagaactgtgatgcttatgaggcttgacggcactctccatggtggagttctgacttccaatctacatggca

SEQ ID NO: 88431 - DNA, 437 bp, Glycine max
  Clone ID: PAT_MRT3847_50861C.1
gaaaacaatacttgagacgaccttattctgattgtttcatgctacctgatgaccatgatgcaagctagggccatgacacgatggttgcttgttggaaaaaaccgccctctgctgggaacaggagcccagggcttatcataaattcgtaataactacggcatatttacacgacattcattcacgatcctgcttgcttcaagccatgcatattacatcactatcaaagaatggaccaaatgttccaccacagatgccaccagggacttgttatcggcacttctagcggagcaattgtaacgatttttgccttgcatgccggtgagctcattatgctggcccatcatgcgcatacttgagacccgattctccaaaaccaggttctggttgacggtaaaggtggtgacaatgcccttattatgcggatcagtgtccaagtc

SEQ ID NO: 88432 - DNA, 509 bp, Glycine max
  Clone ID: PAT_MRT3847_50862C.1
gttctgcctcgagtaaagattgttcttaaaacatgttatgttgtgtttcagattgattgtcagtgatggagcttgggtcatattctgatcagagtaaatcaaccttttctctggtggatgaggatcacacatttgcaaactctgtccggttcactctaaatcaagatccaagagtgacattttgtgggtacagcattcctcatccttcagataatcgagttaatatcagagtgcagacaacaggggatccagcaagagaagtgttgaaagatggatgccaggatctgatgctaatgtgccagcatgttaggagcacttttgataatgctatgactgattttaaaaggacccaaactaatactgaacaggaaatggataccaaataaagtctgctctagacttctatttatagtgttgatattgatttgggtgtgtattgttggttttaatagtatactgtgtaagcattggcaaatgttggaggttaaggaaataaaatttatatcagc

SEQ ID NO: 88433 - DNA, 1285 bp, Glycine max
  Clone ID: PAT_MRT3847_50863C.1
ccgctcgagggccaggtagcgagaaaaagcgataaaagtgcggtctctcaccgcacgcactagcactgtctctcactgaaacttgttcgcacattttcacggatctaactaagttatcgccatgaatcgccaccacgatcccaatcccttcgaagaagaagaagtcaatcctttttcgaatggcactactgctcctgcatcaaagtcacgtattccaccattagcatctgagtcactgggctttggtcaaaggcatgatgctacagttgatattcctttggatactacaaatgactccaagaaaaaaggtcaagagctagcagcttgggaagcagatttaaaacggagagagaaggaaataaaaagaagagaagaggctgtttctagagctggtgttcctgttgatgataagaattggcctccatttttcccaatcattcaccatgatattgccaatgagataccagttcatgctcagaggcttcaatatttggcctttgcaagttggttaggaattgttctttgcctaggttttaatgtagttgctgtgactgtctgttggattagaggcggcggtgttaaaatttttttccttgcggttatatatgctctacttggtgttccctttcatatgttctttggtacagacccctctatcgtgctatgaggtacgacagtgcactgaagtttggttggtttttcatgctctacttgcttcatattggattttgcatctttgctgcaattgcgcctccaattgtttttcatggaaaatcattaacgggcatccttgctgcaattgatgtcttctcagaccatgtattggttgggatattctatttgattggatttggcatgttttgcttggaggctcttctaagcttatgggtgcttcagaaaatatacatgtacttccgggggcataagtgagactgttctcttctggattttgatccgacggcttttataatgtcaatcacttcacaatgtggcttagcatattctttttgtctatcctcattttctcatacaatatcttggtgtgatattggtcttgttctttgtagttaccagggtttagtttgtatcagggtttagtttgtttgtaccatactgtgtaatgaattctgtgaagttcagtatctcttctagagtgtttcgctccagtgaaaagaaaatatgctttcgataagcagacatgtagtggatttccattgaagtattattgtatggtattgcagttgtgatgcgccataaaaaaaaaaaaaaaaaaaaaaaccccaaa

SEQ ID NO: 88434 - DNA, 694 bp, Glycine max
  Clone ID: PAT_MRT3847_50864C.1
gccatcgattcaaaactcgttagaccataaattcattaacatatgatcatacacaaattgtcattgatttagagcctgtttaaaccatacgttgatgaatacaaataagactgaggaagcataaataacaaaaaataaatactatagtgtaaaacttttacacaatcttatcacaaattatcatatatgaatatgaataatatgataagttgaatgatttttacaaactagtcacaccaattggataaaccttgtagacttgtaaacctttaactcaagtcacgggagcgaactggtaatataaaatatgtctaatcatttcatatgtacacagaatacagcagcaactccattaacatggacatattgccttaagattaaactgattgtgtaatattcgttcgagattttggcagtggttggcctaatcgtttcaaacttggaagcaaggatggcacgcccaaaaacaagaacaagcgcttccatagtctgatgtaaatgagaaatttccattcagtcgggctggctaaatttcctttccagtagcagtagcacttaatcaagaatactatgttccgttgcgacaatttcatttcaatcatctacttgtatcaagaaaccgactcttttacaaaacttgactaaaacgatatcataacaatgggacatgattaatttggacccagcatatttt

SEQ ID NO: 88435 - DNA, 473 bp, Glycine max
  Clone ID: PAT_MRT3847_50865C.1
acccgggaaattcctggacgggaacccgcaggcggacaaagggaccctaaaaagagtcggaaaaaaggagggggaaaacaggggcacagggggatccggggggaaattgcaagccggaaaaaattccacccaaaaaacaaaccgaaaaaaaaaaggggaaacccgggggggccaaaggggggagcaaaaaaaaataaatgacggggcgctaacgggccggtaaccaggggggaaacctggggggaaaaatgcataaaaaaatcggcaaaaaccaggggaaaaacgcgcagcaaaaggggccccagggtgggccccctttgcaccagtgaaacgggcaacaggaaagggccctccacgggcgggccctaaaaaaggggccacaagaggtccacccaggggggcccaaccgggggaaaacccggggggaagggggctaacggggggggaaaaaaggggggggtttaggggccggg

SEQ ID NO: 88436 - DNA, 1363 bp, Glycine max
  Clone ID: PAT_MRT3847_50866C.1
gtgcggtctctcaccgcacgcacccacgcgtccgtacggctgcgagaagacgacagaaggggacgaacaagccaggtagccagaaaaaagggagagaagtgcggtctctcaccgcacgcactagcactgtctcactctctcacgcacgcatcatctcaaacttgttcgcactttttcacggatctgatctaactaagttctcgccatgaatcgccaccacgatcccaatcctttcgaggaagaagaagtcaatcctttttcgaatggtggtgctgctcctgcatccaaatcacgtattccaccattagcatctcagccactgggctttggtcaaaggcatgatgctacagttgatattcctttggatactacaaatgactccaagaaaagaggtcaagagctagctgcttgggaagcggatttaaaacggaaagagaaggaaataaaaagaagagaagaggctgtttctagagctggtgttcctgttgatgataagaattggcctccatttttcccaatcattcaccatgatattgccaatgagataccagttcatgctcagaggcttcaatatttggcctttgcaagttggttaggaattgttctttgcctaggttttaatgtagttgctgtgactgtctgttggatcagaaggcggcggtgttaaaatttttttccttgcggttatatatggtctacttggtgttcccctttcatatgttctttggtacagacccctctatcgtgctatgaggacggacagtgcactgaagtttggttggtttttcatgctctacttgcttcatattggattttgtatctttgctgcaattgcacctcccattgtttttcatggaaaatcattaacgggcatccttgctgcaattgatgtcttctcagaccatgtattggttgggatattctatttgattggatttggcatgttttgcttggaggctcttctaagcttttgggtgcttcagaaaatatacatgtatttccgggggcataagtgagactttctcctcaggattttgctccgggcttctataatgtctgtcacttcacaatgtggctcagcatattctttttgtctatcctcatttttctcttacaatatctgggtgtgatattggtcgtgttctttgtagttaccagtgtttagtttgtactatacagtataatgaattctgtgaagttcagtatctctacttgtgtgtttccctccagtgaaaagaatatttgctttcgattagcagatatatagtgaatttccaatgaactattattttattggtattgcagttgtgatggccaaaaaaaaataaaaagaaaaaaaaaaaaataaagagctgggcattac

SEQ ID NO: 88437 - DNA, 199 bp, Glycine max
  Clone ID: PAT_MRT3847_50867C.1
gattccaaaagaatacttaactttgccatgttacatttttgttggagcttcaataaatttgagctggttgatcttgggcgaggtgttacattgatttagaaattttaggttcttccaacacttgacccccgaaacttttagtggaagaacctatagttaaataattacccccgttttttgtttaaaaaaaaaaaaaaaa

SEQ ID NO: 88438 - DNA, 273 bp, Glycine max
  unsure (1)..(273): unsure at all n locations
  Clone ID: PAT_MRT3847_50868C.1
caaagttgggctacggtcaatttagaattatcactatcgtctcggacgatttgtcctccaaatctacttacttgaaaggggtaccttgaatgcgaaagatggaacagcgtgtttaggcatgcatggttccaagattgattattggactccatgtccatcaactgaactagaagtgactncaaaagggtttgtcaaaacctttttttgcagctgaccacacctcagccctgatgaaaaagctgttaccctaatggtttgcaagcccttaaccct

SEQ ID NO: 88439 - DNA, 287 bp, Glycine max
  unsure (1)..(287): unsure at all n locations
  Clone ID: PAT_MRT3847_50869C.1
agcggcggagaaggcacccggcggagaagaagcccgaaggctggagaagaagatctcgaaggaaaggagggagccgagaagaagaagaaagcgcaccgaagaagagccgtggagacctacaacgatctacatncttcaagggtcctcaagcanggttcaaccccgacatttggtatttccagcaagggccatgggcatcatgnaactagcttcatcnaacgaccatcttcgagaaaagctcgcccaggaaaagcgtcgcgtttgggcttcgctaccaacaaggaagc

SEQ ID NO: 88440 - DNA, 470 bp, Glycine max
  Clone ID: PAT_MRT3847_5086C.1
cggtcgttggggccgacgcgtgggagcttatcttgccaatcatgctaatgggttacgagaattgtgttcgcacagtccataggaagctcgccaattgagaaggaaagctctctctctaattgaatggctgcaaaaagctgatgtgcctaccatagcacagattgaagagttccattcgatgcagaggatgatgaatgctcctgattcaaatgatcatattgatctactgctgagcattgattggtggggtttacaaggagcaatgtaagcttttccaaacaagattgtttttgatgataggcttgcgcaggctaacacacaagaattctttgatggaaattcatcagtggatgcttggttaccaatctgtgcgaattgactctatcctgtaagtcaatacaccttataagctgtcgttgtaaatgttacatgtggtagaggacatgttggtttacccaccactgcttgga

SEQ ID NO: 88441 - DNA, 288 bp, Glycine max
  unsure (1)..(288): unsure at all n locations
  Clone ID: PAT_MRT3847_50870C.1
cntgagagttaataanaaaatnnatgatgcatctntgtttcnnatcagtccatgcatcagacatnatngtacanccatacttggacccattgcnccctgtggcctttcatcanattnncagtatattcaacttccttcttcaggantggnactctgatgtcatgatagctagnantgggcnaatgnggcccatattgaccaatggctgcaaccatattctcaaagcttntcaatttaatgagtttgaatgacaaacctgcttgagtaccaagagcgagcantatgttg

SEQ ID NO: 88442 - DNA, 228 bp, Glycine max
  unsure (1)..(228): unsure at all n locations
  Clone ID: PAT_MRT3847_50871C.1
acnttactagtccaacagcgacggctnaacctctttgttctctcngtctangnaagaggaagagnangaaggaagacggagaagaatcaaatcatccttgagcaagacatgtacaggaacgctgctttcangtcttagggtcatcagtgcccgntcgtgcagcanagcacgatacctgcnagtgncaagattgcaagttccgttgccacacaacaancctcttctggt

SEQ ID NO: 88443 - DNA, 378 bp, Glycine max
  Clone ID: PAT_MRT3847_50872C.1
gcgagttgacgacagaaggggattcatgttcatctcatcaatcttttcaattgtgtgtgcgcagcgtgaaactcgagactaccttggtcttatactcacagcaggaaactatttgcagtgaccaactactttgtaggtcattatgtattcaaaaggtgtggagaatatgagggggacgagccgtgcttggggtgggaccgtggcggctggtgttggagtggtgggggccatgaaggatgagggggtggtgcggggggaacgggggggtgaggtcggggcgggggcggtgctgggggtggggggaggggtggtgggctggggggcggcagaggtgtggttggggggggtgggggggtggggtggggggggggggggggg

SEQ ID NO: 88444 - DNA, 666 bp, Glycine max
  Clone ID: PAT_MRT3847_50873C.1
cttgcctttgagcttaataggtactttgtgatcacaaatgacccccaattgcctttttgcattttagccgttttgcttgtatctcgtgtgaaacatcctcattcattttcccataatttttcatttattgatcccaaatatttaaatttaaatttaaatttagagacttgtggtataacgaattcggctcgagccttttgttttcttgtgaaatttgtcaatttgcaaaacatcatcgttcctcttattcccctaaggattataaacaattgtgtccattcaccttaatcaatagtgacgtttggggaccttgttgggaccctacaccaaatggaaaaacatggtttataaccttcatagatgatcatactcagataacatgggtttacttgatgaaaacaaaatctgaggttgaaagcatattcaaaacttttttttcaattgatacaaacacaatttcaagtgaaaataaaagttttccgtagtgacaatggaagggaatattttaacaagcacttaaacaagttctttcttgaaaatgacataattcatcaaagctcttgtgttgacactccataacaaaatggagtggctgaacggaaaaatagacaccttcttgaagtagctagggcattattgtttcaaaataaggcacccaaatatctt

SEQ ID NO: 88445 - DNA, 445 bp, Glycine max
  Clone ID: PAT_MRT3847_50874C.1
actccaatgaacctgaccatttcatattttattattatacctcacaatcagcatttctttggtcaagaatggttattaccattaaattattggcattggaaccatccggaaaaccagggaaagggattgaagaaaaccatggacttcccttggccggtaggtgcccccacccaccagggccccacccttattcccattcaaagggtaaaagaaaaaaaaacccaattcctcctaaaaaaaccttaccggtccttttccttccaagggaaaaaaccttccaggtttggctcatggttcccacaaaagggtggggtctgcattcttggaagtacccacttttgggtccttgtggaaagctggccttctgtcctaaaaatatcccttccttgctttttttgggtctctcccaaccttaacagaagctccacggtttgcaactccccat

SEQ ID NO: 88446 - DNA, 337 bp, Glycine max
  Clone ID: PAT_MRT3847_50875C.1
gaagcgtccactcacaccttcagccatcggcatgaagactaacaataaagccatcgccatggaacatgacgaaaacgtggaggggcttgagcgttttcacgacaaccttctgtaccaggtgtttaatcacctggacgcacagacgctggcgatggcgggatgcgtgaacaaacaactgcaccaaactgctcatgactagaggctctgagaactgatctgcacacatcagtgggcaaacacatggtgcgcagatcaacatctgcaatccttagtcctcgcactcagaggctatcttcgcctacacgcactgtatctcttacctctctccaaacctaaa

SEQ ID NO: 88447 - DNA, 329 bp, Glycine max
  Clone ID: PAT_MRT3847_50876C.1
aacaactaaatgtgccacaactagagggagctacttctcaacaattcacaaatttgacgacttaattgttatcccctttcaactctctacactcttcccatttctagccaatacccatctcatccttcttgtgacaaccaaaagatcatcaaatccaacttttcttttcataacttaggagatttcatccttttaaacatggatgaaattgaaatccctgctcatttcctctgccccatttccctccaactcatgagcggaccttttcacgcctccttcattaattattttatttattcatataacttttaaaatattttttttttttt

SEQ ID NO: 88448 - DNA, 327 bp, Glycine max
  Clone ID: PAT_MRT3847_50877C.1
attcttttttttaaaggttaaacatgcaccgtgatgtatagggttgtgagtcggctaaaaaacgtgcaagaggtgcacggatgctacggttgcaagatgaataaggcgcacatccctatagtggatcgacctacaagtgaaaattcgggagagtggctagaggttacgtacatactgcgcgtaccgaggcagaactatggataccgatccccggtcatagtcacattgaaattttaccgactgtggatgttcttattgatgacaacaactagcggcttaagctcacttactataaaagtaaagggttagtggcaagatcatagcctg

SEQ ID NO: 88449 - DNA, 749 bp, Glycine max
  Clone ID: PAT_MRT3847_50878C.1
actttacacaataacttgacgagaattcctcaaagactcctcaaccctccgcctgcgcgaactgaatctccaagccgactatcacgtgcgtgtcggtgccttccacatccttgcgctcaccctcaaatatgtgacatgctcctcaatcccccgaactccaccgacactcaactaggatacagaccacatcgcatgggatcagaatctgcgcgagaatcactacgaacaaatgcgtgggctgtaacgtgcgaacgtgcgtcagtgtcaccgtgatcaacgcactagggacttttctgtccgaatatcgcccctactcttgctgaactctctcgagatgcggggcgtcttcatgatctccccgatatcggaatgcggacacgcccggatgctgatacggagccgacctactaccacgactacttgcgggaggtgcggcatccccggcaggctctttgtagtaagaacgacatgtatagcgacgatttctatatcgccataaccacgctacgtaaagattcggtgaaaaaaggaataagagcacgcgccagagacgttagtcaacaaccatgctaatgatacaggagacactagtattagcagccataaaatcaacgtcagaaagttcactgcgtcttcttcggacaaattcaactacgccaatcctctacagatggtcacccagagcgagaggtaactctgctgcaacgccgagagattcattatctgcgctaccatgtgtaaggtttgtg

SEQ ID NO: 88450 - DNA, 824 bp, Glycine max
  unsure (1)..(824): unsure at all n locations
  Clone ID: PAT_MRT3847_50879C.1
ttcgagattcgtccgcacacaacatgtttggcgatttgtgtcaccgagacattctcagaacttggtttcttggaattctattgtgtctgttgctggtgtttgtagtgattaattggtagggtcaattgatgtagtgggtttagtataggtcattttgctgctacattttgtagccatgtgaatatttcgacgcagtttccccccgcacccgccgcacattctgagagnaggagatangaaaaccacgcacacccccaacccggacccccccctcccccaaccgcccacccaacccccgngtatccccacaacatcccccacccccccttccccagccccccccccggccggacatattacaaatcacccactcttccccccccccccgcagcctcaccaccccttccccccccccctcctcccccccccttccctccctcccccccccctcccccccccctacccccccccccctcactcccccccccccccccccccctccccccccccgcccacccccgccctctcctcgcccccctccctctccccccccacccctctccgccccgccccacccccccccccccctcccccccctccccccgtgcacctctcctcttctccctccccccccttccttcccccccctccccctctccccacaccccccccttcccccccccccccctccccctcccccccactccccccccgcccacctattctctcccaccccacccccccctcccctcccccatttttccccccttcgtgcttattccccccccccccctttcccttcccccctccctatctccccccct

SEQ ID NO: 88451 - DNA, 1255 bp, Glycine max
  unsure (1)..(1255): unsure at all n locations
  Clone ID: PAT_MRT3847_5087C.1
aaattaattcattaagcgtgcctcaaattagcctatttaactttgtttcatgaacaggtagctgtgcctccggcaaaaccacctccgaagcccgatccggaggtcgatgatccgctttatctgatgacattgaccatcccagagcttttcttgaggccttatcaggttagatgggatgccactgtgttcggggtctttaatccagatttccccctctacataaagcacgaagacctctccaaaatcgcacacggtggtcaatgtctcagcatatcagtgttacagttgtggattctgtaagtcattatatattacttttaattacctaagttattgttttcaattcataaatatttaactttgacttaacataaacaggcatctcactgaaacatgtatgcgagtggggaattctgatatccatggattcctcgagccacagtccattcagaggtctgggcaatcgcagtttgtgtcttaaagttacataaagagttggatgcagagttacaatgcgatgtctatcttggagcctacctaaatggggtaagtcacaaaataactaaatttaattaatgtttactaatatactaacccatttttaggttccactgcagcggaaactggcttgatggtaggctccctgcccaaggatcaataggcgtctggctaggtgcattgcgtaacaggcggtactatcatgtacatcaaaacttcccacttatatatatttctttatgtatctgtacactagnttgtttaattaatatccaaatttctttatgtatttagtgtaatagacaaaaaggaagtactaagtgtggctactatatgatgcactggatgtccaccatcattttaggaacttttaggaataattgggaagcggtaagtttatttcaaacaaaatcgatttatttataatttctattacattattaacttattatgacttatttcatcatgcagtattttaatgatcctagaccattgaagccagagagattaaaggcattgcggatccagtgggcacagttttatctccgagttacagatcaggcctaggatttagggacagtggttttttccttagtttactttggtttaacatttttgaaattttctatgtaatatgaacattgaattcatttgatgattgttctttatgataaatcaattatttgatgtttattatcattaaaactgcttgaaagcagaataaaatgtttatttgctgtgaattcggacggcgtgg

SEQ ID NO: 88452 - DNA, 319 bp, Glycine max
  unsure (1)..(319): unsure at all n locations
  Clone ID: PAT_MRT3847_50880C.1
agtaaatgtgtactgcggtcctcttcaggattttactccagagactggaagatatgacgaaatattttttttttggggcatnggccatcttacagatgaagatattgtttgttttccccagagagctaagggtgggctcgcaccacgtggattttttgtcctgaaggagaatattgcgagatctggatttgagcttgatagtgaacaccggagtgctacgtgatctgatttgaacttcagagagctattttcgcgatgtggattgcatgcttacgcctcaaaggatgggaagggatggcctgaagagatatttgctgtg

SEQ ID NO: 88453 - DNA, 358 bp, Glycine max
  unsure (1)..(358): unsure at all n locations
  Clone ID: PAT_MRT3847_50881C.1
ctcggaatttcggcctcgaaactggccttgcgagtaatgaccgaccagaatgggggaaagccgccggccgggtctccgccccatgtttgcataaggatgttcatccttgcaaatcccaccaacgggtgccctgagattgctggaaatcgatgaagaccctgaagcttcgagcactttgggaatagatgaactccccgggaagttcttggtgatgcccctgggtgaaggagtttaaagggaaaggttttcaaaaccaccggtggggtgtggaccaaaccaagggattccccttaagaaagcaaggggaagttggcctgacccccctgggnatacgtagcttacgaaacctttttggctt

SEQ ID NO: 88454 - DNA, 271 bp, Glycine max
  Clone ID: PAT_MRT3847_50882C.1
gtcttttcacgcgtgcggaagtgagtggaaggagctgtggcgttttgggcctcccttattgtgtacctgtgagaaaaaatggaaggaggtttgtgacaactttggctaaaaggaatgagtctcaagagaagagtaagggaccctctttcacactgagggtttccaagtcaactatcgctcgtggtgccattggactgtttggattggggttcgtcgatgccgggtacagcggagactggtcgaggatcggagtgataacaccgcagactga

SEQ ID NO: 88455 - DNA, 404 bp, Glycine max
  Clone ID: PAT_MRT3847_50883C.1
ccgtctaatgctcacgatctagacccaggcggtcccggaccggaatctccgggcgcgggcccacgcgtccggaataacgctccgctcctgagtcgcgatcattgatacagatggattgcctcatgctaaaacataaaatttgggaaggatggaagatatatacttagtggggattacatgaccttaaaccaatcgtacatcactatggatcctggtccagatgcaacattccaggctcacgagtattataaagccacagctttgtgatatatatgaaaatgataaaaccctgataaaacccgagtgagtctaattggtgatggattgcttgtttcaactggctcttacagcaatatattccgaccgatcggccgtgctactagaagcactgacgctatggctaa

SEQ ID NO: 88456 - DNA, 146 bp, Glycine max
  Clone ID: PAT_MRT3847_50884C.1
gaacttttggggtttggaagttttcctggtttggaagggaaaatctcacactggaaccccaaaattggtttgggttttggttttgggataccaattggaattaatggttttcaaccaagaagggcctccttttcttcaaaggggaa

SEQ ID NO: 88457 - DNA, 303 bp, Glycine max
  Clone ID: PAT_MRT3847_50885C.1
ccacccaaaaaatggccaaaaaatttttccccttggttttaattttacggggggggggaacttttttccaacctttgggttttaaccgcggttttttaccgttggaaaaaaaaataacagttggggggccccaaaaaaaaaaactttttttttgcccaaatagcccccaatttggttaaaagcctttttccccctttttaccccaatcccccttttttcaagcaaagccttttttttttgtggaaaagttcccctccaacctatttttttttgaagccccagagggaccttaaaaattttttt

SEQ ID NO: 88458 - DNA, 550 bp, Glycine max
  unsure (1)..(550): unsure at all n locations
  Clone ID: PAT_MRT3847_50886C.1
gtcgctccgcaccagtttcaccgcacgaatatcttgttgtttggagcgatccgagaaaaactctgtaaacatgttggtttaccaggacctccttacaggtgatgagcttctctctgactccttccgttacaaggaaattgagaatggaatgctgtgggaagttgaggggaagtgggttgttaaangancanttaatataaacattaatacaaacccttctactaaaggtaaaagaaaagataaaggagttgataagtgcagctattaaattattaacattagtaacacattcagacttgaggagcagcccgcattcgataacaaacagttgattaccttcatggaagaatttatcaagaatttgactcccaatctcaatgcggatcagcagaaattatttgagaagcacatctaaagagcggctaagtgcgtgctctgtagaattgaagattgccaattgtttagtgatgagaacatgagtaataatgctgactgggtgtggtgcgagtgggagaacgtcgctgataatcgcacattcgcttacattgca

SEQ ID NO: 88459 - DNA, 448 bp, Glycine max
  Clone ID: PAT_MRT3847_50887C.1
tcattcgcccgcgggtgggtacatttacgggtaccattgtgcagagtgaaccagtcatgaattcaagggttcagcttttgagtaccactaccaatggtgattttgttcaaggaaaagatctcgcactggttaaagttaatgtaacatgtgctgctgatggctggacatcaagtgacactacaactccattgttggaatctggttagcaaaaagacagaagggtaattgtggagtattatggaaggatgtatttcgttgctgataacgctgatcacacccaaagaaagagttgttggaggggaattgttccttagattttaaaattcgttctagaaagaaaaaaggtttctctacagaagcacaatttgctagtggtaaaacctcaaaatttgaaacaattggtgctggtgtacattcttcacaagatttttcttgtaaaggaagattc

SEQ ID NO: 88460 - DNA, 421 bp, Glycine max
  unsure (1)..(421): unsure at all n locations
  Clone ID: PAT_MRT3847_50888C.1
tgggtgttgtaagttgcaatggatatanacggcgcttttttttatgaggggggttttttacttctctaaacnctttactanntnntcanaaaancannnttncctttncaaaaataacttttaagaagccacacataatatttcttgatgagccatccaatcatctggtacgctgctgtgtctctccatcattgtttgttgcttcttggtgggctagtggaccaatggcaactagtttactgacttatttgttgcagggaaagtacatgtgtctattgaatctttgtttttgttttttgtcatggttgtgcttattttctctgttaaaatggtatgccaacaacttatgtgaggagaaaatagctgaacgtggtcctatgatcgtctcaattaagcttctgacttgaccttgtcattttaa

SEQ ID NO: 88461 - DNA, 414 bp, Glycine max
  unsure (1)..(414): unsure at all n locations
  Clone ID: PAT_MRT3847_50889C.1
tcgctccgcaccagtttcaccgcacgaatatcttgttgtttggagcgatccgagaaaaactctgtaaacatgttggtttaccaagacctccttacaggtgatgagcttctctctgactccttccattacaaggaaattgagaatggaatgctgtgggaagttgaggggaagtgggttgttaaaagaacagttaatgtatacattggtgcaaacccttctgctaaaggtggaagagaaaatgaaggagttaatgatacanctattaaaaggagtgacattgttagcacattcagacttcataatcaacccagattcgataagaagcaaggtatgaccttcgtcaaaatatttatcaagaatctaactggcaggctctatggggagcaacaagaggtattaagaagcgcagtggag

SEQ ID NO: 88462 - DNA, 302 bp, Glycine max
  unsure (1)..(302): unsure at all n locations
  Clone ID: PAT_MRT3847_5088C.1
gagggtttatgcanaancaagattctttnctcantgtncaacgcnatgacgacgaggctccntagaacgatcttncatcggccacaagctccntntccggaagcccaaatgnatttncccacctntcctttcccgccagtcctccangggccanaaattcctcngnggcccgcgaaccagtaaagganaccnnnnccatnancaccagttggagcatgtacggaaacgtctacnancgcccaattgcgcaggcgagctanacgatcacagcgacggagangaaaaccctagcagcgggagag

SEQ ID NO: 88463 - DNA, 483 bp, Glycine max
  Clone ID: PAT_MRT3847_50890C.1
cccacgcgtccgtaagaatcaagcagattagtctttaaaattagtaaaacaacaaaatgatccttgaatttgaaaattgtcaatcaatttagtcgctcatttaaatctcatttaaacagttaattaatctgttaagtactggctgctagctcacaaatccattctggctaaaaatagatttatggagtgtgtggagatgggtaagggggtggtttccttgcaacttgctgggttgagtgtgggcgcgtcgctccgcaccagtttcaccgcacgaatatcttgttgtttggagcgatccgagaaaaactctgtaaacatgttggtttaccaggacctccttacaggtgatgagcttctctttgactccttccgttacaaggaaattgagaatggaatgctgtgggaagttgaggggaagtggcttgttaaaggagcagacgatgtaggcattgttgcacacgcttttgctgacggtggatggga

SEQ ID NO: 88464 - DNA, 561 bp, Glycine max
  Clone ID: PAT_MRT3847_50891C.1
ttactctctatctttattattgccattaaatcttttgatagttataaaaatagttttttttactttaatttttttatttaaatgaaaaacttaattagaatattttgagaatatataatttcataccattatttaatcataaattatcatacattgtaatattattaaattttgtaataattttttaaaattatacttaaaataaagtttaattaactgtgattttttttacgttaatctcataaaattaaacttttataatacttaattatgcattttattatttttttttctctttttatgtatattttatcttaatataaagtattcattcaatgcatgcttgcttcttaaatactattatctttttatagttaaactcttttgcatttattgagtaatggatagattttttcggtacaacaacggatacattgagaatatcggcgaagctatcaaacaaaaactagacgttaatttggatccaaatcccaattataaaccaacacaattgtgtagaaaaaatgacacaactcggcgactcgcacatgcatatgttca

SEQ ID NO: 88465 - DNA, 498 bp, Glycine max
  Clone ID: PAT_MRT3847_50892C.1
cttttatctctctctctctctttggcgaatgaaccattctcttcctctccgatccgaaacccatcacttctaacacctgcagatctccctctctcaacctcactccacaccttacaccaaagtctcccaaactttccatcgcttattattccctttttactctttctctcttctcacctttctgcaattgcttctctagggtttctccgaggcgacggattttccaattgtatccggcctttcaattggattgaatgactgtatggcggcacctaggctatgacttcaagcatgttgagtggggagtgaaggtttatctttgggagttctcaatcttgcaattgtggtaccacaggttagaacccacttactcatatattaacagcttgaaggttgggactgacctattatgacgttatcgttctccagaatacctattatgacgttatcggtctccagaatattaacagcttgaaagtacaaaaccaagagttttat

SEQ ID NO: 88466 - DNA, 211 bp, Glycine max
  Clone ID: PAT_MRT3847_50893C.1
gggaaaacaagaagaagggttttttttaatttaaaggggggggggggggttaatttttttaaagccccatctccggggcttcatttttatcacgcacctatttacataaaactatatgtttttggtttatgactcaggaaattaaattttggtctatattaatttttaaggggttcttgtttatgaaacttctttaaatctgtttttaaaa

SEQ ID NO: 88467 - DNA, 464 bp, Glycine max
  Clone ID: PAT_MRT3847_50894C.1
gggggggttttttttttttttggcaatgaagcttggttaacacactaattctagtttagatgaaatgaacctttcatagtgaaaaaaaaagaaaaagatgttcctgttacaaagttcagagaaccaacctttttatatcaagccaatgccaaacctaaatgcgcggagcagtgacctcaaaggaaggcagagagttaagctctaataatctgggacggggagctgttcatgagtggttgggctaacgaaaaaaatctcggagacaacagcagctatggcagcccccgcaaatgggccgacccaataaacccagaggttagaccaggggcaactgacaacaggcggcccaaactaccctggagggttgatgggtgccccatgaaatgccccccccggcgtgatggtcgcgccacccatgaaccccattgcggtgggagccgctgtcccaagatcacccttgtttg

SEQ ID NO: 88468 - DNA, 334 bp, Glycine max
  Clone ID: PAT_MRT3847_50895C.1
agcctacgcctactatacgagacgaaattaattggaacattgtgtgaagactagtgagactctggaccgacagatctcgctactaggaagcgctccgatgacaagggcatgatgttcatgctctattagacatgtgaagactttgacagacacttattactccaagtctttgaagagcgttggatggccatctacatggaactgtggattatgatgcccatctattacaacgcgagtgttggaatattgaggagtttcattattgcccgccggcgtgcggcttactacgaactaggatggcctctatttgatttcaggacaatacgtgcaagca

SEQ ID NO: 88469 - DNA, 486 bp, Glycine max
  Clone ID: PAT_MRT3847_50896C.1
ggaatattatagcagttactgtagcttggatcaaaggagaaggtttgttttactactagatattgaaccaacaaacacagtagggctgttgtttacataaatttgtcttaccttgtaggtctttcaatctggtttctatctatcatatactttatttccggtgttccagcatcctatgtgatgtggtatcgtcctctttatcgtgcgacaaggtagttttcaatttgattgaattcaattcttatggtatggcatggataattgatattcaagatgatttcagccttttcctaaactataaaaaattgttaatgtcatccacattggctttattgccattgtgaagcattaaacattttctgtagcagcagtatgtacatctggcgactttgtgagcagaatgtaagttaataaatgacaacgttgtcatcttgaaactgaaaggctttggggtgcaaagcttacattataaaataccttaatcta

SEQ ID NO: 88470 - DNA, 138 bp, Glycine max
  Clone ID: PAT_MRT3847_50897C.1
atagagttatcgcgatattgtagtgcgaaagactcactttacctgctaaaaacagtagatggctcattttaacctcatacttatcacgcttatttttattatgatctgagccttaattcatgttctacttccggtcca

SEQ ID NO: 88471 - DNA, 475 bp, Glycine max
  Clone ID: PAT_MRT3847_50898C.1
ggcgccacgcgtccgtacggctgcgagaagacgacagaagggcactaaaccttcaccaactgaggaattgagtgctaccctggcctctaaattaacctgataatgatgttttcatgagcatttagactttagtagctagcatgttgtagtctaaccgttgtctgagaatataaaaaaaaaaaaattgctgcttttatagatagggacattttataatcttatatttaatcctggtgaattacctgcttagaccaacagcattgtacaaattctccaagcacagatataacataagcttttgcctgcctaagttgtgattgccttcttctgaccgagacacgcttcttcttgtccgcaacaactgtaatttaaaaaacttgcaggccattacaacactaaccgttcacagtatgaacagatagatggtttaatctatgtcaaattgtcaatcattaatattagaatcttaagttta

SEQ ID NO: 88472 - DNA, 316 bp, Glycine max
  Clone ID: PAT_MRT3847_50899C.1
agtcacatgggcatcatcaacatttcgtcgtttcgctgctcattgccttcgctgacacagatggtgcgttgtgaaacgtgttttgggatgaaagtggtatgacgaacggcgtatacgtcgccgaccgtggcaccgtctctgggactgacgtccagtatgctccaacaggagcactcattgacacttatcaccgcaaaaactggtccttttacacggctcacattgcagaattaactgccacattcatcatcgtaaatattaatgtgctcacaatcctatggtacatgcaccacagtgtgctcatagaaaacttcaa

SEQ ID NO: 88473 - DNA, 1301 bp, Glycine max
  Clone ID: PAT_MRT3847_5089C.1
cgtgaagtggacacgcaaagcctcacttctacgatcagtggtgaatgttgatcatgctaccgggaaggccgacggtccattattgtttaatttttccaggatgtgcgcatcaaggcacaggccatccagaagcagaatactgtcccccgcgttttgtctcgtgggggttatgattatttggagcagaagctcctagctgagaagaccaagaagaagctgcacagtcaggaagcgttgatggcatcatcgaccctccatccccggtcagacgccacgtgaagtggaagatggcccgcacgaagaaaacaggggagatgacgactgaggccgcaaaggaaatcgctgagaagattgattcctttatggagaaggccacacagggatccatcatcccccatggatgtcaggatgttctggtcgctgctattggatgtccagatcaccctgaacgtgtccgtgctgctggagccagtgtcaccatcaagcaaactacgactccatggacgtcctacagcgcttcctccctgcctcctgacgaattacagcagttgacccagcaaatcagggaccagctagaagagttcatcacagagaaagtgacgaggtaggtcatgacatccttcagccagcttcagtcacagatgcaatctcagggacttgtagtgcctcctgagcctctggttggtcctggtccctccggtcctcgggtgagcacaaatgggagttgtgttgatccctcaggaagcgatcctaagacgggtgactctgacaggtgcggcttgtacatagaagtagatcctgcccgcctggttgccgtggggagagtttatgagggatccactcttgttcataacactcatttgttgcctggccaagtaaaggtgagtgtggacgagattaaagatgcagatgctgcagttcctgtacccactgatgaggtttccttagtggggcaggcacttcacaccttccttgcttggccgacacatttggtcaagtctttatcacaccaggtagttgtgtctccgccaaaaccacctccgaagcccgatccggaggtcgatgatccgctttatctgatgacattgaccatcccagagcttttcttgaggccttatcaggttagatgggatgccaccgtgttcggggtcgttaatccagatttccccctgtacataaagcacgaagacctctccgaaatcgcacacggtggtcaatgtctcagcatatcagtgttacagttgtggattctgcatctcactgaaacatgtatgcgagcggggaattctgatatctatgga

SEQ ID NO: 88474 - DNA, 390 bp, Glycine max
  Clone ID: PAT_MRT3847_508C.1
aataggatcacaccgagacaagcacggagcacaaaacggggtgaaaggacaaacccccggcggacccacccccacgagaaaaacgaaggaaggcaaccgccgaagaccgaagcacacaaaggccgaggcggagcacacaaggcccaccgacacggccaaaggacccccaaacgaagaggcaaccgccgaagaccaccaaccagcggaccggacaaaacaacaaaccccaagggaaggcggagacaaccaccacaaacaaagagaaacgcaaaacccagcaccgaaaggggggccggaggcgaacccagaagcacaaacacaagccgacaaagccgaccaagagagaaagaccaaggcaccggggcccccaccaccacagcaaggaaaacc

SEQ ID NO: 88475 - DNA, 479 bp, Glycine max
  Clone ID: PAT_MRT3847_50900C.1
gttagctcggaattcggctcgaggtggagtcagtgcttatgatgttcaaggcacattgtctctccaaattcttgacaaagaggatggacatattcaagttcaggtccagacaggggagaatcaagccagtcttttcaggacacaccctaacatgaaatacagatttagttgccaatgaaaatatactacgcctacaggatcccaatatgcctttccccactggtcaagctggaggtcctgaaggtgttggtcttttaaagtggcgaatgcaaagcactgacgagtcaatggtgcctgtgaccatcaactgctggacctgtttttgtggaaatgaatcccacgtcagcattgactatgaggctttgtcatcgtttgatttgctgaatgttgtgagctccgtacactatggctgctcttagggatgctccatctgttcagcagattgaaggagaatggaagtatgacttcaggaattcctt

SEQ ID NO: 88476 - DNA, 750 bp, Glycine max
  Clone ID: PAT_MRT3847_50901C.1
cgacgagctctctctctctctctctctctctctctctctctctctctctctctgtatatatatatatatgtgggggggggagtgagagtgagcgcgaccatgtatatgttatgttaaagataaagaaacacccactccactcactcttttttggtagataaaatagctgatttgtaaggggggatgtttgtgagaaaacaaaaagcgatagagagatgtattatgaatggggggggtgtgaggagaaaaaaaaaaaaaaaaaaaaaaaaaaaaaaaaaaaaaaagggggggggggggggggcccgctccattctttatagagtgagatgtatcacgcgccctgcctgctggtcgttatacaacggagagggggaggaaagacgggagccagcacaaataatgagcgcctcacacacctttcttgtgtcggcgggtgagagaaaagagacgagccccgcgcccttccttcctcacacctgcggggaaaggggagtgggaggcgcgccctctcttgacgcaaattacgcggggcgggtggggtagggacacacagaaagaaaaacactacagtgagcgaacaccagcgcgctgttttttttttttttctttttgtatcgcgcggggccggcccgtcacacataaaaaataggtgggttttgttgtgtttataatttcgttcacccccccaaacacaaatatggggggtgtggcgggggcgggcccccgcaaagagtctttcttcgctggagg

SEQ ID NO: 88477 - DNA, 264 bp, Glycine max
  Clone ID: PAT_MRT3847_50902C.1
acaggctgccgcacgggaagaccggcctcaaaagcggtcgctactggattcgaggcttgtctcaaggaattcctacttttctgggtactactttttacgggaaagattaagggtatgtgagccactcactgacctggtgacagacttcgtgaatcactctctgttccactgttgaacactctgctgtacagctatactacttgatgtaggacttcaagtcagattgaaacttcctcagttctttgctcaattccatgctcaagc

SEQ ID NO: 88478 - DNA, 245 bp, Glycine max
  Clone ID: PAT_MRT3847_50903C.1
tctcgagccgtattggctcgagcggctgcgtgaagacgacagaagaggtagtatgaacacttactgagtttggtgatatattactagttagtatataggattaaattttatttgatcaaatttttggccataagcaacctcaaatatcaatgaacaaaagcagcataaagaggtaggaaaatgagtccagcacaggataatagaatgcaataggcgggattacaaataaaaagtgtgaaaaagta

SEQ ID NO: 88479 - DNA, 343 bp, Glycine max
  Clone ID: PAT_MRT3847_50904C.1
ctgttatttagaacaacaccctatgtgagtgtttgagatgagcttgctgacaactcgtttagagatcacacagggaaatcgggtgaggaaaagttttgagaggcaaatagaatagctaaatctcccaccaaaggggctgctggagctacctcaagcaattgcacagctccataagggattggcatggaataatggactgatgtgatgtaagaatcatgcatatgtggattggttcgcttggggtgctgaaccaattttttttagtgcgtggagaggtttatggttacctacaaatggaaggcttggaactactttccggggatatgtttcagatgctttgtct

SEQ ID NO: 88480 - DNA, 563 bp, Glycine max
  Clone ID: PAT_MRT3847_50905C.1
gccgggaagtttgccgtgctagcatgtgaggagtgcctcctgcttgggggggggggggggggacgaagggaagggtaactgtagtgtagaggggtagagattcaagaaggtcacaaacgaaacggaggagatgaggaagtaaggcaaaggaaaaggagccaaaaggaaacaaaaaaaaaagcaataaggataacgcccatttcgagcaaagggatgttaataagcaggtgtatcgcaccccaccaacgggactagccgcatgagatagcagccccagctgctgctgctgctccagctgctgctgccgcagcctcgttgggctcccgagtaatacttcggcatgtcgctcaagtataaattgcacgtggaaatggctaattcaagggttcctttagtcatctttggtaattattcctcctcttcttcgtccatggcgtaaatggcctcagcatgtgtggtagacaccaatatgtctcggttacggcagctatgtctcgttgtagctgagttagcgttaactctactattgcaggtgtttgtattcctatctcttatcgcttcgg

SEQ ID NO: 88481 - DNA, 220 bp, Glycine max
  unsure (1)..(220): unsure at all n locations
  Clone ID: PAT_MRT3847_50906C.1
nggagacnncnaaaccgcattgtgcccancngtntcatagatcgcgctanctttnnacatgcnatgtagaacatgcagtagaggatgtagcccctagaacttgccacaggtaaatggctgttgncctnaaaggtncgtagntccgcnactgatgagcngnaaacattnatggnctcttgttagcncntaattagagtaacnccgtgtaccattgctcatg

SEQ ID NO: 88482 - DNA, 244 bp, Glycine max
  Clone ID: PAT_MRT3847_50907C.1
tacgtgccaaatagaagattattttgcctaggaagacaaggaagaacagtactgaaatcattatccatataacgtcttttacccttatgctcaaaaacaaggacgctcacatgtcccccaggaattatttcaaaataagcttgccctcccacacaaacttgaattccttccttgaaacccttgtctttgtccgcaccttgccacagatgcctatgcccgcacttcttttcctttcgccctttaa

SEQ ID NO: 88483 - DNA, 528 bp, Glycine max
  Clone ID: PAT_MRT3847_50908C.1
gagggcaaaacccaaaacttttgggggatgggcagaaaacccaaaccctattttaaaaaaaccctacgggggcgaaaaaaaccaaaaattgggtaagggcgggaaaggcaaaaaaggcaaacaaaacccggccatggaatcccccccaaaaacaattttgctttaggcaaaaaaaattaaggaaaacaggggaaggggaaccacccaaaagcggggggtcattagggggccccattcggaaccgggattaaaacaaaaacaggggaaagggtgaggaaaaaacggttttttgaacgggggaaacaacacggaagggtaaaaaagaaactaagttttccacggcccccacagggtgaaaaggaacaaccaaaaaaacattttgggcaaaagccccacttttttggaacccccgccggaaatgggggggccaaattttaaagtgggactctggccttttcaggattttaaaaaaaacggttccaaaaaaccaatcctttacctttgtatttaaaaaaaaaaccaaaaccc

SEQ ID NO: 88484 - DNA, 164 bp, Glycine max
  unsure (1)..(164): unsure at all n locations
  Clone ID: PAT_MRT3847_50909C.1
cacaatggcaactaactctctccattantccatccaacaccacnaccattccntcaccaaacgccatcanncttcaganacnccaccccanacatcanttttcctcanacaccntacaccccctatnnaccccaanatcantatctcccagantcnttnaanct

SEQ ID NO: 88485 - DNA, 410 bp, Glycine max
  Clone ID: PAT_MRT3847_5090C.1
gttggtaaaaaatgtacaaacacattctagagtccgaataaaaaatatctgacagtttcctcccttcttaactaggcaaatgaatagttatctaaagggcacagccaagcatcctttttattcggactctagaatgggttggtcaatcggatgttggcctggatcgggagccctgtacgtggttcgcgtaggtgcgacgtcccaacactgtcagatagtaagagggcgactgaatccagtcgtcggaaacacccgttgactatgttcctgggcttgaccgatgtttcttgggctgacttgggtataggcttcctgtttggcttaggaacttactttttatttccttccgttctttaattggtacgtgctgctgcaaccactgcttttggggataattcggcctgagcaca

SEQ ID NO: 88486 - DNA, 224 bp, Glycine max
  Clone ID: PAT_MRT3847_50910C.1
ctaatttgtaatgtatggaaattgaactttattggagttgaccaacaactcactaccacatgagtcgtgtattaccttactcataactcgtttttatctgggaaatgtttgtttgtcttgtgttattatttggttataatgtgagtagttataggtactgtggtgagaaacttctatccacgctatacctatggataatttttttcttaaaaaaaaaacaaaaa

SEQ ID NO: 88487 - DNA, 1099 bp, Glycine max
  Clone ID: PAT_MRT3847_50911C.1
gacagcgcactgagtgctgagaacgttacctcattcaaaagcagcaacagcagattattcttctttgtttctgttctttcttcatcagccgattcagctttgtccatggccaccgaaccaaaagcagccgccgatgacgtcaagatcgatctcttcgaagacgacgacgagttcgaagagttcgaaatcaatgaagagtgggatgacaaggaagaagggaaggaagtgactcaacagtgggaggatgattgggatgatgatgatgttagtgatgatttttctctccagttgagaagggagttggagagcaacaccgagaagaactaaaccacctgctagttattattgcttgatatgacatgcgctatgtcttgggttgggtgttcgagctcttggaaggagatgaaaactatgccttgtttggaaggaaatgtaagaacatagagacatgatttttctgtaccttcttgaatatatatgcttttaaagttattgagtgcttgtattgttcttattttcattttggggttgggtgggcatgcttttctatgaaccagtctggtgaacagtgcagttgagttgcacgttccccattttcttggtgcccatcggttccaaataggaatttcctaattgaagaattaacgtaaaggctgaaaaaaaaattactttggctaaaaatttaattctcactatgcatttcatactacaaagtgcccttcaaaatctttagcaggagcttttagaaaaaagatccagaagtggctgtttcaaaattcctggagaaggtgcagtcaatgcttcatattgtgtttggcttgcaaatgaagaagaaaatgtgattgtagctctcctacaacaaatactaaaggatgttcaatatctgccactaggataaaaagataaaatgtagttcttttctttttacccagatgtcttgtgggatggagcagtggaaacctgcagtgcatcattttttcattgattatttgtgttgggaattaatttgacactgtttcaaactccaatttttgctgcacttggtcaatttttgtgtaaaatgtctaaaggaagtaataattctaggttggaatgatgt

SEQ ID NO: 88488 - DNA, 455 bp, Glycine max
  Clone ID: PAT_MRT3847_50912C.1
gggacattcaggaaccacagctaagtcctgatgagaagttcaatgcttgctttgaaagcatacctgtcgctgcgttccctccacctcctggaaatgaagtctgaacccacatctccaaggagtccatccggtggagctgctaatacggctgcagtgaatggaataacttctgaagcattcggccttgaatctgcttcgacaacttcaggcaatttctttgaggatctgacttcttctcaactatataagaacaccaaggttcgtgacatttcagggtcattccgctgggctccatttctcgctctggagagatcaaactcatttttgaccatgcttttgctgctttccaagtacaagatgaagagtattcctgtggtggacttgggtgcaggtcgaattgacaacattattacacagtcttctgtaattcacatgttggcagaatgtgctggtct

SEQ ID NO: 88489 - DNA, 469 bp, Glycine max
  Clone ID: PAT_MRT3847_50913C.1
ttcttcgcgtccgattttactccttttagagagagaaaagaaagattgagctttcaggagagaggaagagagagaaaaaaattggatttttttttggggtgttccaatggttgaactggaaatccaaagaagggtgtgagaaaaaaaaattgcatcttcttttggtgggtgtctctgaaactatgatcttgtgaaaacccagaaaggaaaccttcggtgcgcgttggtagatagatagagagagattattgttgttgggatattctgagaaccgttgattgagaaatgaacggtggtgatgaggtcgtggcagctccggcgagtccaccgcagccgctggagtggaaattctcgcaggttttcggggaacgtacggcgggggaggaagttcaggaagtggatataatttctgctattgaatttgacaagtctggtgatcatcttgctactggtgatcgggtggtcgagt

SEQ ID NO: 88490 - DNA, 412 bp, Glycine max
  Clone ID: PAT_MRT3847_50914C.1
gtgttacgtcaggtattcacacagtctgatgtgtttgaaatggcacttgacatgagaaatcagtttgatgaagttgaaacacttaaacacagagaagttttgaacccatctatgttgtgtgacagtgaagggtggttgttaggcaaccccatgggaataaggactgagagagagattcatgcagaacatgaaggtgcaaaaatctatagaagattgtaccagaaaccttgtccatgccagacataaatggagtggaacactcatatcagacacactgcagtccacaacacttcaaaatcctaacaatatgcttggcattttattgtgtctctctttctagtcggtcgtgttttggcctgagatgtgtactatcccatgaagttcacatattgcaaatatcatacctagttgc

SEQ ID NO: 88491 - DNA, 2172 bp, Glycine max
  unsure (1)..(2172): unsure at all n locations
  Clone ID: PAT_MRT3847_50915C.1
cttggttgcatgaatggatatggtctgaaactgctgctgggcttggatgcagataggactcggagttggtcccgtcccaacaaccactcaccgagtcaccgccgtcgccgccccttcctcctgaggattctcaccagggactaaccgacacgtatttacccactcgcgccggcagtacacttacaaagcataagcggcactatgctcttcgaaaattgtatcatgacagtccaaggcttatatgcgtattatatacatcaccaacataatgtccttgttgtactttgaagcccatccttatacacgtgagtaatatatgtgataagtgccaatttttagcttaaattgttagaggggtaccaagctggtggtgtccctggggggcagttgatgactacaactgaagtggagaattttccaggattcccagatggcataagtggacctgatctgatggataggatgcgacggcaagctgaacgttggggtgcagaattgtatcaggaagatgttgaagttattgatgtgaaaagtagtccttttactgtccaaagtagtgaacgtaaggttaagaaccatactgtcatttatgctactggagctactgcaaaacgacttacgctaccacgaggaagatgaattttggagccgaggaattagtgcttggtgcaatttgtgatggagcatcacctctcttcaagggtcaagttcttgctgtcattggagggggggatacagctacagaagaagcattatacttaacaaagtatgctcgccatgtgcatttacttgtacgtcgggaccaactgagggcttccaaagctatgcaagataggttgattatcacgaatgtctcagagtgtttgacaatcccaatgtctctgtgcacttcaatacaacggcgataagacttcagaagaacaccaaaggacagatgtctggcattttagtaagaaagattgatactggggaggaatatgtgcttgaggcaaaagggctgttttatggcataggccattcgccaaataccgaactgttgaaaggccaagtcgaattagaccactctggctatgtacaagttcaggagggtactgcaaaaacttcagttgaaggtgtatttgctgctggagatgtgcaggaccatgaatggaggcaagctataactgctgctggatctggatgcgttgcagctttatcagttgagagatatcttgtgagcaatgatcttcttatagagttccatcagcccaaaactgaagaggttaagaaggaacaaacagacagggatgtacacgagggctttgacattacacttacaaagcataaggggcagtatgctcttcgaaaattgtatcatgatagtccaaggcttatatgcgtattatatacttcaccaacatgtggtccctgtaggactctgaagccaatccttagtaaggtgattgatgaatttgatcagaatgttcattttgtcgaaattgatatagaggaagatccagaaatagctgaagcagctggaataatgggtactccatgtgtgcagtattttaaaaacaaggagatgctcaagactgtctcaggagtcaaaatgaagagagaatacagagaattcattgaagcaaacaaataaaaaaaattcgagggtgatacccgaattctgtgattcaattttgttttccattttagccagctgaatagcgctgtcaattttgacaactattccttgaactaaacagcaacttcatagattgtacatgtagagctaccaatcactattactgttttgattgttcaatattgcatttttcatatttgaatttaaaaagcctcaactaagaacatctcgttgacacgttgtggtgaggaaattgtgatcatcatccaagctgaaatgataagtgtcgtttttgtnaaaaaaaaaaaaaaaaaaaaaaaaaaaaaaaaaaaaaaaaaaaaaaaaaaaaaaaaaaaaaaaaaaaaaaaaaaaaaaaaaaaaaaaaaaaaaaaaaaaaaaaanaaaaaaaanaaaaaaaaanaaaaaaaanaaaaaaaaaaaaaaaaaaaaaaaaaaaaaaaaaaagggggggccgnatttaaaagaacaaatttttgggccccgggtggggggggttaagtttttttttttagggcccccaaaaattaaaacatcgg

SEQ ID NO: 88492 - DNA, 235 bp, Glycine max
  Clone ID: PAT_MRT3847_50916C.1
aacaaagataacccataattttaagaatactatacagaaagatacaataccaataatatgcaccgatataatattgacttctcttacatttcctaattacaaaatcgaaattaataatcagatcatagagacaaagaataatccaaagggagtatgtatagaaagaatgattacgcgagagactacacagctagtaaaccagcagagacatatatccagggcggaagctggccac

SEQ ID NO: 88493 - DNA, 2424 bp, Glycine max
  Clone ID: PAT_MRT3847_50917C.1
tcgagtttttttttttttttttttttttttttttaaaaagaaaagaactacattttatctttttatcctagtggcagatattgaacatcctttagtatttgttgtaggagagcaacaagcacattttcttcttcatttgcaagccaaacacaatatgaagcattgactgcaccttctctttctacaaagaagatacagaacaggggggaaagagaaaagaagaaggacgaaggtggaacagaagcccggaggcagagaatgcagcacaccatcgaaaaagataaaggggttctgccaacccatgatcttcgacactggcaatccaggcactattttctacaaggaccgccccaagactttgaggggcagatagtggaatggagggaaagagtctcagactcattgggaggggaagaggaaaaagaaggcgacgccgccgcaaccgtaacacaagaaggtcaccggcaaaaccaggaattcaaaaacagccacttctggatcctatttcaaaaagctctctttagggcacttgtagtgagatggttaatagggtatatgtatcgctcagtccagtgactttgttgtgacactaaaagaattagcattcgcggcggacattggtcctgtccgcgccagtacttatagcccctttggaaatgtatcggcttgcacagtagtagcataaaaagtttgaagaaagacaccaaatctgattattacacttctgtcaaacctagaacaaatactttgcactgtacacatttcacaccacactaaattgattgcagctaaatttggtttatgaaacagtgtcaaattaattcccaacacaaaaataatcaatgaaaaaatgatgcactgcaggtttccactgctccatcccacaagacatctatctgggtaaaaagaaaagaactacattttatctttttatcctagtggcagatattgaacatcctttagtatttgttgtaggagagctacaatcacattttcttcttcatttgcaagccaaaacacaatatgaagcattgactgcaccttctctttttataagaagatacagaaaaaaggggagaaagaatattagggttggaagaaggtggaaaaattgaacaaaaaaaagagatgctgcccatcatcatccagaaacaaaataaggtctgcccaccccaggaattttgaaacagccacttctggatctttttttctaaaagctcctgctaaagattttgaagggcacttgtagtgtgagttaaatgtagcatccaactcattggttggtaagaaggggaaagaagccttctccacagcaaccccaaaaacaggtcaaccaaaagcaaatacatgttcttcaatcatctttcttcctcaagcatagtacatgtataagctatttgcagcagcacaagcaattgaattctcagttgggtgccatgctaagtgcagcaactttgttgtgaaatcaaaagaattcccatttgcgtcaacaccggcgctctcttgctccacgtcttacaactcttgttatactgtttcccaatgatctagatggtcttgaaggggttggaacttggcgtctcattggatttttactggcttccaaagttgtagcttcagtacttcaaggaacacaaccaaacacacggaatagattgttgtaagagccagttgaaacacgcaatccatcaccacttagacaacattcgaacttatcaaagattgatccattttcatattaattacaaaggttgggtcatacttatgcagaaacctagaaagttgcaactcaaacagaatccatactgaatttccataaatttaactgtcatttaatgacgactaaaacatctatcatacgttcactaaaaaaattaatttccagaagtccatatattgatttggatagatatacaaaagagttcaaaaaaatttcttttgttgattctaacaattccttcctaacaacaaataatttttaactgccataattcaacttgaacaccggaacccacggaagtgcttatatgacactcaattacaataactagaatgagattcagttcttttctcttcttcccttcaattcccccctcatctcgagaattatatcaccacctacttcacaatcatcacaatcatcatctcactcctcttgactcagttgtataccttcatctgcttcctcccattcttcccacactttttttttttagaagtcttcatagacttcgcagaattcgaagaatatgttctccgcggccgatatagctaccatgtctctggtctgggttgcataagaagataaagcaagaaaacaaacgtagaaaaataagataaaagtgcttttagttgtttggctctttttgaagtttttactatacacttctttttacaccattatcgtgtctgtctgcagcctaa

SEQ ID NO: 88494 - DNA, 635 bp, Glycine max
  Clone ID: PAT_MRT3847_50918C.1
ggcgtacgtccggcataaaagaagagttctgcagaagcctttggttggtgctatagtagataatttaatgcctgggggacaggtattcatacagtctgatgtgattgaaatggcacttgacatgagaaatcagtttgatgaagttgaaacactcaaacatatagaagttttggacccggctatgttgtgtgacagtgaagggtggttgttaagcaaccccatggcaataaggactgagagagagattcatgcagaacatgaaggtgcaaaaatctatagaagattgtaccagaaacagatgtgagttctcaagcttgacttgtttgccgattcactcctactatgagcacaaggggaaccttgtccatgccagacataaatggaatggaacactcatatcagacacattgcagtccacaacacttcaaatcctaacaatatgtttagcattttattgtgtttctctttctggtgggttgtgttttggccttagatgtgtactatcccatgaaattcacatgttgcacatatcatacctagttggttaaggtttaggggtttgtgtaattattcatttttataatgtattgttttaccaactagtatcataattgataaaagtaatttttacaaaa

SEQ ID NO: 88495 - DNA, 912 bp, Glycine max
  Clone ID: PAT_MRT3847_50919C.1
tttcgtctgcgagaagacgacagaaggggaaaacagcgcactgtgtgctgagaacgttacctcattcaaaagcagcaacagcagattattcttctttgtttctgttctttcttcatcagccgattcagctttgtccatggccaccgaaccaaaagcagccgttagtgacatcattattaatctcttcgaggaagagagtccaaggagcccagaggcgaagctggggttgcgagtggaggatttatgggacattcaagaaccacagctaagtcctgatgagaagctcaatgcttgctttgaaagcatccctgtctctgccttccctccacctccttcaaatcaagaagttgagataaaatcagatgccaccctagccgaggcagtaaaactacttgcagaacacagcattctcagtgcacctgtggtggatgtagatgcacccgaagatgctagttggattgacagatatataggaatagttgagtttgctggaattgtttgtttggattctgcatcagtctgaacccacatctcctaggagtccatccagtggagctgctaatacggctgcagttactggagtagcttatgaagcattaggccttgaatctgctgcgacaacttcaggcaattttttcgaggatctgacttcttctcagctatataagaataccaaggttcgtgacatttcagggtcattccgttgggccccatttctcgctttggagagatcaaactcatttttgaccatgcttttgctgctttccaagtacaagatgaagagtattcctgtggtggacttgggtgctggtcgaattgacaacattattacacagtcttctgtaattcacatgttggcagaatgtgctggtcttcagtggtttgagagttggggaaccaacaatctttctg

SEQ ID NO: 88496 - DNA, 407 bp, Glycine max
  Clone ID: PAT_MRT3847_5091C.1
tcctcctcagctcctctgataatataaccatgtaacgttcaaattctacgccaatctctgtcgcattctctttcctctttcttttttccttttccttagaagaatcgaaaacatcttcgaaaagcaagccattattaatggctgtcgactcctccttccagaaagaacatcaaattcgggagtttgtggacgggagtggaaacgtagctgtcggtttgaagttgcataataaaccaagtagtgatgaccttaaccgacagtttcctttaggctcaagatgtttatagtatttcagtgttgcctgaggaaaatgaaaatgcaaattgtgcttcaccactagctttcttgagcatcttagaggttcctaatcaagttaaaaacacaatgtgcttagatgctcacataaa

SEQ ID NO: 88497 - DNA, 2388 bp, Glycine max
  Clone ID: PAT_MRT3847_50920C.1
aaataatgcagattttggataagcatgccgcaaaacaacgtaggacaagacattagtattacgtggagatgaagcagttcatcacacacaacatgcactctcatcataatcatccacgcttcttctggttccaaagtcaacggattatgttccatgtttttgaaatccaacggtgttgatcttaggtgtaggaagtagcttgtgaagtgtttgcagattaagtgtccttctcttcagttatttatgggatgtgtaaagagaaaaaaaggatcataattaacttcccacgcgtccggttacagagagagagagagagagttattatggtgactatggaagagagtccaaggagcccagaggcgaagctggggttgcgagtggaggatctatgggacattcaggaaccacagctaagtcctgatgagaagttcaatgcttgctttgaaagcatacctgtctctgccttccctccacctccttcaaatcaagaaattgagataaaatcagatgccaccctagccgaggcagtaaaaatacttgcagaacacaacattcttagtgcacctgtggtggacgtagatgcacccaatgatgccagttggattgacagatatataggaatagttgagtttgctggaattgttgtttggattctgcatcagtctgaacctacggctgcgaggacgacagaaggggaccgcgctgtgagtgctgagaacgttacttcattcaaaagcagcaacagcagattattcttctttgtttctgttctttcttcatcagccgattcagctttgtccatggccaccgaaccaaaagcagccgccgatgacgtcaagatcgatctcttcgaagacgacgacgagttcgaagagttcgaaatcaatgaagagtgggatgacaaggaagaagggaaggaagtgactcaacagtgggaggatgattgggatgatgatgatgttagtgatgatttttctctccagttgagaagggagttggagagcaacaccgagaagaactaaaccacctgctagttattattgcttgatatgacatgcgctatgtcttgggttgggtgttcgagctcttggaaggagatgaaaactatgccttgtttggaaggaaatgtaagaacatagagacatgatttttctgtaccttcttgaatatatatgctttagaagttattgagtgcttgtactttaattgaattctgcattattaggtgctgtctggctttaaaatttgcctttccggtggagctgctaatacgactgcagtgaatggaataacttctgaagcattacgccttgaatctgcttcgacaacttcaggcaatttctttgaggatctgacttcttctcagctatataagaataccaaggttcgtgacatttcagggtcattccgttgggccccatttctcgctttggagagatcaaactcatttttgaccatgcttttgctgctttccaagtacaagatgaagagtattcctgtggtggacttgggtgctggtcgaattgacaacattattacacagtcttctgtaattcacatgttggcagaatgtgctggtcttcagtggtttgagagttggggaaccaagaaactttctgaagttggtcttcccatggtgacaccaaatcatattatcaaggtttatgaggatgaaccagtgcttcaagcatttaaactgatgaggaaaaagaggattggagggttgccagtgatggacaggggtagcagcacggcaattggtaacataagcctgaaagatgttcaattcctcctaactgctcctgaaatctaccatgattatagatctattacagcaaaagacttcctgacagccattagaagctacttagagaagcatgaaggggcctttccaatgtcaggtgacctgattacatgcaataaggattgcacaatcaaagaattgattcaactgcttgaccatgagaagattcatagggtctacgttgctgacaatgacgggaatctggaaggactaatcacactaagagatatcatctcaaggctagtacacgagcctcgtggctattttggtgatttctttgatggggttctcccaatgcctccaaacagcagggtttgaaatgctttcaggaagaataagttctattccataagtaacaaattgatgtgtttctcatcagagctgacgacaagatcctagcccctttgtaacatcagcacctagcactttgcaagttacttgctctcgttttaccgtaggtgaaactgtgaaattttgtgtaaattttgacgtaataatttggagttttggtcacatttttcttttgaacaagttgatccttaatctcagggtcctctgcaattaaaagccagggaacttttcgg

SEQ ID NO: 88498 - DNA, 2798 bp, Glycine max
  Clone ID: PAT_MRT3847_50921C.1
acgctaagcaaggcggctcgaggttggtcttttttgtgttccaatggctcaactgggaacccaaagagaaggaaaaagaaattttatttcttttttagacgggtctttgtgaacctatgatcttgtgaaaacccagaaagcgatctttgatgcactcataggattggccgattcagttgcgtgttcggtggccgttgatttcgtgacaaatgaacggtggcgatgaggtcgtggcagctccggcggctccaccgcaccctctggagtggaaattctcgcaggtcttcggagaacgcacggcaggggaagaggttcaggaagtggacataatttctgctattgaatttgacaagtctggtgatcatcttgctactggtgatcggggtggtcgagtggttctctttgagagaacagatacaaaagatcatggtggatcaagaagggatttggagaggatggactattctattggtaggcatcctgagttccgttacaaaacagagtttcagagtcacgagccagagtttgactatcttaagagtttggaaattgaagagaaaatcaacaaaatcagatggtgccaaacagctaatggtgccctgttccttctttctacaaatgataaaacgatcaaattttggaaggttcaagaaaagaaggtcaagaaaatttctgagatgaatgttgacccttcaaaatcaatggggaatggatctattgctagttcaagcaattcaagtagttctagaccatatcttgcaaatggaggatctccagatagaccatacaattatataagcaatgacttttcatttccaccaggaggcctaccatcactaagattacccatggtagtagcagccatgaaaccagtttgattgctcgatgtcgtagagtgtatgcacacgctcatgattatcacatcaattctatttcaaataacagcgatggtgaaactttcatatcagctgatgatttgcgaataaatctttggaacctggaaattagcaatcaaagttttaatattgttgatgtaaagcctgcaaatatggaggatctgacagaggttataacatcagcagaatttcaccctacacattgtaatacgttggcatatagcagttcaaagcgctcgcgtccgcttgttgacttgcgacaatcagcattatgtgattctcatgctaaactatttgaggaacaggaagccccagggtccagatcatttttcacagagattattgcttctatctcagacataaaatttgggaaggatggaagatacatactaagtcgtgattacatgactttaaagttgtgggacattaatatggattcagggccccgttgcaactttccaggttcatgagtatttgagacccaagctttgtgatttatatgaaaatgattcaatcttcgataagttcgaatgttgtctaagtggtgatggattgcgcgtagcaactggttcttacagtaatctatttcgtgtgtttggttgtgcccctggaagtgctgaggctacaactctagaagccagtaaaaatccaatgagacgacaagttccaaccccttcaaggccttcgagatcactgggaaatagtataacacgtgttgtaagacggggagcagaagcccctggagtggatgctaatgggaattcttttgatttcacaacaaagttgctgcacttagcatggcatccaagtgagaattcaattgcttgtgctgctgcaaatagcttgtacatgtactatgcgtaaagagagatgattgaaggcgcaatgtgtatctgcatggtcacatcatattgctgtggagaaggcttcttcttttcccatcttaccaaccacactgggttggaggatacatatacactattaactctcacactacaagtgcccttcagagagcttttagaaaaaggatccagaagtggctgttttgaaattcctggattggcaggagaccttattttgttactggatgggcagcatctctttttttttcctcttcccctcctttcaatcctaatattctttccctctatttctgtatcttcttctgaaagagaaggtgcaatcaatgtttcaaattgtgtttggcttgcaagtgaagaagaaaatgtgattgtagctctcctacaacagatactaaaggatgtttcaatatctgccaccaggattcagattaaaaaatgtagtttttcttttctttttttgcccagatatttctgtgggatggagcagttgaaacctgcagtgcatcatttttttattgattaattttgtgttggaatttaatgtatttgctggtctgtggcctcccatcttacccacgttgaggctacatatacactattaactctcacactacaagtgcccttcagagagcttttagaaaaaggatccagaagtggctgttttcaaattactggataggcaggagaccttattttgttactggaaaggcagcatctctctcctttttttttttcctcttctcctttcaatcctaatattctttccctctatttctgtatcttcttctgaaagagaaggtgcaatcaatgtttcaaattgtgtttggcttgcaagtgaagaagaaaatgtgattgtagctctcctacaacagatactaaaggatgttcaatatctgccactaggattcagattaaaaaatgtagtttttctctctcttttttttgctcagatatatctgtgggatggagcagttgaaacctgcagtgcatcatttttttattgattaattttgtgttggaatttaatttgacatgtttc

SEQ ID NO: 88499 - DNA, 101 bp, Glycine max
  Clone ID: PAT_MRT3847_50922C.1
tctctctcttttccatatccatatatatccccaaaccctaccgttaagttccccaattcaacatccccgaaggccaggtgcgctagcttctttagttcagt

SEQ ID NO: 88500 - DNA, 247 bp, Glycine max
  unsure (1)..(247): unsure at all n locations
  Clone ID: PAT_MRT3847_50923C.1
cgcaaaaagggttaaaacctgatggttattgctatgaccctttgattgcngctttgtgcaaagagggtagagtggatttggctattgaggtattggatgtcatgatctccgacgggtgcgtgccggatattgtgaactataacaccatattggcttgtttatgtaagcnaaaaagagctgatgaggctccgagcatttttganaagttgggtgaagtggggtgtcaccgaatgctagttcctacaat

SEQ ID NO: 88501 - DNA, 266 bp, Glycine max
  Clone ID: PAT_MRT3847_50924C.1
cccaaaggaaaaaagggggggaaagcttttccattttcccaggagccccctgcataaaaaggttttttagttccctacattggacggcacccttaaagacaaaagccaactggcctccagggaataaacttttttaaacccggtccttcccgcattaaacgaaattccggcccccataaatccccccccaaggttaaagggggggcctttaggcgaatatcccgtttcagggggggggggccaaccaaccaagacggattcaaagg

SEQ ID NO: 88502 - DNA, 159 bp, Glycine max
  Clone ID: PAT_MRT3847_50925C.1
ccggtaaggccgggcgcgacccagccggccgggtgaggcacaccaacccgctgagataaggcacagcaataagcggaggaaaagaaagaccagggagggccctaggaacggcgagcgaaccggggaaagcccaccaggaaaagcgggcggccgcggcga

SEQ ID NO: 88503 - DNA, 1225 bp, Glycine max
  Clone ID: PAT_MRT3847_50926C.1
aattcggctcgagtatttatcttgaactctttcatttcaagtgtgtgagcattaacccctttggttttttgtgaggaataattaaaatctgtttcattttatcacaaagtgacattgattctctataccctatagtgcctcaacctcacaaaactaaaaggccaaagagaaattttgttcaattggggtgctagctataatgggtaacacatttggtgcgaagaaaaccacaaaggttatgaaaattgatggtgagacattcaaattgaagacaccagtgaaagttggggaagtgcttaaggatcaccctggtcttgttttgctagattctgaggcggttaaacactatggcgtgagagcaaagccattggaagcacacaaggatttgcagcctaagaggctgtattttcttgtggagcttccgaaggagacgacgccgcgaagggttcgttccggcatcaacatgagtgccaaggatcgcctagagagccttgtgctcactagaaggtctgcctctgatctttcaatcatgaaacaaagcagcaacaccgataataaggagaatagtaataatggtggtggtgtgaggttgaaaatgaggcttccaaaagcagaagtggagaaattgattcaaggttgcaaggatgaggctgaggctgctgagaggatcatgaacctttataaggccaatggaagcagagaaaatgagggtggaactaaggaaaatggtgaaaagatggtggtgttggaccaacaaagtgttaaggagagtacaaagaaaagggtgagttttatgccaatcaacgaaggaggaattgaagtagctgtggcttcataaccattttcattacattaaccatgaagccgaatattgaatccactgtgttgctgttagcttggggaatatgaatatcttactaaccaaaggagctttgcttacacatagttgaataagagttatgttatttgtacaatgcttagaatttcaactggttacaattttataggtgtttgtatattagttttcatagaactgaagaatatatatttagtaagaactagtagttgctcttttttagcagacacctgttgtgactaattgtaaatctatgtattgtatatgtagcattactcctagagtgatgatgtgtacatattttgaggatgatctcctcatcatatatatagagaagatactttatgcttttctcttaagagttcaaaa

SEQ ID NO: 88504 - DNA, 556 bp, Glycine max
  Clone ID: PAT_MRT3847_50927C.1
ggctcgaggaaggatcccaacctgcataagcggaggtcacgcttggggtcaacaagaaggaggacctgaaatgtaatcgaataatatggaaactagaaggaagttgaacgatcagagatgacaatagcaagcttcgacactagcccagacgggcgaacataaatataaaaaaaaaacaaaaaaaagacaaaaaataataaaaaacaaacaaaaaaagaaaccatagtaactcaaaagcaaagaaagcctatacttaggcaaccaataattgagttataagttgcttgcgagatgcagacaccactgttttgcttaacttcaatatagaaagccatctcctacagctttcgcagcagatttgagggacgaagcgctctatgaacttagacgcctacctgctccttcaaagtatcactttttaacttctagaagcagtcctccaatggaagatgaaagccagacagagtccggaaaatgagttagccaactactgcaagaagcttaggcttctggaacagaaagatccgctcggaaaggtcagactaaaaaagaactc

SEQ ID NO: 88505 - DNA, 298 bp, Glycine max
  Clone ID: PAT_MRT3847_50928C.1
actctctacggccaaaccctggcagccgaatcaaggcgccactgtcacccgaagagaactatcataggtctcccatttgagccaagaccctatacttctcggattaattcttcgaagggagtgttggctctgaagacgacccttcttataccggaagacccggcttcacagacgcggaggaaatggaggaaccccactgcccaccgggacttaaaacagaacgagactataatggttttgaggcccaacatgtccaaggatgaacgacttgcactcacccaaaagaacgaggaggagc

SEQ ID NO: 88506 - DNA, 463 bp, Glycine max
  Clone ID: PAT_MRT3847_50929C.1
ccgtatcttaattgctcgactcgacccactcgtccgcccacgcgtccgaaaagtaagagtctggataaatatgtaatttatatttttccgttcttgtcaaggataaaagagtaattttttataattctttatcttaaaaaggaaataatttcccactcataattttaaggctaatattgtaattttaacttttttgctctttttaaggataaaagtgtaattgtaaaattattattcatattataaccgtaataaaagaaaaattaaactcacgaaagtaaaatgctcacttcttatgtgagaaagtttttgtgggaaattaattaagaaaaaaaaataactaaatttttcaatctatgattctcaaaaaaaaaaaaaaaaaattctcctactaaacgttttcttatatagatcgttcaattttattatgtaactatacatgttaaatattatgtattaattt

SEQ ID NO: 88507 - DNA, 1177 bp, Glycine max
  Clone ID: PAT_MRT3847_5092C.1
ggaaaacataagagttcaagagtcaggatatgaggttggaaagtttgaaaaaatgaatagcaatctacctcctcctgatccttcttttgcaggagagtttgatccgagtacctttcaggtcataatgaatgacgatcttgaagagctgaaggaactgggttctggtacctttgggactgtgtatcatgggaaatggcgaggaacagatgttgccattaaaagaataaagaaaatctgcttcactggtcgatcatctgagcaagagagactgactgtagaattctggcgggaagctgaaattctttccaagcttcatcatccaaatgtggtggcattttatggtgtagtgcaggatggaccaggaggaacaatggctactgttgcagagtacatggtggatggttctcttaggcatgtattacttcgcaaggataggtatcttgatcgtcgcaagaggctgataattgcaatggatgcagcttttggaatggaatatttgcactcaaaaaatattgtgcattttgacttaaaatgtgacaatttgctggtgaacttgaaagatcctatacggccaatatgcaaggttggtgattttggcttatcaaaaattaaacgaaataccttggttactggtggtgtgcgtgggactctaccttggatggcaccagaactgctgaatggcagcagcaacaaggtctctgaaaaggttgatgtgttctcctttggcatagtattatgggaaattctgactggtgaggagccatatgctaatatgcactatggtgcaattataggtgggattgtaaataacacattaaggccaaccatcccaagtaactgtgatcatgaatggagaacactaatggaacaatgttgggcacccaatcctggagccagaccctccttcacagaaatcaccagtcgtttgcgcataatgtccgctgcagctagccaaaccaaaacacagggcaataaagcatctaaatgagttacacattgttatactgtcatcttggcatctcttaatggtgaaccaaggaagtaaattatacaagggtggttttatatacttaggtttttctttttccttaccataataattcaatactacactatgcaaaaattttgtataccaatgttttactacaagtgcaaaaaattgcttttcaatttctgt

SEQ ID NO: 88508 - DNA, 767 bp, Glycine max
  unsure (1)..(767): unsure at all n locations
  Clone ID: PAT_MRT3847_50930C.1
ggctcgagcaacaaccaaagcctcttacaagcttaggttgatctgcacattaaggcccttatcagattaatttctatcatggctcttcctcttcttccacctctttcttcaatcatcaacacccttttcttctttacactcttcttcccaaaatatgtttcgagtgatgttgaagggtactcagcatgtgaaccttttagctgtggtgaaatcgacattcgctacccattttggagtagtgatcaccaacaaagttattgtgggcatccaaagttcaagcttgattgccaacaagacaacgtgacaattgacatgatgtcgcagagattccatgttattgatattgatcaaacatctaaggttttgaagatggcaaggttggatttatgggatgacccttgtactgatgagtatagcaatgtcaagttggattctgatttcttcaactacaattccaatgatgatgactatactttgttatatgattgtggtcctcctgttacatatacgtctagtgtgaatattaaaggaacaatatcatttagttgccccatagatggtggttttcgagatgcattctttgtgtcaagtactgatgtgggtaatttgaaggatctggggtgcaagcatagcatcaatgtttctgttctaagagaggctgtgaaggatgctttgcaagtggaaaatgtnttagaaaaaggatttgaggtanggtggattggtgtggatgaaagacaatgtgatggttgcataaaaaccggtgggag

SEQ ID NO: 88509 - DNA, 1150 bp, Glycine max
  Clone ID: PAT_MRT3847_50931C.1
cccacgcgtccgcccacgcgtccgtgtctgagcacataagcacaatcttcgattccagccacttcatcgcacctggtggggtccacctccaccaccagcacatgctcctacctctctttttccaattcgaacaggaccttctttaatcgccacccattcgataccaccctctccctccggttccgattcaacggttctagaagatgcctcggcgggtccagatcgaagatcccaaatacgacgacgttcctgacgccgacgaaccggaggaaacgatccgtttcaaatcctccaacagcaacgtctccgacgaccaagaacccttcatgggcatcaaggttcgccgaaaagcctctctccacagagaccacaaaggagactacctcaacgtcccttcccaccctttcctaatcaaaattctacagaaacaaggggacaatgaggttctgtttgcggacagggttctgaagtttacgggctccgggaagatgaaacgctgcgttctgatgatcacggattctgcgatttacatcgttgaccctgaggtggacgcgctgaagcggagaatagtgcttgcggcggtggagagggtttgtctgagtgaactgagtgataattttttcgcggtgattgttccgtcggagtatgatttgctcatggctagtactcggaagacggagattgtcacggtgctggtcgaggctaccaaggccaagagtgcgacggggttcgaactcgatgtcgttttctccaatagatttgagtataacgcggcatctgacttggtgaaggaagttcaatttgaggaagttgaagggggtgtcaaaacaagaattttgaggaagtgaattatggtccaaaattttgatgaacttgtctgtaaactatgtaagagatacagagtctgatttttgagtggtattatggaatgtgttcttctggcaacaggttttccactcaaaaatgactttgtttataattatgatgtcagaaattttaagagaaaaagaaagatatgtctgatatatgtttaacttgaaaattgaaaagagattcatatgtactggacttgttgaatgtgattatatcagtttctcggatgaaaaaaagaacatttttgttaaaaaaaaaaaaactcgagactagttct

SEQ ID NO: 88510 - DNA, 289 bp, Glycine max
  Clone ID: PAT_MRT3847_50932C.1
gtcccgccatggtaatccaggacaaagattcccaccagatctgcctaagtttgtgatagctgaaaaagttaaaattaacttgaacacctcaaatttttaagaggctccctcatttaacttctagacaagcacctataaacttaacaaggcttgacactattgtcttagagaagtctcagtaggttttacaattggaaatcgcccataagctagaaaatagaaattagtccaagctgggccatattctagcatgtcctggacagtgtagtcaaaggaaccaaaacatatg

SEQ ID NO: 88511 - DNA, 1038 bp, Glycine max
  Clone ID: PAT_MRT3847_50933C.1
cgtccccgcctcctcctctttgtgaccctgcttgttctgttcccgtctgcttgtcgactcgctcctttccctgggtgttcgtttgacttctccgtcatgtcttgcttccacgaaacaaccgaagacaatgtcataagacttgtaacgggggttgtcatacaagttctgtgcagctatgtgacattgccatatgctctagtcacacagatgggttcaaccatgaggcccaccatcttcaatcagagagtagcatcagctctgaagaactggcacaacactgccaagaagcatgtaaaaaacagtaagcacaccacaccattctcaagcaggccatcaacccctcaatatggtatgtctccaactcatctgctacacaaacaccttgctggaagaagtgagagtgcacaaacttctccaagaacatccaactatgaaaatgaacagtggggtgttgaaggatcaccttccccgagccaccatgcagtagctgctgatgaaacccagatgcaagttttggagccaggctcaggctgctcaggttcagcaccagaattgcctattagctctcaacttgatatcagagttagttcatctgagttttcgtttgagaaaagacacattcctggaagtgattagatgtgtagatttagtttttagttaaccggttcaaatgtacagcttctgtacatatcaaagttccaaatgcatgcatgcatgcttttgctgcaatgcaaagccatgcatttgaagaatgaggcataatcttttttgatggagcacgatttgttgaatgaggagtgacactttgttgaaggcaaatttgctgttgaaatttcattatgtgtacatgaatgtgtacaacaacaaaatatgtttcccttccaaatgactaatgttaggtcatgtgttcaaagaactgttttaagtgagtgtttggatatgtgtatgtaaaattcattttgaattaatgcgattttttaattgattcttataaacttgatttgtagttaaaaaaaaaaaaaaaaaatttgatattat

SEQ ID NO: 88512 - DNA, 293 bp, Glycine max
  Clone ID: PAT_MRT3847_50934C.1
attttcatcttcgtcttaccatactggcgcgcgcctatgtctatacgcagattctacacgtcggcgggtgtgcgctgtatggattccccaggtgcagcaaaccctaagttgagtcagagtcactgttataggttctagggcctaatagggaatgggggagagagagtgcctgtggtgactgtagaacccggcaaaccgaagcgagccatgaatgcaacctagggaggagcaaaagctggtggaatatcacgggctgatacataggccattgatgttcttaagagaagagatcc

SEQ ID NO: 88513 - DNA, 277 bp, Glycine max
  unsure (1)..(277): unsure at all n locations
  Clone ID: PAT_MRT3847_50936C.1
gacccacccgtccgngacggcanancggacatctancatatnctttcactctttctttcactaccacananccagatccatgggcattctaaccaaccccacctcttcaacccatcccctaaacttcctcatctactgcctcacagacttaattggctacctcctcttctccctctgccatacccaatgcatctccttccattactgctcattccatctctaaaaccgagcctacctcgaaacctacatagccctcctcaaaccctcccacatcttc

SEQ ID NO: 88514 - DNA, 729 bp, Glycine max
  unsure (1)..(729): unsure at all n locations
  Clone ID: PAT_MRT3847_50937C.1
gggttggggagaaatcagctacagttattggtgccacttttcagtggtttttgagagatctaactggtatgcttggaggaatcttattcacattttaccagggatcaaatcttgatagcaatgcaaaaatgtggcgattggttgcagatcttatgaatgacctaggaatgctaatggacctcatttctccattgtttccatcagcttttgtatttgttgtttgcttaggaagcatatcaagatctttcactggtgttgcaagtggtgccactagagcagctttgactcagcattttgctcttcaggataatgctgcagatatatctgcaaaggaaggaagtcaagaaactgtggccacaatgattggcatggcactgggaatgcttgttgctcgccttaccattgggcacccactagccatttggttttcttttttatctttgaccgtgtttcatatgtatgcaaactaccgagctgttcggtgccttgcattgaactcattaaaccctgaaaggagctctattcttttgcagcatttcatggagactggccaagttctctcccctaaacaggtctcttctcaggagcatgttttacccatacagttcatttcatggagctcanagaaagctaattgtctgcataagaaagtatgtttaggcatgaggatttcttcattcgatnacatggaaatcaagnagcatttngctttgtgcagcaccttactac

SEQ ID NO: 88515 - DNA, 483 bp, Glycine max
  Clone ID: PAT_MRT3847_50938C.1
ttgctcgtgggcggacgcgtgggattcttcaatctctctcactcactcatattacacttccactcaccctgcagaacagccatgtcaacactgaaccacctctttgatcttccagaacagatatgctacgtacaatgtggattctgtacaacaatactaatggtgagcgttccatgcagcattttgtcaacagtggtgaccgtgagatgcggccactgcacaagcctcctctctgtcaacatgaagaaagcttccttggtccctttccaccttctagcttcccttactcatcttgagccaaaagaaggtgcttcagaagatggtgcaaacaagagtttgagcagctataatacatccacaatgaccaattcggattgtgaagaagagaacgtgacccaaatttccgatttcgtgcataaacctccagagaagagacaaagaacaccatctgcttataaccggttcatcaaagagagattaaag

SEQ ID NO: 88516 - DNA, 2072 bp, Glycine max
  Clone ID: PAT_MRT3847_50939C.1
gtgaggtccacgtagtagggctaagggcaaagaaaccaaactccacgcctcctcctttgaaagtaatcaatccatcatcgatcgatgccgttgcaacacccgtcactccaaagccgcgtgtcgttctagagcgaaacggcagcgtttcgagcaggtgattttattgcagtgcctcaactcgattagatcaactcacctggatgctgggtgggaacagaagagaaaaaccgaaatagaaacataaaaagtagctgccaatttcacgttctcattctccgaattaaaacctcattcctcaatccgcaagtttctcgtgacccttctcatcatcatcctcctcgtcgtcgtcgtcttcgtgccctaatcggttctcacgttgcgggtgcagatgattgatcgattgattgggctataaaacgctgccaccgaccatgatcaaccattcataatccaaaaagaaaaaaaaattcttgttgtgtggtgggttttttttttttttttggattgttttgttttttgcatttcccgatgacgtattacgagactgatggtggtggtcggagagaagaggtcgtgccggacgttaccctcacaatccaatccgatgatggcaatggggactatgtgaaactgagggccaacgccgacgacggttctcctccgggtgcggcggcggagctttctccgccgacgctaagagccgccgtgtggtattgggtgaaattggtggtgttgtttctattcctggggtttttggctgtggttgtgctcgtctgggtcggaccctatttcatagacaaggagattattccgattataaattgggagacagagactttcagtactccagtgttaactgttttggtgtttgcatctgtggcaatattcccaaccctacttttgccatctaccccttccatgtgggtggctggaatgacatttggttatggctttgggttcttgctaattatatctgcagcagctattggtgtatcactcccttttgtcatcggcaaactcttccaccataaaattgaagggtggctggagaagtatccgaaaaaagcttctattctaagatctgctggtggagggagctggtttcatcagttccgggctgttgcctttatcagaatttccccattcccatacttaatcttcaactattgtgctgtggcaacaaatgttaagtatgggccttatatagttgggtccttggtaggaatggtgccggaaatatttgttgcaatctatactggaatattgattcggacattagctgatgcttcatatgaaaagcattctctatctgccccacaaattattctcaatgtggcaggcttctgtataacggtggcgacaaccatctttttcacagcttatgctaggagacggcttgatgagttacaaagggaggaggatccattgttgcagtagtccagaaattttagtctggcttcgttcattgtttccttatatgaaattgcttttatgaggaaacattattccatgggaagagttgaccgtcaaatgtattataactagtgggatgggttgaccaaggaaaggatattggaggaacaagctaacatggccaacacctatttttagttcagcatttccattccttgtttccttatattgtttacagaaattgttttatttgttagcgcttctatctcatttatcattgtatatgaatgaaattcccgatttatatagcatttgaatccaatgcctcaatatttgttgacttgctacaggaaaaatgttttgtctgcatgaatttctttttctcagtttaacatttcattaactgggacagacaaataaatgcttttcgcatgagctactcaactcataccatactcggcaataatatgatggcattataaagggaacactttatttggggggacacatcgtggatatggtgaaggggcctcaccattagaagggtggggaatagctagagacaagattttggatataaataaatacgatatggtaatggtcatgtttggaacatattattggtgaattttacagttaatcatggtggaattttacgc

SEQ ID NO: 88517 - DNA, 1296 bp, Glycine max
  Clone ID: PAT_MRT3847_5093C.1
ctcgagccctctgataatataaccatgtaacgttcaaattctacgccaatctctgccgcacccgctttcctctttcttttttccttttccttagaagaatcgaaggtcccccgatagttataatataaccatgtaacgttcaaattctacgccaatctctgtctcattctctttcctctttcctttttccttagaagaatcgaaaacgtcttcaaaaaaccaagccattattaatggctgtcgattccttcttccagaaagaacatcaaattcgggagtttgtggacgggaatggaaacgtagctgtcggtttgaagttgcataataaaccaagtaatgatggccttaaccgacagtttcctctagagattccgccgattctatttgaagagacttcacttccagcaggattgcacggttcacatactaaagatgtttatagtatttcagtgttgcctgaggaagatgaaaatgcaaattgcgcttcaccactacctttcttgagcatcttaggggttcctaatcaagttaaaagcccaatgtgcttagatgatcccataaattgtcaaaactgcattgattttcaaatgaagaatgagggtgtgtattcccagtgcataattgatatccctagtgtcaatggaaactcagtttcacctgaatcctatgaagaggcagttgaaggttttaaaactgggaactcaccaacaagtgtactgtggagagaatcaagtttcaaagcggggaaacttatgcagagtctggtgaatgtgagcaatccaagagataaaccagtctctgagaagctacatgatttaccgagtaacagatggagaaaatataagcgtgctgcctcatttgattccagaaaagttgctcttctgttttcaatattgtcaagtttcggaacattggtattgatatatctgacattgagagtcaggcagagggctgatgggtttgctcttatttgaagttccaaaatctgacacctcctgtttttagatttccaagcttctctgtttgtttaatttaagcttaagaccattaactggaaatgtaccggacaaagacaattagatggagtgaagatgcaggagggaatgaacgttgtggagtggttgtgatattatttttgtcatccttcagagtcaattattgaagccagaaagacagaataaccgatctcattgtgtgaaaccaagattctgtctaatacaattgtatctatgtttatagttcaaaaaattctagaactttgtctgaattgaacagatctagatctacatttgttat

SEQ ID NO: 88518 - DNA, 1031 bp, Glycine max
  Clone ID: PAT_MRT3847_50940C.1
caggctcgagcgtaactgcgtgcactctctctctctctacaacaagaattcatctattcatttcagcccatcagcatggcgaaggagaagaaaaacttgtccaacaagaacaagaagccaagcaatgcagacgaggttcacttccgcggagtccggaagcgcccctggggccgctatgccgccgagatccgcgaccctggaaagaagacccgcgtctggctcggcaccttcgacaccgccgaggatgccgcccgcgcctacgacgtcgccgcccgaaacttccgtggccccaaagccaaaaccaacttccccttcctccccgacaacaacaccaacgttaacctcaacaagaagaacaacaacgttaacgttaaatctgacagtcccagccagagcagcaccgtggagtcctccaccccggagcgtgaattcacgcgccgcgccgcccccgccgcaatggatcgctttccgttcctacccatccagcagcaaatcctcgtgacccaccccgtcgcacccatgcgcccggtttactttctcgaccgggcccacttcatgacccagcccttcccactccgattcgaaccgggtccggtccagagcgactccgactcgtcctccgtcgtcgtcgattgccagcccaaaagagagctcaatctcgatcttaacttggctccacctaatgaatattaacctttttttttaatcttttaatttttcataaaaaagacagcagaaagaaaggaaaggactaaggagatttttttttctcttttttttttttttggaagattaatcttccattaaattgtcgtgtagattagataagatgttgttaattacatcctttgatgtaaataggttaatttttctgtttttttaggtccttgatagtattaacaaaggacatgatctgaaattgtctagatctggtataattttcatgtaacatcggaatatctgatgtaattctggctaatgttaattttctcttattacaataaaatctgctattctcgagacctcgtgcc

SEQ ID NO: 88519 - DNA, 349 bp, Glycine max
  Clone ID: PAT_MRT3847_50941C.1
gcttggacccccagtttatgatgcctacacaagctgggattggatcccagcagcaacatagattctggactgagacctggggggggcccgatgccaagcttacatgttcctatggattagcacgggcaacaggggcagctcccagggggccatcctggaacatgaactgtgtaacaaccacaacagactatgccaatgatgcacccacaaaggcttccaagggggcgtgcttatcaataccctcctggccgcaacatgcaagatgtgccacttcatggagcaagtggtgaaatgatgccagctccttatgacatgggagggctgccaatgcgggacgctgtgggacagc

SEQ ID NO: 88520 - DNA, 726 bp, Glycine max
  Clone ID: PAT_MRT3847_50942C.1
taataatcgtaatgactttgccattagttagtgttttttcttttttcatctttgcatctgacatgtattttatgttacacctgtaatccattattgcaggttacccatttcaaatgttggctggtttaaaaatagaaactaatttggttatttctgcagtggaattttgattcggacattggctgatgcttcacatgaaaagcattctctatctgccccacaaattattctcaacgtcgccggcttctgtataacggtggcgacaaccatctttttcacagcttatgctaggagacggcttgatgagttacaaagagaggaggagccattgttgcagtaagtccagaagttttagtctggcttcgttcgttgtttccttatatgaagcagttccttactatgggagtggttttatgaggaaacattattccattggaagagttgaccgtcaaatgtattgtaactagtgggaattggttgaccaaggaaaaggatattggaggaacaagctaacatgaccgaaacctatgtttagttcagcatttccattccttattccttatatatggttcacagaaattgttttatttgttagtgcttctatctcgtttatcattgtatatgaatgaaatgaaattcccggtttactatatagcattgatttgattccaatacctcaatatatgttgatttgccatagacgttcaattttacttgctacaaaaa

SEQ ID NO: 88521 - DNA, 304 bp, Glycine max
  Clone ID: PAT_MRT3847_50943C.1
gggtcaaaagcactatcaccttgcactcaatcaagaaaaacacaaacatagctgctcaattgagcatgggccaattctggaccttgaaatacaggacaaatactggctattttgcaaggatttaaagacctggtaaaacactagaacaacaagccaataattggggaaattaaataactttttttgactaaagatgctttcttgggcttaacactggggcagatccggggggggaggaatcactgactgggatgggccaactccattttctaccaaaaggggcggtcccagaccccaattcaaa

SEQ ID NO: 88522 - DNA, 408 bp, Glycine max
  Clone ID: PAT_MRT3847_50944C.1
cggctgcgagaagacgacagaaggggggagtggaggaactttaggtcagcgtcatccttatttttgtgcttgagctcaaacatcgcggatcaggtgattctactaaatttacagccaactccatatatgaatgagggccaatattgcacttgctcaatagggtctcaaatatgagtacaaagaagatgacttgaggaacaagattcctcttctcctccaaatgaacccggttcacaagaagattctggttctcatccacaatggcaaacccatttttgaatccctcattgctgttcaatacattgaggaggttttgaatgacacatattcctttttgccttctgacccttaccagatatctcatgctagattctgggcctgattattgttgataagaaaatatattat

SEQ ID NO: 88523 - DNA, 398 bp, Glycine max
  unsure (1)..(398): unsure at all n locations
  Clone ID: PAT_MRT3847_50945C.1
ccacgcgtcncctgcggtgctgttggcggagactccgcggggggaggggtcccacacctactactgcatctccctcaccttattatttattcttcgatgaagggctaaaaacatcatgacctctctatgcgttctctggctatgtctatccggaaaaaaacacccactgattataacttccctttctcatgggggggggggtcaataacctaaccgagaaatcccctagactaatacccgggcggaggaatctcctcgtgcaattaccatcaacactacttggttctactttactattaaccactgaggaagcgctaaaaaatttaaacggaaacctcactgcgtaatgggggggggaccaatctcatatactccccttcgcactggtacttctcatc

SEQ ID NO: 88524 - DNA, 801 bp, Glycine max
  Clone ID: PAT_MRT3847_50946C.1
gcttgctgcctgcgtaagtatatgcgctcatttgttcctgccatttatgatgtaacagtagccatccctaagagttcccctgctcctacaatgctaagactcttcaagggacaaccttcagtggtaaagcaatcaaaatcaagatttagaaataactctatcttaagtctccatcaattttttctctgcctatattatttgagtgtcattgaatattataatagaaagtagggagaataatgatattttttctcattagttcatcagaaacattacgaaatatagatggagaggagagaggaaaaaaaagtgataaagtttcctcaaacttatctcaacttatcatataacaaaactggaacataatgatagataaatacaatcttatcctgatcctaaggataaacagcagaaacataatgataaaacaaacagatttgcagatccaggaaattgattctaacaagggcagcatgtagatcgttacctgattgggctaaagagcaagaagggaggtttacagatggatttgaggactgtagaagtttcactagtgtgtctatttgttcctttgtgaatgaaaggtctccaggagaagattgctggccttggacttcacttatggctgtagaattttatggggttttttacttctccagcaagatgcccaagctttcctttttcttccactaccagcttcacagtttgtgcttactagataatttttgccattcaatttatgaatactgaattgaatggaaccagatcctgttgatgacaggacatcatctccagctgctg

SEQ ID NO: 88525 - DNA, 224 bp, Glycine max
  Clone ID: PAT_MRT3847_50947C.1
cacacttttaaagtgggtgaagagagagagctgtattcactggatgattaatatggcatggtcgacatgcttacatttgatggaggaggaggctgatcagaactattgactggggaaggcctggataggttactatcacaggcacgtgaaaggatgctatggttgaaatcatatacagcgtgatctgtctgtgagccagacatagtaccggattcgactataac

SEQ ID NO: 88526 - DNA, 257 bp, Glycine max
  Clone ID: PAT_MRT3847_50948C.1
ggcgacgaaggactgaagcttttagcatcagaggaagagggtgaaggagagagagagaaagtgagagaaagagacgaagacgttcaagacgacaacactcaagacgacaacgttaaccatgaatcctgatctcatgaggtcctaagcatgcgtcaaaaagaaatgtcgtaccatcaacttgcacgtgatactcggtcccattcgctcccattgccactcaagacaccgccgcactcactcgatctaatgcgtcacca

SEQ ID NO: 88527 - DNA, 353 bp, Glycine max
  Clone ID: PAT_MRT3847_50949C.1
tgaacttaccagtgtttatcaaaaggcgtgattaaagaacaattcccttggcatactgaggcccttacggacactaacagggatgaagagattgtgctagtataagtatctgatcagtggataccttggacacagggctatccaaattgggctggtcacacataggcgatactatccttttataaatcatgaaacaaggtgctggaatttgcagacaacaatctctaggcggaacaagcaattcaagccttactaaccataatagaaccgctcagatgagctacactatgattttttctaccagtgtggaaggccttactttaacaggagtgcccaacagcatctctatctaa

SEQ ID NO: 88528 - DNA, 303 bp, Glycine max
  unsure (1)..(303): unsure at all n locations
  Clone ID: PAT_MRT3847_5094C.1
gtccttattgccgggccagagcccgcaccgctacattggcacgaaacaaaaggccgacggaagccggacgaacccgggcnagccaccccgaacaacccggacagaggggaccacaccagccccggaaggncacagaaaaccggcgcgaaccgcagcagagccaaagcngcgcagagcacaacnccnaaacaaacacangaccangnggccgaacaccaaaggcgcaaacccaacgcaagaaaaaggcccccccaaacccgggggacgaccccccaaaaacgccagcgaagcagcggcagcaaa

SEQ ID NO: 88529 - DNA, 217 bp, Glycine max
  unsure (1)..(217): unsure at all n locations
  Clone ID: PAT_MRT3847_50950C.1
cggctcgagttgatttgcaccntacttatcgtattataggagtgattaaaatggtggccgcagctgttatttcctgataatacaggcatatcattggcctgtgctatgaatagtactttttgggggcgcgctagttctgatattcacaccatctgctctcatgactgccaattcgcggaatcctgctcgcacaatactaatgacttattgccattta

SEQ ID NO: 88530 - DNA, 1697 bp, Glycine max
  Clone ID: PAT_MRT3847_50951C.1
cccacgcgtccgcttttttccacacacacaacacaaatacctctctttctctctcttcttcgcattcttcggacatacaaaaactcacactctctctctctctcttcaaatcaaaacccctcacaaaattcacaacaacatacacacaaatcccaaatcctgtcttctcatataaaagaacccttctttcgaatccttcccgctctctctctctcttattctttttccctatccgattcaattcgcgcgcagttccaaaccctagtccccctctccgagctctgtgatttttgggttgataaaaaaaattagggtttgatggctgaccaaggattggaagggagccaaccagtggatctacagaagcatccttctgggatcgtctttaccctcccatcaaatcaaaccctttttaaacgctcaaatataaatttctggcaccaaatccttcccactctcctcaattctattcatctcaactcaacaatctctcagatccgtcaaacaaaaaataaaacatagaaaaccctagttctataaatatataaaggaaaaaactttttgctggttttgaggcatagcattaaattggattttgattattcatggctgaacaagcattggaaggtagccaacctgtggatttaacaaagcacccttctgggattgtgcctacccttcaaaatattgtgtcaacggtcaatttggactgtaagttggagcttaaatcaattgcacttcaagctcgaaatgcagaatacaatcccaagcgttttgctgctgttattatgaggatcagggaaccaaaaactactgcactcatttttgcatctggcaagatggtctgcactggagctaagagtgagcaacagtctaaattggcggcaaggaagtatgctagaattatccaaaagcttggtttcccagctaaatttaaggattttaagattcagaacattgttggctcttgtgatgtcaagttccccattcgacttgagggtcttgcctattcccatagtgctttctcaagttatgaaccagagctgtttcccggactaatctatcgcatgaagcaacccaagatagtcttgcttatatttgtctccggaaaaattgttctgacaggagccaaggttagagatgagacttacacagcttttgagaacatatatccagtgcttactgagttcaggaaaaaccaacaatgattactactgtcaagagagcaggagcaagacttgattgaactgtaaatatgaagaccagagatagaaatatctgtaatcaggattgagttttaataagacacctgtgtttgttctgtctttttctctcttttaagaaaagggatcctgctttagtaaagtggaagaaaaaaaaaaccgtgtattgaatttgactgtagaaaaagagatatataagaggcagaatgaaaagaaaaagtggaagcttgtgcaaatcatgaatatctttcactgaagtggaaactatttttggttcatttcaactatgagcaactttgttttttagttaatcaagttctaaagcttaaggatagtgtcttcgtatactgttcaaaacagcaacgacgtgtttaatacactatgttttatgaagctagcaacatctaggtattttaatttcatattggaatttgaagacgttatgataaataaaacactacatttgataactaa

SEQ ID NO: 88531 - DNA, 272 bp, Glycine max
  Clone ID: PAT_MRT3847_50952C.1
tatataacaacctagtctcgaaatgttacttatcttattccgatcctttatagtgcgtttgatagagatgaagtagagtaaaaatgaagaaaaaatttcaaaaattagtagtcccatacttttatcacactacttcaattcaaatatttcttctcaattccatttcactctaccaaccatgccattaatatttttaaccgtagaaatatacatgtcatcaagttgataacttcaatatacttgccatcccaaaaaagttggaccttattttt

SEQ ID NO: 88532 - DNA, 1836 bp, Glycine max
  Clone ID: PAT_MRT3847_50953C.1
ctcgagccgaaataagcagccttacaactcttcttaatcccatcaaatcgaaccctttttaaacgctcaaatacaaatttctggcaccaaatccttcccactctcctcaattccattcatttcaactcaacaatctctcagatccgtcaaacaaaatataaaagatagaaaaccctagttctgtaaatatataaaggaaaaaaggtctgatagatacccattgtcaataagatctaattcttcacacacggatttccccacaatttcttaacgattataacctgattgcgggaaaaaaaaattgcccttttgttgatttttttttgtcaaaaacaattttgtgtgtgtataaaaccatccgtgatctgggttcttttaaaaattggttcttttgtgtattttgttacttttgtaaggaaaattgagggttttggtactgatcactgtggaacatggtggttttcgttgatgggcagctttttgctggttttgaggcatagcattaaattggattttgattattcatggctgaacaagcattggaaggtagccaacctgtggatttaacaaagcacccttctgggattgtgcctacccttcaaaatattgtgtcaacggtcaatttggactgtaagttggagcttaaatcaattgcacttcaagctcgaaatgcagaatacaatcccaagcgttttgctgctgttattatgaggatcagggaaccaaaaactactgcactcatttttgcatctggcaagatggtctgtactggagccaagagtgagcaacagtctaaattggcggcaaggaagtatgctagaattattcaaaagcttggtttcccagctaaatttaaggattttaagattcagaacattgttggctcttgtgatgtcaagttccccattcgacttgagggtcttgcctattcccatggtgctttctcaagttatgaaccagagctgtttccaggactaatctatcgcatgaagcaacccaagatagtcttgcttatatttgtctctggaaaaattgttctgacaggagccaaggttagagatgagacttacacagcttttgagaacatatatccagtgcttactgagttcaggaaaaaccaacaatggtatggaagtggctctttttcaattgctataggatatacatgttgtaatccctgggctaggaatataatgaatcaatatcattgtctctattatttttttttctttgttcagctatcagaatataattgtgtcagatgtagggctgaggttttcctaattgaaatgacgaaattctttacgcagtttcttttctgggtcatatatttgtataagttctgaaatctgaataatgtaaaatgcgatttaactacaaaagtaaactgaaactttagtttggaggcactcagtgtgactagtagtgtgtcatgaagtttatcttgttagttctgatgtctttggaatatttgctattaatggcacagattactactgtcaagagagcaggagcaaggcttgattgaactgtaaatatgaagaccagagatagaaatatctgtaatctggattgagttttaataagacacctgtgtttgttctgtctttttctctcttttaagaaaagggatcctgctttagtaaagtggaagaaaaaaaaaaaccgtgtattgaatttgactgtagaaaaagagatttataagaggcagaatgaaaagaaaaagtggaagcctgtgcaaatcatgaataactttcactgaagtggaaactatttgtggttcatttcaactatgagtaactttgttttttggctaatcaaacactacatttgata

SEQ ID NO: 88533 - DNA, 310 bp, Glycine max
  Clone ID: PAT_MRT3847_50954C.1
gaatcgaagaaaacatttatttggattaaagatggggacagaccagcaacctctggggcagaccccacacacagcattattacaagaccagatccacatcacaattacattcactttgtatactgtttggcttccatgacatttatacatttgcatgtccttcacctataccagatattcatatgattgttaattgcttcaccaccacaacattaacattaataacaataataatgaatcaacaaaaacatgaaaaattgttccatgagcaaggggaaggtttctcttgtctttctttccggccgtaaaa

SEQ ID NO: 88534 - DNA, 577 bp, Glycine max
  Clone ID: PAT_MRT3847_50955C.1
ccgagcgtccgccctgatgctgtcccgtgtggtcgcacaggttgggccgggccttttaaaaattaacatttcttaaagagctgttgattttatttttagtcccgggtgtgggaacagagtttagttcttctcttcctaaactactctgggattcgagtttgaattttgtcgctttactggttacaacacttgtggtttagaaagaaaaaaaaaataaaaatttagtccttacatttagaaactactcatttagcgccagcacatacattttattttctagttttagtccccacaggtggtacatttttaagtcctgatgtccaaaattataggactaaaattaatattgtacaaatgaatataggaccaaaattatacacataatggtcctataattttggacatcagggtctagtgatcaaatgaatagtgaaactctgattctgattggagaattgcactaaaagtaatgaaagaatcctctggctctaagtattgtgctttttttatttgtgaggcattttgggtattgcattatgtggttatgctgtaatgcatgcaggctgcaagggatgct

SEQ ID NO: 88535 - DNA, 225 bp, Glycine max
  Clone ID: PAT_MRT3847_50956C.1
ggggtggttcattttatcctccaagggagaagaaaatctcgatagggaggaggacacacgtctcacggccccctacacaaaagtttccccgcatatcacaaagcgctgtcacactatttcccggaagggtttttgcgcgcgcatgtggtttttggtattctacacggcaaaacaagacgacgatcctgttgtattgggctggaggcatccttgggagggtcatca

SEQ ID NO: 88536 - DNA, 188 bp, Glycine max
  unsure (1)..(188): unsure at all n locations
  Clone ID: PAT_MRT3847_50957C.1
tttttatttntgattttgcaaaggacgcaaaaacaagcggtcatcacacaaaatctcaaacttcttcaactttaaaacatttgtttacgtccgtccatgtcaaaacccattccccatctcctcaataataatttnnnatttttcnnccaaattcaaagacctccccttaaaaattaacctaaacaaat

SEQ ID NO: 88537 - DNA, 295 bp, Glycine max
  Clone ID: PAT_MRT3847_50958C.1
ctctctctagaatactcataggggggctttttagataatgcatgggtctttacccggcatggcacctgcacaccatgggccaacaggcgttgcagcaggaccaggcagagcctactgtcggagaagaaacaaccctacataatgatgccgccgaaacatcaggcgccggatgctatgtgggacccatccgaccagcctacgatgcctcaccagcctgctagcgcctacgaggtccgaaccctatggatcggggatctgcaatactggatggacgagaactatatgtacacctgct

SEQ ID NO: 88538 - DNA, 457 bp, Glycine max
  unsure (1)..(457): unsure at all n locations
  Clone ID: PAT_MRT3847_50959C.1
gtggtttccgctcgcactttcgttcccattgtgccggcgttcgtggtttcctcttgcctgtggggtgctgttgcctgggcgccacgctgtgaccttgtgaagactgcttggtgtccgtctccgttctcggcctcgtttttgctctgcattgcctctgcctgtgtcctttctggggcctcgtcttgcgctttgtactctgtctcctgcttgcctgtttgcacctgctgttggcttcttcctgccgtcactgcctgttttgggtgcagatctattcactgattgacgcttgctgctctgtctcccataggtgtccacaaggcctccccccatggtgcccagcgtcctgattgagttggctttcattggtctggttgttcattcttttgttctttgatacgtgccagtctgtggttcttgacactttnccgcttgttggacatcatgattgtttttctcg

SEQ ID NO: 88539 - DNA, 370 bp, Glycine max
  Clone ID: PAT_MRT3847_5095C.1
gaaaggtggacatttttttttttgactttctaaaaagaagaaggggaaaaaccatgaacccttttttgattaaaagggggggggtcctaaacctagtttactataaaaactctgctaaaccatacaaacttttttttaataaaaatagggggtttatttaaacacatctccttataaaaacatgtttaaacacatacacaatcccacaacttttattaaataaaaacccttacattttgggggaagtggtaatcacccccaggggttaatggaaacattttcatttaggtggggaagaaggggttgaaaaaaggttatggaaaaaaagaaagcctacaggtggctccggtatggaaaaaaccgcatttgg

SEQ ID NO: 88540 - DNA, 385 bp, Glycine max
  Clone ID: PAT_MRT3847_50960C.1
gactgtttttcatggcaaaaaaaattcaccatgttgttaaacggaaggtagcagatatcgtacatagaaggaaaaaaacttctatgtagatgttcattttctgactaaaattggtcagacaatgtgaacacaagaaacttcatcctaatcataggagcaagaatttgtcactgaatccaggttctaggttgtttcctaatacgagataaagttttatttatttattttttgctaggcaatacgaggtagtttcctaattaagattaataaatatagcataatacttgccttgtttccagtacctttgttcccacgctcactctagaattttttacctctcacacttcaccttcttcttctttattccttgctcttcaatggcttc

SEQ ID NO: 88541 - DNA, 188 bp, Glycine max
  Clone ID: PAT_MRT3847_50961C.1
ttttttttttttttttttttatatatttatgggatattgatttagaaaatgaattggaaagggtagaacatcagggaccacgcaagaaaaaagagaaatgaactggggtttatttattaacccctccggtaaatctgatgatggaacaatttttggattattaacccgttggctctgtttatgatggg

SEQ ID NO: 88542 - DNA, 194 bp, Glycine max
  Clone ID: PAT_MRT3847_50962C.1
cttattctgtctagatgcatgtaagacgtggaaagccctatgacgctatcatgttgatcagacaaatgagcctataaaggagcattgtggaaaattagatgaaggcctagaacctgctaatcattgactaccttggctggaatgagtaccagattgctaagagggtgtcactgaaggtgcagaaagcttgatat

SEQ ID NO: 88543 - DNA, 357 bp, Glycine max
  Clone ID: PAT_MRT3847_50963C.1
ggctcgaggaggacaacactaacatgcattgatttaaacaacttctcagctagcccaatttgatggatcagtattaccaccgtcatatctgccaatgtctgaatcacttgctgaccctccggcaacattttgcggatataattgccagaaaccgtcgcaagaccgaccaatagttggcggaggaagtgtgagccttgtgacaaaggctgttccaccttggacataaatatgaccaagtggttgccatggatgctttcaatactgacaggcgactggagggggaattaaccactgcagttagtagaaggaatagctgattcttggaactatcgttggagatttgaggaggcacgatta

SEQ ID NO: 88544 - DNA, 493 bp, Glycine max
  Clone ID: PAT_MRT3847_50964C.1
gacaaaaaaaataaaaggaacatatgaaggcaatgtcaatccatcgagcttttccatggctgcatatatgcaagattataacctagtggacaaaagtttgcattgagttgccaatctcctcatatcatatatatatttccattggacaatggacaactggtttatatgattgctttgatgacactggaaattgtaagctcttgtccgaattcaccgtgtcgtgtatatatgatgtatcacaaaattatgttgcattctaatttgagcttaattaatttgtatccactgtagaaagttttccattactgtcaaacaattagatatcatgattgacatgacttttaagttattgtaaacttatcaaatagtcattggatgatgtgtgcgtatactaactattttctctatttttttagatatactattttctcttgttttcgggcatttacataggattgataacttgctatgagataataaacttccaaaatta

SEQ ID NO: 88545 - DNA, 371 bp, Glycine max
  Clone ID: PAT_MRT3847_50965C.1
attatggtgaatagccatgaatagtattcccttgttcctgcatgcaaattcatatgaattgaaatctattacaaattgagtagtggatcacaatcattgatgtacaaggcaggcctcaagtacgatccatccatgtattcaaaatttgtgagatttaaaaaataaaataaaatacaagtaggaaggctaagttaattgtgctagtctgggagcatcaaatcattgatatatcaacaaaatgaaaataaaataaaaacagtgtatacataacaaataaataagaatggtactttgttagaaaacaaaacaagtttaataatagctcacaaaccactatttttattacgtctcatcactggaaccaatagaga

SEQ ID NO: 88546 - DNA, 573 bp, Glycine max
  Clone ID: PAT_MRT3847_50966C.1
tacggctgcgagaacgacgacagaagggattgagtatcttcacacgggttgtgttcctgcagtcatccatcgagacttaaaaagcagcaacattcttcttgacatacaaatgagagccaaggtttcagattttggactctcaaaacttgctgtggatggagcctcccatgtttctagcatagttcgtgggacagtaggatatttggatcctgagtactatatttccagcagcttactgacaagagtgatatttatagttttggcgtaattcttcttgaactcatatctggtcaagaagcaatatctaatgacagctttggtgctaattgccgaaacatagtccagtgggcaaaattacacattgagagtggagatatacaaggaattattgatcctgtgctacaaaacaattatgacctacaatcaatgtggaaaatagcagagaaagcattgatgtgtgttcaaccacatggacatatgcggccatcaatttcagaagttctgaaggagatccaagatgcaattgcgatcgagagagaggctgaaagcaattcagatgagccaagcaattcg

SEQ ID NO: 88547 - DNA, 236 bp, Glycine max
  Clone ID: PAT_MRT3847_50967C.1
ggttcagcgtcgcctgaatcagttaccatttgactgttgtttgtatcgaatcggacggcgaagattgcatcgcgacgtattatgcagcagagtgatcaaacggtgttgagcctgctgcctcgattcgactcctcctcttcgtcctctgcttcccctgcttttggctccttttccgctgatcttcctctcatgcgtccccaagctggagctccctctcccttctctatcaaagctgg

SEQ ID NO: 88548 - DNA, 410 bp, Glycine max
  Clone ID: PAT_MRT3847_50968C.1
ggttattatgtgttatactgaaaatcacaaaataggaaaaataagaatataatttattgtgttatactgaaaatcacaaaatattatgttattatgtgagaagcaaatgtcctgctcttatgtagccttttatgtatgagttgccttggaaatttagatttgtggtttcattagggtaaatagtctatgtttgtttttttctgaaaaagtctgtgctggcagtaggggaatgattactcttgaattgttagtttttttaattttgagaggcagaggatgggttaaccattaccaatatttgattaaaaaatctttttcttttcaaatgaagttcacgaaaccatagttcttagtctgagctactaaaattcttaatgcattgaccagtatataaatccttagttgattga

SEQ ID NO: 88549 - DNA, 3101 bp, Glycine max
  Clone ID: PAT_MRT3847_50969C.1
tctgactcactcacgcacgcagtactctcttttcttctcactccgcagaagagagagaaatatccaatacctagcgttagcgtactctctcccaatcccaatcctttttttctctctatctatctattcatccctttctcttcttcttctattccctcttctccttccgcttctcctctttatcgctgttgtggttcagcgtcgcctgaatccgttaccatttgtttgttgtttgtatcgaatcggacggcgaagattgcatcgcgaggtattatgcagcagagtgatcaaacggtgttgagcttgaggcccggtggtggaagaggcagcaggctcctcgctcctcgattcgactcctcctcttcgtcctctgcttcccctgcttttggctccttttccgctgatcttcctctcctgcgtccccacgctggagctccctctcccttctctatcaaagctggagatgctcggtttgagggccgtgagcgtgtgcgatacacaagggaacagcttttacagcttaaagagggtgttgagatcctcgatgatgttttaaagatcaaacaagatattgaagctgaactttttggtgaagatcaaagttgggcccgcccagaaaacaaccccacacagcaatttcaaaatcgatatactgagccagataatcgtgactggcgtggaagatctggccaactttctggtaatgcagatgagaggtcttgggataatctcaaggagaatagggagtttggcaatactagtaatcgtcaagaccaactgaactctcagtttgcaaggacacaaatctcttctaaccaagggggaggacctactccgacactagtcaaggctgaggtgccatggtcagctagaaggggaactctctctgacaaggatcgcgtcttaaagacagttaaaggaatactaaataagttgactccggagaaatttgatctcctgaagggtcagttgatcgattctggcattacatcagccgacatattgaagggagttatttcgctgatatttgataaggcagtgctggaaccaacattttgccccatgtatgctcagctgtgttctgatcttaatgaaaagctgcctccattcccatctgacgagcctggtgggaaagaaatcacttttaagcgagtactcttgaatatctgccaggaggcttttgaaggtgcagataaactgagggaagaactgagacagatgactgcccctgaccaggagatggagcgacgggacaaggaaaggcttgtcaagattcgaacccttggaaatatccgtttaattggtgagctgttgaagcaaaaaatggttcccgaaaagattgttcatcacattgttcaggagcttttaggacctccagacatcaaggtctgtccagctgaggaaaatgttgaagccatatgtcagtttttcaacactattggtaagcagcttgatgaaagcccaaaatcacggcgcataaatgatatgtactttatccggttgaaagaattgagcaccaatccccaacttgcaccacggctgcggtttatggttcgtgatgttctagatttgcgttctaataactggattccaagacgtgaagaggtgaaagccaaaaccatcactgaaattcattcagaggcagaaaaaaatcttggattgcgtccaggtgccactgcaagtatgagaaataaccgtgtagtttcaggcgctctaggaaataccagtccaggaggattcccaattgctcgacctggtacaggtggtttgatgccagggatgccagggaccaggaggatgcctgggatgcctggaattgataatgacaactgggagatgcctaagacaagatcaatgccgagaggagacatgtcaggcatgcaaactggaggacatagccagtctccctttctttccaagacatccactgttaactctaggttactacctcaaggtagtggtggtattataagtgggagaagcagtgccctggtgcatggagctggtgctccttctgctgctcggccaccaaaccttggttttagtgctgaacccacacctcaaatcccttcacctgttaaagctgtttctgccatacccgctgagaagccacaacctccagctgcaaaattgaattttgatgaacttcagcgtaaaactgtttctcttctggaagaatatttcaatgtccggcttttggacgaggcattacagtgtgtggaggaactaaaagctccagcttattaccctgagtttgtcaaggaagctatttcccttgctctagataaaagtccgccatgcgctgaacctgttgccaatctttttgaatatctgttcattaagaagattctttcagccagagacatagggactgggtgcatgttatttgcttctctgctggatgatatcggcatagatttacctaaagcaccaaataattttggtgagataatagggaaactagttttggctgggggtttggattttaaggtggtgacagaaatccttaagaaggtggaggatgaccggttccagaaagcaatattttcttctgcgttgcaggtaattacctctgcatctgggcaagctgtgctggatgcacaagcatctgatattgaggcctgccagagtctgttcaactgaatcagatgagagtttgcatgagaataccgatctctgtaactgaaagaacatctctgccttgtttcacaactttcaaattccctatcctttacgctcgcactttttagagcattttgtattacagtatgttataaaagtgggagcttccagtatcaggtattttctcgagttgtataattttcttttgtcttgttttgatgtcgtagagtttgtttaatgagggaaaagtcaaaaccataaagctacggattttgttttccagttggctaatccatgtgccaagagagtggcccatccacccgggggtccaaatgttttttgtacttcatttctttcatttttttccctttattttctcgacagagtaattgttaacctggtcagttcataaatattgtcaagagatagaacaatcaaaaacacttaaaacaaccacaaaaaaaatgggggcccccctt

SEQ ID NO: 88550 - DNA, 584 bp, Glycine max
  Clone ID: PAT_MRT3847_5096C.1
ttttttttttttttttttttttttttttttttttttttttttttttttttttttttttaggaaaatgatgaatcttgtcaaatattttttcctgggtaacgaaaaccagaaccgccccctcatcaaaaaaggaacaaaccaccattcggggaaaaaaagaaggggggggttaacggagggaattttcactctggccgggaccccccgacccaggcgtaaacaaaacggggggggaaaaaaaataaaatcccctaaaaaaaagggggtaataaaaaaatcccaaaaagcccggaggtaaaaataacgaggggggcccaaacccccaggggggggggttggagaaaaacccggggaaacaaaaaaaaatttattggaaacccctttaaaacctcctaacttataaaaaaaaacctttcaaaaaaacgtaccaaaaaaaaccttttaacctttttttttgggggaggagactttaaagctaacccaaaaaaattccccaataagccttccaaaaattttttaaaaaaaaaacccaattaaattttcggggaaccaagggaaagggcaaccgggaaaattttccaccc

SEQ ID NO: 88551 - DNA, 823 bp, Glycine max
  unsure (1)..(823): unsure at all n locations
  Clone ID: PAT_MRT3847_50970C.1
tgcatgcctgcagctatattccttcagatatctttcagcagaaaatcgagactctggttctaactgaatcatgtgtaatatcatcttacggattccaagatctggtatctgcatcccatagagaatacaatatttaaaatattaaaaactgagtcatgaaaatgggtagggattatccctactgatgggactacgggattaccaaacaagactaatgcacacacacaaaaaaaattactttttcaagatgctgacttggatcatattgccctctgcgataagcaagaagctgagacagttcaaatagtggctgcccctcaaggaaaagttcagcaactacacacctgaagatgcaaaatgatatttgcaacttagaaaataaagaacaaaagcataacacaaaaaaaagtattttagaagattatataactacagcattgcatcagttactgcttcaacaaaatatatcctagagagttcaggttcaacataaatttatacagaaatcaagtcaatagcagactaaaacatcagtatctcaccataaatacagcagtacaatgccttgcagatcaattattttgtccaccacttagtcagttaattaaattgcgcaaaaatattcgtatttgcagcctaaaatatggatggtttaaagactaaaacatcttcaaaattaagattcttgcagcaaagaatgctcacccgacagcaaatatatccatatagggttttaaggggggtgntcttgtgccacctgcatctncccttcatgttcataaaatctctgacacgccacagccccaaacaaaaaatgaatgaa

SEQ ID NO: 88552 - DNA, 153 bp, Glycine max
  Clone ID: PAT_MRT3847_50971C.1
caccctcctttgggctgtgggctatggacgaactccctctgctggctcaagctaggaagctcttcctgaccgatccaatcataggagccctttgacttcatgatctcctgaggccacatctgggataggctgtgctcgcgcacacaccacccg

SEQ ID NO: 88553 - DNA, 278 bp, Glycine max
  Clone ID: PAT_MRT3847_50972C.1
ctcacatatcgtccttggatcccggtctttcccaaccatcccttaacccaccggaggttccaatacaatgcgagctgagcctagggttagacctattgccttcactgatcttgaattccggatacggcaagagaaactgcacgatctatcggcgcaaaaatcgttccctgatcggacaccttaatgccacagtattacatagaggttgaataaggacggatcagggcccaacgggactgcgagactcatcacttcttgcagatacgatgaacagcgat

SEQ ID NO: 88554 - DNA, 472 bp, Glycine max
  unsure (1)..(472): unsure at all n locations
  Clone ID: PAT_MRT3847_50973C.1
gccgctgggaaaaaaaaaaaaacacacaaaaattaataannaaaaaaattaataaatagtgttntttttttttttatttttttactttaacaatgtattttnnaaatgtaaagaaaaaggagaaaggtgaaagaataaatttngttaaccataccatgcactaaacattactaatgcgcacaattnaactnagcaaataatatattgaaatttcttagagtcacaataccccaggaaatgatattccgccatatttggtatctagggaatggcacaccaaaaactggctgcacacaatattctncacccaaaactgtatgctttttaaaatggttgggngaaaaaataatgntncttgaaaccccccgtcgtctaaaaggaactcgtcgacaannnatctcccgtttccattccacatcaaacaaattctttaaaaacaaatcttttctttctnctttttttccaaaatttt

SEQ ID NO: 88555 - DNA, 342 bp, Glycine max
  Clone ID: PAT_MRT3847_50974C.1
caaattaaccaacataattcgtatcaaaaaacatggccaaaaatttttataatagtaaaaaagcaaaaggacccaacattttttttttttttgggcggatttcttacttaaaactaactcttttttcttcttcttttcccccttaaaacaggttttctttaggggggtgggtatatgggggagtaattggcacacagggtttgaaaggctataaaagttcattgggagcccaattagggggagtttgcagcctcgaaaaattttggccactttttagcttcttttccaggaccttccccctcaacagagttaacttcatatactgggttttcagggacttca

SEQ ID NO: 88556 - DNA, 402 bp, Glycine max
  Clone ID: PAT_MRT3847_50975C.1
cttccaaaaagtaagtcattagtcatataaggttaagatactatgtttgctttgagatttaattataagaacgagacttgattaacatgcatgtactaagcttgagaagtattaatatgaagaataacagcttttgaaataggattcgcacataagaaatagtcttaccaagaggatagttgctaattgattataagcatacaagattgaaaatgcatttagaatatcaaagtgcagtaacataaaaaaaaaattatgtgatcagaagcatattagaatgtgagttttggccatggggtaatttaataaactcagaagctacacatgatcaaaaagtttgtcgaaagatgctaaacaaaacctaaaaaacgtgatactgatgtgtgcattgttcgtaagcat

SEQ ID NO: 88557 - DNA, 380 bp, Glycine max
  unsure (1)..(380): unsure at all n locations
  Clone ID: PAT_MRT3847_50976C.1
ggttcttcttttccatcctannnntttcttcctctctggggctgctgggggcttttttcttctncattnttgctctcttctagcttcttcttncnccctttntgcttcctcttgtcctttcctttccctttctttctccatcctagcggtntcttcctctntttnaacagcctcttacttttttcttagccattcttgctctcttctagcttcntnttcccccctttctgcttcctcttctcctttcctttgcctttttttctccatcctagctttttcttcctctattggagctgcttgttccttttttcttctccattcttgatctcttagagcttcctcttcctccctttttggatccccctctcctttcctttccc

SEQ ID NO: 88558 - DNA, 2443 bp, Glycine max
  unsure (1)..(2443): unsure at all n locations
  Clone ID: PAT_MRT3847_50977C.1
cgcatgcacgcaatccgggtcgagcttgagccgcgcgagcactaacttgtcactattttgagtatttgccacagggaaattggatgaaaagaagtatctctaatttttactgctgtattggaccaaagggttggtatcatgttccantatatctcttagaaccatatacacaatctcattaagcccgttgtttaaacttcccacgcgtccggacgtcaataacattcatcaatgtgttgtgtacacactgcacaccaccccatcccatgtgactctctgccccttccttcatcaatcatagtttctctgtgttttgttccgctaaatctccaaagcaatcaagcagagttctttaattagatgcaacctcagcacgagggttaacagattccgaccgtctcaatgaatgttgtgatttgtggtactgttgactccttctttttggttggacttagagtccaaaatggcggtgctggggtgagttgagttgaagtgaggcacctactttgcagtctgagtttgtgttgtctagtcttttttttttctttttcaaacatacaataatgaaggccttttccttcagtggggtttggattttattgtttctgagctcggtttcagctttttctccaactgggtcgattcggcatcccgtcaagtttatcataggagaagaagaggagaatttgggttcatggaagagtgaattcacacaagtggctccagcaccagggcctaaaggtgacgatgttcttattctggcggcaaacaagaccaataggcctgacattctgcgaggattccgacgttatcgaggtggttgggatattgcagatcagcattattgggcttcagttggattcactggtgcagctggtttcattcttgctgtcctgtggtttatctcatttggcttggcgctcatgattcatctatgctttggatggggaattaacatcaagggcaaaggatcaaatcattcacagaggatttgtcttatacttcttatatcattcacttttgctgccgcgactggatgtatcctcctttctgcgcaggataaattccatgcaagccttggataccctccattattttcaatcagtctgattatacacagactctaagaaatgtcacagagtatctctcccttgcacgcgtccgcaatgtcacccggattcttcttccatctgatgtcatggatggtattgacaagctgaatgtggatctaaattcttcagcagacacactttccgagaagacaaatgaaaattcagttaaaattcgaagagtattcaatgatgtgcgtctagctctgtatgttgtggcagctgtgatgcttcttctggctcttgttggacttgtcctgtctgtccttggatatcaacatgcaatcctcatatttgttatcaccggatggttactggttgcaaccacattcgttctttgtggagtattcataattcttaataacgcaatttctgatacctgtgtggctatgggagaatgggtagcaaatccacacactgaatctgcactaagtaatgtcctcccatgtgttgatcagagaaccacaaacaaaacactctttcagagtaaacaagtgatcaacaatattgcgaatgttgtcaatacgttcatctatgcaactgcaaacataaatgtaacacaaggtagtcctggctcttacaatcagtctgggcctagaatgccgactttatgctacccttttgactctcaatttcaagagcgtcaatgtacagatcaagaagtttcttctgccaatgcttcaatggtttggaagaactatgaatgtgaggtatctgaatctggcatttgcaccacagttggcagggtgacccccgagatttacttgcagatagtagctgcggtgaatgaaatctatgcattagaacattacactccacctttacttagccttcagaattgcaattttgtcagggatgcgtttacaaaaatcacttcaagctactgtcctccattaaaccattacctcaagattatcaatgtaggactcggcctcatttcagttggtgttctactctgccttgttctctggatactctatgcaaaccgcccccgaaggagggaagtgtttgagaagtcatccttaccagaaaccaccacaaatttaccgttgtcaaatgcaaatagtgaaatatagattgtacaataaaaaaaatagttgataaagtagagttccttattgttttacaattccctactatattacgggaagaaacaaaggtggagcgaagctgcatctttgagtttgaagagaatagccaaagctagtgtactacaacttttttccatataaagaaagagcattttaaattgtttttagcctttaaaaaaaaaaaaaaaaaaaaagggcggcagagaaagtgagctagcgaccgggaattatcaagaccggtcc

SEQ ID NO: 88559 - DNA, 393 bp, Glycine max
  Clone ID: PAT_MRT3847_50978C.1
aggtaaatatgattcaatgaaggctcttttcatcatttttcaacctaaaagaaaaagaaaaaaaatgctatctttctgggtgctaatccttacctagtgaaaaggttcatgtgggtaccatgtagcccattcatcttggagatatttcacccttttttttcatttttattttctccctaacctttttttcttcttttctttatgggactcgtataattggtggctttttatcactgaaattgaagatattgggggctcatgagtggctgcttgaacctgaaggtcccttggggattctgggtctggaggttggtgttggggaaattgccagagggaccctgatatttctttaacgggtataataacatgttggcctcatgatccctgtttgga

SEQ ID NO: 88560 - DNA, 307 bp, Glycine max
  unsure (1)..(307): unsure at all n locations
  Clone ID: PAT_MRT3847_50979C.1
cggaatttcccgnnggtcgacccaacagcgtccgctccaacgcgtctcagtgaaattatttataacattgttgattagccatgagatgggggacacggttttgaattgggagttgcagctttcgctacactggnntagtttaggtgaggaggtgggatagggcattacggcagattcttttatcacacgaccttcagcttagaacttgttacccaatggtttagtgtgggcctcagtgaaatctttgttattgtgccgatatctgnngcgccgaaatagatgaatggaacgttatttgttgtgttta

SEQ ID NO: 88561 - DNA, 138 bp, Glycine max
  unsure (1)..(138): unsure at all n locations
  Clone ID: PAT_MRT3847_5097C.1
agggcccgaagtttttggatnagggttttngaacgaaccgtngncgttgcganctccttttggaaagggtggntaatttcaatgcttccnctgacnaggatcgccacctncaggtaaaaaattnaaggccccccctga

SEQ ID NO: 88562 - DNA, 193 bp, Glycine max
  Clone ID: PAT_MRT3847_50980C.1
tttttgctgccaaattgacctgattataatggattcatcgtaaaactaaagaggtgagctattgcactatgacacattatatactaaggtgcttagatacccttacttcaatatacacatgcatggacggtactatatcaacgttatgtgcaaagcgtcacacatgtgcaacctataatattagcaagtccaa

SEQ ID NO: 88563 - DNA, 306 bp, Glycine max
  Clone ID: PAT_MRT3847_50981C.1
accaaaaaaaaaattttttcctggaggttttgggaaaaacatgaataagctaatcgggaaatttctaagttttggccttttaaaacccccctttgaaagtttttctttctggccaagattggttttctggttcacggttctataatggcccccacaaatcccgttaaattatgggccccaaaggtcccgctgcaattgcaagcccttcaaggaacctgattacttcgcttgtatcacccaaatagttttcggcccttcttggtttttggccaacagggcgtgccaaccccttttgttttttggggg

SEQ ID NO: 88564 - DNA, 292 bp, Glycine max
  Clone ID: PAT_MRT3847_50982C.1
aaggcccaaccagaccctaacttaattggggagattaaaggacccaaaattgacaccttcaacctgaaattctttttttcagaccccaattaccaggaaacctgtttcaaccgtttaaaatataaggaaattttgaatttcaaagaatagaccactttttatcacatcaaaccctaaatcctctgctgttcctccttcctttaaatgataaggttcaggggacttttaacaacgtcgggggcagcgaaccgttcacgtcgccgaaatccgaacacttaaccggacgcgtggg

SEQ ID NO: 88565 - DNA, 524 bp, Glycine max
  Clone ID: PAT_MRT3847_50983C.1
cccacgggaccgacctcgcgtatgccgggcatcgagaagcgacagaaggggttttcatcactataatatgtaggttgggaccggttaatgaaaaactagggtcagttaattaattgacttggatatttgatgcttttccaaatgtgtttgactgttgaggtaccgacgaacaatgaattcacttggatcacagtctcagttctaccctcccaagcacactttgcggaaatgatgacagcagatgaaagcactgcttttggtaccagttggacgtggcaagctcatagatggatctacacaatagcaaccaccaaagattgggtggctactttgcaagctaccaagacacaaaagtggctggtggtgcgatctatgcctttgctcaatgtgttgaaactctcacgcaagaaacctgttcggactgtttggcaattgcacagagtggcatacaagattgtatttcaaagacaattggtcggggagtcatcctccagtgtgctttatgagatactcggaaaaccttt

SEQ ID NO: 88566 - DNA, 225 bp, Glycine max
  Clone ID: PAT_MRT3847_50984C.1
actagctttgtgaaacttcttttgcaggctgttctgggtacaattgcgattattcttggtgtgacaaagggagtagatgattggtaatcttcatgccaagagttgtaaagtttgctagaccagtgcatgtaaagttaatcagttgctggaaattatgtctgagttcggtttatgtattcattgaaaactgctaccatgtctaatatgtattgtttgatttattac

SEQ ID NO: 88567 - DNA, 360 bp, Glycine max
  unsure (1)..(360): unsure at all n locations
  Clone ID: PAT_MRT3847_50985C.1
aagaagagaagaatggtggtatgaatatgattaatgattatgaagctcagctcatagaaagcattttggaaacgaaacctgttctcactagacactgactaacaatggcggctgaggctcagcttcctgaccacttcaagtgtccgatttccctgcaaatcatgtccgaccccgtcatcctctcttccggccacaccttcgaccgctcctccatccagcgctggctggacgccggccaccgcacttgcccaattaccaaaactgcccttcctgcacactctctcctcatncccaaccacgcccttcgaagcctaatcttcaactacgcccccatcaacccttaacaacaccaccaccccc

SEQ ID NO: 88568 - DNA, 268 bp, Glycine max
  Clone ID: PAT_MRT3847_50986C.1
agtttcatctgctgaggaagtgtcagcacctgatgcccaatctgatattccatctggcgtgtcgctatcagaacttcattcaaaaatatcatcagtcctttaattcaagggcaaaggatgctgatctaaaacagatttctaaagaatataaaacccttccttgaaaaggctatatccacttcaagccatacatctgtatctgccattcaccatgagatcaatccttctaatactacttgtgataaccatggtattactgaaaatcctg

SEQ ID NO: 88569 - DNA, 240 bp, Glycine max
  Clone ID: PAT_MRT3847_50987C.1
aaatcagttcgtggttacattgtggatgcaaatctgagcgttctcaacttggttattgtaaaaaaaggagagaaggatattcctggactgactgatactacagtgcctcgccgcctgggccccaaaagagctagcagaatccgcaaacttttcaatctctctaaagaagatgatgtccgccagtatgttgtaagacagcccttaaataaagaaggtaagaaacctaggaccaaagcaccc

SEQ ID NO: 88570 - DNA, 347 bp, Glycine max
  Clone ID: PAT_MRT3847_50988C.1
tccacaccttcaaaagacaacaaatactttcacttttttactacaactgactcacactactgggaatgttcacctatcatcttgaggatatctttccaataacactaactataactcacctaatcctttatgcccttctcatttccaacatccaaacatatcttcatactctcaccattactatcaccttacactaaatcacaacgcattaatcatatcattttatgcaccatctcttacttccacaagatcttataaagctattgatacattatgaccaatataagttactggcaactcatcctttaaatgaagaaaatttaattcaaaatctaccaaatgatctt

SEQ ID NO: 88571 - DNA, 402 bp, Glycine max
  Clone ID: PAT_MRT3847_50989C.1
atgcaatggttcatggtaggtcagggtctacaataccaaggggccttggcattggcgtcaagttgacaaccattaacagtatgtgttcatataggctcaatactggtattataagatctagcctcttgggcaccattcctcagtccatttaacagcaaactgtttggaatcaaatggcaacagtgagaacaccattgaactttgactctatcacgcagagctattgtcagctttatattgaccttctcagtggaggaatcttagtggacaaaactggagattggatcacacttatacaaaattctacaattagtaacttgatgagagatgctgcttggaacaaaggctgtttaatggtcaagattgtgatgtctgtgcatgcaacaatcaatacgagtgatt

SEQ ID NO: 88572 - DNA, 247 bp, Glycine max
  Clone ID: PAT_MRT3847_5098C.1
ataagctcgaatactcggatcaggacacacatcttttggtggcgtcacaaatccgtgagtggtctggaatcaatacattcgcaccagctacccagagtaagctgcttgaactcctgggaagtcttaaacaagagaatgtgaactccttgcagtacacttgtgctgggacaacgacgtgctggaaaatcttcaactgtgaagtctatcgttggggaaagcatggtttcgattagtactttccagtcgg

SEQ ID NO: 88573 - DNA, 678 bp, Glycine max
  Clone ID: PAT_MRT3847_50990C.1
ccacgcgtccgggaattggtgattgaagaaatggcagatgcagcgaagggtacctacagagcctcaagatggtcccttaacggaatgactgctcttgtgaccggtggaactcgtggaattgggcatgccatagtggaggacttatgtgggtttggtgccactgtccacacttgttccagaaaccaagctgaattggataagtgtttgacagaatggcgtagcaaaggttttttggtttctgggtctgtgtgtgatgtctcatctcaaccccacagagagaagttcattcaggaagtcacttccatcttcaatggcaagcttaacatctatgtgaacaatgttggagtaaactataggaagcccacaattgagtacactgctgaagtatattcacaaattatggcagtcaatttagactctgcttaccatctgtgccaacttgcatatcctcttctgaaagcatctggaatgggaagcattgtgttcatttcatctattgctggagtggtcagcttaagtactggatctgtctatgcagcatgtaaagctgcaaccaatcagcttacgaaatatcttgcttgtgaatgggctaaagacaacataaggagcaattgtgttgttcctgccactaccaatacaccacttgttgaacatctgcttcgcaacaagaagtatgta

SEQ ID NO: 88574 - DNA, 669 bp, Glycine max
  unsure (1)..(669): unsure at all n locations
  Clone ID: PAT_MRT3847_50991C.1
gaggaactggaaaaactcaacttggggtgcgttgtgatcagcgttggcaaaaagggtaactcgtttttcactcacagtataaataagaaacacccttttgtgaaagttgatagctttatcgaaattggtgggtttcctaccgcaaaggaggctcaggttatcgccgatgatgttttttcactgtttgttagtgaggaggttgataaggttgagcttgtgtacgctaagtttgtttcattggttaggtttgagcctgtgattcagaatttgttgcctttgggagaggtttgtgatgtgaaagatgagatttttaggttgagtagtaaagagggtaagttagctgtggagagggatgttgtgaagttgaaaaaagagggtgagatgtgttttcctctcatggagtttgagcaggatcctgttatgattcttgatgccatgttgcctctttatttgaatagtcaggttttgaggggtttgcaggagtctatggccagtgagcttgctgctaggatggtggccatgtcaaatgccacggataacgcagttgatttgagcaagaagctttcggttgagtacaatcgggaacggcaggcaaagatcaccggnggagtntgttggagattgtggctggagcttgagcattancagaaaatgactgatgagtgggac

SEQ ID NO: 88575 - DNA, 417 bp, Glycine max
  Clone ID: PAT_MRT3847_50992C.1
ggaattccgggtcgacccacgcgtccggaaaatctcactagaaggaaaaacacacttattttagattcgagtccgcaagtaccacaagatgggagttatgttaacttcgacagacaatttttacaccttgaatgcccacttataagcaaccgatccgacaactctttgctgaatcttcaccccttgctataaaaaaaaatcatcaaaaccaaacaactggctacaacacgaatagtacttaaatttgctaactgatatctaaaaaccgtgtcgatacactgctacctcgttgttacgtacaccactacaaggaatcatccttaacacaatggatacttggatcctcaaacaaatactgtctccatagtcactggtcacccttatctccattaaaacactaacagctcacccatccat

SEQ ID NO: 88576 - DNA, 213 bp, Glycine max
  unsure (1)..(213): unsure at all n locations
  Clone ID: PAT_MRT3847_50993C.1
gtggtgtgaccttcttntatccttntgnttttttngtgtgcaattaacacanacacacacaaaaatnatggcatgccaagattggccagagccagtgattcgagtcnaagccttggctganagtggcntanccacnattccctgaacgtttcatnaagnccnangtccnaaagacncacnantnataacanctnngctccaagggttnatttc

SEQ ID NO: 88577 - DNA, 653 bp, Glycine max
  unsure (1)..(653): unsure at all n locations
  Clone ID: PAT_MRT3847_50994C.1
attcccggngtcgacccacgcgtccgcactgactgagacactcattccctggtagttgtggtatacattgagcatgtagacttaaaagtccccttgtttttagttactagacgggattaagaggtgcttttgttgcacccacccggattttgatctgaacccagcacagctattgttgatgccattaactctataaggaactctgcttggcgaaacgtgctggcagacacgcagctgaactatcaagtgttccgcaacaatgggtgtgctggacgaggtagccgcctattgacaggaacttaaagcctattttatgatgcgttgttgtaaatgagtgctacatcggcgaatgctaacgatgattacttcgcattgggctggatagtgcaggtcatttcaactgtgtggttaaggattcccattgagatggctcacgctgctcgagatagatacatcgaagttgatgagatcatacatgcagcgacaaggatcgattactcgccagcacacacaccaaatggtgagcctccgaaggtatgatactgaaccaccagtcctactgcatggccggaggccctacactgagagcaagaacaacggccagcgatgctgtctacaaccgtgcatatatccactgctctggttacccagat

SEQ ID NO: 88578 - DNA, 265 bp, Glycine max
  unsure (1)..(265): unsure at all n locations
  Clone ID: PAT_MRT3847_50995C.1
gtttctctntctctntctctgtctgcttcttcactttctctcgtttcantcganaaaaatcatgggcagaaaattctcgtcggtggcaactggaaatgcaatgggaccactgaggaggtgaagaagattgtngnnacttaaattgaagccnaaatccccttggggaaatgttgtagannttgttgtgagccctccttttgtgttccttcctntgtaaaaagtttgctgcgccctgattnccagtctcgggcccanaatggtggng

SEQ ID NO: 88579 - DNA, 208 bp, Glycine max
  unsure (1)..(208): unsure at all n locations
  Clone ID: PAT_MRT3847_50996C.1
gtacgangaagtngtctanatgtgnnncatananggnatattanatggnncancanttagagtggagtgataatcngcttcactctaagtggtggtanatgtaatattccgngtatggtgcacatgtagacngnttcatcgtaagttgtttcagagtaataagantctgtgcattgatntaaaaanaaatntaaanaaaaaaaaacgg

SEQ ID NO: 88580 - DNA, 390 bp, Glycine max
  Clone ID: PAT_MRT3847_50997C.1
ccacttacaacaaggctgtgttaactagtgtgaagggattggaacatgcaaaattttggtggttctcttcataggacagcactatacgagcatagttatagggcgtcatagtcgctaacatcttaagagattcataaatcactctgatgactatgtttcacataccgaatttgctcatcaacttgagtaagaggtgcttatgtgcttcacaaactcactatcgttctattacatcaaccacgactttttgaatcacattatgtatgacatgctcaagtatgagaactctctcaagtgtgacgactctcatgagaccacttgtcaaatctccaccatctaggtaccatgaagatgctcaagatatgataactgacaaacatgggagaagga

SEQ ID NO: 88581 - DNA, 302 bp, Glycine max
  Clone ID: PAT_MRT3847_50998C.1
aaaaaggaagctgaagtcatagaagagaacaaagaagtggaagtgacggaacagaacaatgaaattgaagtaacagaagagaagaaggaagctgaagtcatacaagagaagaaggaattggaagtgaccgaagacaagaacgaaattgaagtagcagaagagaagaaggtagcagaagtgacacaacagaagaaggaaggggaagtgacggaacagacgaaggaagttgaagtgacggaagagaagaaggaaccggaagtgatactagaatagaagaatgaagttgaactgacggaagagaa

SEQ ID NO: 88582 - DNA, 156 bp, Glycine max
  Clone ID: PAT_MRT3847_50999C.1
ggtttatagtatttgtttgtacacaagtcgcaactactaaaatgggtgcgatccacatggaagaaaaagatgggctgccggcgactacagagctagcagacccggtgagctatgaacagaccggttccggcagggcgactcagcttgatatataca

SEQ ID NO: 88583 - DNA, 466 bp, Glycine max
  Clone ID: PAT_MRT3847_5099C.1
gtcgttcaaatatgatatgaacggtgctgggtcacattctttagaagattttcctgacaaagaagatcaagaaagacccagaatgattgatgccagattgagacaaagaatggatgctcaatacaggtgaggttcaggctcagatggaaacaaacttgtttaaattggctcttgatgatgttgaaactcctaaaggttgcatgtcggatcttaaaattacatcaatctaaaattgcacttgccaaaaacacagttggaggaaccattctgcgtagagatctattggcaaatcatatgacagagggcatttatagagcaagtgttgattggcagcgcactcatcgtattaaaggaatgattaaaatggtggccacagtgggtattcctgagaatacaggtatatcacaggcctgtgctatgaatagttcctttagggggcgtgcccagtctgatgtttacaccatct

SEQ ID NO: 88584 - DNA, 149 bp, Glycine max
  Clone ID: PAT_MRT3847_509C.1
gcaaatccaaataacggcaatattattattattccacttgaaacaaaaattatacagagacaagaatgagaagaagaagaagaaacgaattacttcagagtcttacttggccttgacttcaaccgcagatttgccagcgatgatgacag

SEQ ID NO: 88585 - DNA, 1437 bp, Glycine max
  Clone ID: PAT_MRT3847_50C.1
cggctcgagcggctcgagtacggctgcgagaagacgacaatctcccatgccacatatttcttcagcacttatagtgtggtgagagagaaattaaggaagatagcttaattgagctaatcaactatggctacccttattgctccaaaccactaatcgccggttgaagatgttgaggctctacataaggctttcaaaggatgggggactgatgagaagaccgttatagcaatattgggtcacagaaatgttcatcagaggcaacaaatcagaaaggtttatgaggaaatttaccaagaggacctcatcaaacgcctagagtctgagctctctggtgactttgagagagctgtgtaccgttggatgctggaacctgcagatcgtgatgctgttttggccaatgttgccatcaagaatggcagcaaaggttaccacgtgattgtggaaattgcttgtgtgctttcagctgaagaggtcttggcagtgaagcgtgcctatcacaaccgttacaagagatctttggaagaagatgtagctactaataccactggtgacattcgccagctgttggttgggttggtgaccgcatataggtatggtggagatgagatcaatgcaaaattggccaaaactgaagctgatattcttcatgaatctatcaaggagaaaaagggcaaccatgaagaagccatcaggatccttactacaaggagcaagacccaacttctggcaactttcaaccgctacagagatgaccatggcgcttctataactaagaaattgttggataatgcatccactgactttcagaaggcattgcacactgctattagatgtatcaatgaccacaaaaagtactatgaaaaggttctgcgcaacgctctaaaaaatgttggaactgatgaggatgcactgacccgtgtggtggtctcaagggctgagaaggacctcagggacatcaaagagctatattataagagaaatagtgttcaccttgaggatgcagtggccaaggaaatctcaggggactacaagaaattcatcctcactctgttggggaaggaagattgaagtgattgctctagccaaggacatgtctttagtttgcttatgttggattcgtgtgctgtgatttggttaatttccctattttgagtgtgttttttatgagttctgtatctttgttgtgagagtgtgtacttctgttttaaattactgttgttgatatttgattagtataataaactttaaatatgttggtgatatttgattagtataataactttaaatatgtaattaaggtctggttttcttataatagtcttttaaaatttcctaatctgatatgtaattagctgaatgatgtgatgtgatgcatataatcgatttcacttaaagaagtaagattttattattaaaaaaaaaaaaaaaaaaaaaaaa

SEQ ID NO: 88586 - DNA, 246 bp, Glycine max
  Clone ID: PAT_MRT3847_51000C.1
ttacgagtaaatcaatctctgtgctgtccacagacttcttgaatcaattatgttcccactcttagtatatttgctgaacactctactaacggatataggacttattgaaacatttaatcttcttattgatttttttatcagttctttgaataattatatgttcaagctggagataacttggattattactcccactttcctatttggtacaggaattcgaggttatgacattcctatttataatct

SEQ ID NO: 88587 - DNA, 447 bp, Glycine max
  Clone ID: PAT_MRT3847_51001C.1
agcaaagtattttccaccagtccccaaaagcgaaagcgatcttccagtgaacaaccgggcggttgtcgccgacaatggcggccacgccaccccctccgtctttctcgcttcattcaaacaaaccctctcactctcactctctgcttcgcctctcttccaacgaaaacagaacctttttctctttcaattcgaatctgaggtgcgagatcaaaggcttcgagagccaccgtggctggaccatcgagcgcgtctccgacatgagcaaagactccgccaattctcacatcaccaacccttcttctcccttcctctctgtctcctctgtcacctccgcttcccaattccccaccaaaaatgccaaaagagtcgtgcttttctactgccccgagaccaaggttctcgccgagaaaatcgccgcgcaaactgattccattgaacttcgtaaca

SEQ ID NO: 88588 - DNA, 632 bp, Glycine max
  Clone ID: PAT_MRT3847_51002C.1
acagaaaaaaaaaagggaaaacaaatgtattaatcactaatcagatttttcatcttcgagcagcatgggtgaaatcgccatttgtatcgaaatcaaattctccataaacccgtgtttaacctaacactaaaatggctcgctgcggatgaccagtaattcctatttatcagtattgggatgcaaagtggatagagtcattcgtcggaggtctacaccattaacatgcctcaaatgactccagtaataaatctgtttaaaagtatctaactgatacacaaaagatggcctgcataaataagttctctcgaactcctggtttcaattgattgctgtgatcttcaaactcaacggcagaacccctaacctctttttacaggcctttgaacgtaggatttgttgggatcttctgtcttcagcttcggtggccgaatttctcctttcttattcttctttccacccttcataaaatctctccaactggataccctcttttctcgtgttccttcccattcctcctcatgttcacgctttcttttccacatttctttctgttcctcttcatccctttttaatctgccttcctcctcagatatcctcatttgcatttttcttctcctcaattcttgtcggta

SEQ ID NO: 88589 - DNA, 514 bp, Glycine max
  Clone ID: PAT_MRT3847_51003C.1
taagtatggtgttctgagcttgcgtttgtctgtttattctcgaccatttactccatacctaatccatactcattgagtgatttaactcaacaaaacttcgaatagcccatctcaaaagctgtctcatgaccagttgcaccctgctcaggaagtgagctatcttacaacttgacctcccttgagcaggacctttaccacatatccgaagccctcaagtgcacgattcacaccctgtacaactccacacttgtactctctccagcttctgaaccacctcgaaatctctctagacgccactctacagatcgctgtccgaacgcttgacacgcgccgaaccgctaatctcatgaggcctcctccatgacgctgactacacctccccctactgcgaggtgcatgacaacgacgacctaaggctgaagctcaagtccttgtgactacagatggacccgttctgcttattcggcttcttcatcgccaagaagattgagctcgacggactacgcgccgacat

SEQ ID NO: 88590 - DNA, 653 bp, Glycine max
  unsure (1)..(653): unsure at all n locations
  Clone ID: PAT_MRT3847_51004C.1
aaaagggaaaacaaatgttttaatcactaatcagatttttcatcttcgagcagcatgggtgaaatcgccatttgtatcgaaatcaaattctccataaacccgggtttaacctaacactgaaatggctcgctgcggatgaccagtaattcctatttatcagttttgggatgcaaaggggatagagtcattcgtcggaggtctacaccattaacatgcctcaaatgactccagtaataaatctgtttaaaagtatctaactggtacacaaaagatggcctgcataaataagttctctcgaactcctggtttcaattgattgctgggatcttcaaactcaacggcagaacccctaacctctttttacaggcctttgaacgtaggatttgttgggatcttctgtcttcagcttcggtggccgaatttctcctttcttattctgcggacatacaaaatgggggatttttttacttaagcaactattatccttgggtaacttacaatgtcaaacgcantagttaaggtcatgaaaatcagtaagcttagcatttaaccttcttttcccccttcataaaatctctccaactggataccctccttttctcggtggtccttcccattcctcctcatggtcaccgctttcttttgcacatttt

SEQ ID NO: 88591 - DNA, 1280 bp, Glycine max
  Clone ID: PAT_MRT3847_51005C.1
caaagggaattaagaatgataatcaagacacattcaatactaaactaatacagctggtgtactctattcattatacccctgaactgaatttataggactgcaactgttcacggaacataaaatttacatatcatacacagaacaaagaatagagcatgatataccactctttttaagttatccagagaacagcttcacaattatggtgataacgttgaagagaataaggggaagtctcaagaattgacaggcatatataagccctattacttgccctttaagagaattcctctgtggtcctgtcatttctgccaatgtccatcctcttcgagcaaggaaccggtcctcattcaaaattgccaatgcatttgcaaagagcagaaaaccttctagcaatgtccagaaccccatcttctgccacaaacacaaagggttagtcacaccttaaaagattttgtggaaaaatgaagaaagcaaattgtttaaacagaaacacattcactttctttggggttgtgcatcttagtattcagaggaaagcttcttcataagtttcactttacttttcacacaagaatcagttatagaaattcaaatatcaatagtgtatgaaatgcacaagcaaattctaaggtcattattatcaatagaggctgtctttctacctggtttgaactgcatacagggccaatgctttgactccatgggatattgatcaataaagccaaaaccaaagttatccaagtaaatcagagtgcaaggaatgcaaacccaaactagggtgacattctacacagaattgacaattgtatgtaaaattctggaggaaaaacgaagagattttatcaagatgttcctgccctctgcaatcttctatgtaccttcaaatatcagattgcaataaatttcatacattttgcctatcctgactagactggctaaatggggatgcaaacccaaactaatttaacatatgttcattttacaaagaactcagaaaaagtctaaataaaatgcaagctgtttttcttggctcggttgggtgtctcgcagcttccaaagtttgtttggagcaataattacagtggttttaatagtatccataccgaaattcacaaaaaaaataatagaacaatcaattttcatatgaacaaatctaagcaacttaaccaaatcatggagaacaataaggatcccagacaacagaacaccaatcctcatggaaaaaaaatcattatagtgaatttttttcctccaaagtgttaaaatcacagggaagg

SEQ ID NO: 88592 - DNA, 772 bp, Glycine max
  Clone ID: PAT_MRT3847_51006C.1
cagctggtgtactctattcattatacccctgaactgaatttataggactgcaactgttcacggaacataaaatttacatatcatacacagaacaaagaatagagcatgatataccactctttttaagttatccagagaacagcttcacaattacgctaatcaagacagaggacacattcaataaaaaaactaatacaactggtgtactctgttcattatgcctctgaattgaatttgtagaattgcaactgttcacgaacataaaatttacatatcatacacagaacaaagcataaagcatgataccactctttttaagctatccagagaacagcttcacaattatggtgataacattgaagagaataaggggaagtctcaagaattgacaggcatatataagccctattacttgccctttaagagaattcctttgtggtcctgtcatttctgccaatgtccatcctcttcgagcaaggaaccggtcctcattcaaaattgccaatgcatttgcaaagagcagaaaaccttctagcagagtccagaaccccatcttcagatttgaactgcatacagggccaatgctttgactccttgggatattgatcaatgaagccaaaacctatgttctccaagtaaatcagagtgcaaggaatgcaaacccaaactagggtgacattctacacagaattgacaagaaggaaaaaacaacgacctgcgaggtctcgagtctgaaaacccgctattaagaaagaaatctgaagacccggaa

SEQ ID NO: 88593 - DNA, 493 bp, Glycine max
  Clone ID: PAT_MRT3847_51007C.1
agccctaaacctatctttcttctctctctgtgtgtgcgcatcaacggcaaccagaagcagccatggccactgcaaggactgtgaaggatgtttcacctcatgagttcgttaaggcgtactcctctcacctcaagcgatccggcaagatggagctgccagagtggactgatattgtgaaaactgcaagatttaaggagttggctccttatgatcctgactggtactatgtcagagctggtgagtttctttcttttttctttgggtgtgtgtgagtgttttccttgtgtgttgcctggttacttgtccattttttttctggaatgtgtgaaaaattggatctacgaaggaaccctttgtaattttttcttgttgaaatttgcaatgatatgttgttgtgttttgtgtgcttaattcaattttgaactacctcagcttccatggcaagaaagatctacttgagaggaggacttggtgttggtgcctttcagaggat

SEQ ID NO: 88594 - DNA, 405 bp, Glycine max
  Clone ID: PAT_MRT3847_51008C.1
acttttcccagaaggaaaaacaatcaagacaaatgtggcttacaaaatacaaacagtacagtcaatacttcatctttggtcttcaactccgtttatctcttgaaaatcacacattacatattatatagaatggaacagtgtatttcaccatccactatggagaaccacacgcatgcataacttttatggggtctgtcaacacacaaattaacaaacttagtgaaaccaaggcttctttattcatctgactgaattgttaccataatctgttcttaccggaatattagagttcggacacgggctcgtcctttgtaaaacattagacttaatcaacaggtcttgaagaacactctaacctcctaatctttatcatatttccaggcgaacccaaatggtcagggggca

SEQ ID NO: 88595 - DNA, 362 bp, Glycine max
  unsure (1)..(362): unsure at all n locations
  Clone ID: PAT_MRT3847_51009C.1
aagcttggaacccgtgagcgtccggttccaccctgtttttataaaccccccgccgagaaaagggagaaagcgacttttaagcnaaggtggggtaaaaccgcacagagangggaaaccgaagcccaaaacaacagagagcacagaggcacgaagcacaaaacgcacgcagccgccaagaacagggcaccaacgacccagagaccaagaacaaccccaaccccaaagaggaggccaacaaagccacaggccaaggggaaagcaagggcgaagccagcagggacaccaaacagcaagccggagagccgcaccaccaggcatagcccagcagnggcccccccgcaggcggaaggagccaaaacaaa

SEQ ID NO: 88596 - DNA, 1666 bp, Glycine max
  Clone ID: PAT_MRT3847_5100C.1
atcagttggcaggaaggagttattacagatcagaacaagaaagataaaacattaactgttcacttccctggtatgtacattatttgattaaaattaatctataatatatagtgtgcttacaattgtatagaaccagccccttcgaaaagcattatctaattggtttactgcagtcagtggaaaaacaaaacttgtcagagcttggcatctacgtccatcccgtttttggaaggatgggaaatggattgagtatcccaaggttggagccggtgacagttctacccatgagggtgatacacctcatgaaaaacgacctaagttaggtagtcctgcagtagaggtaaaagggaaagacaggattccaaaaggtactaatgccgtggagtcggcaaatcctggcgagttgaggttacttgacttgactgaaaatgatagagtgttcaatattggttagtacagccccacgcgtccgaaatctgatgcccacagaatggtgaggactggtcttcaaaaagaaggatcaagagtgatttttggtgttcctaaacctgggaagaaaagaaaatttatggaagtaagcaagcattatgttgcagatgggacaagcaagatcaatgatggaactgattcagtcaagctttcaaatttcttgatacctcaaggtactggatcacgtgggtggaaaaatagttcaaaaaatgataccaaggaaaaactaggagctgactccaggcccacctttaagtctggaaagtcgcagagtgttttgggtagagtggtcccaccaaaagaaaacccattatcaaactctcgtactaatgatttgacaagtcatgcagaaaggatcaaggattcatcaagtcattttaagaatgtatctcagagtgaaaatcaggtggaaagagcattgtattctggaagcactggagctggggccggaccaatcttgttttcatcacttgcgtcttcggctgatgctcatcccactaaaagagcatcctcatcaagagcaagtaaagggaaacttgcgcctgcccatattaaatcaggtaaaggtgagatggaaaaggctttaaatgacaatcccatgaaatcagcatccgacgtggttgagccccggagatccaatcgcaggatccagccaacatcaagactattagaaggattgcagagctctttgatcatctcaaagattccttcggtttcccataatcgtaatactaagagttaaatggaagggagcttgcaatgatgcggtacagttaaaagaccggcctgttatttagatgaccgacatacctagcatagatgtgtatatttataatagagaaccaacctaggaatggaatggaaattcttgcttcctatgttttaggcggactatagttcagtagacggtcggtcatattgattttttagtatttatttaaatttgaatgtgatttgatccgtaggctgtgctgtatatcgatattctccatgttaccttggtggtagaggtttgtttgttcttcaaatgataacataacgggatgctctacatgccaattgctgcattcattggctgtcggctagtaccttctcttccagttcgcgcatatttcataccctatccagagtcagcgttatttatgagaaacgaatgggaagtttcattttttcagtg

SEQ ID NO: 88597 - DNA, 324 bp, Glycine max
  Clone ID: PAT_MRT3847_51010C.1
ggctcgagctctgtcttgatcagaaactaacgctatcgtgaccatgtcttccatcggtctacacggtacctcacatgctcaacaatactcaggaaggagcgggaggagcggtctctgacaggaccgaactagggaacagacacgacgaggcggaggatgacgaatagtacgggaacgacgattgcatgcccggaagcgccccggcagcatgatcagagccacgagagggcaagacactgttaatgagactggatggtgaagttgccatctcacttcactgtggcggaataggtatacattacacgtaatcagtgggacgctcaa

SEQ ID NO: 88598 - DNA, 337 bp, Glycine max
  Clone ID: PAT_MRT3847_51011C.1
aatgataaatgaaaaagttacacatccgcccattagaaaaaaaaagataccctggtctctgagagtacaaaatatgcctaagggtgacttcacacggttttccaaaacaaaatgatgctctcgtgggggcaggggaataactttcttttggttggtggctcttggcaccaagcaattaattcctaattgtcaaatcttactcaccgtgggacaggtgacacgtcctttgttgcttgaagcggaaacctccttaagaaccaactgcttacgcacccaagttccatgctctaggggatatgtgacggaacacccaacctacttagacctgaactaccct

SEQ ID NO: 88599 - DNA, 249 bp, Glycine max
  Clone ID: PAT_MRT3847_51012C.1
gggaaaaggaaaattaatacgggtttgtttacgaaactgcattctattacttgtggggttcataatcatggggtgggggaaactaaatgcaaagactgtaattcactgcataggagtgcgatacaaaaagttccagttcattcatataggaagcgctttaaggagcttttctccctttacaccgaacaggactttaaagcacataaaggtgttaattttgacaatgaaattcactcttgatggaaaata

SEQ ID NO: 88600 - DNA, 239 bp, Glycine max
  unsure (1)..(239): unsure at all n locations
  Clone ID: PAT_MRT3847_51013C.1
gagaatggagctgtgcattggaactttcanaagtttcttntttcnaccctttnttcntcttcaaaacctcttnttctcgtggtaatgncaacgctaaaaacacncttcaaattcaattgccctaaantctcatctttccccccttcatattcacctcttccaancctttntntntgtcananttnttctcccttcacantctcagntgttntgttcntnttcttcttnttcagtggagt

SEQ ID NO: 88601 - DNA, 317 bp, Glycine max
  Clone ID: PAT_MRT3847_51014C.1
tcctctagagcggccgcccttgggttgttttattttattttttgtttgttaacaggagtacaacacatagcttattaagaccatgcttttgtatttttttttcacagaaagtacgaattctttttagcattgtttgggggcataaatatagttttttgatataaaagtcgttgacttcaagtaggatatgctaaagggcaaatttgaaaggaacggttggctcacacaaactatgttttcttttcttataaactatctttatatcttttgagaataggcgacttattggaaaggaatggtttttttcgaacgcgggg

SEQ ID NO: 88602 - DNA, 193 bp, Glycine max
  Clone ID: PAT_MRT3847_51015C.1
ggttggtcataaaaaattacgacggcttttattaaaaacccaccgttactgtaagtataccatgctttcatacactgttactgtaagtataccatgttttgataagttgcttcataaataattgttttttttaagataggaaagaaaaatgaaataagcttatcccataagcttaaattagccaattgtgtga

SEQ ID NO: 88603 - DNA, 352 bp, Glycine max
  Clone ID: PAT_MRT3847_51016C.1
ggcagtgctggtcaccggagttccatagccggttcattaaagctttagatgtccctcgatgttctcaaacatctactcagaacgaaattaaggaactcatgacggtggattagctgacaacttcagaagtccagactcatttacaaaacaagcgacttcatacatagcgagttccagttgctacaactccaagttttagtcagtcagctgtatatctagcatgcttgtgcacgcacactgaatccattaagggtggcagttctgatactcctcacagtccactccatcaatccacacactcgggggaatcaccatcgaccacataaggtgaccacatgatggatcatgatga

SEQ ID NO: 88604 - DNA, 205 bp, Glycine max
  Clone ID: PAT_MRT3847_51017C.1
aggatgtgtgtttttttcgtatagtaaggattattacatatgtaagcaagcagctaactaccactactaagccggactgacaaaaacataaacgaaaatatacaggaatagagacgcgaatacacaactgtgcagtcaatgaccggagatacgtacataacatatgagaaaatttactggctagcgtaacagggttggggcctat

SEQ ID NO: 88605 - DNA, 546 bp, Glycine max
  unsure (1)..(546): unsure at all n locations
  Clone ID: PAT_MRT3847_51018C.1
ctcgagccgaatcggctcgagctcaaatgcgaaatggacaagcaggaatacacggtggccgaaatagatggctggacaaggcacatactctgacctttgagacgaacggtcgagccgtcctggctggagaacacagcccgatcgatgcgcttatacctaccatggtcatggattatgcttcacaggtccctgttgatcgatctgtatatgacgaagaggaaggttcgggatggtctagagtcgattttgtagtcgacgaggcgttgaagagggagattgtcgattgcgaggggaggaacaaggcgatcatcgaggacagcgatgcgaaagagctatggtttggagagtacggcgcggagtggatcaagaagaacgccaaagtcgcgcccgacgcgtatattcagcaagtcttacagctggcctggtaccgagatcaagggtatgcgaccgcaacatacgaaaccgcatctacgagattgatgcagcacggacgtacagatgtgattcgaacactgagtcangagagtcgaggctttgtcagggcat

SEQ ID NO: 88606 - DNA, 177 bp, Glycine max
  Clone ID: PAT_MRT3847_51019C.1
ttttgccatatcgtactctcagtcacaactgacaccgtcgtcgtcgtagtcgtaatcaatggcaccgaagctgaccactgatgagcagaagatcgcttacgatgcgaagtgtgcgacctattggaggagtactgccagatcctcgttgtgaactccgatactgtgggatcgaaccag

SEQ ID NO: 88607 - DNA, 435 bp, Glycine max
  Clone ID: PAT_MRT3847_5101C.1
gaggttagtaggcagaaaggagattacctggggtggtgctgggggatccttcccaggatgaggcagcaggaaccttacagagtgatggtaatattattctacattttgatcatggtggtgattccatgggtataaacatctgtatgcactttctctgggtgatacctcaatttttaaaataatctttttaaaacatggggtcttgctatattgtccaggctggtcccccaactcctcagctcaagtgatcctcctgccttggcctcccaaagtgctgagattacaggcatgagccactgtagcaggctaaaataaattttaaaaaattttcaaaacagttaccctgaaaagagctccctctgtaggaaggtgggaggtctggcatccccacaaaatttcatgttccatcttcatggggcagctgatttacaaggg

SEQ ID NO: 88608 - DNA, 757 bp, Glycine max
  Clone ID: PAT_MRT3847_51020C.1
tcgtatttatagaaccgtagaatagaggttgctatagcaatacatacagtggagaaattttgattgttgtgagataatgtctgcttcagaggataagggaaaaaaattctctcactcttcttggtccctactatgctgtagaaatggtatctcttcaacaactacttcagcagcagaaagggaaaaaaaacagtgaagaactaagcaggaatagttcaagatcatcatccaataagaagccaggaggatggaaggccatgccttttattttaggcaatgaaacgtttgagaggttggctgcatttggtttgtttgctaactttatggtgtatttgacgagagagtttcatttggaccaagtttatgcttcaaatattctcaacatatggagtggtatcaccaacttcttccctttgattggtgccttcatttctgatgcctatgttggtcgcttctggaccatagcttttgcttccttttcttctctactggggatggtggtggtgactttaacagcatggttaccagagttgcatcctccaccatgcactcctcagcaacaagcattgaaccaatgtgttaaagctagcacacctcacctaggtgctctacttacgggactttgcctattaagcgtaggctctgctggcataaggccatgtagcatcccatttggtgtggaccaatttgacccctccacagatgaagggaaaaaaggtatcaatagcttctttaattggtactacaccactttcac

SEQ ID NO: 88609 - DNA, 622 bp, Glycine max
  Clone ID: PAT_MRT3847_51021C.1
ggaaattatcaggaaaggaggtgaaacatctgaactgtatctcattcaacctgacagttctgtcaaaccgtatagagtatactgtgacatgaatacagaaaatggaggatggacagtgattcagaaccgtcaagacggtagtgttgactttggcaggaaatgggatccatataaacagggatttggaaatgttgcaaccaacacagatgggaagaattactgtggcctaccaggtgaatattggcttggaaatgataaaattagccagcttaccaggatgggacccacagaacttttgatagaaatggaggactggaaaggagacaaagtaaaggctcactatggaggattcactgtacagaatgaagccaacaaataccagatctcagtgaacaaatacagaggaacagccggtaatgccctcatggatggagcatctcagctgatgggagaacacaggaccatgaccattcacaacggcatgttcttcagcacgtatgacagagacaatgacggctggttaacatcagatcccagaaaacagtgttctaaagaagacggtggtggatggtggtataatagatgtcatgcagccaatccaaacggcagatactactggggt

SEQ ID NO: 88610 - DNA, 272 bp, Glycine max
  unsure (1)..(272): unsure at all n locations
  Clone ID: PAT_MRT3847_51022C.1
gtcctctgcacttgcacacannggggtcgtcaatggntaggnncatgaaacacganngtgccccattntgntctgttgctctgtgcctatcnagnacaaatacagcggcangaccgtgnncntgcnanggaggcngtantngcnnnangggaantggagcagtctctgcaaagcttgncaggtgtgtctcctggtganggancgggtgctacaatgtcagacgatgaagatgaccnngcagagagcntgccaacttatacgaagggagcctt

SEQ ID NO: 88611 - DNA, 392 bp, Glycine max
  unsure (1)..(392): unsure at all n locations
  Clone ID: PAT_MRT3847_51023C.1
gcttgtttcaaccgggacaaatatcgtttccagcaacactgatccatcctcctgcacgaatcacgttataattattcccttcttctccttttgcttccacaccgttcgaaaattaagtaataaaactaattcgccacagtttggtttgtttcgtgaatgggatcagatctgtaggcccacgtttttcattttcatttttaaaagagagagagagagagcagtgtgattttctttctttccttttgaggaaacgacaattctgtgttgcctccatatccgtgcttactcactaaactgttcttcaaccataaagaccctactaatttagggntcctatactttgttttttggtggggaaaagaatgtgagggtttgtttcttgaaaggaaaaa

SEQ ID NO: 88612 - DNA, 455 bp, Glycine max
  Clone ID: PAT_MRT3847_51024C.1
aatccaaacacgcccttagcagaatggagactaatccccgcacgatccgcagcctagtctcgaagctgagctccgtttccgaagccggccgcgtcgacgccctctcccaactccgcctcatgtccaaacagtcccccgaaacccgccccctcatcgccgacgccggcgcaatccccttcgtcgcagaaaccctctattgctcttcgcaccccccccaagaaaacgccgctgccacactcctgaacctcagcatcacccaaaaggagcccctcatgtcgacacgtggcgtcctcgacgccatcgctcacgtgatctctcaccacaacaccaccttctcccccgcggcggtccagtccgacgtcgccaccatccacagcctcctctactacgtggactcctaccgccccgtcgtcgggtccaagcgcgagactggctactcccttatcgacattctt

SEQ ID NO: 88613 - DNA, 527 bp, Glycine max
  Clone ID: PAT_MRT3847_51025C.1
aacatcatagatctatgtttcaagactaatgttaaattttgattgtgtcatctgattgtgttcgcattaattattaattgaattgtaactttattttgctcacattaaggtcactgctttgtgtaatggaagacgaacctttgcgagcacaacgtccatttcttattcgcttttttgaatcacttggacagcgttaccaaagcctgcttgatgcctggactccctatgccacaggaagatggatattcacagcctttttctttattgtttatatgacaagagttatattattagaggggtggtatattgtaacatatgctcttggtatttattatctaaatcttctaattgccttcttgacacccaaagttgatccagctctaggagatgatgatttagatgatggaccaagccttcccaccagtagggatgaagaatttagacccttcattagacgtctaccagaatttaaatgttggcattctgcaactagaggtactgggattgcgctgttttgtacatttttc

SEQ ID NO: 88614 - DNA, 340 bp, Glycine max
  Clone ID: PAT_MRT3847_51026C.1
tttttactgggaagctaaaattaaaatgtgtgtaggataatatacactcaaacataacccaagtagctgggttacaaaccaaccaaaccacaggctaatagcactggaattaacaaccagatacacgcacaatgaatcacttgcgtttcccttactcataactagatcacaggataggggaaaaggaacaagagagagagatagagcgagagagagtgagagagagagatattaaggcacagccctagctactatggtacaataaacatttgaaatgtataagtgatgcagcagtttaatcactgccactgctgctgctgctgacatggccatgctcatg

SEQ ID NO: 88615 - DNA, 323 bp, Glycine max
  Clone ID: PAT_MRT3847_51027C.1
gcagggaaaagagtgtcgtgtggtctgtagcatcaaaaccgtgctgtcaattcgaatttggtagacacactaatacttgttttctttcgatgctcatgatggcagaccaagctcaagtattgttctctttggagtctacagatcacgcgcctgtgaagcgcgttggcacgcacaacggaagctttcactgttacgaggtccatgactgcttcatgattagtgtcacgaacatatatagcagcgacgaaattggtggtttccgaaaccctgaagtggaggaggatcatgatgctgctcacgatgttgggggagtgtatgaccct

SEQ ID NO: 88616 - DNA, 334 bp, Glycine max
  Clone ID: PAT_MRT3847_51028C.1
gagagcggacgcagtggtttttgaggatacaaacgtacacaggcaagcatgctgcgctttaaaagatgaatggggaaacgaatcatgaaaacacggggcgaggccttaactggagatgaatggcacagcccggtctgtactcaccattatagattcgtaatgcattcccatgtcgatagctgactgaaaatgcaaaaggcccgcactgatggccgttcgaaaaagaacctatgccgatatgttatatgaaaggcgcacgtggcgcgcccactaagcacggagggtgtggaggttaacgcgcaaagtggggggtacgctttacaggaccctagct

SEQ ID NO: 88617 - DNA, 460 bp, Glycine max
  Clone ID: PAT_MRT3847_51029C.1
gatagtttatagcacattcattttttgacacttgcatgataattttattgtgtgctttaatcactttaatcaacaactctgacccatgaatattggatacttcaaaatcgatgacatatctgactcatacctgcgctggatacctatagaacttaaagaaacaacagtgttaaaattaagacttactcataccatacctgtacctgtgcaacatagaatcagtaatgacatatactgtgtatgtcatttattctctaggtgaaatatctttgctgtataatcttaaatttcattcttttagtttcttcagaagggtattgttatttgatgaatgtatttgccaaacaatgtatgtcttatagaactttaactgaatctaattgtgttttaagtcttaattttttattaattggtatgtataacctatcttaactgtgattgccctttgtgatagataacc

SEQ ID NO: 88618 - DNA, 282 bp, Glycine max
  Clone ID: PAT_MRT3847_5102C.1
agagttcccgggtccatccatacgtccgtccagatgtcagtacaggtgatattgggacacttaaattgagaacatgtgaatctagaatataggactgttctcatcaactcatctcatcttatctcttctcacagtgggcactggttctatcctgaatatttatgttatcgatgatgccttttccattggacgtgttcgatatctgtggatcaatccttcaaatgtctccactgctcattatgctttcagtgtgcaattcattccaggttataccccaaattt

SEQ ID NO: 88619 - DNA, 544 bp, Glycine max
  Clone ID: PAT_MRT3847_51030C.1
ggctcgagtcgaaaactgtttgactaaaacctttcgtcccgcaacctcgtatcctggaacatgatgatgactggttacgtcaaacaccatcaaattcaatatgcccagtacctgttcgatcaaatgcccttcaaagacacggtttcttggaatatcatgctctctggttttcacagaatcacaaactctgatgggttgtaccgctgtttcttgcaaatgggaagagctggtgtgccccccgatgactataccgtctccacattgctcagagcggttataagcaccgagttagatgttttgatcccccagcttcacgctcgagcgctgcatttagcacttaacttgagtgtgtttgttgggtcttcgttgatcagagcttatgccagtttaagagacgaggaggcttttaagcaagcgtttgatgatatattgaggaaagatgtcacgtctcggaatgcttcggtttctggctatatggaagtgggaagtatggatgatgctcatacacctttgatatgatgatgcctgagaaaacatatttcat

SEQ ID NO: 88620 - DNA, 1522 bp, Glycine max
  Clone ID: PAT_MRT3847_51031C.1
ctctaattcttctcttttctatcatggaataaggaaaggagaaacaaacaaactgtaccaattccccccaaagccttgtctccgttccaaatcatcaatcaaatcctcaactctctgactccttttcatccaatccttaaaatcgtcagtggtctttttaatgtacaaggaattatcaaaaaataccaaatttccctacatatctatctaagttgtgtgtgagagactatgtaagggatggtatcagctacaattaggcgtccggaattgtgtcgccctgttggagaccatctgagggtgaaatttctagtaggcatggagatgcaagtggacgtgctaatggtttgttgtggtataaagattcaggaagacatgcgaatggtgaattctcaatggcagttattcaggcaaacaatttgttagaggatcaaagccaacttgaatccggccccttgagcttaactgagggaaatcctcaaggaacttttgttggtatatatgatgggcatggaggtccagaagctgcccggtttgtcaatgaccgtttattcaataacatcaagaagtttacttcagaaaataatggaatgtcagctgatgttatcaataaagcattcttggcaactgaagaagaatttctttctttggtagagaagctgtggctgcacaagccgccgatagcatctgttggttcttgctgtttgataggcataatatgtagtggggagctctatattgcaaatgcaggagattctcgagcagtattaggtagactggatgaggctatgaaagagattaaagctattcaactatccgtggagcacaatgctagccatgcatctgtcagagaagagttgcactcattgcatcctaatgatcctcagattgtggttatgaagcaccgggtctggcgcgtcaagggtctcattcagatttcaagatccattggtgatgcctatctaaagaaggcagagtttaataaagcaccattattagcaaaatttcgactctcagaaccctttgatcagccaatccttaaagctgaaccagctatactagtacagaaactgtgtcctcaagatcagtttcttatacttgcatcagatgggttatgggagcaaatgagcaatcaagaagcagttgacattgtccagagctgtccacgtaatggagccgcgaagaaacttgtgaaaactgcactttgtgaagctgcaaagaaaagagaaatgagatactcagacttgagaaagattgaccgaggggtgaggagacatttccatgatgacatcacggttatagttttgtatcttgattcaaattttttgtctcatgccaattcacgtgtacccttggtttcgatcaaaggaggtggtgatagtggttatgatattggtattatagatgcctagttcaggaatgaacccatccctctcttaaatttgtattccaaatgtacatttccccttccccttccccctcccccgggataatagaattaagaaagagtatcctctctctctct

SEQ ID NO: 88621 - DNA, 878 bp, Glycine max
  Clone ID: PAT_MRT3847_51032C.1
tttggatttcgatgataaaaaaaatacaagaaagaaactggaatttcagcccatggaccttcaccattcagtttccttcttcttttttgccgggaatttgtttaattaggcaaaacttgcaaagttcatagttggaccctgtcaccgcaggaatcaacgttttcttccactatctcgagaaatttcaagctttatattcttgaactgaagccgcttatcatattttccgttacgcgttcgaaatcgagtccatgagacgaattcagcttccggagccgccgagccctacctcccggagtggcactccggacattttcgaatccggagttcacacgttcgtgcggcgcgccgtcgtaatcggcaacggtttcgccgcatcggagaatcagagcgtcggattggtccgcgcccttggcctctccgataagcacgtcttatatcgtgttaccaggccaaaagcggggattaatgagtggcttcaatggcttccaatctctctccataaaaaaatagattatatagtaagaatgattcgcggttattctcagcttatgttgaaatctcaggaaaagaagcttatgccttcaccttcagaaaatggtgtcagtgcaggcttgttagctgtcttagaagctgatgtaaaggagatagttagttttgctcatgaaacttatgagaaggagggaccgttgttggttgtcgcatgtggaagagataccatttctactggcagttccataaaacgtttagcatctgagaatgtttttgggtgttcagataccacatccaagattgcatttgaatagatttgacatgggtgattacaccctagcatgattattatccaccccttacggatactgctgatgctgctaaaa

SEQ ID NO: 88622 - DNA, 362 bp, Glycine max
  unsure (1)..(362): unsure at all n locations
  Clone ID: PAT_MRT3847_51033C.1
ggtccggnnaattcccgcggtcgacccacgcgtccgggtttgacctcaattctccatgccttttttccaattcttcatcacctgtgctccaatatacccaccattgctactgttcctactactaatgttagttaccgtcataactgcacaaataatggcatctcttttactcagcatattcaatcttctcccagctcctttcctgctgcaaaagaagcacttactctccttaacctaagccccgcaagaggtgaagatcttgatcttgaatcttgcttgagtgccatgaaagtcaacaaagagaaggagaaagaattactaagcgtgatgtgtgctgatgatgactgtgggggtgatgaaac

SEQ ID NO: 88623 - DNA, 718 bp, Glycine max
  Clone ID: PAT_MRT3847_51034C.1
ccacgcgtccgcagcacgtgccgtcgtcgtcaatatcgtcgacgccggagcggagggagtgtcagtcgccgtcgctgtcgccgctctctctgtctccaaagaaaaaacaaaccccagatggagaatctgttccgggacttgttgtgcttgaaaagacgcaatcttttggttcatctaagtcgaaaaacgaaagtgggtcaccgagattgtccaacgcttcttccaatgggaagtcctcggcgttttctctgccgtcgccggttatagggatgaacttgcatcatgagttggatcagtctccgacaatatccgacgtttcagatcggtatcggcattctcccctttcatcgttgcatttgtcaccgacgctcctttcttcgccggagagagagttgaactctcagcctcagccaccaccttctcggaaacactgggagattcctgacttgttgacaccaattggcgaagcaccaaatttttcagttccacagaggaaacaatgggaaattccggctctttcagtaccaattgctccatctagtcgccacgcagctttctctcgccataaaacaccgaggataggatattgggtggtaacccgtccgaaaaagttgctatcttgttaagagcacttaatgtgactatagaagaagtgtgtgaagcactcttagaaggtgttactgatactctcggaaccgaactacttgaaagcttgtta

SEQ ID NO: 88624 - DNA, 976 bp, Glycine max
  unsure (1)..(976): unsure at all n locations
  Clone ID: PAT_MRT3847_51035C.1
ctcgagccgcttctcggaaaaactgggagattcctgatttgttgacaccaattggtgaagcaccgaatttttcagctccacagaggaaacaatgggaaattccggttctttcagtaccaattgctccatctagtagtgttttagcccctccttcttcttcgtcttcaccggcgncaccgtcaccactggcggttccacggcagcgtaagcagtgggagatgccgtctcccttgacgccggtggatcaaccggtgtcgaggccgccgtcgctgacgccaccttctaggccttttgtgttgcaaaccccaaacacaaaggtttcaccagttgagttgccacctgctagttctcagaattttgaggagggttctgaagagacatctaagcctaagttgaagcctttgcattgggacaaagtgagggccagctctgatcgtgagatggtgtgggatcagttgaggtccagttctttcaagttgaatgaggagatgattgaaactttgtttgtagtgaacacgcctaatccgaaacctaaggatactactccacgctctgttcttgcgccacaaaaccaggaggatagggtattggatcctaaaaagtgccaaaacattgctatcttgttaagagcacttaatgtgactatagaagaagtgtgtgaagcactcttagaaggtgttactgatactctcggaaccgaactacttgaaagcttataagaaatggcaccaagttgagaggaagcccgcatattctcagaacattgagatgatttctgaggagacctctaagcttaagttgaagcctttgcattgggacaaagtgagggccagctctgatcgtgagatggtgtgggatcagttgaggtccagttctttcaagttgaatgaggagatgatcgaaactttgtttgtagtgaacacgccaaacccaaaacccaaggatactactccacgctcagttcttgcgccacaaa

SEQ ID NO: 88625 - DNA, 829 bp, Glycine max
  Clone ID: PAT_MRT3847_51036C.1
gaaactactccgccgacgaaaaaaccctcagatccccacgcgtccgccgtctcttccctcgcgaagcctccaccacatccggcgccgcttcccggaaagccagaaacacgtcttctacaagctctgagtttctctaccttggcaccattgtgaactcccgcggcggcgttgatgagctctctgacccacgcgctgccgcgttgaaccctcggaaaatggactcgccagagctccagccgctgccgccgctggcgcggcagacttcgaggcttcgggaggaatcgacggcaacggtggaggacgatgaagaagagttctactcgccgagagggtcgctgaataatggaagagaaggctccgccggagctggatcgggttcccggcgagttttcaacgccattgccggggaaaacttggttggtcgtagcagcagtgagtcatccacttcttcttactcttcttcctcttctgcttccccggatcgctctcattccattagtctttctcctccggtgagcataagccccagaaaatcactacctaagtcgccggaaaataccataacccaccattcgccaccgcaggaggcgacggcgattagaagctcggcgtcctcgtccatactgtcgtctccgtcgccggtttttgggcagcacgtgccgtcgtcgtcaatatcgtcgacgccggagcggagggagtgtcagtcgccgtcgctgtcgccgctctctctgtctccaaagaaaaaacaaaccccagatggagaatctgttccgggacttggtgtgcttgaaaaggacgcatcttttggttcatctaagtcgaaaacgaa

SEQ ID NO: 88626 - DNA, 372 bp, Glycine max
  unsure (1)..(372): unsure at all n locations
  Clone ID: PAT_MRT3847_51037C.1
ctcagaggattggacatatcaaccttatgaaaccacgaaccgcatgccatcgcctagcaactgtagttccaaatgatccataaagcataaaccaagcatgtgactgatgatgctagagataaagtcttgacttttgagtagtttcggagacatcacatatcagtagtgacaaggtgataatattggcgagatgaataattcactgaggacgcatcatgacacatgcacatttatttcattgagaagatcaaagacctcaataacacattaaatttataagggacagactggagagtaatactaataataggtntaggacaagggacattccaataaagaggctagtcatacgtaggcattctactaatgctt

SEQ ID NO: 88627 - DNA, 269 bp, Glycine max
  unsure (1)..(269): unsure at all n locations
  Clone ID: PAT_MRT3847_51038C.1
ttagtatgggtgacaggggaacataattgtgtctcacgtccttcaaatggctacataattaatgtntgttaggataggcgacacgggaacataatcntgtctcncttccttcaagtggntacataattaagaagttattagctacagctacgtgctgtagttgtnagcttgtcctnttgtgncanttncttgccattgtattttnganaaaggggggtaaacaccattaagtgctactgcttattcantaagnctgattcatagaacct

SEQ ID NO: 88628 - DNA, 411 bp, Glycine max
  Clone ID: PAT_MRT3847_51039C.1
aggcgtgctcagcggcagcggcactgtcaccaacgtcacgctccggcagccggcctcgccgggagcagttgtgacccttcatggaagatttgagattttgtccctgtccggttcttttctgccgccgccggccccacctgcggcgtcaggactagccatatatctggctggcggacagggacaggtagtaggtggaagtgtggtgggaccccttgtggcctcaggtcccgttgtcatcatggctgcttcatttggtaatgctgcttatgagagactgcccttagaggaagaggaaactccggtggcagttgctggcaacggaggattaggatccccaggaatcccaggaacccagcaacaaccgtaacagcaacagtacagagcattttgatgcatgtaagttggacaaat

SEQ ID NO: 88629 - DNA, 343 bp, Glycine max
  Clone ID: PAT_MRT3847_5103C.1
ctgagaaaaggtcacctgactctgatccgtcacctaagaaccctgagaatgagtttttgaccacgactcctgggaacaaacagaccctcaatgaccttacaattcataaaattttatcacagcacgcatcagatgaattctaccttgggcaaacagacggcggcgactactggacttctgatgccgggccactacaggcctttaagacgttagcaagaatcttgatgagattgaaaagaaccttatagagaacaacaataatgagacattgataaaccgctatgggccggctaaaatgccttacaccttgcactatccttctagtgacgacggattgactttc

SEQ ID NO: 88630 - DNA, 270 bp, Glycine max
  Clone ID: PAT_MRT3847_51040C.1
tttgccttaggatccttctcttagaggctgatgcgctgctgagagagcactgcacagcaaagtgagagccagatccaaaagctgagctgccctcaaacctgataaccgcatagagtcgaagagtgggttcatagagacctggcatcctatcaacaagccatctgcagtgcactcgggttaccatatctatctgcacccttagactcattgagatatacagaccttgctacatcatcggtccctatgatatctacatacaacaaggtaatg

SEQ ID NO: 88631 - DNA, 364 bp, Glycine max
  Clone ID: PAT_MRT3847_51041C.1
tggaaagtacagtcaaaccgcacgatcatcaatccattcgagtaacccattgaagaagaggctcagatcggaaaaattaacgtatccaatcccaatcccatcgttgcacatgatacaattcattctgtagcagaacaagcgaggcaagacccgtcttgccaaatactacgtgcctctggaggactcacagaacctcaacggcctataccaggggcatttgctcgacttgtacagagaccttaaatacacgggtttcgtagtgtatcgttcgcacaagataatatacatgcgatatgcagggttatttttctcactctgaggtgacatcactgataatgagttggcggctttagagtgcatacat

SEQ ID NO: 88632 - DNA, 523 bp, Glycine max
  Clone ID: PAT_MRT3847_51042C.1
cttggggggggggggggggttgctaagtgggcagagagacaggtgcaaaaagacgcagccacataataaaagaggaaggaggtacactatcgcacgagcaaggtgagagagaccgtgggttcaagacaaacatgtgacagtgctaatgtatataggtatgggaggcgggaggatacacactgacgaggaaggacccactagtcaccagccacacgaaaccgggccgcaccgtcactgtaggtttataagttataaatgcagacggaataagcacagcttttgcggcagagttgtggttagtgcgcgtgagttcaggcaatatgtttatcgttaaagttaatttgttcggctgctatgcagtgatcaggtgtataaggcgcgggctgttgcggttgcgagggcgtatttctaactatgggttatagcaagtatccttatcaccattaatcccattatacaaactccgttacttagagggatgctcttagcacgaaacgggctgactcgtttaacgcactaagac

SEQ ID NO: 88633 - DNA, 134 bp, Glycine max
  Clone ID: PAT_MRT3847_51043C.1
acgatacgccacgcgtactgcctggttctctctcataacattacgcaccagacagatatcggggatcgttgaaactatgtccaagacacatacaccataataaaacctttataccatctgaatctaacatctat

SEQ ID NO: 88634 - DNA, 1607 bp, Glycine max
  Clone ID: PAT_MRT3847_51044C.1
gcgcgagccgatgggcagagaaggttcttttctgcatcaacaaaaccaactcctggacttgctgtcaataggagcaggctgttttgtgcatcaacaaaaccagctcctggacttgcttgcatactctctctgttctttctattcaaagatctgtaaatttatatattatcttttatcatatatagtattagtatagtccacttgtttaaaccacctgtgttgcatattctgaatcctatcatcttgtggctttgatgtctagagcattggaacatgattacatagggttggcagagaatccgtcaatggatggtaaaaactcatcatcactgaacttgaaggagacagagctgaggcttggcctccctggttgcgagtctccagagagaaaatcaggttctgcactctgtctttttggcaaagagttgcagaacaacaataacaatgtttgttctttgaaggctggggccaagaggggcttctctgatgccattgacacctcttctgtcactgagggatctcaaggagcttctgctttgttctctccaagaggtggcaatgttgggaagcctcttattggtttagacactcaaactaacaccaccatcaaagaggttggtgcagttcctcaatcagccaaaccggttcaggaaaacaatgatcagtttgctgcaacaaatgcccatgcaattgctcctgctgctaaggcacaagttgtgggatggccaccaattcgatctttccgaaagaacacgatggcctctaatttgacaaagaacaatgatgaagctgagggaaaatcaggatttggttgtctctatgtgaaagtcagtatggatggtgccccttatcttagaaaggttgatctcaaaacctataacaactatatggaactttcctcagctcttgagaagatgttcagctgcttcaccattggtcaatgcaattctcctggacttcctgggaaagatggactaagtgagagctctttgagggatcttctccatggatctgaatatgttcttacatatgaagataaagatggagactggatgcttgtgggtgatgttccttgggagatgttcactgattcatgtcggagactaaggatcatgaagggctctgaggcaattgggctagctccaagggccatggaaaaatctaggagccaaaactaatgcagaaaaaaccccattagaccaaagcggggggtattcattgaagcatataaagatttccaagggtgtttgagtttatgattctgttcaaaatcaaaaacatatgctattcagtgtctcagtttttgtgcattaatatatatagtatgacaagttttatcagtagaattcaactggagacatccagacaatatatacacatattttgtttgtttctctattttgtgtatctttggattctagttgctgtataaaagaattgcttgttgtgcttttcccctctataactattctgaattttctccatgtatttgattttcaatatacatactgaacctttgtattttgttattaaatggtaataaccatatctcttggtcctataatgttagtccccagtaataaccatatctcttggtcctaaaaaaa

SEQ ID NO: 88635 - DNA, 174 bp, Glycine max
  Clone ID: PAT_MRT3847_51045C.1
tgatgagacaagacaacgggttgtgtttggtcaaccaaccaattttccaaagcgcgtggctctatgatacatagtctgactctcctctcatattaatattactaaaaaattgttattatctgcaacaccagacagtgctactcccacctatgattacgatcaacacctacacta

SEQ ID NO: 88636 - DNA, 779 bp, Glycine max
  Clone ID: PAT_MRT3847_51046C.1
tttaaattgaaatcaagtacactaggatttaattcaataacacatgggatcccgatttgttcctaaaaaagagagatgacttaccagaagtcacacgttacaattttctttatgaatctaatgagggcattttccttttgctcgggcgaaggctctatttccatgtcaattgattcaccgtacgtcaaatagacagctgtcttcttcaccaccaatctatgcccaaaagtcacaaaaatctccacttcgtctccaggtcccaaatgtgatattatgccctgccaatcttcatcattaaaggaaattactgcgtctcgcttgtgtatctggatggtgcactttgtgtaattaactatcaagacactaattagacattcggatgccatgatttcaggggttaataaatatacaacacatagaatcattcccttcaagcgacaatcctcaggcacagtgaaatacacggaatgtccctcacttgtatgggccaaccaaaagggataattgtcggctgggagagaaacatcacaagccacgttggttgccaattccttagatatgctattgttgagagtagtgaagacttcttggtaagttccagttccagttccaattccaatcaaatatgaatatgacctcaaggaatgctttgaaaattgtgatatatatggtgtcattcgtaattcagtaaaatctgaaccatttatatcatccagaattgttctgcatagtttagatagttcaatttctgtgtcacattgcaccaaaacactgcgaag

SEQ ID NO: 88637 - DNA, 250 bp, Glycine max
  Clone ID: PAT_MRT3847_51047C.1
ggattacaaatggtccactaagagggcttattggaaggtgagttttttttatagttatgttatgtgatgggctattgaactatgttatgggttaattcgttgtctcttgctatcctatcatctccttcatttaatagccgagattactttagtagtttagtgcaattgaaaccaagttaagggatttccttttacctctggccctctgctgctggctctatatactgagtggctatgcagtgtttatgac

SEQ ID NO: 88638 - DNA, 522 bp, Glycine max
  Clone ID: PAT_MRT3847_51048C.1
ggctcgaggtgagagctctttgagggatcttctccatggatctgaatatgttcttacatatgaagacaaagatggagattggatgcttgatgttcactgattcatgtcggagactaaggatcatgaaaggctctgaggcaattgggctagctccaagggccatggaaaaatctaggagccaaaactaatgcagaaaaaacctgtttgaccgaagctggttattactgaagcatataaagatttacaagggcgtttgagtttatgattctgttcaaaatcaaaaacatgtcattcagtgtctcagtttttgtgcattaatagtctgacaagttttattagtagaattcaactggagacatccagacaatatatacacatattttgtttgtttctctattttgtgtatctttggattctagttgctgtataaaagaattgcttgttgtgcttttcccctctataactattctgaattttctccatgtatttgttttcaatatacatactgaacctttgtattta

SEQ ID NO: 88639 - DNA, 1241 bp, Glycine max
  Clone ID: PAT_MRT3847_51049C.1
ccacgcgtccgcggttctgttgggcatcaacaaaaccaactcctggacttgctgtcaatatcacaccataactgctattgaagctctgctctctgacttgcttgcatactctctctgttctttctgttcacaaagatttgtaaatttatatttatcataccatatatactatataatatattgtatgctccacttgtttgaagctgtgttgcatattctggatcctatcatcttgtggctttgatgtctagagcattggaacatgattacatagggttggcagagaatccgtcaatggacggaagctctgacaaactgtcttctgaggatggtaaaacctcatcactgaacttgaaggagacagagctgaggcttggcctccctggttgcgagtctccagagagaaaatcaggttctgcactctgtctttttggcaaagagttgcagaacaataacaatgtttgctcagttgtaagccctttgaaggctggggccaagaggggcttctctgatgtcactgagggatctcaaggagctgctttgttctctccaagaggggccaatgttgggaaacctattattggtttagacactcaaactaacacccaacaacaggctaacaccaccatcaaagaggttggtgcagttcttcctcaatctactaaaccggttcaggaaaagaatgatcaggttgctgcaacaaatggccatgcaagtgctcctgctgctaaggcacaagttgtgggatggccaccaattcgatctttccgaaagaacactatggcctctaatttgacaaagaacaatgatgacgatgagggaaaatcaggatttggttgtctctatgtaaaagtcagtatggatggtgccccttatcttagaaaggttgatctcaaaacatataacaactatatggaactttcctcagcccttgagaagatgttcagctgctttaccattggtcaatgcaattctcctggacttcctgggaaagatggactaagtgagagctctttgagggatcttctccatggatctgaatatgttcttacatatgaagacaaagatggagattggatgcttgtgggtgatgttccttgggagatgttcactgattcatgtcggagactaaggatcatgaaaggctctgaggcaattgggctagctccaagggccatggaaaaatctaggagccaaaactaatgcagaaaaaacctgtttgaccgaagctggttattact

SEQ ID NO: 88640 - DNA, 338 bp, Glycine max
  Clone ID: PAT_MRT3847_5104C.1
gagaaattttagtattaaaaaaaaaaaaaaaaaaaaaaaaaaaaaaaaaaaaaaaaaaaaaaaaaaaaaaaaaaataaaaaaaaaaaaaaaataataaaataaattaaaaaaaacctagacaaaattaaataaatataaccaaagcaagtaatgctaattaaaaaatggggcggccgcttaatagatgaccagaaaacaaacggggcgtgtcaactgctttcttctttaattgggccctataatacataccaatggggctccgtataaaaacagcacttgtagaaaacaatgtgtaatcacctttaatctcctttttaacacaatctttttttcccca

SEQ ID NO: 88641 - DNA, 468 bp, Glycine max
  Clone ID: PAT_MRT3847_51050C.1
ggatagctacacttgcggcctcggttgccttcatgcttgtgttccttatccctgttacatttgtacaaggcttgactcaactagaaaaacttcagaaaatgttcccttttctgacagggatacttaaagagtaagatgttgctgcatctattaagggactaatgtcatggacttctatactcttggaatggctcattttccttttttttttgcaatttatttgaatcaggattttgaaagaaagaattatgcatgataatttgtatgcaaatcttagtgcattagtttgcttgatgaatgtacaacttcattttaataagcaataaagattttagtgaaaattacaaaaagaaaatgattgtagtttaggaacaagtaggcactcaactagtgaattatgtcgagagagtggttcatgtgtaaccacttgagtggccaattattcataaactgagtatttgaaaagaa

SEQ ID NO: 88642 - DNA, 194 bp, Glycine max
  Clone ID: PAT_MRT3847_51051C.1
ggcaactcgagcgaagagacataccccgtggactacgaatacgtcactacatcagactgctcttatctgttactacaagaaccaaaactctctactaccctatcatcgaacaaacatatgccatctgtcagagcctgctaacactgaatgacgacccgcacctacgggagatcataaccaaccaaccatcatat

SEQ ID NO: 88643 - DNA, 1775 bp, Glycine max
  Clone ID: PAT_MRT3847_51052C.1
ctggccaaaccatatctcaaccaaaactattacctctctctcttttctctctaacaaacactccataaacggaaaagaaaagccacacaacaattaattaagttgttaaatttttgtgagatggagaggagtttatcaggaagtagtgaagaggagatgtcaataacgaaaggtccatggacagaggaagaggattctgttctcttcaattacatcactgtccatggggaaggtcactggaactctgtcgctcgctacacaggtctaaaacgaacaggcaaaagctgcagattaagatggttaaactacttgcgtccaaatgttcgacgtgggaacataaccctcgaagaacagctcttgattcttgacctccattcccgttggggcaacaggtattatcatttatgtttattattcattaaattttttaggttaaaatattccttggttcatgtaatttttcttatttttagtctcttgtacaagaaaattgtaaattttaatcccttcacatgcatccatgtttgctaaagttttggttcgcgtcactactaacatatatggaagactttttaggttttagtagtataaagcagccacaaacactttctccaattaatataagccgctaaaaaaatgttgtacatacattaaaactgaaaaatgtttgagaaacactcaatataccatcatatacttaatgagaaaaatatagataggaggtaaataaaatctgattaataattatttttatcaagaagcaaactcaaatattattcaaatgattcaaccttaatttcaacagcacatgaattacttatgctgaatcccctaattaggtggtgatttcctgcacagaactgaaacttaagatgaagcaagcaaatagcagtttgaccaatttttaatctgttagtgatagaacttggtaattgaagtgatgttgtgttatttgttttataaaatgaaggtggtcgaaaatagctgaacatttaccaggaagaactgacaacgagataaagaactattggagaacgagagtggtaaagcaggctaagcaactaaagtgtgaggtgaacagcaagcaattcagggacacgttgcgttttgtgtggatgccacgtatgttagagcggatccaagctcaggcctcatcatcatcatcatcatcatcaggccaagcccaccaaaccacgttaatctccaacgctcaagcacacagtgacccttgcggagtcatgacgaccaacccaagtttgttgtcggaggtgtcatcatcagcccttgatgcccacgcgccttctctctatgactctagtgcgtcttacaatctaatgggtggtggtagttcctcatcgtatagtgcagaatattgctactactcggacatagcaggaaatggttttggtggttcggacttgtggacggatgaaaatatttgctttctgcaacagctgctcgctgatcatgacttgtcgtgaaacatgcatctttgttttaaacttaggtgaaattaatttgcatctatcaagtatcaacgtaactattattatgtatacttcaattaatttcaagagaactgctatttgttgtaaatttaatttagcctgatttctaagagataatgatgagtattttaatttcccagaagacgattttgttcacaacaaatagaattaataatagagtaataaaatgtgattcgaaaaaatcatacaaatgcatgagtgtaagtttttgacagaaataacatgtgatgagttgtatttggctgg

SEQ ID NO: 88644 - DNA, 394 bp, Glycine max
  unsure (1)..(394): unsure at all n locations
  Clone ID: PAT_MRT3847_51053C.1
ttgacgctttcctttattcacacacacannaaacactggtgggtgttttttaccacacctttttctgcctaggtttactttccagtttccacccaaagcaaccaaccaaccaacaaacaacacaatgtatccaaaggtgaaggtaagacacgacgacaactacgctgaacttggtcttaaagctttcctctctctatatctgaaaccatctgcttcttcagttgatggaccagaaagttgtatcttcggcatccattgtcaaagcaccatagtgatatgtgcctgtaactatttcaagagttcttgttactgagtaagatttttgaactttagtttgggatcatattccttcaagagctacaggttccgggtagggtgtttttcctgatgataa

SEQ ID NO: 88645 - DNA, 338 bp, Glycine max
  Clone ID: PAT_MRT3847_51054C.1
acggttgtttttttttatttaacaaactttaggtcatgacttatattcggaagggtccaaatggtcccccaaaaataccctatctcttcaagaaacaaaatgccttccacaggctttttaaaagtggaatatacatataccagaacgttggaacttctaatcaaaaaacaaggatgaaggtcaactagaacattacattattacaatcatatacatgaggtctagtgcaatcctacactccatagcgtaagagaaacctgttactgctgcgctttagttacgcgataactaccactggcccagaacgcccgccctgaattaaaaaatgagtcggtcaa

SEQ ID NO: 88646 - DNA, 640 bp, Glycine max
  unsure (1)..(640): unsure at all n locations
  Clone ID: PAT_MRT3847_51055C.1
ccacgcgtccgcttttgaacattcctttctgctttctgaaaaactcttcaatacacaacaccagcattttttaagatacaatacaacaacaccaccctttttattgcatccaccaaaaactctctccttaataagcattcattttcattcatcttggttgtctagttccacaagccaccattttgagtttcatgataagaagagtttagtggtagtagcagcatcatgggaacacctgtgaacatcatcgttggatcacaggtttgggttgaggatcctgaggatgcatggattgatggtgaggtgacacaaatcaaaggcaaaaatgccaccatcattgccacaaatgggaaaactgtggtggcagaaatttcaagcatataccccaaagatacagaggcaccacctgcaggagttgatgacatgaccaagctagcataccttcatgagccaggagtcctgcataaccttgcaactcgttnttctctcaatgagatatatacatatacagggaatatcttaattgcagtgaatccttttcgaagactgccgcatntgtatgacatccatatgatggagcagtacaaaggaacagcatttggagagcttagtcctcacctttttgctgtagctgacacat

SEQ ID NO: 88647 - DNA, 2122 bp, Glycine max
  unsure (1)..(2122): unsure at all n locations
  Clone ID: PAT_MRT3847_51056C.1
ctcgagccgggcattactaaagcctcaacgacaacgcgagaaggagctaagagagagaacacacccaacacaacacaatacaatcgatagtttccgattcttaaaaaacccgaaagtacgaggtgatgttcgaatggagccaaacgaggagaacggaggcagcacgagcagggaggaacaggaagaggcattggtggctttgattgaacaccgaacccacgaagtcaaaaaccttcgtcaccgcatcgcttattataaaacccagcttgatgaagcggagaaaaggttgcaagattctgaatccaaattggctcgccttcgaggtcagacagtgtcatctagaagtaccttagatgatggaatcaaaactttaaagacagagcgcagatcaaatagtcccattgatagaaatgaaggttctaccaaaaaccgacatcaatctaaaccagaacttcttattccttcagcgaatccaaaaatatcacaacctgtactgttgccaaagtctttttcaaaagcttcaataacttccagttctgaagccactcctggagtccatagttctcctatcacaggtggtagctctaggggaaaatctgacaagtctcatagtaataggctttcttctgagcagcaaaaaactgaagtcaaggagaaagggacaaaaaggaaatttgaacaaaaagaacacaaggaattgattcctttaatacgcaagagttcttcgccaagcttggtaacctgtcaaacaagcaaccacatctcaagtcaacacaagaggaaattgcggagtattgctttatgtcctgtgaatgatcagctttttgtgaccagtgctctggatggagtggtcaactntttggcaagttcaggctaagggagcaggagcttctcgtcttagcactactgattgtgcatcccaaaagcagaggagatggccagaagatttagcttggcatccagagggaaacagcctattttcagtatacagtgctgatggtggagactctcaagtatcgattacaaatctgaataaaggaccagggggagaacgtgtaaaattcttagaggacaagcctcatgttaagggaattatcaatggcattgtccacgcgtccggggaaaatacatgttttgtaactggtggaagtgaccatgctgttattctttggagtgagcaggatgatgagaagtggaagccaaaggcattgcacaggaatcttcactcatctgctgtaatgggagttgctggtatgcagcataaacagatgttgttgtcggttggtgcagacaggagaatatttgggtatgatgtacgtgctggaagagcagatttcaagcatcaggttgacagtaaatgcatgagtgtcctgcccaatccgtccgacttcaatttattcatggttcaaactgggacccacgagaggcagcttcggttgtttgatatcagattgaggaatacagaacttcatgcttttggatggaagcaagaaagcagtgattctcaatcagctctgataaatcaggcttggtctcctgatggactttatataacatctgggtctgctgatcctgtgattcacatatttgatataaggtatactgctcacaagccttcccaatctataagagtgcatcagaaacgagtcttcagagccatgtggcttcagtctattcctcttgttatttccatatcatctgatctcaacattggactgcataaggtttactcttgaacctcttgccaatgactcagaccatcactgctctccacacatttgttggtgctgagtatgtagttcatttcactagggattttttaggaaatgatattaaattttttgatgtgtggagttttgtggcaacttgaaacgagtaaagggaggaatttatctgaaaaacaattttggttggtaaaggcctgctcagatgctgcaaggtgtatttgattgttgttttttaggttaagtatatactttccctttgttatttatagcaaaggaaagtatgagctgttttgtggtttgatttattttttaaaaggataaaaatattaagaaacattttttgtgtttttggctatgttaaaactaagctgaaagttgaaaagttagtttatcat

SEQ ID NO: 88648 - DNA, 274 bp, Glycine max
  Clone ID: PAT_MRT3847_51057C.1
acggctgcgagaagacgacagaagggtccccctcttctttttctggccattttaaaatgaaatttgatatttgacgtttcttttttcagttggataagaaaagattgtaggttgaattagagtcgtaaataattcaatatatccacacaaaagtggaaaactgactttatatatataaagatattgggcatcagaggtgaccaccaatgccgcacaaaagcctgtttctctgtgtgacaccaacaaggttactttaaggctttttttttttaaa

SEQ ID NO: 88649 - DNA, 502 bp, Glycine max
  Clone ID: PAT_MRT3847_51058C.1
attgtattattctatttgcccccaccccaaaactggggcatgctaaaggggaacaactttttttgtaaatttgccaatcatggttgaatataaaaaacaccgggggctaaacaaaccactgggtcacgagcttttgggactgttaaaagcttaattacaaattctcagggtgttaacaaatttaacagaaactttaaagggtcgggggggcccttaaatttccccatttttaaaaacgaaacctctgataaactgggctttaaaagaaaaaaaccccccccatttaatttatttatatttgcccccttatccaatattgggggaaacacaacttccaaagaaaaatttttaaaaaaaggggatggaaaaggttgaagattcttcccccttttcctttgggggcctctttttctttttggaagctttacctttagccttaggcgggccctccctgacccccctaagggaaacaccgattgggccccttgcaaaagggtttttt

SEQ ID NO: 88650 - DNA, 423 bp, Glycine max
  Clone ID: PAT_MRT3847_51059C.1
agagagagagagagacagagactgctatattcccgcccaggtttttttatttctacgccaacgacacgcgcggatataactctctgtgcgggccctgctctatccaatcccattaacatactcttcccatgccgaccataatcaattcctaaccctcctgaaccgactactgcgccgaattaattaacttctgcaaccgctataccagatactcatcttcctcttacaggaacagcaaagccacatcttcaattcaacagctctcctagaacatcaaattcaatgtgctatgattagctgccagccacactacgcattcagtcaaggacctgcacatataaaaggcattaatatgcgaaactgtgctagttggacaaaaaaaacaggtacccagctcctctaacatattgtcatatgaaatta

SEQ ID NO: 88651 - DNA, 571 bp, Glycine max
  Clone ID: PAT_MRT3847_5105C.1
gcaagtgactgcaaagaagcagatgagagatgaggttgcagaggagcaaaggattatggatgaaattgattcagatgatttcttcgcagattttgaaccaattaagaattctgaagctaaaaaagactccctcagtaaacaggagaagaaaggaaaacctgatagtgctaactgttccagttctttggagtcattggctgatggttctgaggaggatgcagggaatatggatattgatgagggttataattctgaagaatgtagtgaaggaacacaagagaagatgcaagttttgcctgtaaaaagttcagagaacagtgagaaaggaattgaggaaaaagactctaaagctcctcaagaaaatcctaaaatgctatctacaccaaatgaacgaaatgctggatcgaagacaatagtaactagaaacttgtcatacagtgtggaacgagctgatttggaaaatcttttcaaaccgtgtggagaagttgttgatgttcgtctacatacagatgctgaagggaggtttagaggctttggacatgttgagtttgcaacagcacaagcagcacaa

SEQ ID NO: 88652 - DNA, 391 bp, Glycine max
  Clone ID: PAT_MRT3847_51060C.1
cccacgcgtgcggccacgcgaacttatacgcttacacaccaagggaagaagacaacgacgggggggaggagcacaacccgagcaggcgcagcaggaggaaaaccacaaagagcatgcggggaggaggacaggagcaagcagagagagcgcagagggctagacaacggggaaaatacaccgaaatgctgaaacaagagaaaaaagacaagaaaccaatcctatcatagaaaataataagtcaacaccgccgggacgaaagacaaaacgcagaaacggtgcgcccatacgaaactggcgagcagcgcgaagcgcgaaccaacggttacatagattcgacgcacagattgctcatatcgataagaggaatgccaacaacggaaaggagggggag

SEQ ID NO: 88653 - DNA, 210 bp, Glycine max
  Clone ID: PAT_MRT3847_51061C.1
ctagagaattatcatacccttcaagatgattttgtacctacgtccaatattcctattaggggtaatccttctcgcccaatccatttcggcgagggctgctttaaattttaatggcctgggaaaaaaaattggggaagttctaaccaagcccccggccatcaatcttccggcaaataaactgaaaaaggtgaagagccccctgaaggccct

SEQ ID NO: 88654 - DNA, 327 bp, Glycine max
  Clone ID: PAT_MRT3847_51062C.1
aattacaagtaaaacatgtttaaaatttattttttaaaaagggaaaaaaaaaaaaacaaaaaaaatagtaatactggactgttggataaaatatgatttcaaaaaaaaataaacaaaaaaaacctagccagaataattagggaaaaaacaacactggcgaaaggaaaaaccaaattcattgaaattaataggaatcgcgtaaagtaaaaaaaaaagtaaagaaaaccaccatagtattttaataaaagaaccaaacaattggagaagatagtttttttgtgtgtggagaggaagatatttttttattccaacaaaacacaaaaccat

SEQ ID NO: 88655 - DNA, 258 bp, Glycine max
  Clone ID: PAT_MRT3847_51063C.1
atcgcaggaaagctttatccacattcatgaaagagtgaataactacagtggcccgcgaggcgactattggatcactggtgatgatcacaatgccgtattcactacacagtaaagctagtagagcgggacccaagggggtcagattcaaagaggtgttctacccttattacagcgaagaagcctatggggttttgactttagcagaacctatcttggagggaccggaggggactgacggggagtggggggaggaggatg

SEQ ID NO: 88656 - DNA, 1678 bp, Glycine max
  Clone ID: PAT_MRT3847_51064C.1
ccttcagctgctcgagtcatgtttgtgttcaaggaagacagccacaggcacagcatgttattgatggcttcctcactcaccaaccaccaaaccacaccgtcgcacccattccatcgctgattcctccaatggcttccactaccaccactttctctctttctctccgcaccaaccaacaaactccattccccaaaccctctttcttctccaataacaaccatctgcatttcaactctaataattgggcctggacctctgtttccactgctcgcaagtcaaggatatgcgtcacttcctctcaagttttggattccttagcagcaaaatccgaacccgctcttcccaccaccgtcgaagtcgatttgggtaatcggagctatcccatttacatcggatccgggttactaaaccaacccgactatctccagaggcacgtgcatggaaagagggtcctagttgtaactaacaaaacggttgcgccactttatctagacaaggttgttgatgctttgacaaggggaaaccccaatgtttctgtggagagtgtaattttacctgatggtgagcagtacaaggacatggatactcttatgaaagtctttgacaaggccattgagttgcgactagaccggcgttgtacgtttgtcgctcttggtggtggtgtgattggcgacatgtgtggctgtgctgctgctttgttcctacgtggtgttaattttattcagattcctaccactgtgatggcccaggtcgattcttcagttggtggcaaaactgggatcaatcaccgccttgggaagaacctgattggtgccttttaccaacctcagtgtgtgctaatagacacggacacattaaatacgttgccggatagggaactggcatcagggcttgcagaggttataaagtatgggctcattagggatgcagagttttttgagtggcaagagaaaaatatgcacttattactggcaagagatcctagtgcaatggcatatgctataaagcgatcttgtgaaaacaaggctgaggttgtgtccttagatgagaaggaaagtggactgagggcaacattgaacttgggtcatacatttggtcatgcaatagaaactggggttggctatgggcagtggcttcatggagaggctgttgcagctggcacggtaatggctgttgacatgtcatatcgcctaggttggattgatgattctctagtgaagagagttggagatattttaaaacaggctaagttaccttcagcccctcctgagaccgtgactgtggacatgtttaaatctgtcatggcagtggataagaaggtagcagatgggttgctaaggcttatccttctaaagggccctctaggcaattgcgttttcacaggggattatgacagaaaggctctagacgatacgcttcgtgcattctgtaaatcctgatctttgtgctccatgtttctattgcagctttatccaattccttttagtgagtttttgtatgttgttatataacctcacttgtatttttcttatgtactttggatggcaaccatggttcccattatatacgcaagagtctattacaaagttgtattattagaaattgaggcatgatcaataattatcatttgagcatatatcatattcttcccatcttttttgttgcttacaacaatgct

SEQ ID NO: 88657 - DNA, 259 bp, Glycine max
  Clone ID: PAT_MRT3847_51065C.1
ttactgggtgaatgaagactctacttatacatactttgaagagattccggtggatgttgctcatgctgatattctaaatgatcccacattccattggatcacctatcctgagcacatccacagagatctgtgtgggcttacctctgccagtaaaagcaccatgggttgacgtggcagatgacatctgtatcacaatgcacgctccttccgctgggcaacctctaagagatacaacaccctgtctctgcgccgctaccgc

SEQ ID NO: 88658 - DNA, 274 bp, Glycine max
  unsure (1)..(274): unsure at all n locations
  Clone ID: PAT_MRT3847_51066C.1
gggggacgagactactagtccgccctcgccctttttttttttttttttaataaaaagcacccctaatggttctgcatatttttaatcattaattctcccaccccaaangtactattacttatgattttcacaggccaattattaatatactatgtctctatcttttcatattcaaaatagttggactgaaaaaaatgttaactaaaaaccgcatctttgaataataataatcattaagaataaattctgtacaactgtggaaaaattttaattt

SEQ ID NO: 88659 - DNA, 259 bp, Glycine max
  Clone ID: PAT_MRT3847_51067C.1
ttctttccaacttttggcccttcaaggattgggcaaactagggccctggtgctctttacaatgcttcttttttggaccctttcattttttcccgccgagggatccaaaggggtttttgaaggattgaacctccacggtttctttttttttttgaattattggaaagaaacaaggcctgttttgcaagggcttttttgaaaaggttgttcaaaaacctggggtaaacttttaggctttttgactttgggaaaagggacct

SEQ ID NO: 88660 - DNA, 158 bp, Glycine max
  Clone ID: PAT_MRT3847_51068C.1
gtacgctcggactgcagcccgatcgtgctgtgatatacagtaccatcgatctttaggtgtccaagatgtgccatgctcatcgacgtcctgtacgcgaagaaccccgaagtcttcagcgtcatcgaccagggcggcgaaggtagtaccatcacctaggc

SEQ ID NO: 88661 - DNA, 470 bp, Glycine max
  Clone ID: PAT_MRT3847_51069C.1
actcacatgttgactacacactatttatagcgcctagcacacagaatatgccctgatttactgttttagtgatgctcatgcttctacttaccgttgccggattatcagcccacttattattaacataaggcgtttctataggctactcctagctgtattattcttacgggaccatgcttaccttgccctctaaaccaatggtcttctctggggccaatccgacacacgcccctaattctgatttccctaattggacgccttttggacaatgttttgaacactggtgacccccgtgggaccacaggagccttggcgtggcacctgaggatggatacacctgggcggaatgagtgggatcatccttgattgacagtggttacttcattttagtgctgagcttaagaagatggaccaactccacaataacacgatcagatgaaacggaatgctcatttgggaggagctgaaca

SEQ ID NO: 88662 - DNA, 391 bp, Glycine max
  Clone ID: PAT_MRT3847_5106C.1
acaaaaacgaattaggatttattttatttttacgagataaaagagagtcagtttatacaagcctgaatacggggagggagaggtgtaacatctgacaacctaacttatgcttttttatctcaattgaaatagcccacttattctactaagatctgaaaaaatttggaaaggacggtgagggttggaaaaaggggaatgaatacctatgatgatataatacactaaaggcataaccagagatgggatctgcacatcaatcgggctcgtagatgaccttgttagacactttaagtggtggtaaaagaataggctgagcaagaattgctttacatatagagatgaagggagagagagctctacatgatatagctcagagatccgattttccttg

SEQ ID NO: 88663 - DNA, 186 bp, Glycine max
  unsure (1)..(186): unsure at all n locations
  Clone ID: PAT_MRT3847_51070C.1
gaggtcaagtacatgtccatgttcagctgacgagaacgtcaacgcctgcaccatcatgtgatgcatgcntntgtatagtctctcgatcgtatctgtgtagtagtacgagctagctagtgcatatcgatcttcgtactgtatcatatcgatcgaaagaaccttaatagccaatacaagaggaatgtg

SEQ ID NO: 88664 - DNA, 369 bp, Glycine max
  Clone ID: PAT_MRT3847_51071C.1
tttttgatcgatttggatactgtcatgcttggatttaattattatattatcgaggcggattctttgttttcaggaaaaaaaaaaaaatttttcctcaaaaaaaaaacaaccatgcctggctgtattttaaatggggggggggacaattatcgcatataagagacttatatacagattattgcttccctttcccatagtactacaacatgaaacttggaacaaaactattgatttttccttccccgacttcccccagttaattatttgctgtaaaaaaaaacaaaaactttcaatggtatttccccccgcagtggcccaccaaaaaaaaatccgattaactttgtaaatggggccatattatttataaaa

SEQ ID NO: 88665 - DNA, 308 bp, Glycine max
  Clone ID: PAT_MRT3847_51072C.1
tcctgtatagcgggcgcgatccacttcgttctgtagagtataacctgaccgatgtcaaatttagacgctgcattcagccctagaaggtaaacagctggggctgtctataagccatcaatccaaatggacacttggcatatcgagtggccttgccagattctgcaccataaatttattttcatgaccgaatcagatgtcagatctgagctaccgcgctatcaaatgctgcatatggagcagacgagatgcttaagattgtactaccatgatatgactcaggatcccatctcaggatgctgttggatcaa

SEQ ID NO: 88666 - DNA, 245 bp, Glycine max
  Clone ID: PAT_MRT3847_51073C.1
caattggatgttatttagatctggattttttaaagatatgcaccagtgagttctccatggacgctgtcgtatcgtaattcgccaccacactgaccacctcccgtcctccgccgtgaagttcagcggtggcttttattttccgtttgcactgtgtcgcagcactgccgccactatcccctgtttcctcttccttcgccaacaacacaaacaccaacatcaaacagcggtggcttttttagttactt

SEQ ID NO: 88667 - DNA, 834 bp, Glycine max
  unsure (1)..(834): unsure at all n locations
  Clone ID: PAT_MRT3847_51074C.1
cttcttcttattcaggtttcctttgattccactcctcctctaaatagctcacaactccatgctttcatgtctccgcttgaatttaatccctttgttatgaagaattgggttcaagacaaaattgctccccccttaatgattgtcataacgaggaagcttgtttgcatatataatagagaaaatggtattgttgttagtttattacaggtttgagtggttggttagtacttcgtagaagttagctggtaacaacaaataagtaaatcttgactctatggaagactacaatttttctgttggtcaagagttccctgatgtgaaagcattccggaatgctattaaagaagctgccattgcacagcattttgagcttcgtactattaaaagtgacctgattcgctactttgctaagtgtgcctcagatgggtgtccatggcggattcgtgcagtcaagctccctaatgccccaacatttactattagaagtattgatgggactcatacttgtgggagaaatgcaaacaatgggcaccatcaggcttctgttgattggattgtgagtttcatagaagaaaggttgcgagataacatcaattataaaccaaaagatattttacatgacatccataaacaatatggtataaccataccatacaagcaagcttggcgtgcaaaggagaaggggtcttgcggctatatatggctcttctgaggaggatattacctacttccttcatactgtgaacaaattaagaaaacaatcctggnaagtgttgcagaagtatttactggtgcagattacccgtttcagagattctttgtttcttttatgca

SEQ ID NO: 88668 - DNA, 2704 bp, Glycine max
  Clone ID: PAT_MRT3847_51075C.1
ggctcgagcttttttaaggatatatccacaccgtgcttctcgaccttctctctctttttcttaccaaaaaaaaaaaaacaatagttcctctttttttgtgattttttgtttttgcacacccctcctgaaatctagagacaagccgcaaaattaatccatacccagaatttctctctctgaaatatcttgtggggtttatctgttttttgttcaccttcatagttgagaagatacataaagttgattttttttaatataatagtaatataaagctgtgtttgttgggtgttttggaggatctgctttgctttgctgtgttcagtggattgtgttaaaggggttttgagaattcttgttgaagttgaaaaagctgagagtttttggttgaagttctgctcccatggctgctcaattgcaaaaatctgcagatgaaatgaggaagaaggttcacggtgattcttcaacgggtgaacttaataattccaattcgtgtgcatctgggatgtggtttgtttgttcaggttccttccaagggtgcaagttccccttctgattcaagatcatgtgtatcatctataggggatgcttctggcagtgttaaggaagttgatgtggatcatgagtacttgtccacagatcagggggttccttatcctgctggtggctattatgggtactactatccaggttatggtggtttctatggagagtcagacaaccaagcgtactatgttggtgccgatgccgtggatcttcagtaccctgtcatgcaagcagataatggatcttatgtctatctcgtgccaggatttcagactggctacccttcatactttcctttaagtcctgctggtgttgaaggacagtatgttggccataatgtctaccctcctggctccatctttcaacaaccgattggatcgcctggttattatcctgcttctctatcatatggagagttacaaccatcaacatactcatggtattcacctctaatgacacaagatgggttacaaggacatggttataatgaactggctggtaaaccaaatggtagatccaatttgtcttcccagaatcatacaggtggtgttgtgtcaaagtctgtacccccacctaactcggcagaagggaagggtttgacaccattattagaggtctcgtcaactcatgttaagcgtaaccagccaaaacaaacaaacaaggcaccagtttcggtcctccattcacctgttgtgaagtttcctacatacaatcaaggaaagagtgaattcctctatccaaacaacttgcttaatgtgaaagcaaacacaaagggttgggttagtactgaaaagttgaaacagagaaacaaggtcaacgattcactcaatgagcagaatcaaggtcctagaacagctaatgcaaaaggtgcattaatgtctggaggtaattctgtgagaggctcagccctagttgggagtggaaatgttaccaacaaaatcagggcagatcagtacaaccttcctgattttccaaccaaatatgatcatgcacttttctttgtcatcaaatcatacagtgaagatgatatccataagagcatcaagtacaacgtgtgggcaagtactcctaatgggaataagaggctggatggtgcatttcaggatgcacagaagagaatggaagaaaaagggtgcaaatgccctgtgttccttttcttttcggtcaatgctagcggtcaattttgtggagtggctgagatgaccggacgtgttgatttcaataaaagtatggatttctggcaacaagataaatggaatggatatttccctgtcaaatggcacattataaaggatgttccaaatcctcaactacggcatataatactcgagaataatgatcacaagcctgttacaagcagtagagacacacaagaggtgagttttccccaaggtgttgaaatgctcaacatttttaagaattatgtggctagaacttccatattggatgactttgaattttacgaaagccgccagaaggtcatgcaggagaagaaaacaaggcaatctatgccccatatcaatgtacagcaaatagaggaattaaccatacttgggtcattagacctatcatccgtgaagaacatggaggatcctaaggtggttaagaaagtgaatgactgagtaacatgtagggctgatgctattcctggggaccccccatgtcagcatgctggtccgcggtaagtcatgtgggccccaaagtaagaaaaaaaagctaatgaattcaaacttgaagttctaaaccaaaaaattcttgctgatgatgatgctttagaaagggagaaaaagaagaaaaaaataataatttttatctgggcaagtgggtgactgcattcctaattgtacaaaactacaaaggaagaaagtctttggaaagtggatggacccggtgatatagctgttacagggtgctatgaaaagcatgtgtcatttactctttttaaaaaaataatttttgtttgcacataataagctcagtttggttccttctttgttcttggtattttcacttttttttctttcttgtagttgtatttaccgattttaacaacataacaaatggcacgatttggacaactcaccaataataatatgttgagaatgatgggttccatgtggaaaattattggtgttgcgaactctgaccatgcattatttca

SEQ ID NO: 88669 - DNA, 421 bp, Glycine max
  Clone ID: PAT_MRT3847_51076C.1
acaaaatacctataaataacacaccaattaaacattttagcaacataataaagcaaaataataaaccctaaattccacaatacttaaataatcaagtctagcaatgcatcgttactagataattacttgcagaggtgatagtagtggtagaacattcttattgatggtttgatattgttagaggtgagggtttgattcaagaacaacacaccaaatggaggtatgttgaacccttaacacacagaaaacaacccaaaacgagtgctgacttggtggcaaactcgagagtctaccgagtttgcatagagtttacagagaatctactaaaaagcgagttgcatacaagtcaactcacagagggtaagtagacttgtaaactcataagatttagtgagttaagtcgagagtttgataaccatgt

SEQ ID NO: 88670 - DNA, 2843 bp, Glycine max
  Clone ID: PAT_MRT3847_51077C.1
ctgaggactctctctcttccattcattcatcattcagcgtctctttaaataggctctctattcaaaaccatatcttccaatccaaccaaaaaaagattatcttttttaaggatatatccacaccgtgcttcttgcccttctctctctcttcctcacacccaagaagaaaaaaaaagaaaatttctcttttttttgtgatttttttatttgttttgcacacccttcctgaaatctagagacaagccgcaaaattaatccatacccagaatttctctctctgaaatatcttgtggggtttatctgttttttgttgtttttgtttgtacccttcgattcttcaccttcatagttgaagatatatacaaagtatatataatagtatataaagccgtgtttgttgggtgttttggaggatctgcttgttttgctgtgttcagtggattgtgttaaaggggttttgaagatttttgttgaagttgaaaaatctgagagttttttggttgaagttctgctcccatcgctgctcaattgcaaaaatctgcagatgaaatgaggaagaagcttcatggtgattcttcaacggttgaactcaataattccaattcggttccttccaagggtgcaagttccccttctgatgcaagatcatgtgtatcatccataggggatgcttctggtagtgttaaggaagttgatgtggatcatgagtacttgtccacagatcagggcgttccttatcctgccggcggctattacggttactactatccaggttatggtggtttctatggagagtcagacaaccaagggtactatgttggtgccgatgccgtggatcttcagtaccctgtcatgcaagcagataatggttcttatgtctatctcgtgccaggatttcagactggctacccttcatactatcatcctctaagtccagctggtattgaaggacagtatgttggccataacgtctacccccctggctccatctatcaacaaccgattggatcgcctggttattatccagcttctctatcatatggagagttacagccaacaacatactcgtgggattcacctctaatcaatcaagatgggttacaaggacatggttataatgaactggctggtaaaccaaatggtagatccaatttgtcttcccagagtcatactagtggtgttgtgtcaaagtctgcacccccacctaactcggcagaagggaagggtttgacatcattattagaggtctcatcaactcatgttaagcataaccagccaaaacaaacaaacaaggcaccagtttcggtcctccattcacctgttgcaaagtttcccgcatacaatcaaggaaagagcggattcctctatccaaacaacttgcttaatgtgaaagcaaacacaaagggctgggttagtactgaaaagttgaaacagagaaacaaggtcaacgattcactcaatgagcataatcaaggtcctagaacagctaatgcaaaaggtgcattaatgtctggaggtaattctgtgagaggctcagccccaggtgggagtggaaatgttaccaacaaaatcaggacagatcagtacaaccttcctgattttccaaccaaatatgatcatgcacttttctttgtcatcaaatcttacagtgaagatgatatccacaagagcatcaagtacaacgtgtgggcgagtactcctaatgggaataagaggctggatggtgcatttcaggatgcacagaagagaatggaagagaaaggatgcaagtgccctgtgttccttttcttttcggtcaatgctagtggtcaattttgcggagtagctgagatgactggacgagttgatttcaacaaaagtatggatttctggcaacaggataagtggaatggatatttctctgtcaaatggcacattataaaggatgttccaaatcctcaactacgccacataatactcgagaataatgatcacaagcctgtcacaaatagtagagacacacaagaggtgagttttccccaaggtgttgaaatgcttaacattttcaagaattatgtggcaagaacttccatattggatgactttgaattttacgaaagccgccagaaggtattgcaggagaagaaaacaaggcaatctatgccccataccagtgtacagcaaatagaggaattaaccactacacttgggtcagtagacctatcatctgtgaagaacatggaggatcctaaggtggttgagagagtgaatgactgaatagcatgtggggctgatgctattcctggggacccgccatgccagcatgccgatcacgatggtgtggcgatgtgccacgtggaccacaaagtaagaaaaaaaaaagctaatgaattcaaattttaagttctaaaccaaaaattcttgctgctgctgatgctttagaaagggagaaaagaaaaagaaaaagaaaaaataataataatttttatccgggcaaatggtgactgcattcctaattgtacaaaactacaaaggaagaaagtctttggaagtggaatggacccggtgagatagctgttacagggtgctatgaaaagcacgtgtcatttacttttttttttaatctttctttgcacataataagctcagtttggttcttcctttgttcttggtattttcaattttatttttcttgtagttgcagttaccgattttaacaacataacaaatggcacgatttggacagctcatcaataataatatgttgagaatgatgggttccatgtggaaaattattggagttgggaactctctgaccttgcattatttcaatttgaatatactccgcgcattattgcgtaatg

SEQ ID NO: 88671 - DNA, 352 bp, Glycine max
  Clone ID: PAT_MRT3847_51078C.1
ctctgctctgcctctagggttatcatatctacatttccatttcctctctctcaggttccaagaatcttaaactactgggaaattcttacccaaccgcgggcgcttattaccaaaacgccgatcagactgctacgaacacgctcataagctacatacctgagaacagatgcactcctataatgctccgtttgacatggcactctgctgcaacttacgacgtgagctccaagaccggcggtcccttaccaaccataaagtacccctccgaactctctcacggagctaacaactgtcttgacatccctgttaggattttagagccacttaaagcgcactttcctattatgagcta

SEQ ID NO: 88672 - DNA, 2794 bp, Glycine max
  Clone ID: PAT_MRT3847_51079C.1
ccacgagtcagcacactcttctttgttgtctcttccctctcccatttctctttcttcgccaactgttcctccttccattccaacacacacaacaacaacaacaaaaactagttagattcatcgctacaccttcacattgctacctaaaaatatcaattcaacaacggtttcagggttttagcttctgctacgtgttggtgtggtgaatgccctttctgttctgcgtgtgccacctctctcagccagtgttcactacacccacaacacaagctcttacagggtttttaagaaagatcagtctgacagctaagtctttgcggggaagcaatatttggctgagcttgctgactgactgaggttaaaggtgatattattggatgtgatgaagcttaaaacatggcttgcgagtgttctgttgctcactgttgccatgcttaccgctacattaggtgcattcgtgggggtaaacattggcactgatgtttctgatctgccatctgcttcaaatatagttgacattctacaagctaatcaaattactcatgtgcgtctttatgatgctaacgcgcacttactacaagccctttcaaacactagtattgaagtaattgttggtgtcaccaatgaggaggtactgaggattggagaatctccatcagcagctgcaacctggattaataaaaatgttgttgcttatgttccctccaccaatatcacaggaatagcagttggtagtgaggttctttccactatcccaaatgtcgcccctgttctggttcctgccatgaattctcttcacaaagccctggttgctgcaaaccttaacttccgggtcaaagtttcaactccccagtctatggacattatccctaagccttttcctccttccactgccacctttaactcttcatggaactctactatctatcaactccttcagtttctgaagaatacaaattcctcctacatgttaaatgcctacccttattatggatatactaaaggagatggtattttccctattgaatatgctcttttccgacctcttccttccgtgaagcaaattgttgacccgaacactctatttcattataacagtatgtttgatgctatggtggatgctacctactactctatagaagccttaaatttcaataatatacccattgttgtcacagagactggctggccatcatttggtggagctaatgaaccagatgctactgaagaaaatgccgagctttacattaataatatgattcagcgggtcatgaatgattcaggtcctcctagtcagccaaacatagccattaatacatacatatatgaattgtttaatgaagacaagaggaatgggcctgtatcagaaaaaaattggggcatcttttataccaatggaagtactgtttatccattgagttttggtgcttctgaccagattactgggaaattcttcaggagtattttgtgtggctaaagatggagcagacactgataagctgcaatctggcctgagctgggcatgtggacaaggaggagcaaattgtgctgcaattcaaccggggcagccatgctatctccccaataatgtgaaaagccatgcatcttatgcttataatgattattatcagagaaagcatagtagtggtggaacttgcgactttgatggtaccgctacaattactaccaaggatcctagttcttcatcctgtatatttgccggaagttctaactcgagcactggtggattgagtttacctccaacggctcttggaccttcaggcccctttggtgcgagtatgaacctgcaagtgtctagccttaagtatttgatatctgctgttggtgtatttttggctctggcggtgttatgaccacaaaggtcgatgctctttaaatttcaattcaatgattcgtgtaatgtggtcctgtcgattttgtttctaacttttcttgggtccaatttattattcagatacgtcccatcttgtgcatttggggtcattgtaatttatcacactcttaagattgttatttaatctagtgctttaaccagaggagacaagccgaatacgggtcccttaaggtggaatagccctagaagatcagcatggtctgactctcctgtcagaggtgttgtatcaccatcttccgggatttcgtcacaatcttcagggactcaagcagggcagaattattatccaactttccacaagacccggaacagtaagaagttcacaaagcaagagtgggatgagttctcaagagaatccactaagcaggctctagcagaatgggcagcttctccagaattcactgattggatcgttgagcatgcagaccggatacaagtccttccaagcgagagttcggatgagacaatgggaagtgaatcggattccacagatcgaggaagtggaagaggatttgggctttttaattggcagtgacttgagtataaattagaatgtactaacaagcggaaatagtgagttagggagcaatggcaatagtgttttagccttttaggtaggaatttaggtttgcttgctgtagccaactctgtagatagttttattagtttgcctggattttccaaactgcaaagcctgggcaatcttacgaaatttattgttattggttagttaattttttgccatgtttttgttgctcgtgttatttttagtttgtagtagtgtgtaattcttcttgcactgtaaaatctttatcagttggatttcaattgcttttatcaatgtgtctttggatagaaatgttaacatgttatacctta

SEQ ID NO: 88673 - DNA, 710 bp, Glycine max
  Clone ID: PAT_MRT3847_5107C.1
agtggttcatggacctggtgttgggtcctagtctttcccagggcgagtcgttcccggatgcctacagcctgctggtggaagtgactggcagggcatatggctccggtctggcctcatgcgtgccggtgattgtcggcttttccaaatctggattcttgccgcctgcgggtggccggccgtggagttgcacggaattcgctttggcgggcactcctgggctgggcccttggtcgtacagctagtgtgccgcccctgcagaacgactttctggtggacgatgtggctggcgggtcattgtttgctgggttcctggcagtggtgttgccccgtttcctctgttgcgtccgcagaggggcgggggccagggaggtctgtccagtgtacggcctcggctgggggtggtgccggtgtactccgctgggcggggttcactccttgcttcccacgcgtccggcaacacgaaaattaattcaacaaccctgtttgagttatgtaaatattgatgtatacccccccttttgaatatatgtcgaacagtaactctggcaagtgaacagaaaggttgtttgataattgttggtctgaatggtctctttatcatctaacagattttgtatgtacctcaacttgtaattaatgatattctgaagtctttatcatctaacagattttgtatgtacctcaactgtaattaatgatattctgaagtc

SEQ ID NO: 88674 - DNA, 457 bp, Glycine max
  Clone ID: PAT_MRT3847_51080C.1
gagacctgggccctaaggtggagttccataacttaccaaacgcgagctgtttatcgaaaacatctaaagcggaagactgtctttaaccctgcccctaccctaccaatagattctttgtaccccccatttgatgaccaaaccttggataaacaacggttagaatctaatacggtaacgatacaaactcaacctgcacattgtctcagagccttggccgaacgctgcttctgcaccccactcttgaaacttctagtttgaaacctgaaccaactcacacgttatctacatattggggcacataccacacagcagtgctttaaggcaaattgaaaataccatcccctaaactcgtctttgagtgggccacatagcatttgaggtgttccattcagctaggtactctcctaacaagaaccaattttcatatacaccatgatgcaatattttaacttaatga

SEQ ID NO: 88675 - DNA, 287 bp, Glycine max
  Clone ID: PAT_MRT3847_51081C.1
gaaacaaaaaggaaacctttctaaaacaataaaagttataattttacaagaggaaattattgcaaattgaggggattgaatgacaccagcaaatttacattccaagaatgccaattctcaagagagagcaatgtaataaagaccatcatatcatcgtctctctaagcaaactaaccacagcatcaccacttagcagttacactttccactcccttcttcgcttacaaaatgcctaccagcacaactctatcaaaattacaagatacctattcttccactccctcttt

SEQ ID NO: 88676 - DNA, 226 bp, Glycine max
  unsure (1)..(226): unsure at all n locations
  Clone ID: PAT_MRT3847_51082C.1
catgcacgcatacgtgggctcggatcctctggcgcggtcgntnntttttttttttttnnnntttttggaataacccatccaacttttttttggaaatatttggattggggttttggcgaggttaacccccttagaattccaaccaaatggtttggggaaaaccccgcccttcttgggagggcaaaaagcttgccccaacttccaatccaaaaccaaacatttggcc

SEQ ID NO: 88677 - DNA, 270 bp, Glycine max
  Clone ID: PAT_MRT3847_51083C.1
taggtttttcctccagggttttcttcttaagagggatttttctatggaaggggttcctcatcccggggacaggattttcttcaaaggaaggacatgtggaaaatccaaaacaaaaaacctgagaaaggaccccaaaacaaaatgaattattgaactaggatataaggatggtggagcacctggtaaccttgggtttggttatttaaagcataccattcttaacctttgccttaaatattgtaaactggacaatttcaagcaaagcaatcc

SEQ ID NO: 88678 - DNA, 539 bp, Glycine max
  unsure (1)..(539): unsure at all n locations
  Clone ID: PAT_MRT3847_51084C.1
tatgttgtggccgcccttnttttttttttggtatttttttttttttttcaaaatttaattcataattaactgccaatgaaaaatacattaagacagctaatcattctaactaaatacatacccctaaaaattacatttccttctttaaggactcacctacagagtcttaaatcataaaagaagaatccagcggcaaatgcaaaggaaggtggtgctcacaatacaatacaatagtcattgcattacttaaatatcacatcatagcagaaaataattagcaaaacatgaactaaatagaactagctgtgggcaaaatacaaaccgatggtgcttggctactggctagttgtctaaccacaagctaagcatcccatagtatggcatagaagttgttatacataaaggtcttccatgaccgagcagtgctttaccattcggatccattaaaatctgaccccttcaatgtaaaatgttctttccattgacctaggctagcaaatggcatgagaccacaaaacaacggtagaaacacaagcata

SEQ ID NO: 88679 - DNA, 222 bp, Glycine max
  Clone ID: PAT_MRT3847_51085C.1
ggaattcccgggtcgacccacgcgttcgtccaggcgtgagacgacgcctgaggggggacagacggacgggtgaggaataacaacctagggggggtcgatggtgtgggcattcaaacctaaagcttgcgtctgtcggcttgggttggagcttgtgctgcgtaaagaggaaccatgtctgactgttgcggtaactgcgtctctgaaactatggctaatactgca

SEQ ID NO: 88680 - DNA, 642 bp, Glycine max
  unsure (1)..(642): unsure at all n locations
  Clone ID: PAT_MRT3847_51086C.1
ccacgcggtccgaccagttatccctggttgttgcctatgttaaaccagtgtaacatacccatatttgatgaggcatttatagactgtgctgcttcaaacagttgtttttctatgcctggtcaatcacttggccatgttattgcatccaaactagtgggagctaagcaagctgggtattttattgaacctactaatctctcaacttcaaattgtgatgcacttttttcacttttttctgatgaattcttctccaatgacttttactatgcacaagaagaaattgaagttttgcgttctctccctatatataaaacagttgttggttcttatactaagttgcaaggtcaagatcagtgtatgattccttcaaattcatttttaaaaccatatgatgaacattgtctttcttatgccactgattcaaatgaaagttcatttcttcgagcttcttggagtgttggagttgcatgatcaacagatcttagtacgctttggcttgcctggctttgaggggaaacctcagaatgaacaggaggaaatattaatttacatttttaaaaattggcattgatcttcaattcagatcaatctgtggnttgaagctttgaaagggacccgcatttgttagaaattctggatgag

SEQ ID NO: 88681 - DNA, 324 bp, Glycine max
  unsure (1)..(324): unsure at all n locations
  Clone ID: PAT_MRT3847_51087C.1
aagctcttgatgcgcagactcactcatatgccttgtcagagagagaaatggcactgatggcagtcgtgctccgcgaagttcgtgtgacactccaagccgctccanaagtgcaaccaaggagtgccaatgtagcacacggtgacgatcatcactccaactatgacgtcctcgacagagtcctcgacgtcgtcaaagatctcgccaaagtcgatccctccagagattagtccagatgtacacatccacaaagtacttagtttggatagcttgtacaatgtggcaattgatatggcactagaagatgagttcaagctacagatacag

SEQ ID NO: 88682 - DNA, 564 bp, Glycine max
  Clone ID: PAT_MRT3847_51088C.1
gcgggggtttgcctgctacatgtgtagcagtaccacctgcttgggggggggggggggatggatattcataataaataataagaagaagaataagtgtaggagggttagcctataggaatagtaccgtttggcaattgagggaaagaaagaaagacgggaaagaacaacaagagtagaagttaaatatacagcagtggagagagactgcaagggccatagaatatcaacagcacaccaccaacaccataccacaaagtaagaatgtgagaagaagtgagcctagtagaatagcaagaagccgataacacaataacacaacacctggcacggaacttagcaagccaaagcaagcatatgcggtaaagaaaaagtttaagcggccgggccgccacctaggacgacgcgtttatacttggcttatattcaagactaggctggccaaggcccgatgtagtgtgttagcaagggctaccccaagatatgtgaacagaaaaggctgcctttaaagatgcagcaatttaaggtgtacattgcataggttataggtttataggagttaaacct

SEQ ID NO: 88683 - DNA, 365 bp, Glycine max
  Clone ID: PAT_MRT3847_51089C.1
ctcatacattggcaagttaatatgtcagtgggagagaggcactgttcatctgtgacaatcttgactcaagcactttagccaacgtggggatagatcagacaggagcgtagctactcaaagtatcacttgttcataatcacactcaataatccttgatatgcttaccagagaactctcaatcaatcaacatactatttacccatctcattaccaacagatattgagccttgataatcatcaccatcaaactgatctttatattcaccaagatcagctacatgatcatattccaacatgcccatgtccaaacatctcctatattaactgcggtagtttacctgtacagaaaccaactacataaatgc

SEQ ID NO: 88684 - DNA, 397 bp, Glycine max
  Clone ID: PAT_MRT3847_5108C.1
ctgctgtcacgctgaaccgtgctcacaggttggcgcaccttaaacccggcaacaacagcagtcgttacttgatttcaacaacctctcaatttcttcctacttacgtgtgtgctatttcttaggggaaagaaaatgactctttgtgctgcgcacagacttcatgaatcatctcttctaccactctcaggtgatatgctgaacactctgctatttgatatatgacttcgtgccagatttaaacttcttatgtctcttatctaagttcattggccaaattcaagatcaagctgggagacatcttggattatttgctcccacacttctatctggtataggacatcgtggctggactattctatatctttcctttgtttcactctctaattgtcactgatcc

SEQ ID NO: 88685 - DNA, 227 bp, Glycine max
  Clone ID: PAT_MRT3847_51090C.1
cttgatcctctgagcggccgccctttttttttttttttttttttttttagattatgaacatgaagaaggggcccttgctaccagattattatccggggactcttacaagcgagcatagcaagggggtaggattgaaggttttctgagatctgaagtcctagcccttgaaatgatctggacacccttattatcgaaggagaagcgcaattaaatcacccttatacttc

SEQ ID NO: 88686 - DNA, 150 bp, Glycine max
  Clone ID: PAT_MRT3847_51091C.1
gggacgcacgatgtgcttcctagatcgaggcggtttgcttcaccggggcacgcgacggcgctgattgcaaccgatgacggaatggttaaacacgtgtgggacaggctggtgcgagtacattaccaacaagactgggggccaataggttga

SEQ ID NO: 88687 - DNA, 1068 bp, Glycine max
  Clone ID: PAT_MRT3847_51092C.1
atgggatcaagtcaaacgccttcgcttaaaaagaggttctatcaagtcaaggtcaagagcctaggaatcaccagtctaaaagagctagggcagttgatgggtcagctccagcggcaagctttttgcaaagcttacggtaaaatctgggacctagccatggcagaagtctccacagaggccattgcctccctcgcccagtattatgatcagccgttgagatgcttcactttttggggacttccagctatcacccatggtagaggcgaatgggccccgttcatagacattctcacactgttgatcttcggaggagtcctctttccaaatgtggatgggttggtggacctagcagcgatcgacgcttttcttgcctatcatgaccacaaggaaagcccgattgtcgctatgctagccgacctatatgacacctttgatcgaagatgtgagaagagcagtacgaggattgtttgctgtactctggctctttatgtatggttggtttcgcaccttttttgccaagaggtgaggcatgcgtgcccgctagaaagccaccgttcatgcacagagaaaggaggggcaaattgggaccgactcttagcaaacaaagaaggagcgtttgtcaactggttccctcgatggaaagaaggaagaaccggggttcttattttgtgtggaggattcccaaatgttcccttgatggggacaatgggttgcatcagttataatcccgttcttgctataaggcaacttggctaccctatgagaggggcaccactagaggaagagctcgcgcctgtcatttcacgaggtttcaataagaccaacgtggagacacttcacaaggtccgcaaggcatgggaggtggtgcaaaagaaggacaaagaactcaggggcagtaacaatgggcccatcggtggctaccgtaactggttgaaagcccatgtgcaaggtttggattggctcctgagtttgagaactgctaaaagggaggaatttgaggcaccggaggaagacgaagagatgcaggcccttagggcagaactcgagcaagctcaaacagtcaaataa

SEQ ID NO: 88688 - DNA, 365 bp, Glycine max
  Clone ID: PAT_MRT3847_51093C.1
ctagataaacataaatattgctttattaggttgatcccacaaagtaagattagaatccttatttgacatattggatattccaaacataacttacagaaacgtgaatacatacatacaatgatcagaagtctacgatttagccaagactgccacgtatcctagaagccacatgagtgccagaatttactccaatcttcctgaacctgatgatccaaatcacagaacccaaaaaaggttgaagctttattatgatatggaaagagtatgactttacacgattatccccctccgagaggtattcatctgagattgtcatgatccatcccatgaagtagacatacacaaagccaggttagacattcatt

SEQ ID NO: 88689 - DNA, 553 bp, Glycine max
  Clone ID: PAT_MRT3847_51094C.1
actcaatatgcaaatatttataaagaatgcaaaaacatcaatgtgaacaggacaacatacagaactaagtaaagcatgaacaagactgacaaaattaaattgaagatcctacacaaatggaagaaccacccgataggtttacagagaattacctgttgaaatcatttgcgtttcagcatttacttaagtaaaaactgtaactcagccaattgctcaaacgcaacatgatgaaactcatagcagcaacatccaggttcagttgacctttatatagaagctttacctaaccatgacaatttcttcaattacacaagagaaaatcaacccagcataactgtatctcaaagctccaacagatttcaatgagaataacctgcatttgttttggatttaacatacccaccataccacaaaacatgagtaaacacaatggagcctatcgatggccacatcaaataatgatgcttgaactaaacaagattatacaacaaaattggccacatcaactatagaatctagatatgaaagactgatgaggagattaacttaaata

SEQ ID NO: 88690 - DNA, 1662 bp, Glycine max
  Clone ID: PAT_MRT3847_51095C.1
aatttttactatgtttgggtcttgatatttatttttaaaatttggtggtgtctgaatattattggtttctagttcttcaaaaatgatagttcggagggagaaacccttttagccagtgttcgattatatgcatctaaaacttattggactaaagatagcaataatgttaaatttaactttcagtggctatttaagtttatctcctcctcagtctttcatatctagattctatagttgatgtggccaattttgttgtataatcttgtttagttgcaagcatcattatttgatgtgaccaacgataggctccattgtgtttactcatgttttgtggtatggtgggtatgttaaatccaaaacaaatgcaggttattctcattgaaatctgttgtagctttgtaatacagttatgctgggttgattttctcttgtgtaattgaaggtatgaagtcagattctgatgctctatggtttagagcttatttgtttttcttctagtaagttttgaaataaatatgggctactgcttagctttgtattatgtacgaatgcatttgctctaagtactgttttccaatatttttaccatcatctggtgtcttatattgtcgtgcacttttcccccccatttttccttttgttttttttcctttttcttttttcttttcccccccaagaaattgtcatggttaggtaaagcttctatataaaggtcaactgaacctggatgttgctgctatgagtttcatcatgttgcgtttgagcaaaaagctgagttacagtttttacttaagtaaatgctgaaacgcaaatgatttcaacaggtaattctctgtaaacctatcgggtggttcttccatttgtgtaggatcttcaattttattttgtcagtcttgttcatgctttacttagttctgtatgttgtcctgttcacattgatgtttttgcattctttataaatatttgcatattgagtaattttcagtgtcatcttaatggttgagttgagtttttgttgtgttgatctcatacggtgtcaaaacttaaattgtgggtttaaaaaatgagtttgttgctgagaggtgctaaagaaattctggttttttttcctgttggtgggtcacaactaagtttatccccttgttttgtgctctttttttttctgtccccagccccgttttctctttgccccttctgctcccatcctttttttttttttggttaggttaagcattggatatgatgatcttatgagcagctgcaaattctcttcaccagatgattgtgtgaagtttgttcttggaagttctgttggtgttttagtttccgtttttttcttgtctcttcaccacctggtctagttactgatgttatgccttctccagctggcgcttaggcctttaccgcactgtttgttcatagttctgcacggtttaataaaagaaatgggtagtactattctaggttattgttgagctcttaacatgttgatgcgtgcccttcaacatatacaaataactaatggctaactgagggggaagtattgagcgttgatgacttaggctcttggggaatattttatcgaatgctggtccactttttcctccacaatcatcctaatttaagttgtatgcccaaaaaaaaaaaaaaaaaactcgagac

SEQ ID NO: 88691 - DNA, 175 bp, Glycine max
  Clone ID: PAT_MRT3847_51096C.1
gcggcgggcccatgcccaaaagaatgctgctgttttgattcacatcctttgcagtgcgcctttcactctttccccggttgggtgacatgtcccccctccccccaaacaacctgtggctcactcccgacagagctgccccctttatctgccctcttgtttccctctccctgtctgg

SEQ ID NO: 88692 - DNA, 358 bp, Glycine max
  Clone ID: PAT_MRT3847_51097C.1
gtgcgcgtgggagaaaaggtcttattgttgagggttttctgaagcgaatccaagggtggcaccaacaggcagaaactaaagcccttgttcgagtgggtaaccctgtgatgtgcacccgctgttgaaacgatgacggatctgagcgggcagcttctcgcctgctgccgaggcccccactactgtgccagcgaccgactgcaagaccgttccattgggattcatccggcggtcccacaggatcggctactgcggactcttcgtcttctatctcgtcgacgtctggatccagcgtgagggcggcgctcccctcatgggagcccttccctggatcaagtcacttggaactcatccctgacca

SEQ ID NO: 88693 - DNA, 161 bp, Glycine max
  Clone ID: PAT_MRT3847_51098C.1
ttttatatttttattttgcaacaattttttatgacaagcttccaaatttacaatgggttggatggcaatagtaaaagggttttcataaaatacaaaaaaaaaaaggatgactgggaaacacggaataatcttttaatcaccttctttaacggtattgacaa

SEQ ID NO: 88694 - DNA, 322 bp, Glycine max
  unsure (1)..(322): unsure at all n locations
  Clone ID: PAT_MRT3847_51099C.1
ttgttttaaaaaaataaacattaaacaattaataactaaactagtatgcgaccttacagcattgacagagagacagacacttagtttgtacaaattgtatattcagaagagaaagagtgttgaaaaagccgcaaaggacanaaccgcgagagccaagcagagcatatccaacctcctctcatctctttgtttcttttcttttctctccatctttctgttcatgaattccaagtatctactccttccttcttcctttccgtccttaagtaatgttccccttttaccctccaacgcccgtttcaaaatccccaaactctcctta

SEQ ID NO: 88695 - DNA, 202 bp, Glycine max
  Clone ID: PAT_MRT3847_5109C.1
ggaacttcgcacgttcagtgtcagacatgcctagctctgtcgtgccgtcgttgacgagggcgtttcgggtgcgaagccctgacctccgctcgctctttcggtctcgcgctcttgtccatcgcttccgccaatgtcttcgtcgaggagcgtttcgatgacgggtgggaagatcgaggggttaagtcagattgggaaagggatg

SEQ ID NO: 88696 - DNA, 566 bp, Glycine max
  Clone ID: PAT_MRT3847_510C.1
ggggttccacggtcgacccacgcgtccgtccacgcgccgctttttagaaaacagagtgcttggttacaaagatcttgacttgcttgagagaggaagagagaggagtctcttgctttcttcagagggaacatgggcttcttgcaatcctaattagagcaaatacatgatatcctaggagataaacacacacacgaaaatcttattgaggaagctggttgccactagcttcaccaagacttggagagggagcagatgaggatggccatcctgaggcaagaacaaacattcagacaacaggttcatgagctgcacagactgtaccatgttcagaaacagctgatgaaacagatgcagatcgccaagctgaaccaagctcaggcaatcgctgccaacgccgaaaccaaaccgaaattcgagatcactttcgccgagaattcaaccaaccatcaccaccaccaccaattctacagcttccagagcagcaagatcatgtctccccctgcagcagcagcagcagcagcagatcaagaagaggaagaagaatgcgacctccagctgacgctggc

SEQ ID NO: 88697 - DNA, 251 bp, Glycine max
  Clone ID: PAT_MRT3847_51100C.1
ggctcgaggtaacatcccgcagacttcgacgagcgcagcgagacatgtcaactcctataccctcgagacaactatgaattgctggcatgtgtacagtctctctaatccggaatcgctctctgctcctgagctctcatgctcaagagcgtattcggcgtagacagctcgagattacggcacacagacaccgcgcctgttcttcagctaaaagagcctgaacccagcacaattgctccgagtgcgcttgagct

SEQ ID NO: 88698 - DNA, 636 bp, Glycine max
  Clone ID: PAT_MRT3847_51101C.1
ctttcgtgggctttgcagagatctgcaccctggtcctgttagtctcttgcattggagtgggaaaggtaaaccgtgggttcgattggacgctaataggccttgtcctttggatgcgctttgggcaccttatgatctattgaacactcccttttctttggattcttgaacaaactttcttcagattgggatgataggatgcatccatataaatatatacacatacatatatatagtgtatacattacaatacaatacaatgcaatttgagctctctctgctggcgctttcggatcggacgagggaacgaagattgaacgtacggttcaatgcaagggtgacgattttttttttaattttcattctgtagattcgtacagatttgaagtgaacacaaggcaacgcagattcaaacggggaggaaaagagattcgtgaattttgaagtgacaggtaattgtactgttgttattgtatcaactatcgaataactgtgcatagaaagagcttccatattttggatgcgtgaattcctcgtttttattttcaacttaataaagttctgtacagagtattgaacattgattgttaaaaaccaaaaaaaaaaaaaaaaaaaaaaaaaaaaaaaaaaaacccaacc

SEQ ID NO: 88699 - DNA, 478 bp, Glycine max
  Clone ID: PAT_MRT3847_51102C.1
tttgctgaagcagacacattcttttgttttgttgagctgttgagtaggttccaagataatttttgtcaacaacttgacaatagtattgttggaatccgttccactattacaagattgtcccagcttttaaaagaacatgatgaagaactgtggcgtcatcttgaggtcaccactaaggttaatccccaattctatgcatttaggtggattattctcctattgacacaggaatttaattttgccgacatccttcatatttgggacgtcattttaagtgatccagagggtccacaggagacacttctcagaatatgctgtgcaatgctaattctcgttcgtagacgccttctagcgggtgatttcacttctaacctcaagatgctgcaaagttatccctctacaaacattagtcatttgctccaagtagcagataagttacatgtacagtcagtctaaaaatggttttcaccgcggatta

SEQ ID NO: 88700 - DNA, 348 bp, Glycine max
  Clone ID: PAT_MRT3847_51103C.1
aaaaaaatgaaaaatatgatcaataactgataactctcacagctgctccctatggttgaaaaaaaaagaagatgttatactaataaaaacggaagaaaaaactttgtcaattggttgctcatggggatccctggattgagcaatcagaataatgggcagcaaagattatgcataactgagcccatttcattggctggaccaactgaggatgatgtgatcaagacgcgtgaacttgagaagtacttgcaaggtgttggattgtacgagagtcacgaggaggctctgggaagggaggaagtgcttggcaggctggaccaggttgaatttgattgtgtttaatgcaatttc

SEQ ID NO: 88701 - DNA, 573 bp, Glycine max
  Clone ID: PAT_MRT3847_51104C.1
agaagaaaatcctcagcatcaggatcctcattattcaaaaagtaccttaacaaccagccattttcacaccagtttttgaggatgactatatagctgaaactagtagttgtttttgttattattaaaatcatacaaaaagatatagagaattagagataataaaacgcagactataaacaatgcaaacaagaacattttcattcagtagtgtacaattggtctttgatgcacttaccataccaaacatgtagtgttccacaaccaaggcctcaaggctgactctgttcatcactcaaattcaaaggcaagcaagcaaccctcttcaatttattgacaacggcaaagcttgacttgatgattatgacatgggatggaaggaagagaaggaaaaatgaccccaaaaaccaaaaaataaaaaaatagagggactacaaagcattgttttacctccctctcttgctagaataggcatgtatggaaaactgaatagctgttgatacaaaaaacaatcgaaaattatgcaagtaaactgatgaatgttacagagagaaaggctaacaacacagtttataa

SEQ ID NO: 88702 - DNA, 538 bp, Glycine max
  unsure (1)..(538): unsure at all n locations
  Clone ID: PAT_MRT3847_51105C.1
gtaggtaccgtgatccaaagactggccagccatatgctacaaaagaagcttttaaaataattcgagaacggtatgactattctgtttgcaaattgtgttttccgcatttccccttttcacaaattttatagaagattgactaaactatatttttgagaatttaagctaatctcttgtttttgttttcctggagtgatttggtcaaatattccagacgaaggtgacttctggatcagtcctaccccagtgaaatgttctttattattattattattgaagttactataataaattttttaaatcaataatttcatccctgcacctgacattgttttttgttagtcattacatgaaaaaaacactacagtttagtcgatacatgaaaaaatgtttacaaattgcttcttgttgtttgttagtgtcatgatggtgttaaattaggtccctatgctagtatacttggcaatgttttttggtttagtctctatgatttggnctctacatctgacacaccgttttttgtctgaccccacaactg

SEQ ID NO: 88703 - DNA, 2428 bp, Glycine max
  Clone ID: PAT_MRT3847_51106C.1
aagtctcacaccccccctgtccacccccccccccacccccctgcctatgctcccgcgcccgcgtcctccgccgtcgccacccttcgcctcaccctccatcataccgggtcggttcgggtattgacgagacaactccacacacagagagagttgttggagttgttctgtctgaaaccgaaccacattccaaagatagccgttgtcattgtcagaaggagaagccattgcgttttagaaagcgataccgtgagccacaacaatgcattgcgttagggtttgattatattacgcagatcgaggctcccgctgtgaagcgcattttgcaatttcaacaaataaataaataaaaatgggagaaaaatcgaggtccaaaggagggtgctgcggttggtttatcgcgtttatcattctggctctcgtcgtcggtgccattgtttttaccgttaagaagaaatttagtcactccggttccgataagcctgctccggttcccggtccccctggcgccgttgaccaaaaatattccactgcactcaaaactgcgatgcaattcttcgatattcagaaatctgggaagttagttgacaacaaaatatcttggagagggaattcggctcttaaggatgggagccaagcgaagttggatctaacaaaagggatgtacgatgctggggataacatgaagtttggttttcccatggcttttacggcgacggtgctgtcttggtccattctggaatatggagatcaaatggatcacgttggccagttagacgctgcgcaagattcgctcaagtggatcactgattatctcatcaatgctcacccttctgagaatgttctctatattcaggtgggtgatcctgttgcagatcacaagtgttgggaaaaaccagaagccattactgaggaacgaccactcatacaagtgaatgcatcttgtcctggatcagacgttgcagctgaaactgcagcagccatggcctcagcatctttggtctttaaaaagactgatcctacatattcaagcactctactcaagcatgcaaaacagttgtttagatttgctgacaggaatagaggttcctatagtgagaatatacccgaagtccagagatattataactcaactggatatggtgatgagcttttatgggcagctagttggctctatcatgctacgggtgatgattcttaccttcagtttgtgactggccaagatggagaagactatgctcaatggggaagcccaacctggttcagttgggataacaagcttgctggaactcaggttttgttatctagattaagcttttttaaggcaaaggacatttcgaattcatatagctctgggctccatagttacaggaaaactgctgaggctgtaatgtgtggtcttcttccggattctccaacagccacaaaaagcagaacagatgatggtcttatatgggtgagccaatggaactctttgcaacatcctgttgcatccgcattcttagctgctgtttacagtgactatatgctaacatcgcagacaccaaaactaaaatgtggttcagattcctttaccccatcagatcttcgagactttgccaaatctcaggctgattacgtattgggcaagaatcctatgcatatgagttttctggtgggctatggagataaataccctcaatttgtgcatcataggggtgcttcaattcctgctgatgcaaaaactggctgcaaggatggcttccagtggcttgagtcatctgatcctaatcccaatgtagctactggagcacttgttggtggacccttcttaaatgagactttcattgattccaggaacaattccatgcaaacagaaccaagcacgtacaacagtgctgtcatagtcggtctcttatcaagtttagttaccacgtcttctgccgttcaatcctttacctaagctgtagcttcctatccgtcctgagttgcacttgttgacgtagatttatgttttttgttgctttattcacttcccaatccttacaaatgaagtgttgtcaaaagcacgaaacataatattgtaacgatatgcatgattgtatgagtgtaaaccctgaggtttggataggtttatcgtgaatatgtacgggtgtagtttgctttggcattattagctcagcaggtgtggagctattttgttgtagtatgtagagcaaatctttaaaatttattattattataaccactgcttttattattatcatcatcctttgataaataacaatcacattattgctctttggtttcattctgttggacgagcattttgtttgacacaaccaaaaaaaaaaaaaaaaaaaaaaaaaaaaaaaaaaaaaaaaaaaaaaaaaaaaaaaaaaaaaaaaaaaaaaaaaaaaaaaaacccaaaaaaaaaaaaaaaaaggggggg

SEQ ID NO: 88704 - DNA, 603 bp, Glycine max
  unsure (1)..(603): unsure at all n locations
  Clone ID: PAT_MRT3847_51107C.1
cgaggtcacaaaccaccagtactctgccccccatatttatggctcaagagatattctcccgcgagaacaacatccttcgccgtcgccaccattttctttaagctccatttttgttaaccgccgtcgaaccgggtcgggtcgggtattaacgagacacctccacagagaggcagtaaactaggttgttggagttgttctgtctgaaaccgaaccacattccaaagatagccgttgtcattgtcagaaggagaaggcattgcgttttagaaagcgataccgtgagagacaacaatgcatcgcgctagggtttgattatattacgcagatcgaaactccccccaacggtgtgttgaagcgcattttgcaatttcaataaataaataaatgggagaaaaatcgaggtccaaaggagggtgctgcggttggttcatcgcgttcgtcattctggctctcgtcgtcggtgccattgtttttaccgttaagaagaaatttagtcactccggttccgataagcctgctcctggtcccggtccccctggcgccgttgaccaaaaatactccactggacttaanaccgcaatgcaattcttcgatgttcagaaa

SEQ ID NO: 88705 - DNA, 1419 bp, Glycine max
  Clone ID: PAT_MRT3847_51108C.1
gtgatttgaagttttcttctctagcattttatggttttagttgcattaatcaaccggtatgggttgaagctcagttgattctagtttgctttcttatctgtcatcaaagttaagaactaagtatcctgtcattgttaggactgcctctcttcatggccaccgagcacgaaaagcagttaattgtggccaaaccgaaccctaacaccaaaagccctcgccgatcctccacctcttcctcgctcgccatcatcgacggcattttcgcgagaaaaagcttcttctacgacaggcttccctcccaaccactcagactcaccgttctcaaactcgacggttcctgcttccatattcaagtttcgaagaccgccaccgttgcggaactgaaggacgcagtggaggccgtgttcagtcacgtgcctcacaaggggcctgccaaaatttcatgggcacatgtctgggggcagttttgcttatgctatgatggacagaagctagttacagaaaaggataatcttcgaaattatggtatcaaggatggtgaccagcttcgtttcatccgccatgttacaaacaattgctgtgttcaaagaaagcggttgaagaaaagagttgtctatttgaaacaacacaggaggtcatcgcaagtggatggctatcaacccaaaggaaattgtgatgatgatgagattggttctgatgatgaagccacagataatggggaagatcaagcaccatattgaagaagaggaagaagaagaaagagaagaagagtgtgttggaaagaacaaattagctggctttttgggagagctgttttcatacactccactggcagttgtgagaagaactagaactaaaagcaagatttggccaacaactatgcccaaatgtatacttggtagttttagaaagattagaagtattgtatgctttggcaggaagaggcactattctcggagacttccatggagaccgcattaacaaatggtgttttctaaccgcacaacatatccaatgatggcagcagatgaaaaagccgaggtgtgaaaattttggttcctatgcaaatgatgtgcgtgtgaaaactgtattgctgttttgactgagatggcagcaagatgtagatcatctttttaatggttctattgtataaacaaacggtttggagttggagtttccaatgtgcgtccgttggttcttaggattagaaacatcaatgtcttaagcaatgatatttttagcaaaatatcaagttaaggtatttgttgtcacgaaaaagagagtttatttctgaacttcaataattgttggttaatttgatccttaaatctagacatcggatcacacatcctccctcacttatgggtggtaattaaatttagacccattaagtgacaagatttgtttgttataaatctc

SEQ ID NO: 88706 - DNA, 257 bp, Glycine max
  Clone ID: PAT_MRT3847_51109C.1
ggctactacccgccgttcgatggaaattgcgctctacggtgtttcgtagggctaattcgactaacgcgggtcaccaacggcacgcgcctttggggcgcctgggccccctactgctgatgggctaacggacgtcgagcgcacgcgtacctcctctcacagatactgacttagaggcaggcagtcttattccaacgcccggtaccttggctccactggctttgcaaccaagcacaatgaccaattgagcgaatgaactg

SEQ ID NO: 88707 - DNA, 371 bp, Glycine max
  Clone ID: PAT_MRT3847_5110C.1
tttttttttttttttttttttttttttttttttttttttttttttttttttttatatccattttcccccctttagaagaaaaaggcaggcaagctagctagggggaggggctgaaaaagaaaacaggggaaacaaggaaaaaaatttttttaacgaggaggggccgggcccagaagatccaggggttgggccaagtaaaccaaagggaagctcagggccactggctattgaaccaagcccgatgaccaataatgccaattgcgggaccctcttgaacaaggtagaattaccatggcgaaactgggaaaaaaaggggaaaactaacccgtttgacgaggggaaaaacccaccttaggtggcttattggtggg

SEQ ID NO: 88708 - DNA, 314 bp, Glycine max
  Clone ID: PAT_MRT3847_51110C.1
aaaaacaaacttgggggggatttttgggtcctttttttaatgggccccattttgtttacaaccattccgggtttttttttagggggctttttttccgcccccttaaacattaaagttttttaaatgttttgggaacccattcaacttttcccaacgggtttaaaaccccccacgggaaccggggacaaggggaagggttgtttccttttggattttgaaaccagggggggtccttcctttcttgagctttttgccaaaaaaaattaaccttttttggtccggggggatgcctttcttgtcctgaattttggcct

SEQ ID NO: 88709 - DNA, 1081 bp, Glycine max
  Clone ID: PAT_MRT3847_51111C.1
tggaaccggagcagggagtatccttatagacaacattaatatttcatcaattggtcttcatgatcttagaagtcatttgagtatcataccacaagatccaaccttatttgaaggcaccattcgaggcaatcttgatcctcttgatgagcactctgataaagagatttgggaggcccttgataagtcacaacttggagatataatccgtgagacagagcgaaagcttgatatgccagtgctggagaatggagataattggagtgtaggacagtgtcaacttgtttctttgggtcgagctctgctgaagcaatcaaagatacttgtacttgatgaagcaacggcatcggttgatactgctactgataatcttatccagaagattattcgaagagagtttagagattgcactgtgtgcactattgcacatcgtattcctactgttattgacagtgatctagtgctggtactcagtgatggtcgagttgcagagtttgatagtccatctaggctgttagaggacaagtcatctatgtttctgaagttggtgacggagtattcatcgcggtcaagtggcataccagacatttaaaatggatgaaaatgcatcaaaaccttcaatgatggaggtggtatgagcttaagagccttcgaagttagtgggcagcaagagctcaagacatttcgagtagaaacagtaacgatgcctcagttgctgtcactgctgcattggaaacatgctgagacataaaatgagctgatgcacgagtgagcccttatcgattaagcactccagtgggagaaattattttccagtttgaaagtatcatcagttggttcatccccataaaccacattgaggaattcatgcatggttggggcttgctttgtaacatggaataagatgatcgccctttacaggaaagaaaacatgggcgtctgaattgatttcaataatgttgaataacagttttgagaatgaggcagtaggcttttgcttgcttagaaaagtgtaaccctttgttgggatgaaacaatttaacgggagaattcattttttcaaggaatttaaaatgattcatgt

SEQ ID NO: 88710 - DNA, 284 bp, Glycine max
  Clone ID: PAT_MRT3847_51112C.1
gatagtatcatcatacagagcattgaattcaaaaacttaagttcagtccttgtgttttgcttgcgtcctcaaaaccaaacatgtcgaacacatgcggcaactgcgactgcgctgacacgactagctgtaccaatggaaacagctatggtgttattgtatagactgacaagagttacatcgagactgttgtcatggatgttccagcagcttagcatgatgggaagtgcaagtgtggcactaactgcacttgcaacgactgcacctgtggctattatcgaatatgt

SEQ ID NO: 88711 - DNA, 378 bp, Glycine max
  Clone ID: PAT_MRT3847_51113C.1
gttggtagaaccctcgctgttcgcggcaactgcactgtttgatcagctgtgtttactgctcccgaagagaggagggctccaggatttcctagcagagcatgatctccacgctgctgacctagtatgttcttctctaccattcaataatggattcatcagtgctaaaacgacatgcctatatagatggcgtatggagggctaggaagttagacatgcatcggtgacaattgacatgtcccatgcctatttcgacaagctctcatacaccatcgatgaaggttcaataatattagagacccggtctttgtcgaatatagagatgtaaggccacggttgctctgaccactctttggcataggcaaaatctaacactgctga

SEQ ID NO: 88712 - DNA, 307 bp, Glycine max
  Clone ID: PAT_MRT3847_51114C.1
ctcatgcgttcgactgtaaacacggcaggtttaaggtaactgactcattgtgcattgatgcatcacgcaagacatgtgctaaaacgacctgaatgggcctcattatggaccgaacgggtattgcctgaaacggcgcaaggcgtatagagtgaggagctacatctatgaaaagccatcaagctattcaaacctaaggatggtagcacacttgctagcagttggacatgtcgaaccatgtcaagcccagcaggcatgtctataggagacgagagactcaacactgacagaacagggcttacctctgggc

SEQ ID NO: 88713 - DNA, 243 bp, Glycine max
  Clone ID: PAT_MRT3847_51115C.1
gcgtgcaaaaatgaactaaagcgaggggaagggaacaacgcgcggaatgggatgatgccccctgcgccattaatgccaaggaccgcgatgcccgtgtagaaaaaacttgcgggaaggatcggcctgcacacatttgggttccataaacgatgctttacgggttaaacaacgatattggctactcaagaacacatcgccttctatgaatggcatacataaagggggcccctttactagcacaaa

SEQ ID NO: 88714 - DNA, 432 bp, Glycine max
  Clone ID: PAT_MRT3847_51116C.1
agcctctgatttctagtgtcccaataatggtaatagaagggaatcatgagatagaagaacaagctgaaaaccagacatttgttgcttatagttctcgatttgcattcccatcagaagagagtggatcatcatccactttctattattctttcaatgctggggggatacattttataatgctgggggcctacatatcctatgacaaatcaggggaccagtacaagtggttggagagagacttggcttctgttgacagggaagtaactccgtggttgatagctacatggcatgcaccttggtatagcacctacaaggctcattatagagaagcagagtgtatgagggtggagatggaagacttattatataaatatggcgttgacattgtcttcaatggacatgttcatgcgtatgagagacaaacagggtata

SEQ ID NO: 88715 - DNA, 389 bp, Glycine max
  Clone ID: PAT_MRT3847_51117C.1
ggcgaattttgtgcatgcacaagattgatttattagagaaaaagaaagacttatggaaggttgctaaagaattcaaagatctctctggatatggaaggtaaggttcttttttagaaagaccagggtaaacaataatggtctgcagtatgattgtaacttttgtgtggattcactctagttcttaagctagcttctaataccttctatttttcttttacttattattatttaggcatttcatgatatcatgactgaataaggcaggagtaaaagatctaacagtgcatgaaggagcaagcatggatctttctacttctagtgtctactaggagtaaaaaaattatttaatggttcctctaaagaatcaacaatgtgttttttggggcata

SEQ ID NO: 88716 - DNA, 696 bp, Glycine max
  unsure (1)..(696): unsure at all n locations
  Clone ID: PAT_MRT3847_51118C.1
aaagagtagaacatttatatgatactattaatttctagtgttatacaagatgatattcaggaatcagataactaagtttaaaaccaaggtaaatatgatgacatgtagatcttttggccatgatgaacatgaacttgggttgctaccgtaccagcaaaataattattatcatttctctgtcgcgtgttcaaacaagaagggatttccaagtatgaagagaggttcttcttctttgactgatcactgatgcagagttcactgtttcctcttaaatccaacattttgcctaacttttgaatgaagtcaccaggtagctctagaaccccactcagcttgttgtggctgatattctgttgatctaggcttggaagtgaacccaaatttggtggaacttgtccactaaggctattgttacctaaggagggaggctgtaagatttttcaaaaaagagaaagagtagggtatggagcctgttaatccacaccctgataaactcaatgatttgagcttcctaagcttccctatgaactggggtatccctccctatgagtaaatattctaaaagctctaanacttgagaaggtttcactaataggccctacaataaaattatgactcaaatcaagccagacctttgagttttcctatatcaggagggaatgtttccactgagcatgtttagagtgcaaatccagc

SEQ ID NO: 88717 - DNA, 445 bp, Glycine max
  Clone ID: PAT_MRT3847_51119C.1
ggggaggcagaaagcgaattcttttttaagacaaaagacaggtggcattgaatcagataccaagtagcgctctctccacaacctacaggctgattcgcgaaagcgtagataattcttccttattggaaagggtgcaaatggccctacatgtaaggcgcctgaaatgtgttttaccgttaaaccgaccaattgaaagagtccaggaggactgtaatgagcctccacaaacgtcccatgggagccatagggcactctgagaaggcactgtgccagggggctccagcttcaaatgaagagctttcagaatctgcaacctggactgccgcgtgttctaagggtgcacaaaagccattacgagccctggatcctggttgccattccctacaggcgttggggggaaaaagggatttgcgccaaaccttctcttttcgtactaaagccgctt

SEQ ID NO: 88718 - DNA, 247 bp, Glycine max
  Clone ID: PAT_MRT3847_5111C.1
ttgaatgtgagaacacactcttattatcatgaaaactcgagagcaatcctaatacaaatagaggagaaggttcaggccagaattacgcataagcgatgcataaagtctatgctattaagaaggccaacatagatacggaaaccacaatttttttttaattagatagagatactgcagggaattcctttgaaaggcaatccttcctcaattgaacgatggagcaaagggtatggcagctgaactggcc

SEQ ID NO: 88719 - DNA, 377 bp, Glycine max
  Clone ID: PAT_MRT3847_51120C.1
agcggtagaaaaaacgaccaccaggggggggatttataggaagatgagttgttacgcccacgccggacacggccgttttggtaagcatcgcatgcatcccgtaggtcgcggtaacgccgttggcatgcatcaccaccgtatcctcttcgacaagtaccatcctgggttcttcggcaaggtaggcatgcgctactttcacaaacttacgcatcaaagttatacatatcctgattcatctaacatctgacaagcatggggttccttcttctccaggaggctcaagacaaggccatcgtcgacatggcacccttgctcgatgtcacccagtattggttacttttaaggttttggttaaaggtgtattgtctcaaaaccag

SEQ ID NO: 88720 - DNA, 290 bp, Glycine max
  Clone ID: PAT_MRT3847_51121C.1
cccattctttttttttttttgtttttttgttttttatgttgagctataatgaagttctaatgacagcaaaaattactagttggcgcacaaactatagtcaaagttcctgatggtatttcaaaccccagcaaaaacaagtgacatatgttttacctagtatccacattgtttataccaggctcagaactggcaaagggactctcgacaaattctgactgcctagacttgggggggaaaatgattttaaaactcgtttataagctccatgaaacccactttgacattaggac

SEQ ID NO: 88721 - DNA, 643 bp, Glycine max
  Clone ID: PAT_MRT3847_51122C.1
aatatgcaaagaaaatattatactgaggttaaagactatattacaaatttacaatatccttttaaataatagaagaatatttcacaagtaaatgcaactagctctagaatataatgatgcttcatgattatgtcagtttttgtttcgccacctttttttcctagcttgggtcatggctgctattgttttactggtttatttaacttggacagggctttgattttatgaagaaaattgaaaggaaattagggttccctttcctgactcctttttatacaattccttttttttttttacttagaagcttaaaaacaaactgagttctgcgattgtggcaggtgatcatgcatgcagaacctgcactacatgttgctcttttaatagggctgggctccattaactgaaccaagtggtccaggaagaatattagaaagaaagaagaagaaatttaaaaagaattaattcaagagtaaatataaggacaatggttaatttattcaagcaactaccatgcaacatggcgggtaaaaagagtcccttgggaggaagcaccatatatccaaaaatggtcaaacggtaacctttattctgataaaaaaatgtaaaaagtgctcatgtggtcctatgagagggtgaaataata

SEQ ID NO: 88722 - DNA, 648 bp, Glycine max
  Clone ID: PAT_MRT3847_51123C.1
caaaaccatagtattgaagagaaagcggaagagattaatgcctgaaattcgttcaacgagtcccgaatcagttgaatgctccaattcttcggggccgaattttccatccccactgaacggtgttataatctttgtggtaacaacatttggagggtacctccaagttcaattcgggtcaaagaacacatctccattcgatgaacactacataattatgtgggcagtttctgtggccttatcactttatgcaatgatgttaattgctgagttcacagtggagcttcacaaacacagtttcctttcgatcatcaaacggttcactgtgctaatgggagcccttgtcgctgttctgctcactataatcattcttcccctgtttggatatttcaagttgcttctttggaccatttgtttcgtgaaggcaacatttgtgagcttcgaagaaatttgtaattgtttttggaaaggattgtgtcaaaccattgacatggtaagcagttactttggcagggaacatgctagtttgccagtataatgtataattagtactcgaagcaacatgagttaactgctgacaattaattaaggagtgtacgttttcttccttctttttttacattttctttcctttcttattcataatctgga

SEQ ID NO: 88723 - DNA, 350 bp, Glycine max
  unsure (1)..(350): unsure at all n locations
  Clone ID: PAT_MRT3847_51124C.1
aatganggaccgacccacgcgtccaaccacactctagttctctcttcatcaccttctttatcctttataataatttcatcaaggaggaggactgttagcgttaaacaaaggcatcctctacaatccttaatgcttatgcatgctaccgattgtgaacccatcactcactttctactaaagaaacaacaacctactgattcaccttaaactccaaatgacattacataagatccatccaagaattccttaaattcctgtacttcatcaattcaatcgatgtctaaatcaattaattgatctcttgatgaaaaatattcctcctataaagatccccacaaattggccctttc

SEQ ID NO: 88724 - DNA, 297 bp, Glycine max
  Clone ID: PAT_MRT3847_51125C.1
gctaaccctgctagctatgctgtttgtacgcattgatgtttgcctggacttccaatacttggaatgagcttttgtttggggaggtattttatccttgaaagtgaatcaatatttaagatccttgttaacttgtttccttgtgtggcattgacatgaataattgtgaatggtaggctactaactacgagctttagaaatggtaaaagagaaagaatgaattcaaagaggatttgtgtagaataatattacattaacattgttgaaggaggagatcgtatatataaaattgagtttttt

SEQ ID NO: 88725 - DNA, 454 bp, Glycine max
  Clone ID: PAT_MRT3847_51126C.1
ggctcgaggctgagatgctgatcactgccttaccgaggatcctgatcatggaatctatgcttacgtgaacttccttgcactatgcctcgcattattgcaatatagactgcctttcggacattctgtctgctgctcatgccacacctgatggcgacatttgcggatcgccgatatacgcagacaacgcagatccgaaccgcaccgcccatatgcactacgtcgctcttgatatcatgcccggactctgttcatgccctcttagaccgcaggcctctaggacgaccatcagctggtggatatgcttcctctgcaagcacgccacttcatatgtctgcacggggaacctccataggctgtctgcgaccattgactgcttcgagaagcaattcacgaacatggaagtccactccgagaacatcattagcaccttggctggatcccactcattatgcac

SEQ ID NO: 88726 - DNA, 531 bp, Glycine max
  Clone ID: PAT_MRT3847_51127C.1
attctcaggaaaaataaacaaaatattttatattcttagtttatatgcccgctactagtcgtcattgacatgtccataccatagtcaatagaccaaccgcataaaccgacaaatttccttcgagttacaaaaaaaaaaaaaaaaggaaggttaccaaaagcatgagtcaattcacactaattttttttttaaaaaaccattgacccacactttcaactaagggttctatggctatattggtaacaaaccccaaaaaagaccaacaccttttgaattaacctatggggcttttcgccctcatttttttaataggcaggaacaaaagaaaaactttaagatcaaacacggggggaaggattaaatctcgaaaatacttagtttttcttcatgagatatcccattattatgccaagtaaaccaattaatatgacaatgaccatcgacacacccccacgacttttggtggtttctcggctcaggaggtccaattcctgacgaagcttggtattttggtgaatggcattattcttt

SEQ ID NO: 88727 - DNA, 243 bp, Glycine max
  Clone ID: PAT_MRT3847_51128C.1
ctcgagccgctcagttttcatttgtagtcatggtcctattgactattgactaattagcaacacaaactagtgcacaagtggcaagcatgtaggtgctgatatgttcatcataaatacatgaaactttgaaacggtttatatgcatcaaccgcttcatataaaagttgatgcacatttcatttttcatcttaactgcaaaactcaagggaaatcctctttctctacttctctgattttataagt

SEQ ID NO: 88728 - DNA, 513 bp, Glycine max
  Clone ID: PAT_MRT3847_51129C.1
gaaactcttagaaccttctattagaagtttgtggccattttttttataagaaaaatcacattttgaatcaaccctaacttttgatttgccatctatgatgacgaccaccgcaataagcttagtgattcttcttctttccctttttgctatatcagtttaatatatgattttgttttgttgctgtggtatccattttgagtaggctgacctgcgtgaggagttgctttggatctgagctggggtttggcccgtaatatatttgtttgtccctagagtgcttctggtgtttgctttagcaggaaaaatagcacaaaaaaggggttaggcttagacacgttgagggtatttattcaaagcgtgagatacatggaaatgagggggtgctgatggtggccctttggacatgttatgtgctccatcagcttttttgcttattgatttacaaggtgctttgataaagaggtgtctgggtctaaaaactcttaatcaaagaagacaatgcttaaccaaaag

SEQ ID NO: 88729 - DNA, 804 bp, Glycine max
  Clone ID: PAT_MRT3847_5112C.1
cgattccacctgtccacaaacatggggaatatctttgcaaacctcttcaagggcctttttggcaaaaaagaaatgcgcattctcatggtgggcctggatgctgcagggaagacaacaattctatacaaactgaagctgggcgaaattgtgaccaccattcccaccattggtttcaatgtggagactgttgaatacaagaatatcagcttcaccgtgtgggatgtgggcggccaggacaagatccggccgctgtggcgccactacttccagaacacccaaggcttgatcttcgtagtggacagcaatgacagagagcgtgtgaacgaggcccgtgaagagctcatgaggatgctagctgaagatgagctccgagatgctgttctcttggtgtttgccaacaagcaggacctccccaatgccatgaatgcggccgaaatcacagacaagctggggctgcactctctacgccacaggaactggtacattcaggccacctgtgccaccagcggggacgggctctatgaaggactagattggctgtctaatcagctccggaaccagaagtgaaccagacccctccctccccctcacttcctcttctccgccctcagctttcctctcatgtggcaaacgtgcgactctgtggtcctgagtgccagaagctgtctccatgggttggtcacagtgtgcatcgcactgtgctgtacatgtgcagacgcagcctgcagccaggtttttatttaatgtaaatagttttctgtttccaactgaggcagtttttctggtacttctatgcaatattac

SEQ ID NO: 88730 - DNA, 331 bp, Glycine max
  Clone ID: PAT_MRT3847_51130C.1
gcgcggacgcgtgggtacaaatcctgtccatgctactatttttgctgctttcactcccaaaggggaagggggggaacaactctatgattgcaagccttatacaaacattggcaaacctttttaactaacttgtaacgcttaaatggttttaggagggagtgtttatgttggtgaaagcttggaaaatggctacttctattgtcatgcatagattgaagatttaatgctcaaatacctatttaaggtttctaaaatattaaatgacctaggaagtggaagtaatgttgatgtttgtgtgataaccaaagggacataaggaatatctcacgaa

SEQ ID NO: 88731 - DNA, 481 bp, Glycine max
  Clone ID: PAT_MRT3847_51131C.1
tacggctgcgaaagacgacagaagggatatccattacacggcacagattgaaattattatgagaaaatcgataagcctaataatgttattaataatactccagcaaacctttaaattaagaaaaagctcacctcttgtatccaagtattgaacccctgacgtaaagtctggtaaacaacaaaaacaacgataacattaacaaatattcatgaaatgtgcatcacgaatatcatgctaacaacttctaaactttgtgaaagttaaactattataaggagccaataaaaccacagatcgaaggcttaaaaacgatgctataaacaacgagagagagagagagagagagttaaatcgcaaacctaacacgctctccttggcgccctttcaccatgtttggtaacggtgatgccccctgctcctccttttctcttctactaagctcggcggaaggagtagtaatatcagtttcgggattcttata

SEQ ID NO: 88732 - DNA, 286 bp, Glycine max
  unsure (1)..(286): unsure at all n locations
  Clone ID: PAT_MRT3847_51132C.1
ctttggcctcgccggtagaagcaagatgacgaaaggaacgtcatctttggaaagcgtgcaataagacgcacacgtgtgcncgccgctgtggctccaaggcctaccaccttcagaagtcgacctgtggcaaatgtggctaccctgccaagcgcaagagaaagtataactggagtgccaaggctaagaggcgaaacactaccgggactggtcggatgaggcacctaaagatcgtctaccgaagattcagacatggttccgtgaaggaacaacacctaaacccaagagg

SEQ ID NO: 88733 - DNA, 240 bp, Glycine max
  Clone ID: PAT_MRT3847_51133C.1
tccgagggggacatactttgactaggcactcatatcattctaggcaggtatcatcatgtcttacgacgagcaacatggttagcgctacagaaaactccgaagactcatgagcgtatcatcaacatgctcgctctagtcatgaaaactggcacatccaccctaaatgacaagaccgcactgacatgtatgaagaacttcacaggactattgatcatgattactcacaactgccctcctttg

SEQ ID NO: 88734 - DNA, 321 bp, Glycine max
  unsure (1)..(321): unsure at all n locations
  Clone ID: PAT_MRT3847_51134C.1
gtgcggcgctcaagccggccggatcgggaccgcttacatnaaatattttcctctcttttctctctccctctgtcgcctcctcttaatcctcatagtcgcctcttgttctctgtctcacttgagagatgtggatcttgttttctccctctcttcggccccatttccttctcgtctccctctgttgcacactcatttttcatcttgctttcggtggttttcccagtctgcgacaacggagcttcgacggcgaggcgcaaagcggagcgaagccacggaggtgcgacgcgacagaggtgagacgacgagtcgttctatgctgat

SEQ ID NO: 88735 - DNA, 1160 bp, Glycine max
  Clone ID: PAT_MRT3847_51135C.1
cacatacataatccctcctacccccttaagaaatatgatagtagcaatgaattgccgggcatcaatatctggtagtgctacccccaatttagaggacacatttttcttcaccacagtgagtttgggaatcaactctttcgagatgggtccaccattggcatcaaattcattaaacatccaaaaatcgaaaacaaagtggaaagtgaattcctttttacgaatccgatagatctgtgaaaaggtcacttacatctgccatgcagtgaggatgaaaagggaggcaaagagaacacgacccagaaaggaggagaaccccattttactccctttggcagaggcgaagagagtgaagctcggagagagaataacggggaagcttcgtatttgcttcttgcttttttctttttgaaccacaaaatggccgacgacagcacagctacctgcatcgacatcctccttgccatcatcctccctcctctcggtgtcttcctcaagtatggatgcaaggtagagttctggatctgtttggtgcttactctttttggttacattcctggaattatctatgctgtctatgctatcaccaagtgatcatattcatcacctcttgtagacaatgaataatttgtcaaagtacaacggttatgcatgtttctcaactccagcattgatataatcgtttgatctcagaacaatgtgattcttttttgttttctgtctatcagactctattcgttttcagttttcattgttgtgtttttaattactgttattgtcttgtatggaaacgaaatgtagacatcgtggcttctagtcttaatatatggtaatcgaattcaaacgtactacttggttggtgttgaaaaccttcttggcaaccgtcttggcaatgaaaagtgacaacaatcagaacaagaaaaagactttcaagtgaaaactcactcacttacttgcttcttggacagacagtttcatttcaatagctttggtgaatagtacatacatgatgatgctctagtaaaagtgttttgcttgtttcttaaattactattacagtattatgctttggtttttctttctagtacaaaaatgaattgcggtgtgtgaatttgtgaaataagaagaaacgaattcgttttgtcgaaggtttgtgattgaat

SEQ ID NO: 88736 - DNA, 579 bp, Glycine max
  Clone ID: PAT_MRT3847_51136C.1
acggctgcgagaagacgacagaaggggactgcatcaaaacaaaacaaaagggttttctattcgattcgacccatacttcttcaaatcgccatctcatcctttctcaccaaccaattacaaagactatggcgagcgcgggcaagtttccaagtccgactcccccatcgataatagaagtgaagaagccgccggagaccataatctctggaccctctggaccctctggaacctctggaacctctggagccttatacaactatgctgggaatgggaatagcaagacccaaactaagaatggaaaccttcttggcaaccgtcttggcaatgaaaagtgacaacaatcagaacaagaaaaagactttcaagtgaaaactcactcacttacttgcttcttggacagacagtttcatttcaatagctttggtgaatagtacatacatgatgatgctctagtaaaagtgttttgcttgtttcttaaattactattacagtattatgctttggtttttctttctagtacaaaaatgaattgcggtgtgtgaatttgtgaaataagaagaaacgaattcgttttgtccc

SEQ ID NO: 88737 - DNA, 744 bp, Glycine max
  Clone ID: PAT_MRT3847_51137C.1
ggcaatgctaaagagagagaggcataattttactaaacgttaacccaccatgattagggttttacactaattatatttgggtctttccctctctaacaggaccatatcttgtacagaaaatgatccaaatccatatatactaatctatacaaataatttgtcacttgaaaaaaaaaaacaaatctagcaatcaaattggtggctatacagaaaaagaagatgttgattctattattaaaggttcacatgatctggagaaacttgaacagtgaactgctgcttttggattggtggtaaccatgcttttatggagaaaatttggtttctcgaaatcatcattttcatgcctgatctccttgagcattgccgttacatctttcatagtaggtcgttcttctggggatggattcacacataggagagccactcctagaacctgaagcatctcagaggtttttgttccactctgcaatactagttgctggtcaaggatagatgtaaattctcttctcttctctcggatttcgtcgctaacccatgcggcaatgtgggccccccccgggaatcctattttcagttggttccatccccgttaagacctcaaggagaacaacaccatagctgtacacatcactcttttctgtgatccttaaactgtatccatattcaggagctatgtatccataagaacctgcaacagtatgagaggctcctgagcactctgaggaactcacaagttttgcc

SEQ ID NO: 88738 - DNA, 895 bp, Glycine max
  Clone ID: PAT_MRT3847_51138C.1
aagaatccggcgcgagcaaagcgtctcttacgtacttgccaaagaggaacaaaagtgttcgtctcttgatagcatcatcaagaagaagtagagaagatgttagggctatttgacaagagccacaagatcaagggcactgtggtgttgatgcccaaaagtgtcttggacattaacgacttgaattcagtcaaaaatggcggagttggtggcgttgtctctggtatctttggcgccgtcgccgacgtaaccggccaaatagttgatactgcaactgccatcttttcccggaacgtctccttcaagttgatcagtgctacctccactgatgcaaagggaaatgggaaagttggaaaggaaacttttttggagaagcatcttccgacgttaccaaccttgggagataggagagatgcatacggtattcattttgaatgggatgctaactttggaattccaggagcaatttacatcagaaactatacgtatgatgagttcttccttgtcagtgtcactcttgaggacattccaaatcaaggaaccattcactttgtttgtaactcatgggtttacaactttaaagactacgacaaaaaggatcgcattttctttgccaataagacatatcttccaagtgcaacaccaggtccattagttaagtacagggaagaagagttggagattttaagaggaaatggaaccggagagcgcaaggaacatgaaaggatctatgattatgatgtctataatgatttgggtaacccagataaagatgtaaagcttgcacgcccagtcctttgaggttccagcacctatccttattctcgtagggttagaactggcagaaaagccaccaagaaagacctaaaagcgagagacctgcaagcgagctttacat

SEQ ID NO: 88739 - DNA, 1154 bp, Glycine max
  Clone ID: PAT_MRT3847_51139C.1
gtgccaagcaaaatagaattgcaagtgaaaggggaagcatatcagttatcaaattataatccatctgacaaataaacaaaataatcttaataggtctaagtaactattccaaactcagctgaagatcaaatacttaatgccgaaactaagcattttggcacactaatacatcttttgctctattttttctaaactgtcttagctttaggggtcttcttcctgagctgactcctgggaattgagttcttcattccaataaagaatagcaatgccccaaaaagtgctgtgttcagcaagaaatcattcagcagctgattgtacttaggcttgccggggctatggttatagaaatcgtacagaagtggagtagtaatcgccagatgcaaaagcagtaggaaagatccaaatgtgcttccaaacacaaacaaaatccctccaacccccttaagaaatatgatggtagcaatgaattgccgggcatcaatatctggtagcgctacccccaatttagaggataaattattcttcaccacactgagtttgggaatcaactctttcgagatgggtccaccattggcatcaaattcattaaacatctgccatgcggagaggatgaagagggaggcaaagagaacacgacccagaaaggctcccacataatacagattgatgttgatactgagaaaggtggactgaaaatcaaccccaacttctttgtggactttggaactgagcctgatggtccttctcttgcccatgagatgagatatcctggtggtgactgtacttcagatatatggatttaaacatacgtgtcattatttccctttaataaacggatctgtcatatggttgtaatgagctactatgctataaataatgctcttgtgaatcttcaactttttgaagacagtttgcaattgcataaatatattaagctcatcttagaaacctctttgtctagtgttgtatttctacctttgtggttacaatcaacttgttaatacgtgtgtgaacaaattggtccatgcccgtttaatccagataaaaaccaattagagaagggggagagaaataagcgatattactatttaacaacagtacttatcctactactataatttgtggacaatttaaaagttctaaccgcaaag

SEQ ID NO: 88740 - DNA, 351 bp, Glycine max
  Clone ID: PAT_MRT3847_5113C.1
tggatcattatatattatatttttattttctggatgtaattttttaatattagaggcaatccatacttatcagtattgctttatctgtaatacatcaacttcgaagttgataaggtgattaatcggcatttaatttcacgtacaatgatacatgataggtttgtaaacattactaatgtatctttcaccttctatatattagagtaccttatttttttttatttctatttttgaagcaaatttattttttattacatgagatttaaaattctagcattaattcatgggcaataaagaaatcctaacattagctattacgttttcaattatctaccatctactcttgtatta

SEQ ID NO: 88741 - DNA, 762 bp, Glycine max
  Clone ID: PAT_MRT3847_51140C.1
cttgtttcctcccaaggaaaacaacgtggcaccaaagaacctgacagctatggatttgctctctccacaagcttcctcctatggaccttcagaggagattccaaccttggttaattccagcgcaattaagtctgtgagcaagggtgctaaaactgcacagatgacaatcttttatggtgggcaagttgttgtgtttgatgattttcctgctgacaaagcaagtgagatcatgtcctatgccaccaaaggggggatcccccaaagccagaacaattctgtctacacctacacacagagccagccttcatttcctcctactttgatcagaacttctgctgattcaagtgctccaattattcccagtgtgaacattacaaactccattcgtgagcaccctcaagcatcatccagacctgttgtttatctgccaattgctagaaaagcttcactacaccggtttctggagaagagaaaggataggtaggcactctcaccgaaactaagaaaattttaaacactatgtatatatttagtataggaatattttagggaaataatcttttcatagaaagagaaacaattgtttcttcaaaataagttgaatcaaacacaataaaattcccttgtttgaaaaaacaaataaaattcccttgtttgaaaaaacaaaatctcggtttaccctttggtagatctggttttccctatttgcaaaagtgcaattaatattagaaccctatatttttttttcttaagttttaattt

SEQ ID NO: 88742 - DNA, 438 bp, Glycine max
  Clone ID: PAT_MRT3847_51141C.1
ggctcgagaaggactggctatgatattgattgatgacgatacagacgtgatattggcagtgcacagtgtggcacctaattctcgagcgcctactcatgaagcatcattatggctacaggttgatgcatgatcaggggccactgcactgtatgcgccatgcacaggctgcattgcgagtggctgtgacagaagatcgtagtggccactgatgacgagcccgcatacatctaagcggagccagttgctacttcttgggtgcatgactcggctataatttcgcaatgacttgcagatgatacatcctgtgttaaattcacattcaggtctgcacacgcaagttagccccttgtttactctgttgcataatacgaagaatgatcgcgttagtgttatgctcgttgaatgatgtatatatctacccttctctctgggacgaag

SEQ ID NO: 88743 - DNA, 659 bp, Glycine max
  Clone ID: PAT_MRT3847_51142C.1
accagcaattctgtctacacctacacacagagccagccttcatttcctcctactttgatcagaacttctgctgattcaagtgctccaattattcccagtgtgaacattacaaactccattcgtgagcaccctcaagcatcatccagacctgttgtttgtaggaatttcttaaattcactaatactttgagataatggtttttttttttcttttttgggattatgggtcatttttttttctaatcaggattttcctttgtatacagatctgccaattgctagaaaagcttcactccaccggtttctggagaagagaaaggataggtaggcactctcaccgaaactaagaaaattttaaacactatgtatatatttagtataggaatattttagggaaataatcttttcatagaaagagaaacaattgtttcttcaaaataagttgaatcaaacacaataaaattcccttgtttgagaaaacagataaaattcccttgtttgaaaaaacaaaatctcggtttaccctgtggtagatctggtgttgcctatgtgcaaaagtgcaattgatgatagaaccctatatttgtttttttctttaagtttgatatgaagatgttcgttgcccagatggataatatggtttccttgcagttgtatcta

SEQ ID NO: 88744 - DNA, 163 bp, Glycine max
  Clone ID: PAT_MRT3847_51143C.1
gcgtaccatctttccctatagggagtcaaataaaagcgggccggaggcagggcccaaaaaatcccgggggaaacctgggagccccccacctttccccaaaaaaggcgagccgaaagcatggggggaaaagccggggaggcctaaggggggagaaaactaaaat

SEQ ID NO: 88745 - DNA, 238 bp, Glycine max
  Clone ID: PAT_MRT3847_51144C.1
cttgagccgctcgagccgggcaaaccgaactaactagctagccagctaacacaaaaattgaggcaaagcgaggccatgccctcatggtgcttggcaccgtgttgtaatattactatgcgctctaaacctatacgctggtcacgggagcaccacggtttaagacatccgcgagaaagttgaaactcggggacaaacaaccttctgctcacggagaaaaaaaacaaggctttcatggaaa

SEQ ID NO: 88746 - DNA, 260 bp, Glycine max
  Clone ID: PAT_MRT3847_51145C.1
agtagatctgatatcacagattctttaatgcaaacggtgagtactggtctgtaaatcatggttggtgctgaacagttctatcacggtactagcagcaggctacacactgttgaagacagattatcagaaaatattcagatagtgcaagttaatacaatgcaatcggggatcaatggagaagcttattcctggaactatttacatcgcttgaacagttcgagtatggacgctcgtggttagtggcgtacgcagggaaaata

SEQ ID NO: 88747 - DNA, 746 bp, Glycine max
  Clone ID: PAT_MRT3847_51146C.1
ccacgcgtccgaaacttgggaggtaagatagtgtatctatgacttaagattaagactttaccccttccaagaagaattttccattagcctagagcgtgtctttcggggcctaatacggctgcgagaagacgacagaaggggacaacgtcaccttcataaatggaaggacacgcctttcccagaacctgcatggtccatcttcttgttccatagtttcttagctaacaaaaatttacacaaactagtgtccctccgacagcactttcttccttaataactccaaaaactttggtacctttcaatcaaccaccgaaaagttagggactttaatttttttaatttttttttttatatgaagatgtgtgattgatcgattccctagtgaaggggtaaggggggtcatgtctttcggtgggttaagtattgctttgagtcttgtctttgggtgtcttctgctggctctgtgtgctcagctttactatttcttatggtggaagaagagaaggacacagatggatattgagatggatgcaaagggtgcgttttattgggggtgctggaagaccccttgtgccatgcatgttgcaaacaacactggatagtgggggtgtgaatagggacatagaaagaacaacaacaagtcgtgagccagagatggagttggatttgctgcacaagccctttggagtgccatgtactatggtggcaacaacactggaagagggggtgtgaatagcagggacata

SEQ ID NO: 88748 - DNA, 366 bp, Glycine max
  Clone ID: PAT_MRT3847_51147C.1
acggagggtggccagccgtcgaagacctgcttcaggggagctaggaccgaggcgaacgctctttcatttaaaaccaggaacgctatgaggtgcatttgctactattggacttacacagccggaaacctatattgagatcatggccagaaaactaaaagctgtccatgcggaccacaagatcgatctctgaacacacaatcacgaatatggatagtgggaaaccaccttaatagtggatgacatggaggaagggaaagagctgactctacagcttgaggactattgatgtgacaaagatgtcactgatgatccgtctccttatgtgccaatggagttggtgagcatcatcgagaaaagcttaaccac

SEQ ID NO: 88749 - DNA, 212 bp, Glycine max
  Clone ID: PAT_MRT3847_51148C.1
acgcgtccgattgaagaaaggtaaattcactttatctcttaaatacgatatataagttcaacattgatggcaatcacaataagattttgtggtgcctcagcaatttttttttttttttgggaattaagaatatttccaggttgtacacatttcacaaacgagtaattgcattaccattagcccattatttgaaattttgagaagaatgttta

SEQ ID NO: 88750 - DNA, 957 bp, Glycine max
  unsure (1)..(957): unsure at all n locations
  Clone ID: PAT_MRT3847_51149C.1
atgttttggtcatgttttgtttgtacaagttgcagtatggtgctatgaatatggtagcaacatggctatacaaattgattaaaatccaataccaagaataaattccctcaccgtgccgtgcatatgcttcaatacaagttggttaaaattaatttaggcactgatataaattacattcaatatttccaacttcaaaagaatcaagtagagaagccccaaatcccaatgtctatactctttattgacgttgtatttacaatctagtgcaactgtggaagcagactatttatccacttgtaacgagctagaaccaagagaggccgccctcgctaattttatttgtctgccacacacatccatcgcatttatccagactaaggagatatttcaaacaaggggaatcgaactcgtcaagattacaacatgaatttaaactagcaaaccatgtgcaaaagaatactaagataccatgaaaccactatgcttattgtacaactaaactaaattaattctagttttattttttcccagtcccttcagaagagcagttggatgcattttttttacagattcttgtgctaccgaccattgactgaaactcaacggtgtccagcactataattgctccttgcaagtcgacttgttgtgccctagtcccttacatcgactgcaatgaagatggcgcttgactacttcttgagatccaaatcgcttcgtagctggccgaccaggtggtcttttggtgggaggaggagtaactgttaccacaagctgagaatcttttgaagcagacacttncatgtctaaaattggatgtacaatctctgagtaagtcaacttgtagctctcagctgtacagtatctggagcaataatcataaacactctggccaatgccactaatgacaagcatggcatgggcacatggtacaccagtcagctgccaggccttgcaact

SEQ ID NO: 88751 - DNA, 241 bp, Glycine max
  Clone ID: PAT_MRT3847_5114C.1
atcacttgctgatgtctcagaagggcttagttcgcaggagaacactgttagctatgaagactctctacacaggagtcaatggagaacgttacccatcaaggttttatgagtagggcttgctcaaggttggagatatagagtacgcattggcatacgttgatggcgcctgaagcggaacataccctgagatgcaaaagctaaggcacgcgctagtggactatgcattggccagtggagagta

SEQ ID NO: 88752 - DNA, 446 bp, Glycine max
  Clone ID: PAT_MRT3847_51150C.1
cttcattttactgttgttttttttttttttgactggacaaaggcttatatttaaagggacttgctggagaggaaaacccgcatggacagagttgcactctttcacaatatcgctgcatcaacccgaactggactttaccaagacgttctctgtttacttccattacccaaaacctaagccatttgtaataacaaacgacacttggttttagactctctaaaccctagaagctgatcacaatgcaaactcaatggcgctattgatgaaagctgcataagactctaatcagaccaaaagcgcggtttctccattgatgatcgattgacccatgcattccctcttcaatagccaggggcacagactaacgcaatttgaggatctcgagaccattgaacatgtacaggtaacactcgctcttacgggattcaatattggtcacgtgcttc

SEQ ID NO: 88753 - DNA, 134 bp, Glycine max
  Clone ID: PAT_MRT3847_51151C.1
gagaaatactcaagcctggaaattgtggaggagaacccaaactcgggtggggtccttcctaacctaaatcctccgttacgaacggaagctctctcgcgcgaattcttcaacgagttcccgaaagctctggacgc

SEQ ID NO: 88754 - DNA, 1206 bp, Glycine max
  Clone ID: PAT_MRT3847_51152C.1
cattgttgaggattcaagtggtggagaaagttcagaaactgttgatgagaatatggaattgtgggggagggggaaaaggtccagggagaaaccactcacacacacatgctctctggaagaagcaacttcaagtcttcaacgatggctacgaattcgattacctcatcctccttccgattagtaacaacgagaatccctctctccctcttccgaaaaaccccacctctcctttcattccccacaaaaccctttttctcaaaacccatcaccttccagagacttcaaccaacaccaccaccacaatcatcatcatcatcaacatcagcatcccttcaacccatcgaagacctacctccgaagctccaagaaatcgtgcacctcttccaatccgtccccgaacccaaagccatatacgaacagctcctcttctacggcaagaacctcaaacccctcgaaccccaattcaaaaccaacgacaacaaggtccaaggctgcgtctcccaggtctgggtccgagcctacctcgacccgaaccgcaacgtcgtctacgaagccgactccgactccggcctcaccaagggcctcgccgcgctcctcgtccagggtctctcgggtcgacccgttaacgaaatcattcgggtcacgcccgatttcgccacgctgttagggttgcagcagagcttgaccccttcgagaaacaacgggttcttgaacatgctgaaattgatgcagaggaaggctcttatgattgtacgggaagctggggaaaagggggtgatggggagactcactttaatgttagagttgtgtctaaagagtttgaagggaagagtttggttaagaggcataggcttatctatggcctgcttcaagaggagttggatgctggactgcacgcgttgtcgatcgtggccaagaccccggccgaagttgaagggtgagcgtgagactccgagagttagctagaatggcggaagagaggtcaaggttttttttctctcctttgtcactttttgtgtttgaggatggatgtatggattttcattgttgaaccagaatggtgattgtttgttagaagggcactttctatttgttagaaaatgcaccgatgaatttagattttgtagaagctatggctttcattcccatactgtaacaattttgccatttgaaagaagaaaaatgattgtgggcttctttgccttc

SEQ ID NO: 88755 - DNA, 297 bp, Glycine max
  Clone ID: PAT_MRT3847_51153C.1
tttacgcaaacataacataacatgtataattttcataatgactccaatcccttcacatcgtgctaatgcactcactcgggttccgattccaactcaatgagttgatacatcaccgatctgttagaaactcgcctatgctcctgctacaacgacactgacataaacccattttccgacgtcgtttgcgacctccaccgcacggaacatgtgttaggattagggtttggcgttgaaacagatccccatagccaaacgaatggggataatcatcatcgtgatcgggatttcgatgctgat

SEQ ID NO: 88756 - DNA, 410 bp, Glycine max
  Clone ID: PAT_MRT3847_51154C.1
ggattattcaagaagatagcctttcaagtcgccttccagtttatgagcaaatgggttgggagcatattgtttctcattggagaagtgcttttagcagagccagtgttgttgtgtttccagattttacttatccgatgttatatagtgagcttgacactggaaacttctttgtgattcctggatcaccagtagatgtgtgggctgcagaaagctatcataagacccatgcaaaggagcagctaagagaacttagtggatttggtaaaaatgatatgctggttctagttgttgggagctcagtcttctttgatgacctatcttgggactatgctgttgcaatgcattctgtagggcctctgctgacaagatatgcaaggaagtatgatgcaactgactcatttaaatttgtt

SEQ ID NO: 88757 - DNA, 291 bp, Glycine max
  unsure (1)..(291): unsure at all n locations
  Clone ID: PAT_MRT3847_51155C.1
gaggaagttgtcgttgcccagggcgattttctacattgtaatgaatgcttgggtgctatttgtggcgctggcgtggtgaaaggttcgaggggaaaaccaaatacngtacgtgaatggtgtgcaaatttgttgccccnggtanaccaaggggatggncttggggctaaattnttggactttggcctgttaaacggttntccgcaacgtgccaaagtnanccngaaatttcaggtcccatttgggaccttgccatgggtcncggcggttnnnttagttgcnaanaccatccca

SEQ ID NO: 88758 - DNA, 469 bp, Glycine max
  Clone ID: PAT_MRT3847_51156C.1
caaaaaaccaattttctattaaatattttcttttttaatctaggcccaaaaatccttttcaaaaataaaataaaaattccccctaaaatggggctttctaaaatccaggcaagtcactaactctgttcatagactttctcatgaaagccactttagccaacctttaaggggttcgccaagccaaagtcggggaaagcggttaagcctttttttaaacgcgacggtttttcagggttggcctttgcctgccccgttaaagctcggtttgttcggcttcaacccaggggaaaaactcctaatccggtttacttgactgcaaaaaaagcccccgagcccaggaaagcaactggtgagccccagggagatcattgggttccgggagccggttaaactcaacgacggtttgggcggggacggggaaattccccaagggttcaatcctggcgcccgaagatcgcaccgggggggg

SEQ ID NO: 88759 - DNA, 220 bp, Glycine max
  unsure (1)..(220): unsure at all n locations
  Clone ID: PAT_MRT3847_51157C.1
actatctntctctctgtctctacattacttacctctgttgattaattattccttgcagtctcttgagggcagatgggggcatctaatggccaccaaaatggttcgatttgcttgtccagcactaatggaagtgatccgttaaactggggagcggcggccgtggcgattaatgggagccacctcgacgaggtgaagcgcatggtgtccgagtaccgtaagc

SEQ ID NO: 88760 - DNA, 469 bp, Glycine max
  unsure (1)..(469): unsure at all n locations
  Clone ID: PAT_MRT3847_51158C.1
cttgcttgcaataactccacgttaaaatggggtacggtcacagttttaaacataagcgtcccagctcatcaagtggacgtattgcaattggtttcatggttttgtaatagcgaagattactgggagacttggttgacaactggtatatccagaatttcaaggaaggaaaacaagttcataactgtaggttgcgacagttacggcaatctcaatagcgtttataatgacaaaacatatacaacaaggtgcttaacaagatgttatggcaatgctttggtgattgatgatggaacatgctcaggtatanggtgttgccaggttgatattcctcctcgaatgactaatatcactattaaagcatttgccttcagaacctcaacgagaaatatcagcataaataatgcctctgtcatctccaattcaacctgcaattaatcctttggtgtcaaaaatggcttttaaaattttt

SEQ ID NO: 88761 - DNA, 752 bp, Glycine max
  unsure (1)..(752): unsure at all n locations
  Clone ID: PAT_MRT3847_51159C.1
aaacagactcaagttttactacaatggtgaatacgctggtttcgatgaagatgagccaacatcaaggcagggaggcaagggagatgttattaaaatgttgaagaagactcacagatacaactcaataattctgattggagacggtgcaaccgatcctgaagcctgcccaccagctgatgccttcattggttttggtggaaatgttgtgagagaggaggtgagatcacgtgccaagtggtttgtctccgattttaaggatctcattgatgccctgtgagtcagggccatatgaatgaagagaaactgaactttgccaaacggatgatatagatgctgcaggcttttatgattccatttgttcaaattaaggctgttaaagatacgcagtattctatattgccattttatttacatgcaataagcaagattgattacaatctctaaagctctagcttcatcttgcaactgtttcaaagagggctgtgaagaattcttctctgccatcttatcatgaaagtgtgtttcgtgttgagtgcagatgtgggtttccctgagaaatcaaaaatcttttctggtcttgcaaagaataccccgctcagggtaaaatgtgaattagagacgttaatcaacacagctatagtgtacaaatcttgactntgatgaggttttaaaactttgttggcatttatctaaaatgccattgcctgctagtatttattcaaacaccacctgcagctacaacagtattttga

SEQ ID NO: 88762 - DNA, 976 bp, Glycine max
  Clone ID: PAT_MRT3847_5115C.1
gggggaaaagaagagtaattggcaaattgattttggcttgctcggcaacacggtgggagcattcttcacttgtccttggttttggaacgacgacagccgagctatctctcattccattttcatccatcaatggctccagtagcagcagcatcttcagattcaatcaagccaagagatgtttgcattgttggtgttgcacgtacaccaatgggtggatttcttggtaccctgtcatctctatctgccaccaagctaggctctatagctattgaagctgctcttaaaagggccaatgttgatccatcccttgtggaagaagtatttttcgggaatgttcttagtcctcgtttgccgcgagaagacgacagaagggggcacaagtgagtttgttgatcgagataactagaaacttcttggacttaactcggaaaaagtaaacgtacatggtggagctgttgcactgggtcatcctcttggttgcagtggtgctcgcattctggtgacacttttgggggtactgaagcagaagaatgggaagtacggagttggtggcatttgcaatggaggaggtggtgcatctgcccttgttgttgagcttcagtaagacctatttcatgttcagtagatgtccttttaagagccagcgtttgatgcaaagctcaaaagatcttgcctccctctttagcaagcgaacatgcaagtttcaaatttattacaaggacaagaccgaaagagagcgaaatttagctacatagttgttaggtttaagtcgcatcttgtgaaagtgaaattttcttggcatcaaagtagaacatgaaacaatattatccaaattttagttttctccgggtttggaatgaatcattataaaacctcttattccaagcacacaagattacagattcccttgctttgcaaaaatgtgttccagaactgaaattgccaaaaagaaagagtggaaatgtgggagttgtac

SEQ ID NO: 88763 - DNA, 250 bp, Glycine max
  unsure (1)..(250): unsure at all n locations
  Clone ID: PAT_MRT3847_51160C.1
gcacncacgcgtacgtaagctcggaattcggctcgagnaagcatgnagcatgtgttgtacttgtatcaaaaaaaaaaaaaaaaaaaaangggngnccgccgntnagnnancncgnnanccnggnatttantncnggncnggnacnngcaggggtacnagtttccccnatagnganncgnntnaaantnggngnaatcanggnnanagcngttcccngggnnaantngttnnccgcncaaatncccnnnna

SEQ ID NO: 88764 - DNA, 546 bp, Glycine max
  Clone ID: PAT_MRT3847_51161C.1
agacacaatataagacgcattttttaactcccaaggaacgcaaaacaggagaatggggggggccatcaagacactcaggtcaaagaaccaaaccataccaaagcgagctaaaacaacacaccgaggaggacactgagccatccggggtccagattatatgggaacataagactcgggttcccctccgaggccgaacgagcatgccctcataaggcaagccctggagctacaacatccacaacaggcaaaaacagctcgctaatggggggagacgactcaggggccacatgaccaaccaccacaaagttgagcagagcctaagacctagccatgctgcacaataacagcgaatacgaaagacctaaggcacgcagagtggaaacccacaggacgcgagggacgacccgggaagggcggaccggcaccagcaggcggaccagcacaccctatagagagtccgatgagagctgggcgcaatcatgggcaaagccgactgctgtgggaaacagagaaacccccacagctccacacaacaaacgagccgga

SEQ ID NO: 88765 - DNA, 262 bp, Glycine max
  unsure (1)..(262): unsure at all n locations
  Clone ID: PAT_MRT3847_51162C.1
ctagggnttcgcaagtgcgatcgaagaagaacaacgacgatggcgatggctgcagntctgcgtgcncgaaggaangcgtttgacccaaccantcaacgccctccacncttctctcaatgcctcccnnatntcttnaagaccangnccctcatggcgcgnnctccatntccacgcangtttgnngannccntttnantatngtgngaatatcnagaagatcaccaaggccatgaagattgttgccgngtccaagctgcgggcc

SEQ ID NO: 88766 - DNA, 291 bp, Glycine max
  Clone ID: PAT_MRT3847_51163C.1
gcgccggcctatcgtcgacccactcattcaatatgagatcccttaagaaggcaattttttgacacttccaggtcgttatgcctgaacaacagtgcatgatttgtttatgttggtgggcatgactggggcatgttttgatgcgttgtccatgccatgcaggattttttattaaaaaaaaaaaaaggcggcgttgaggatcagtactcctgctcactatgcttttatggtacctaataatatggctctttacacttgctggaaccctcttccacttatgctgataatcctttt

SEQ ID NO: 88767 - DNA, 559 bp, Glycine max
  Clone ID: PAT_MRT3847_51164C.1
cattttgttcaaacctccgtttgtaacgtttatccaaacatgcacttctccgttgaggcttgccaactgcaaaccaagcacattcatattgtcaaacacattattatgtcatgtatatatattcacgagaattaaatccgatattatcaattggtacaaggttgttctagtttaattagagttttgtatataaggctagaagtacttcagagcttctttaccggaaaaagctctatatatttctagtagagaaactcttaaaagaacttttagcttgtatattttttcagtagctctcaaacacttcttggcttgtatccgaatagacccttaatgatttcaagtttgagtcactttattatgtgctagattttcttcggtgaagataagacttgaatccaatttttcttttcttgaaggtaagacttgaatgaatctaattaataactcaagtttgtgattatttttcttttcaaatttgattatttaattgcaacgtggatgaataattaaatagcttagaggtggaaggttgcattgtttgtcattaaatgatgcg

SEQ ID NO: 88768 - DNA, 228 bp, Glycine max
  Clone ID: PAT_MRT3847_51165C.1
gactgtcgtgactgcatctcatagctatatagtaactgttcttctacacgagactcaccgaaaaacgcgcatgctgaaaagatctcacttccacccagccaagcagagcgaccggggggcgtacgttgtataggagcgcaagatgtatccgccccggccgcgctgcgcctgagctgcttatatggagaaggcgaaggacagtatactgaccggcattaacaacgcgcc

SEQ ID NO: 88769 - DNA, 477 bp, Glycine max
  Clone ID: PAT_MRT3847_51166C.1
ctttgggctgatttatgtgcttgcatggtcgtgagaagatgatagaaggggaactcggcgagcaacaaaaactaagaaaaaaaagaaaaaaaagtggattcacaaaggggttaagtcaatggatttacgtccatgaatctacatacgtcacacagcggtattcaaacagagctaatcggttgtaacccaataattcttggatcgtaaaaatttcatcggcataaaatcgaactcatccaaaccaaacgttccccaggatactcggtccaacatagacgaggtatcaattaacaggttcctataaacggcgtctagtacgaacggtgtacgtcatacgtttaacggtatgttacccactgtggtgtaccaagtgtccatgtctagtcggatatgcatatcccgaagggcataactgttagtcttccactgctcgccttccctgccctccgttacgctcgctcggccatgtcggtaagt

SEQ ID NO: 88770 - DNA, 563 bp, Glycine max
  Clone ID: PAT_MRT3847_51167C.1
cccacgcgtccgcccacgcgtccggttcaacttactgctacattatacctaccaccaggttacaatccatcaacagatggccctttgccatgcctggtttggtcttacccaggagaatttaagagcaaagatgctgctggacaagttcgtggttctccaaatgaatttgctggaataggctccacatcagcccttctttggctggctagaaggtttgcaattctatctgggcctaccattcctattattggcgagggtgatgaagaggcaaatgataggtatgtagaacaattagttgcaagtgcagaggctgctgtggaggaagttatccagcgtggggtggctgatccgaagaaaatagctgttggtggacattcctatggtgcgttcatgactgctaacctgctggcacacgcacctcattttttttgttgtggaattgctcgttctggtgcttacaacagaacacttactccctttggttttcagaatgaagacagaactctttgggaggccactaatacttatgtagagatgagtccttttatgtcggctaataaaat

SEQ ID NO: 88771 - DNA, 1809 bp, Glycine max
  unsure (1)..(1809): unsure at all n locations
  Clone ID: PAT_MRT3847_51168C.1
ctgatagtccgtcttggtacaaaacacggaaaataagaacatgggtagtctctcctggatctgaagatgtagctccgccaatcctattggcaggtactcaggaagatgtgtactctgatcccggttctcctatgatgcggagaactcaagctgggacatacattattgccaggataaagaaggaaagtgatgaaggaagatatattatactgaatggaaatggtgctacaccagaaggaaacattccattccttgatctgtttgacataaatacaggtaaaaaaatggaacgaatctgggagagcgataaggagaagtattatgagactgttgttgctctaatgtctgatcaagaagaaggggatttgtatttagataaactgaagatactgacttctaaagagtcaaaaactgaaaacacccaatactactttgttagctggccagataaaaacatagttcaggttacaaatttccctcatccataccctcagcttgcatcattgcagaaagagatgatcagatatgaaagaaaagacggggttcaacttactgctacattatacctaccaccaggttacaatccatcaacagatggccctttgccatgcctggtttggtcttacccaggagaatttaagagcaaagatgctgctggacaagttcgtggttctccaaatgaatttgctggaataggctccacatcagcccttctttggctggctagaaggtttgcaattctatctgggcctaccattcctattattggcgagggtgatgaagaggcaaatgatgggtttgtagaacaattagttgcacgtgcagaggctgctgtggaggaagttatccagcgtggggtaagctttctgtgggcggttccccggaggcgtcgtgagnggaancgggganacccccccctttttnnntnggaaagccctcggcgcctctaggtggctgatccgaagaaaatagctgttggtggacattcctatggcgcgttcatgactgctaacctgctggcacatgcacctcatcttttctgttgtggaattgctcgttctggtgcttacaacagaacacttactccctttggttttcagaatgaagacagaactctttgggaggccactaatacttatgtagagatgagtccttttatgtcggctaataaagttaagaagcccatcttgcttattcatggggaagaggacaataatccaggaacattaaccatgcagtcaggcaggtttttcaacgctctaaagggtcatggtgctctttgtcggctggtgattttgcctcatgagagtcatggttacactgccagagaaagcatcatgcatgtcctttgggaaacagatagatggctgtataaacactgtgtatcaaacagttctgatgcagtagaagaccatgctactggcacagtcaaagaacaagttagcaaaggaaccatagatgctgaaagcaaagtggttgcaacaagcggaggtggcagtggagaggtgtctgatcttgagtatgaagaatttcattctctgccaagatcatacttgtggtaatcacatcttcagtcctaaattttaattccaataagccccttccactgaaagttaattatttttttataatggtaaatttgcgaacagtaaatccctgtataggttggacatattcttgcccccttgtgaagagtagtatgccagcgtgcctgcttgttgctattttatttaaatgtaactttcgcatttcaagcaaccaaagaattataatagttacaacccattaatcccccttgtggattaaaaa

SEQ ID NO: 88772 - DNA, 453 bp, Glycine max
  Clone ID: PAT_MRT3847_51169C.1
agcaaagatgctgctggacaagttcgtggttctccaaatgaatttgctggaataggctccacatcagcccttctttggctggctagaaggtttgcaattctatctgggcctaccattcctattattggcgagggtgatgaagaggcaaatgataggtatgtagaacaattagttgcaagtgcagaggctgctgtggaggaagttatccagcgtggggtaagctttatttttactgtatggagaatatgaagtttttagtcagaaatatgatgactcgtgatattttgggttgtcacttgtcacatctaggtggctgatccgaagaaaatagctgttggtggacattcctatggtgcgttcatgactgctaacctgctggcacacgcacctcatcttttttgttgtggaattgctcgttctggtgcttacaacagaacacttactccctttggt

SEQ ID NO: 88773 - DNA, 1936 bp, Glycine max
  Clone ID: PAT_MRT3847_5116C.1
ccacgcgtccggcgagacgacgacagacaggggggaaaaagaagagtaattggcaaattgattttggcttgctcggcaacacggtgggagcattcttcacttgtccttggttttggaacgacgacagccgagctatctcggagacgggcggctccggtacagctggcagggcttccagcagcacagcgactgccgctcccccaggcttccggagggctgagagggcactgcagcttgggacttcttcgggttcgacgatccccttctccttctctctctctttttcgcctcattccattttcatctatcaatggctccagtagcagcagcatcttcagattcaatcaagccaagagatgtttgcatcgttggtgttgcacgtacaccaatgggtggatttcttggtactctgtcatctctatctgccaccaagctaggctctatagctattgaagctgctcttaaaagggccaatgttgatccatcccttgtggaagaagtattttttgggaatgttcttagtgctaatttggggcaagctcctgcaagacaagctgctcttggagcaggaatatccaattcagttatctgcactaccgttaacaaagtttgtgcatcaggaatgaaagctgcaatgcttgctgcacagagtattcaattaggcacaaatgatgttgttgtggctggtggtatggaaagcatgtctaatgtacccaagtacctggctgaagcaaggaaaggatcacgccttggacatgattcacttgttgatgggatgttgaaagatggtttgtgggatgtctataaggatgttggcatgggagtgtgtgctgagctatgtgcagataaccatgcattaacaagagacgaccaggataactatgcaattcagagttttgaacgtggaattgctgcccaagaaagtggtgccttttcatgggaaattgctccagttgaagtctctggtggaagaggaagaccatcaacagttgttgataaggatgaaggcctaggaaagtttgatgctgccaagttacgcaaacttcggccaagtttcaaggagactggaggttctgttacagctggcaatgcttccagcataagtgatggtgctgctgcactagttttggtgagtggagagaaggcactgaagcttgggcttcaagttattgcaaaaatcactggatatgctgatgctgctcaggaaccagagttatttacaacggctccatcccttgccattcccaaagctattgccaaggcggggttggagacttcacaaattgatttttatgaaattaatgaagcctttgcggttgtggctctcgcaaatcagaaacttcttggacttaactcggaaaaagtaaacgtacatggtggagctgttgcactgggtcatcctcttggttgcagtggtgctcgcattctggtgacacttttgggggtactgaagcagaagaatgggaagtacggagttggtggcatttgcaatggaggaggtggtgcatctgcccttgttgttgagcttcagtaagacctatttcatgttcagtagatgtccttttaagagccagcgtttgatgcaaagctcaaaagatcttgcctccctctttagcaagcgaacatgcaagtttcaaatttattacaaggacaagaccgaaagagagcgaaatttagctacatagttgttaggtttaagtcgcatcttgtgaaagtgaaattttcttggcatcaaagtagaacatgaaacaatattatccaaattttagttttctctgaaatgttattggcgtactttggtttggaatgaatcattataaaacctcttattccaagcacaagattacagattcccgtggtttgcaaaatgtgttccagaactgaaattgccaaaaagagtggaaataaggaagttgtagttaaaaatgcgtaagct

SEQ ID NO: 88774 - DNA, 1083 bp, Glycine max
  unsure (1)..(1083): unsure at all n locations
  Clone ID: PAT_MRT3847_51170C.1
ggggcactcttaatcctttacattatctcaatccctacccctctctgtctctctctctctctctgctttgttcgcaggcagtaacttccagtgagcggcggatgtatttgtttattgtaattggtagatgcatttgaggtgcatcttgtgaggtcatctgaaagatggatcttgagggcaaaaaatttgggaagggcaatagagaatttggaagtactcgtgatctcataaatcagaatagactttggctctactataaattcttctgcaagaagtcactcccagtgtcaatttcagagacacattatcttcacaatgtggtgggagacacaaaaatcaggaagggagaaggaatggaactggatcagctctgtaaaaacatggacacgagtgagaaaaaagcttgcttgtgtccttttgacttggatgtactcagtgaagctttccatatgagggatatgaatccagtccacctttcttctgtaagatttttctggttgcgcatttgatcatattcttgaaagaaaactgaatagttcaaattgccgtttgattttaaaaagacgcattgagctgatgtgttatacacaggccagaaggggctaccaaatgcagtgcccaaattagaaaaccagtctagagatcatgagaggaagaacaaaaaggtcaaagataaaggtgagaagtataggaagcagaagcatagattacatcgagtaaataatggaagttgtatagagaacatcagaattagaccccatgatcctcatcccttgctgcagttgaagaaccaacgaggcaagaaaaggagggcagagacaagcaataatgatccttctgtttgcaagcgataagatactagaatgagagcagaatttgaattttttttttctggaaatatgtgattaattcagaagctgacagtgaactctgtttttgtcacatttaacattttttgttctctcctactctaaatctcttgtttctatttgctcacctaaatacttaatttccaaagtgcgggaacaaaagaatttcatgttctggagtttgtttattaatttaattaaagcannatcattt

SEQ ID NO: 88775 - DNA, 584 bp, Glycine max
  Clone ID: PAT_MRT3847_51171C.1
aaaaagcattaaacccacgttttttcaggcttaaggtatataactagaagtaagtctctcacagcagtagcgttttttaattatccataatatgtatacggcccaatcccaccttctatcaaaaccacaaattaattatcaacaactcctctttttttttatctgccaataaaaaaaagttcaactttctttccaacaattggtaattatctctatactccccactactatcaaacccagaaattaatcatcaaaatctctcaaacacaccagaaattctttatccgaaactcagaaaacccaacaaaaattgaaaatttctcagtctgcaattgaaaattgaaaatttgcaaatagggtgcccaagaaaactttcacccaaaaagcaaagacaaaaaaaaaaaaaaaagacctaaccttaccttaaaccgttgtctctatctccaactcacttcacaaattcacacacacacgcgcgcgcgcgcgacacacaacacaaagaaagtgtgatgtgaaaaaaccaagccattagaatggtaaaaaggagaagggtttgacggtggtagcgtgcctcttgcttagat

SEQ ID NO: 88776 - DNA, 382 bp, Glycine max
  Clone ID: PAT_MRT3847_51172C.1
ggtgttttctgttctccttatcttttttttttttttttttgggagagcagaaaaatcttattttatttttttaacaaattaatggtggaaaaccccagcttttaatttaaaccggaaactccctcaaaatggcaccggatttcaactaaaaatgcccctggggttttttacaagggtttttcaaaaaagaaaaatattacccctttacacacccccacacactatgggggtggctaggggggcccttccctaattccccccaattggattttgggagcaaaaaaaaaacaaaacctgcgttcatccgaacctttttttgaaccacactggtgcaaaaaccgtttgcaaagaagaaagggccccccaattgaactttcccacc

SEQ ID NO: 88777 - DNA, 671 bp, Glycine max
  unsure (1)..(671): unsure at all n locations
  Clone ID: PAT_MRT3847_51173C.1
ccacgcgtccgaactgattttcatatttattttcttcccttcttcctccaatcgataagtttgtttagtgtaattgccctgaaccaaaacccaaacagtttctcacacagcggaggtttaagcgtaaattcgacgagaatgcgtaaggacgaagccaaggcccccggcgccatgccgcagcagcagcgatcgcacatccagttcttcgtgcgaatgatgtctgccggaaacacgattgtgatgtaagccttccccgaagacacggtcaaatcgattcacgagcgtatccaaagcatgaagggaatcccattgttcgagcagaggttaatttatcgcgggaaacagctccagtgggaacagactcttgccgagtgtttcattcaaaacgacgccaaccttcaattagttggccgtatgcgcagtaccgaacaccctcaagcctggcaagttatcaacgacatggtttctctcgtttaccgtctttgccgcggcgagacggttcacgatgccttgaaaaccgtcaagggtttgatgaccagttacttgaacatgactcccagaattgacaacgactctgcctctggctactttcagattntcatgtcttcttctgccccgctgtgcttgntatgctctatgtgtccccttacgcagtaacaagactgtgctga

SEQ ID NO: 88778 - DNA, 847 bp, Glycine max
  Clone ID: PAT_MRT3847_51174C.1
tgttaaaacaggggcccgagtgagaaaaaaacttgcatgggtcctttttacttggaggtactaagggaagctttccatatgagggataggaatccagtcccccttttttttgtaagatttttttggttgggcatttgatcatatttttaaagaaaactgaatagttccaattcacgtttgattttaaaaaaacgtgttgtgctgatgtgttatacaaaggccagaaggggctaccaaatgcagtgcccaaattagagaaccagtttagagatcatgagaggaagaacaaaaaggtcaaagataaaggtgagaagtataggaagcagaagcatagattacatcgaataaataatggaagttgtatagagaacatcagaattagaccccatgatcctcatcccttgcagttgaagaaccaacaagacaaggtttgctctcagtcctttatcccacttttttgtgtggtgtgtcttacgttaaattaaatgtaaaattaattatttacataaaatttgctgccttgtaaaataccaaatactatagaagtggggtattctataatttcattgaccttgtttacataccatagctatagtatatttcatattctgtttgaaagaggaaaaaaaaaaagttattagcattaaccatattaagctaatacatgattttggactgactaaaatattaacaagtgttattcgtacaacattttatgcaacaacaattttttgtatccatctctctccattgcatcatttattacatctcgcatttctctctttctatctcagttgtataattggctgtacaaataacatttctctattaacatattgttgaggtt

SEQ ID NO: 88779 - DNA, 425 bp, Glycine max
  Clone ID: PAT_MRT3847_51175C.1
ttgagtacctgattttacttcgctcgcagaggttgccaaagcagcttcgacatcgtgaaaaatcgcggaaaggagtcggcggaaaatctacgaatcgagtgatgcaccacccattgtgttgctcaacagaaaggccgcagtggtacgccgctgcgggcggccgaggagatcgatcggaatcggccgatggataaggcgctattgttcgcgtgggcgtgcgctctaatcctcttggtactgttcgtcgcgctgtaccttccttggtagtaagttgccgatggcgactcgccacggcgctgcctgcgatccgagactgattgccaagtcaccgcccacaatcctggtagttgctctagggcattcgtccggaggatacgttgcccggtcagcttctccctcccttgaggctgaccgggcgaagttag

SEQ ID NO: 88780 - DNA, 496 bp, Glycine max
  Clone ID: PAT_MRT3847_51176C.1
ggctcgagatggtttccgacacaaaaagaaagatttatttttaaaataaataaataaaggcgttgaacagatgcactgcagtcgatttcgtttttggaccacggtggtggcagatcagctgccaaagcaaagaatagagatattgagttttagtttgagtgtgagaggatgatgcgatacaaagaggaaaaagaagcaaagaaggaagcttttagaaaatatctggaaacaagtggagctgtcgacgctctcaccaaagttctggtttctttgtacgagcaaaacgacaagccttcttctgccgtcgagttcattcaacagaaattaagctgtccttccatctcagaatatgaaaagttgcaagccgaattctccgatctgcaaatcaaatacaatgacctcttagctgcacaccagaaaacctgcaaagagaattgcaatggaatggattttcaatgatttttttaaaaaaaaaaaaaaaaaacaaactaaaaac

SEQ ID NO: 88781 - DNA, 343 bp, Glycine max
  Clone ID: PAT_MRT3847_51177C.1
ggaagggcacagagagaaaatcaaaatcaaatcaagtagacaaaagtgataagaaccagaagaagcattcatggctgcttctagggagaaaagaagagcatctctggaagaaacgttgcaacaacttcgcgatgtcacaaactccactgctttgaacaaagcctcaattattgtagacgcctcaaaatacatagaggagttgaaacaaaaagtggagggactgaactcatagctggaaatcgcggaatcatcaacaaccactcaaattgatgaactacctatggtaattgtgaaaaccctataaaagggtttcctgattaatgtgcttttagaaaagaattgt

SEQ ID NO: 88782 - DNA, 665 bp, Glycine max
  unsure (1)..(665): unsure at all n locations
  Clone ID: PAT_MRT3847_51178C.1
cacgcgtccgctcacgggtgacgagaaagagtgatttctctctctcacacacacacactctcagaagtgagaacacacttgggctccattgcctctgaatgaaaaatcttacacaccccacaacgacaccgttttgacaaggttaaacaatgggatctaacattttctgagaaaattgttggttttttttccttgacgttggagccatcgaacagtttgtgaaatctgagatctaggctcctgggaacggttgttgaaggctttggattataattttgaattttggtttctcggttctctgaagtgagggaaaaatgcagaggcctccacctgaagattttctgttgaaggagaccaagccccaccttggaggcggaaaggtttccggtgatagacttaccagcacctatgatctcgttgagcaaatgcagtacctttatgtgagggtcgtgaaggcgaaggacttgcccgcgaaagatatcactgggagttgtgatccttatgttgaagtcaagcttgggaactacaagggaaccaccaggaatttcgccaagaacacacatcctgagtggaaccaggttntcgccttctcgaggaccggcttcaggcctcgatgctggaggttantgtgatagataaggatgttctngaggatgacctcatcg

SEQ ID NO: 88783 - DNA, 499 bp, Glycine max
  Clone ID: PAT_MRT3847_51179C.1
tcggcttcataatcagctgacacaaagaagaaagagaagagaataatacgaagagccagggttttgcctcagaaagggttcacccatttgcaaagtgcctcgagagttgagatcacatcggaacaaaacttggagaattattacaatttacaaggtgacaaaagtgcatggcatagatttttttttatctgtataaatcaaggtaccagagaatttataacaactcagacacttttctcaattgagacctcttggtaaatggtatgtcatagataaagctacatgcgtgctcaacaaagttcttattctcaatctcccttaattatgttggaacctttcgctacttgcttcacctttcttcataggaagaccaaattcttcctcaacaaaccaagaatcaaggagatgatgggtgcatgctgcaagagaagacaatccaacataaaattattctcttcaagttctgacctgtcaacctcttctttccttcacatgaagc

SEQ ID NO: 88784 - DNA, 877 bp, Glycine max
  Clone ID: PAT_MRT3847_5117C.1
gtgacccacatccccggactgatacttggctggagctttcttccactcacaaaatccatgccttcccaaacgtaacaccagagttaaaaacaactctgcaattaaacttcacatcttatgatctccccaaggcaagaccctctgttgccccacacccacttctctaccatgttcaagctcctcaacaagaacctccgccgcctcctccgccgtctccggtggccaattcgccgccgctcaaagcccaaagtagtagtgatcaacaagctcggaaagaacgccccaaaagcccaaaccgaagcaagcacaaatttttccgccgcggttcatccgaacgcgcaattgggtactccgaaacccattcgggtcgcgaccttcaacgccgccctgttctccatggcaccggcgctcccaaaacccacgttcgaggaccaaaacggcatcgcttcgaagaaccccgaaaacctgaattcgcgatccaagtcgacgaaggagcgtcccagaagcatactgaaacaatcgcagtcagtgaagaacagagtaaatgacagcgacaacgtgacgaggttggcgaaatcgaagatgagggtttccataaatttaccagacaacgagatatcgctgctgcgaagccgacaatcgagcttctcggaacacgacaaggcctcctcgtggtgggtaggtggtggggcccacgtgagtaacagaactgtggttgaggttctgaagcaagtggacgctgatgttttggggctgcaagatgtgaaggccgaggaagagaatgggatgaagccattgtcggatttggcggcggcgctgggaatgaactacgtgttcgcggaaagctgggcacctgagtacggcaacgaagtcatgt

SEQ ID NO: 88785 - DNA, 275 bp, Glycine max
  unsure (1)..(275): unsure at all n locations
  Clone ID: PAT_MRT3847_51180C.1
ggctttttgtgtcttcgacaactgagactaaatctcttcctctcccaaactttcttctttaccanaacagtttaaccaatatagatttgagtgattggaagttggaaggagaatttcctctttggttgttggaaaacaacacaaaaatgaccgaagctttgtttaggaattgctctttcaccggtacttttcagctaccatgagtnctcttcctaacatacaagcaattgatgtgtcgncaataccataaatggccnaattcctagcnacaatat

SEQ ID NO: 88786 - DNA, 183 bp, Glycine max
  Clone ID: PAT_MRT3847_51181C.1
aactacagggggagcgaagggtacaccaacatctcatatattccttgttgggggtgcactcttcctccactatagaggagtcagcttcctgcagtccacaaagggcttgcttcagagactttttctttcctcttctctcggggggctggctcacgcttaacctggggatcgtaagcgctttgt

SEQ ID NO: 88787 - DNA, 237 bp, Glycine max
  Clone ID: PAT_MRT3847_51182C.1
actagtcatccatcaagcatagctttcccatttatttgtctcttgtccaatgcagcacataggaagctctgccaaatcaagaggggacttttcataatatgaggcagaatttaaacaactgcataagatctttctgccatcactctgacacctcttatcatcatcatacttcatacagcgttaacaacctctatacaacactgatgcctcttctattacaaccctatcactactcgt

SEQ ID NO: 88788 - DNA, 268 bp, Glycine max
  Clone ID: PAT_MRT3847_51183C.1
aaactcgaagagcccttcttttgtgcggttttttggttaaacaatttaaaaattaatcattacattcaatggcttccacatatgaaccaattttcactaccttagaagaaagggggaaaactattcctggttggttaccacctattcactggagagattattcaatggttgtgtgctccaacttattattaacaattttggctggttcagctagttgttaagcccctacaaaacaatgaatcttggggaatatggaaactaaaataaa

SEQ ID NO: 88789 - DNA, 242 bp, Glycine max
  Clone ID: PAT_MRT3847_51184C.1
ctggatctctcttctcttctttgatctccgttaccctttttgttttctcaacagagagagagagatagaatctttcgaagttcgtttgcatgtgctgtgtggtcagtcaccgatggaagcaccaacctgcgaaggtcactgccgaatacgattacctcatcaagccttctcttattggtgatagcggtgtgacaaacattcctctccctttgcggttttctgacggtaccatcacaaccagt

SEQ ID NO: 88790 - DNA, 523 bp, Glycine max
  Clone ID: PAT_MRT3847_51185C.1
acgagcagatgtgatgccaaagagccagcttaatcaagttttaaatgctgaattaggtcctggctggtcatcaaaattaattagttttgattatgaacctatagctgctgcaagtattggccaggtgcacaaagctgtcatgaaggatggcatgcaagttgcaatgaaaattcagtaccctggtgtgggagatagcatcaatagtgacattgagaatgtgaagcttcttttaaactacacaaatttaattcctaaaggactttatcttgacagagctataaaggggtttggatcccttagcccctctcttcttttcactgagtgatatgccttcaaatttatcagtggccaaagaagaattatctcgcgagtgtgattacaagttggaggcagcaaatcagaagcggttccgagatcttcttactggcacagacggattttatgttccaatagttgtggataatatttcaagcaaaagagtattaactactgagcttgttcgtggaattacaattgacaaagt

SEQ ID NO: 88791 - DNA, 289 bp, Glycine max
  Clone ID: PAT_MRT3847_51186C.1
gaaaaatggaggggacatgaagactgagtctaaatatgacagcccacaggttagctattgatttggggcaactaaaactagttaaattgcacaggagtgccaccccaacttgaggtttgtgctaaacacagggtggcaacaactggtctctgtaacatgagtaggcatacctaccaatcaaagcacgagcaagacactacattgtaggtagtcccgtacatcttgtcaggaccacctaaattaaaaagaccatttggcaacgactacacgcaggttaatgacacgcgga

SEQ ID NO: 88792 - DNA, 348 bp, Glycine max
  Clone ID: PAT_MRT3847_51187C.1
ttgaaattaagacattcatattttaattgaaagataataaccattaaaggagcaacactgttcaacccaaccaaaacaattacatcagtaaaacaaagttcatgtccacatgttatgtaattacaactttgtacattggatggttctaagtttcaaaaagtaagctacccattttttacgtaatgttgtgatcgcctccgggtctagtgccgagccatcaccgaaccacacactccaatcactcttcaactctgcgccaattatgttccacatccaatgcatcacataatacccacactcatagcctccgcgttgaatgtgagtcttcagttcaagccactggggtcc

SEQ ID NO: 88793 - DNA, 1391 bp, Glycine max
  unsure (1)..(1391): unsure at all n locations
  Clone ID: PAT_MRT3847_51188C.1
ccgggtcgacccaagcgtccgaagacgacagaaggggacaactatatgtgtgacattgaatacataattgctaggcatctctgaaatcaggcaagtgaaaaccaaaaataaaatggtctcacagacagttgaactcttaaagaatgagattcctctggagcaggaatcagtggttttagctgaagatgctgtaaatggtctcgttcttgtggacatcataaatggcttttgcacagttggtgctggaaatctggctccaagagaatccaatacgcagatttcgggaatgatcagtgaatcagcaaggctggctagagtgttctgtgagaagaatttgccggttatggctttcctggattctcaccatcctaacaagccagaggacccttatccccctcactgtattgttggctctgatgaatcaaatctggttccagcattaagatggctagagaatgaacctaatgtaacaatcaggcgaaaggattgttttgatggatatttgggctcaatacaagaagatggttcaaatgtttttgtagattgggtgaagaagaataagataacaactctgctggtagtaggtgtgtgcacagatatctgcgttctagattttgtatgctccacaatgtcagctaaaaaccgtggttttctggagcctctagaaaatgtggtggtgtattcccgtgcctgtgctacctttaatgtccctctggaggtagccagaaataccaaaggagctttggcacatcctcaggagtttatgcatcatgtaggcctatatatggccaaagaacgtggagccaagatagcaaatgaagtattgtttggtgcagcagggaaggtttaataaaccgtgttgtgtggcccttctgaataagctatctaaacatacttatgtaaggttggtccaataaggtgcaaatggtcatgtcacatgtggtggcaaccccccataggactacatatcatatgtattcacaaacacaaaaaaagaaaagaacaccgtatcatcatatgtagagtataatcatgtccaagttagacaaggtttatagctaaataagtcgagatttttttcaaaactttatttaattaaaaaaaattctaagtcgtttaaaaaatcttaggtttaataagtcaatctatatttaaataaacaaacaatataaccataataatatcatggttgatattattttaattggtccaattacacttttatgcctttttaccgtagtttctcaaatttgatctccttatttttngtaaattttgaccttccagtatttggtagaaatgttaatgtaattctgacatgaatgtgactgatgtggacgtctgcaactttatttaatatgtttgtaacctaatttaatagaccttattat

SEQ ID NO: 88794 - DNA, 302 bp, Glycine max
  Clone ID: PAT_MRT3847_51189C.1
ttttcgcgtaaatttgtgcatgggaaaactgagtatcccccagggcacttcccggagcgttaaaagaatgcccctttctatagggggaggcgctgtggcaaagaaagctgttctcatgaatatgccaaatgctgctctttcagtgtggggatattatgccggacatctggtctgcgaagtggctaagatgacttctcgctacattaaaggtacagtcggttttttaatagcatttggaaagtgggcggatgacaccagcaattgtgaggccttaccccacaagctggtgcagcttggagaga

SEQ ID NO: 88795 - DNA, 1356 bp, Glycine max
  Clone ID: PAT_MRT3847_5118C.1
acaaataatatatttgaaaggaattttcattttgggatcatgacacgaagcaacatcactcatgttacttactaataacagcgagttactacactcattttaccagttaaagcaaatgaatgaagacagataacactaagattcagaaacatgcatggttacttacaatacggtgttacattagctgagacaacaccatcctaagtaccactgagtcttaaagctaatgctacatgtcatagcacattgactaacaaattgaaattgccaacagtactttatcagtggcatgcagtgtcccaagtcccaaataattaggcactgccaaagttgagcattaaagcaactgacaatcttcttgaacttcacaagctctgagatttatggccaggtttgcttgagcatcagcttcagagttgtattccctaggaatatgactgatcttgaatgacagaaacttatccttcagctccttggcctcagcacacaaggtacccatattctggtttttgattttccataaaccctgaatctgattgcagacaagcagagagtctccttggacaataatgtgcttataacctttcttaagggcatgtttcaatcctagtattaaacttcgatactccgcaacattatttgtttgaatgcccactccttcacgcaaccgatagaccttgctcccatcatgcagtatagctcctgcaccagcaggtccaggatttcctttggaagcaccatcaaaatgaagggtacacgaaagacaagaagaccactcagcttgggatccacctagtgtatgattcctcagtgaatttggtggatatgaaaatgatccagccagcttgccagtgtcaaactgaatggctccttgcaagtttcttgatgaggaactcacattgaaagctcttcctccagatgaatatggatcctgataaggacaagcaacaagtcttccaaaaagcccctcgttcacatcagctgcactaatagaataaggggctcccttgagcccatgtgagacaaggtactcctcagtcttctgaggtaacgagtaccctttgtaaatacttacagggtcactagacacagaagatgcaagtaaaggttggatgtcactgaaggacttgtagatgccaacaacatcccctttccttacaacgtagaaagcgtctttctcctcagccattgcaacaacactctagaatcactttctcttctgtgatactatgaaagaaaaacctgtttttgagttttgaaaaaagcaacagtttcgaagttcgtgaaattgatgagaagaagctatgttgagtgaaagcgacagagtgagatagcatgtcaaaaccggacgcgtgg

SEQ ID NO: 88796 - DNA, 132 bp, Glycine max
  Clone ID: PAT_MRT3847_51190C.1
aatgtaatactgcagccttaacaaaagcggactataaagtagacactaccatagtacaccaccactaaccttcctggttctaaggaccagaaaaccaagcaagcttgtaataaatccgttagggagcgaaca

SEQ ID NO: 88797 - DNA, 1505 bp, Glycine max
  unsure (1)..(1505): unsure at all n locations
  Clone ID: PAT_MRT3847_51191C.1
tccatcccaaccaattngaaggccaaaccttggagccggcaaaaaaaaaaggcaataagagacccaagggctcgagcgcgagccggggacatccaaaaaacatgaaacgaaaccataatttccccttccaccaccggccacgcaagtgggcgatggtgatccccaccgtcacaatatgcttcctcctcctcttcctcccgctccttcccctcaccaaaccctcatcttcatcttcttctttttctgcgacatggtcttcttcttcgctgaatttaacggaagaactagaagtgggtgttccgagattggcgtacatgttgacggcgacgaaaggggagggggcgcagctgaagagggtccttcaggcagtgtaccatcccaggaactactacctgctccatctcgatctagaggcttctgatgcggagaggctggagctggccaaatacgtcaagtccgagactgtgcttgcggcgtttgggaacgtcttggtggtgggtaagcctgatttggtcacctacaagggccccaccatgattgcttctactcttcacggtattgcccttttgctcaagagggccccacactgggactggttaatcaatctcagcgcctctgattatcctctcctctcccaggacgatatcttgcacatcttttcattcttgcccagggatctaaatttcattgagcatacaagtaatattggttggaaagagcatcaaagagctaggcctatcattatagatccaggcttatatcattcaaagaaatctggtgtttactgggctaaagagaagagatctgttccatcttcgttcaagttattcacagggtctgcatgggttgtcctgacaaaatcatttcttgagttttgtgtttggggttgggataatcttcctcgaactctccttatgtattacacaaattttctttcatcccctgagggttacttccatacggtcatttgcaatcataaggactatcaaaacacaaccattaatcatgatttacgttacataaggtgggacaacccgccaaagcagcatccagtcttcttgaaattggagcattttgatgacatggtccatagtggtgcaccttttgctcgaaagtttaccaaggatgatccagttctcaacaaaattgataaggaacttttgagaagatcagatggtcactttacaccgggaggttggtgtattggcaatcctcttttgggaaaagatccttgtgctgtttatggaaatccaattgtagttaaacctaccttacaatcaaagaagctagaaaaactaatagtgaaactattagattctgaaaattttaggccgaaacaatgtaaatagtagtcactctgcaacgtgaaatttttatacacaattctattggcatttttaatgcgtcgtctgttcaaatttaacattatgaattgttatgaaacatctttctagtatgtgaacttgagtaggtcttgtcatttcatgctacggatgggatttttt

SEQ ID NO: 88798 - DNA, 349 bp, Glycine max
  Clone ID: PAT_MRT3847_51192C.1
gtttttttttttttttttttttttttttttttttttttttttttttttttttttggttttttttttttttttttaaggaaaaaaatcccctatggggcattatataatatgggacaggggtcacaaacggggtcctaaacttttttttgacctcaaaccacccccccggaaaatgaacggggttataaactaaaactattctgcacccctgggaaaaaaacccaacccacatttggctgcagatgcccccccccccgtgaaaaaaagggccctttttggggcgagttttctttttaaagggagcctggaacaaaacaacggtccctggggggggaagaaacgtttcttt

SEQ ID NO: 88799 - DNA, 1321 bp, Glycine max
  Clone ID: PAT_MRT3847_51193C.1
aataataaaggttgagacaaggtctgctgttgctgataggctctctacaatgtgtgtccttccgcttctattggctggggttttgagtgctcctggaaaacatgaacaattagcagaatatttgaggaagctgctactagaagaaaattcgatgcagaatcaatcaaccaagcacactcctgagattattaatgctatccgcttcatttgcatatatgaagaaaaccatggtatgatatttaatatactatgggaaatggttgtcagctctaatgcgagcatgaaaataaatgctgctaagttgctgaaagttattgtgccacacattgatgttttggttgcttccactcatgctttgcctgctctaattactcttggatctgaccaaaacctcaatgtgaagtgtgccagcattgatgcatttggtgtagtggctcaacgctttaaaaatgagatgatagttgacaagatacgtgttcaaatgggtgcttttcttgaagatggatcccatgaagctactattgctgtcattcgtgcattggtggttgcagtaccacatacaacagaacgacttagagattatcttttatccaagatttctcaacttacagccgtgcctactgctgcttctagtgatttgatgcttcggcaagaaagagccaatgcattttgtgaggcaatccgggctttggatgctacagatcttcctgcaaatagtgttcgggattacctcctgccagctatacagaacctattaaaagatttggatgcactggatccagcacacaaagaagcccttgaaatcatcatgaaggaaagatctggggcaagtgttggtggtggtgcaagcaagtcgatggcttctcatcttgggattgcatcatcagtgagcaacttctttggtgatggtggcttgcttggaaagaaagacagcacagaagcacagccacagccagagagagttgtataccccaacaaggctgctgctacatcacaaccacaaccagaggacactagattaaagcgcatcatgctgggacatttcagcgacatacttaggaccaagggaaaatcccaagacgaataagatgcatttttgccttgtcataacatccaattttttttatttctcaaataggaagattttttttttctgttttggggaacaattcaatctttttatagtgatttttttgtgataagagttgaaaatgagaataatttagtagattggaaagctatggtgagagtggattgctcggaaagaaagaaaccacagagccaccatcagacgcaactgggtctcccaaagctgctgcac

SEQ ID NO: 88800 - DNA, 293 bp, Glycine max
  Clone ID: PAT_MRT3847_51194C.1
tggcagaacctgaggaagaggaaccgcagaaggcactagtggttgctgaaaaacagcgccaatgctagaaactttgttcatccggccatttctttacacagagcacgaataagtgtatcttgcgccctcagattgggtcatttctttgcagttagattaacaataaaaatgtgcttgaagtcagccaatgttcaatatttgcaatcaaaaggcttttatagtcataatagccagccagttgtctaaatatcttgcacctatagtctatagatggggcattccttgtagctagg

SEQ ID NO: 88801 - DNA, 1338 bp, Glycine max
  Clone ID: PAT_MRT3847_51195C.1
gaacattatttcttttcatataatccaataggcgacacctgtaaataggggtacccacaaaaaatatattttacaagattccaaagataaatccttaaattgctgcaccattccaattacaaaaggaggagctgagtttcaaattacatataagttacagactctccatgaaactcacatgaaagttttaatttaaagagaccccatcatataaaacctaacaagagagaagaacaagactttttgcttgcgtttttcttttctccttgatgtgtccccctttttttattattcttcaaaaaggataaaactaagaatataaaattcccaccttctctcaattatacatgacaccttaattaactcatgaacaacggtatatacatatagatataatacaataagattgaaattaagagtagctcctcagttccaaaaatctcctctgctgttagaactttggtgattctttaatcctctgctgctactcgtaatgtccatactgaaatacatgacaggcataacataacaagcactcaagcttattacataatccaaattagctgagtgcccttgagaaattttcatcatcatatctaataacccccttgtatgaaagcattcaagcgctccacctcttgtcggtgctcgcgcaccacagcacgaaccacatctccaatggacaccatgccaaccattcccttttcatctatgacagggatgtgtctgattcttttatcagtcatcagttgcatagcctgtagaactttggtatcaggggtgactgtgataagtttgttctcttcagtcataatatctccaaccttggtagacttggatgatcttccctgcacgatgatctttcttaagtaatctctttcagtaataatccctgcaattgccttattcgcatcagatttcacaacaaccaaagctccaacattgttttgggtcatcgatttaacagcatcataaacggtatcatctgtggtgcaccaaagccaggagccatcagcacccttgcctttatcattcaagatgtctgaaattgtggtgctctcaaaaccatgctcctcaatgcgagcaggtgtaacagattcaaaccgcgaagagacaattggctgtaacagggggttcaccatgcgcacccgttgtagaacagcatttctaatgacattcccgtgtgacaaaaatgattgaaatcctccttgcattttagctgtcagagagagtaaagtgaaggttgtgaaagagagagcgcgagagtgagagagagttagcggcgtagagatagaatatggctgagctgagccctaccctcgtaagacactgacaacc

SEQ ID NO: 88802 - DNA, 228 bp, Glycine max
  Clone ID: PAT_MRT3847_51196C.1
gaacagtgttatttttcttataatgcatacacgagctttgaatttagtgacagaattgaaaattttgtgttttcattgtcaaaatttgtgttctgtatttttttcttatgttggaaatggtttgcataatgattgcttagtttcctgtttcaaagtttttgattcataatgattgcttcctctctctctcatgaattgttatcctatttgtagttatgaatggataag

SEQ ID NO: 88803 - DNA, 3012 bp, Glycine max
  Clone ID: PAT_MRT3847_51197C.1
ggggggtgaccaaacttcatcttaacacagcctcctgtgaaggtcttcaaaggatttttcaaaacaaattcaaactgcatccagttgttattattaacatgctgctactccatcgggttaatgcccataaaactgaaattacaggaaagcaaacaagaaggctctgtggccataacatatttacaagcactcaagcttattacataattcaaattagcttgagtgcccttgagaatttttcatcatcattatctaataaccaccttgtatgaaagcattcaagcgctcgacctcttgtcggtgctcgcgcaccacagcacgaaccacatctccaatggacaccatgccaatcatccctttttcatcaatcacggggatgtgcctgattctattgtcagtcatcagttgcataggcctgcagaactttggtatcaggggtgactgtgataagtttgttctcttcagtcataatatctccaaccttagtagacttggatgatcttccctgcacgatgatctttcttaagtaatctctttcagtaataattcctgcaattgccttattcgcgtcagatttcacaacaaccaaagctccaacattgttttgggtcattgatttaacagcatcgtaaacagtatcatctgtggtgcaccaaagccaggagccatcagcacccttgcctttatcattcaagatgtctgaaattgtggtgctctcaaaaccatgctcctcaatgcgagcaggcgtaacagattcaaaccgcgaagaggcaattgtctgtagcagggggttcaccatgcgcacgcgttgtagaacagcatttctaatgacattcccatgtgacaaaaatgatctcattcctccttgcattttagctgtcagagagagagagtaaagtgaagggtgtgaaagagagagagacagcgagtgcctgagaaagagggagaagggggtgcaaaggaaaaggacccaaaaccctctttcccattacaacaaaattgctcatcttgaatcacagggtttaaagccttgctaggtggagatccacagaaaaatgggggtgatgaagccacttgccccccagatctcttggggagaataatgtccataagctcagccccaactcctgaatcttcaatttctgattggtagttgataaagggtggcctcaagggtctgatgtggttatcaaaggttgagtggttcaacaggcccaatcttcgaggtttagggcacaccacagattccatcctcatctcctcacagcttgtcaaggccttcttctgctgataaccacactgattcatcttttttctctttcccttcacacctcaaaaacaaaaggatctcttcacaaggaacacctgagcagactcagaggctcctctgagaggaaaagaggacagaaaaaaattgggtgaatgaatcagaggagagaagaaatcaagagaaaagaggtaaaaaaatttaccaacatcttttgtaaggtgaagtataggatcaagcctattagagtcccagagctaattatagacgctccagacactaaaacaattgggtcattgaagaggacagtaatgaatgcagtgactgctatgcttggagatgaattgcacattggtgtttttctcaagggaaaacaagttaaggatgacagtaaaactctacttcaaactggaatttctcatcataacgaggtggatgctttgggtttcacccttgaacctaattcttcacaaagcctaccgattgtatgtgcaaccgttgggtccttgaagaggacagtgatggaggcagtgactgctgtacttggaggcggattgcgtgtgggtgtgattctccatggaaagaaggttagagatgacagtaaaactctacttcagactggaatttctcatgataaccacctggatgctttgggcttcgccttggagcctaattgttcacgaaaccgaccatctgcatgtgctacaacagattctctctacattcctggtgcagatatgcctcagcctttaatagggtacccttcaagtcgtgctgtaattcatcagaggattcagggcttttctaacatgttagctgagcatcaagcaaccagtttaggtaaccttgttgaaagtgatcatgattcagcaccttctccaatcaacacatcaggtgaaaaaaatttgacagattcaaaagaacttattactgttcctgaaatgggtatggaggcactagctgtactacctgtgcatcagaagtcaaagcgaactgagatcgcaccacgccgaattcgtaggcccttttctgttgctgaagtggaagcattggttcaagcagttgagaaacttggaactggaaggtggcgtgatgttaaacttcatgcttttgataatgcaaagcatcggacatacgtcgatttgaaggataaatggaaaacactggtgcacacagcaagaatatcacctcagcaaaggaggggagagcctgttccccaagaacttttggacagggtcctaactgcccacgcatattggtcccagcagcagactaagcaacagctcaagcaccactctacaaaaccttgccttctcctttaataaggacttgacaccaccacgtgcctttgttaaaagtgtcatttatcattttttcttcttcctgtatttatgacaaagtgtgtttatcactttgatttttagtacaatgtcacactttatctatcatgtaaaattagaacaaggtgatgcctatagagaatttgcgtcataggttttcactccaaagtcaaggttcggtgtgtaactggagtggaggggcacgtggatgcacgtgttgatgatagaagtttatctgcaaattgaattatggacccacagcagctaataatgttagtgtagctagagcttatccatgaataaaaaagagctaatattagtctaaatgataatattaaatgaataatagtaatacacatattggcatacttaaagtagttgagataagaaattttactttcttta

SEQ ID NO: 88804 - DNA, 923 bp, Glycine max
  unsure (1)..(923): unsure at all n locations
  Clone ID: PAT_MRT3847_51198C.1
cccacgcgtccgcccacgcgtccgcatccttctttttcgttactgcaccgatcgcctctctctccggcgtaatttaccctaaaagaaaaggaaaaaaaaattattacgaacccaaaaagttttcagtttctacaatatctttctccgaacagaaattccttattaaatacttagttagggtttaacacttctgatacttaatctacgtcaagttgtgcttcaacctattaccgcattcaatttaccagaaaaaaaaaaaaaagaaatggctcaagttcttgagaaccccaccattgacgcggcggcttccggcgcgaacccctcgctgacgaccatctcgttgtacgtcggggatcttcaccacgacgtcaacgatccgcagctgtatgatctcttcaaccaggttgcccaagtcgtttccgttcgaatttgcagggacgtggccacccaacaatcccttggttacggctacgtcaatttcagcaacgctcacgatgccgcaaaagcaattgatgtgctgaatttcactccactgaacggcaaaatcattaggataatgtactctattcgggaccctagtgctcggaagagtggtgcagctaatgttttcataaagaatttggacaaggcgattgatcacaaggctttgtacgatacattttcggcttttgggaatattctatcttgcaaggttgcgacagatgcttctggccagtctaaaggccatggttttgtgcagtttgagagtgaagaatctgcacaaaatgcaattgacaagttaaacggcatgctgatcaatgataagcaggtctttgtgggtcctttcctgcggaagcaggatagagnagagtgctctcagtggcccaaagtttaattacgttttcgtgaaaaacctgttggattcaatgactgaggctgacttg

SEQ ID NO: 88805 - DNA, 478 bp, Glycine max
  Clone ID: PAT_MRT3847_51199C.1
ttttttgttcctttggtaatattgtatttaatatcaacttttaatcacatctatgtacaactgagggacaaaaattgaacttctgttcgacacttagatttgttctcttagatttgttctctaactagtggctgaagatgttaagtagggaaactcttgttctaatgagtttccttgaaaggtgttcaacacctacttctagatcctcaatgcatgtctccaaattttccatatggcattgaaaattttcaatagataagggcttgtgactgatgagagattgcaaagtcgtatccacctttgcaaattcatttgtttctgattcttgagagtcgcaagtcattctatcagactgcatcagcttacagattattgaccatcttctctgctttgattgtcccttggtgtcagagacaaacgtcaacaaagattctaacaacctcatggggactgcttctgcttcttttaagatgccaag

SEQ ID NO: 88806 - DNA, 441 bp, Glycine max
  unsure (1)..(441): unsure at all n locations
  Clone ID: PAT_MRT3847_5119C.1
atttttaccaaccataacaacagccttatcctactagataaaatccacnacattacttatacatcacccacctcaattgaaaactaactcttcagaaacattattcataaaataagaatgcttgatcgtctattataatatggaaaaagaaaaagggcatcgaaagacccggttaacgcataatctccaatggctaccaattaacccacataacgctgagcatccacaggatttattttcattgacaactgactaaccctctcctaattatgcctgagggtgaactagataacgctcggctatatatgtgcgagtgttttcactaccaccgaagccttgtccagattttgctgctcactcttcaacccacttttttacctcagtttgaaaaaaactttgaacatacttattgtcccacagattcttgaaattgttgttcat

SEQ ID NO: 88807 - DNA, 935 bp, Glycine max
  Clone ID: PAT_MRT3847_511C.1
aaaacatcctaaccgcagttagatctcacataccaatcgcaaaagccattgcaggacatgcaataacccgctgcacagaggtggtgacgaaacataaacacggaactcgctcattgcttccctggcacagacgtgagaatattgactcatcgtcaagctcaaaatcagataacataggtgaagcttatggatcatctgagacaaattttgaatctctcttgactgaagagcacttaatcatggagtctatgtcagatgatgacgaatataattattctagtgaaggatctgacggtgatgactccgatggcgacaaagacgatttgtcgaatcaagtggggaagcttaaactgggaaaagaagtagccacaaacaaaaacatagctgaagaagagagtgattgtccaatcacaacgtcaagtagacgtcgtctttatcctcctggaaggatcatgcatattattcctattgcacattcgtctgaaaatcctaattcaaaccacaatggttgtgatgagaaacatgtctacctatatgaaacgcctagagatctgtatggaaagctcagactttctagagggatgatacttgatcatatgacgaaccagtatctgaagatgttacaacaattaatcaatcaactagagaaagacagcttcaaatatcgtggtggatgagccaaggaatagcagatgaaaaaataattggtactaattggatcatggagctagccctaaagaattaaaattggacctcttggttctgatttttgagattgttgtgtgtatattaggattgtaattgttgaatggatcacataggtttttaggagtgtcttcagaatttaggatgatgttaattgtgctaagcataaggggtgtatttgttgcttctgggctctctattaaaataaaatttttaaaggaatttatgac

SEQ ID NO: 88808 - DNA, 101 bp, Glycine max
  Clone ID: PAT_MRT3847_51200C.1
aaatttgcaaatgctttcaaatatagtctgccatttcactattgaatacggaatgaaaccctttcaatgctaaaagacgtaaaacttgacaagaaatctct

SEQ ID NO: 88809 - DNA, 778 bp, Glycine max
  Clone ID: PAT_MRT3847_51201C.1
tcgcaaaatgcattgttaaaagttagcgagttcctgataaccccaaaactagatttcgtatctttattattttctaaaataaaaaaatctgcggaattaaattgaggattcacatacccttcagtagaacccagtgcggtgccaccattcttcttttctccgttactgcaccgaccgctactctctccggcggactttattcaaaaagaaaagaaaaaaacgatataaattaaaaaagtttcaagtttttataatatccaaacagaaattccttattagttagggtctaacgtttgggatacttaatcctacgttagttgtgcttcaacctattaccgcattcaattttccagaaaaataaaaaaaaaagaaagatagaaatggcgcatattcctcagacccccaccaatgacgcggcggcttctggtgcaaatccgtcgatgacgaccatctcgttgtacgtcggggatcttgaccacgacgtcaacgatccgcagctctatgatctcttcaaccaggttgcccaagtcgtttccgttcgaatttgcagggacgtggccacccaacaatcccttggttacggctacgtcaatttcagcaacgctcgagatgccgcaaaagcaatggatgtgctgaatttcactccgctaaatggcaaaaccattagaataatgtactctattcgggaccctagtgctcggaagagtggtgcagctaatgttttcataaagaatttggacaagggcatcgatcacaaggctttgtttgatacattttc

SEQ ID NO: 88810 - DNA, 303 bp, Glycine max
  unsure (1)..(303): unsure at all n locations
  Clone ID: PAT_MRT3847_51202C.1
cattcccccccctctacaaagcaggggagggaagctgctcgggggtggggctgaaaaacacaacctcctaaacaaggccagccattccaccaccgaggagaggcccggcccatcaaatccagggggtgggccaggtccagctcacgacagcaagcccaaatggcacagcggggggcatggccggtcaagagaaggccccacccaacaaaatggtagcgccgaaaatgaaaccaaaggggaggggagcaataattcccaaattacccttgtgttgtcttatcccanccacccgacgccgtgacc

SEQ ID NO: 88811 - DNA, 169 bp, Glycine max
  Clone ID: PAT_MRT3847_51203C.1
tactactcacagtctggttaaaaattggattaaatcggaggggtttacaatatatctgcagatactaatgaactatggaattgaggctactgttctcacatatcttatattctataaatcgatcgatgaaatcctgaacgcctcgattgatatcgaattttttacatct

SEQ ID NO: 88812 - DNA, 371 bp, Glycine max
  unsure (1)..(371): unsure at all n locations
  Clone ID: PAT_MRT3847_51204C.1
gccaaatcgaccaatcccaataccaatatgctttgtggtggcaggctataggccattgacttggctttataagccacaaggttgaatctttgtcacagagtcattattctactaaaggtatactagaaccacttctttgcacctgtctattattacattatatcaatatatgactactggggcaataaaaacattcccttctgagtgttagaatataactatagtactgtttcttgtttacgtaccattcaaagcaacgactttgaatttgttgtcaggcaagcaatatgcggaacaatgnanncgttaannaaatatttcgttgnnntaatttgggncgggggggctttccttcaaaaaaaaaaaaaaaa

SEQ ID NO: 88813 - DNA, 655 bp, Glycine max
  Clone ID: PAT_MRT3847_51205C.1
gagtccttgcggttaatgtattactcaacatgtccatttctactcatacttgcactccaatactatgtttctttcaaactcatgaatcgtcactgttagaccagtcagctgaatcctcttatgatcaagagctgtaatgcatatcagttttgttatcagtttgaaccgtattttctttgaattaccgtaacagcccttcatcataggaggaatcaactggctggtctaacaatcactctatgcagttttatgttaagattagatttattcgtccaaaaatgaaatctgtttgttccttcctcaaaaaaccttattttccatcctttttttatgttctggtgatgttttcttccacaaataagagcaaattcttaatgaaattaatgttgcagacttgcagttatagttactttttttaaaaaaagcattcatttatgggaattttgatctttagcagttggatctatgttagctaattttccttgaaaaatttattgcttggtgatcttatttttgctgttccacctatgtgcagtattacaatttttttctttctattcatttatagctgatttcagggattcagtaagtaccttggagaaggagttatgctgtcttaaagggaagcgggatgagatcgttagtaaaagggatg

SEQ ID NO: 88814 - DNA, 386 bp, Glycine max
  Clone ID: PAT_MRT3847_51206C.1
gtgggggggggggaaaatgggttttttatttgaaaatttttggggttggaattttttacctcaggcccctaaatttaaccgttccccaagggggggttttgttaaccgttttcgataccccatccaggggctggggggggttttccggcctaaaaaaaaggaaaaaaaaatcccaaagcgggaaaacggttaagggataaaaaaagtcccctttccctcaattgaacaaaaaaaccatcccctgtgggggatccactccccccaatcccatgaaaaaaaacccccccgggggcggttgtttctttcccctttaaaaaaaaaaaggaacccgggatttggccaccttattttgggccttcctttttgcaaaaggttgaggccccccc

SEQ ID NO: 88815 - DNA, 1025 bp, Glycine max
  Clone ID: PAT_MRT3847_51207C.1
ctcttaaaaggcaaaaccttattattagtaattaaaggcaatataaagaaattttcattttccacagatgcgtttccagaagaagaaaaaaagacaccagaatcccccctatgacaaagctgtgaaagttaccaacggagatattgcaatcaaaatatacatatatttcccctatgcgtgttacatgaaaagataacaaaaaaaaaagttacaatatagcacagataaataaaatcctaatctgaggttgccaaaaaaatattagctttccccggtcgctgcagggggtggtgaagaggccttatcatcctcgtcattaggagtatttgattttatatacgaccgagcaacatctaacatcacatcaacttctttcttgtactcattgactgcccctgactttattttggattgcataacacaccatttcttgaaatgtgcacccacttttatgtccagagtacatgaggtttcattaattgtctccaagctccatttacagtgtacctcaaagtaggatccaaatggaacatcatgtgcctgttgcacagtctcaaacaccaggtttgtcttgtctggtgatagaacatgatgttgccactctgtcatggctgtgtctggagggcacatagggctgttacaaagggatctgaaggttatctctcggacttgtccatcatattcatctgctgtatgccactgacccatcaaaagattagtgtcctttcgtactgaacgatatttgctagtaaaatttgaaccatcattcaataacaagttaaaaaactgctcagctgtgcagggaaaaacttcattgtatatgccaactaaagcctcttctttgacaaaaggttgaagttttccagtttttggcatgctttcttcaggagccttatctagtatcttatttcctctgacagaactactatgtgcacgcagctctgactctgcattttccttcttctcagcttccaacatttcatggaaattctttgctgcaccggacgcgtggacggacgcgtggg

SEQ ID NO: 88816 - DNA, 276 bp, Glycine max
  Clone ID: PAT_MRT3847_51208C.1
gtcaaaggaatatcataatatgtctcttatgctccaatacagaatttggtgcttgatcaagcctccatacatgggtttcttgggttcaattcaagggcgcggcggttcatattaaaggtggcgccacatttgtgcactgtgtttgcgatttctaaagacacaatctcttcagttcggagtgctgctccaacagtcccacatgccttcccattgctgaagcatcatacagagtctacatgacgcgaatgctcatgagtctgagatatcttttaaatc

SEQ ID NO: 88817 - DNA, 258 bp, Glycine max
  Clone ID: PAT_MRT3847_51209C.1
tcacttcaccaattctaaacacaccccaattaacatctatgactataaacttccccttggaagctaccatatctgggtccaatgtcatgattgtaatatttattctggccacaccagcaccacacatcctggacattccaaattcaacccatatactggtcattgttgacttctccatagtcatattttattctaacaacacatctgtgttcgaaacatgtatccatcatttattgagaaactcgctcatacatatac

SEQ ID NO: 88818 - DNA, 799 bp, Glycine max
  Clone ID: PAT_MRT3847_5120C.1
cgctttgttgttgttgctctgtgccaatgtctttgtagcatgcggggtggcattggaggtggaattggaaaaggtggaggttttggcggtggtgtcggtggtggatttggtggtggcgccggtggaggcggtggcggaggcggaggcggtggaggaggaggtgctggtggcgggtttggcggaggagcaggaggcgggtttggtgcaggaggtggatttggcggtggtggaattggacaccactagagcgttgcgaacgttgcatgcatgacaaagttatattttaacgtcctttgtattagccatgataattggtttattgaaaaatattgtgcttgtaagacagaaagaattaattattaatgttggcttaataatattaatgtactccgtttcttgtaataattaacgttgaatgaaagaaccagagatatatgtactctttttgtattcaatgagaagaagaaatggcaggaaaatcactttcaacctcaaaaaaataaaataaaaaaaaaaaaaaaaaaaaaaaaaaaaaaaaaaaaaaaaaaaaaaaaaaaaaaaaaaaaaaaaaaaaaaaaaaaaaaaaaaaaaaaaaaaaaaaaaaaaaaaaaaaaaaaaaaaaagggggttttatattttgaatattttttttttttggccaaattaaattaaattgccgggcgttttataaccacgggcggggaaaaaatccggggcccaacctaattatttgggagaaaaacccctttttttaagttgggtaaataaaaaataaaagggcccgaacggcctttcttaa

SEQ ID NO: 88819 - DNA, 176 bp, Glycine max
  Clone ID: PAT_MRT3847_51210C.1
ccacaagcccaaagtgaacgcgcagaaaccagagacagtgaagaaactcgtggttgaagaacccacgcgcgcagatgacgatttaaacgagagggggggcacccaatacacgaagccagagccacagccacacggtatccgccaccaaacattaaccgtactcaccacaaaaaaca

SEQ ID NO: 88820 - DNA, 2168 bp, Glycine max
  Clone ID: PAT_MRT3847_51211C.1
ggggcaaataagccataggcaggttttgaaactcaccaaacaccaataattaaattcgcccaggtgaacagagaggcatgtaaaatgtactgtgaatacacatccgaactcaaatgttataacttcaaacaaaataactgaaatttgaagagaaaaaagaataatgagcaaatacgcaaaatactcacaactcactcacaatcctctatttatagtaagcaatacacctttcagaaactgaaaaatacgatgccactaaggataaaccactttatgtcttacgcaaatataatgagcctgtcgagaatatcaactgttttttactggcaaaatacacgctagagaatcaaaaacaaaactcagccaaactaggggcacgtgacagtaatataactaatgaattcatcactacacaacgttaacaggttgcatgggggccatcctttgagttttgcacctgttacactgtagtcttgaagcataattatgattgttgcaatttgagcacatccaatctccactacgccattgctttgctccttttccaatgagagcaggtgtagaaacttgaggtggaagcaatgtggccaatggcaaacttggagctgtacgttgttacgcatatataatgagcctgatgagaatatcaactatgttttgctggcaaaatacacgctagaaaatcaaaacaaaactcagccaaactagggcacatgacgtcaatttaactaatgaattcatcattacacaacattaacaggttgcattggagccattctttgaattttagacctgaaagaatgtaatattgaagcataattatgattgatgcaatttgagcacatccaatctccacttcgacactgccttgctcctttaccatggagggcaggtgcagaagcttgaggtggaagccatgtggccaatggcaaacttggagctgtattgagttcatgctgggataagaggggaagagtccaggttttggatctgcacctgtccctaccactagatcacaccttgtataaatttgatgctgatcaattgtagttcctatattctatctcttgttgtcccaatcataaaacaaatcttttgtagctagcggctttgtcccaagtgcaggaggaaaagcattgcactttttacactgagtggggaatgagtcagtggtgatggcaatggtagagatccagtccccattgtgtcgtcgtctgttgtcagagaagttctgtttgggtggatcctggtggtgagacaactgcagtagcactcgcctacccgcggggccccttgggaaacagcgggggttttggtgccacggaggaggcggggttgcttgcaacggttgcaacttgacttgaaggcgtagttcctgttgttgcaactgctgcactcccaatccccttctctccctccttctcctcccatttcacctcctttgtacaaaagccatgcgcatctatctagtccttggtgacagactaaaaattcacagtttttgttacatgtactgaactaatgattaaaaacaaataaaatttaaataagcctaaatagtatctatccactttgcaaaagaatgcttagtgagtgttccatatatgagccaaaaggaaacaacaacactaggccatatcatacgggaacagaagactaaactaaaggctaacaatttcctaattccatttaattcctacatctttcatccataccaacttaacactaaataaatatataaaacaggttcctaaacaagggcctctttggaacttgaaaaaccacgctacccattacacaaaacaggacccaaagcccaattcataaataaaaaaatgaaaaagaaaagattttgattgaatgattagttggaagaagaagtggtggttgggggggcaaaactaaccggtgcagatccaatcgccctcgagccacttggaatcagagggggttttggtgtcgacgaggaggcggggttgcttgcatcggttgcagaatgatctgaaggcgtagttcctgttgttgcaactgctgcactcccaatccccttctctccctccttctcctcccatttcacctccttttgttgttcctttcagcatgctcacaggagagggattttgattttgggttcgcaggaacaaaatatatatcccagtttactcgtc

SEQ ID NO: 88821 - DNA, 124 bp, Glycine max
  Clone ID: PAT_MRT3847_51212C.1
ggctttgtgcgtttcattgaacacacctgtttcaattccagtgtttatttgctatcattggtttggcgtatctaagggcttgtgttggattagctcctgcgaacgacatgatcctggagtacaa

SEQ ID NO: 88822 - DNA, 378 bp, Glycine max
  Clone ID: PAT_MRT3847_51213C.1
aaacaatgataaggacctttttcggttttataagaagacagggttcttaaagaaacacgtgaactttagaccttaagaaaccgcaatgtttttcattggaaaatgccccaatttatgacatgaaacatgacgtcctttgtctaccactcaaaacaagcaatgagcaggcacaattttctgttaccctaaactatggcagaggctgctgagggcattatgaactacgggactttccatatggacgaggcttcaaaattgggcacctaaacatggggtcgaacttggggttgggggcacaacacgcctttgaaagaggttttgtgctcaattatgaccacccaggacggatgcctctccccttagaattgatttatacgc

SEQ ID NO: 88823 - DNA, 175 bp, Glycine max
  Clone ID: PAT_MRT3847_51214C.1
gctcaaaactccgcctttggatgatgctaggatgttggagacccggtatcttccccattgtagaggatttgcaaagcgactaaggttttaatttctccccactcagttgttctagagtttcagagcatgcccaagttgctgagggctaatatttatgaaaattacgggtttgaga

SEQ ID NO: 88824 - DNA, 283 bp, Glycine max
  Clone ID: PAT_MRT3847_51215C.1
gaaaataggaatccgattgtaaatggatcaaatgatagcagtaagttctgtgggtcacatgatcatacaaacaactgctacattcataatccagattttgcatccatagtcattaggaggaaagagcccaagctctacagaaatggttgcactcagagaatacatgcatttgaaaggagcctttttgatggaaatatgtctgtttcaggaaacttagataatgtacagaatgaaaatttagtcagtgtacatgaagaaggtaaaacaatgactgtatcaacta

SEQ ID NO: 88825 - DNA, 377 bp, Glycine max
  Clone ID: PAT_MRT3847_51216C.1
ggggaaccagggggcctttttttggatcacccttttttgtttttaaattcaaaaatttcagggggggggtgaaagaattttaaagaagcccctttggggtttcaaaaaaaggttttttttttccccaactgggccccccaaaggataaatggtatttggcaaaccaaacttccaagggggaccccacctggaaatgggccaatttgggttccttttggagaccgacccccaccaattggtttaaaccccaggcaacccggttgggatttactttttgggcccttttagggtggggacttattactttccaacggaactggaaaaaagccctttggcgggtttttttggatttttttgaaaaaggaaattttttttca

SEQ ID NO: 88826 - DNA, 177 bp, Glycine max
  Clone ID: PAT_MRT3847_51217C.1
atggctgcggaaatgaagaaaatgaaaagtgagaagctgtggaagaagaggaatggggaagaagaagtggaagaaggtagtggcgctggggtgcacctagcaacacccagacttaaaccttgggcagaaagcttgagcccacattataatgggtccaacccaactatagtctattga

SEQ ID NO: 88827 - DNA, 248 bp, Glycine max
  unsure (1)..(248): unsure at all n locations
  Clone ID: PAT_MRT3847_51218C.1
cccacgcgtccggggccgcgtgggttaatcttaacaagggcctttaagtttcaattctatgtaagggacatttttttcatacaccaaaagtaaaagttatgctttattctctaaaaaaaaaaaaaaaaaaaaaaaaaaaaaaaaaaaaaaaaaaaaaaaaaaaaaaaaaaggaaaaaaaaaaaaaaaaaaaaannnngggggggcccgttttaaaagaatccagggtgccgccgtctggcaggcaaaa

SEQ ID NO: 88828 - DNA, 384 bp, Glycine max
  Clone ID: PAT_MRT3847_51219C.1
actttctaatacatagagataattacttaacttgtccggctctagagagactcggcttcgtcttgttctagctttatgatcactttcgaccgaattaggtccttttggtggatactactagtgccaatgccaatcgcaacacttcacacaagcttctactacaggtcttgcccacaactctttgacactgagaaacggacagcgcaatcggccatatcaaaggagacccgcatggcggcgtccctgctacgggggttctcccacgagtgcttcgtcaatgaatgtgacgactaacagcaactagaggaaaccacaaggttcacaggagaataaagagccagaccgaacaaggactcatgtccttgcccactgcactttctttac

SEQ ID NO: 88829 - DNA, 247 bp, Glycine max
  Clone ID: PAT_MRT3847_5121C.1
ggctcgaggttctagatcgcgagcggccgcccttttttttttttttttttttttttttttttttttttttttttttttttttttttttttttaagaaatttaactattggttttaaagttaaaaccgggtcataattggaacatacatttaacaggacttgggaacagcatcattttttaggtgccataaaatgtaaaagggaaagatgaactaattatacatttgggttcataagggacaacctgg

SEQ ID NO: 88830 - DNA, 286 bp, Glycine max
  Clone ID: PAT_MRT3847_51220C.1
aaaaaacaattttgataaaaatttcaacaaaaggggcccaggggggttaaaaagggacaattgggtccttttgattttacaggggggaaatttggtcccacaacatcccaattttttagttttggttttttgatcaacagcccatttttcacaaaacttaattgtaagggggggagaaacgtcctttttgccctaaactgggatggcccgaaaaacagccccggggggctttttcattttttttgcagcctgtttttggttgcccttttgggcacttgctttgttt

SEQ ID NO: 88831 - DNA, 585 bp, Glycine max
  Clone ID: PAT_MRT3847_51221C.1
tccacgcgtttttaataattgagatatgattggagaattttgaatgtattcatttattgaacgttctatcggacgattcatggaaatcaacacatggggtgtgaagatacaatttgataatgtacatgatgtggagacaatcacatcaaaaatacatttatcgatgaaactctttttatccttttaaattccaaaattacaaattgatgtgttggtgacttggtgtgttgtgttaactgttgagtaaccatgtcaatcaagtgacatttgaaatttgaatctgaaatgtgtcaattttttaaaaattttgcaatgattattcagtttggacaaagattcagtagtgcatcagctagttttttctaaaacaattatttttcacaaacagttatgtgtttcttacagatgaacttgttttatgaaatgtctagctaaaaacaaaaaagagggagaagatatttctatagaagggtacccttgatgctcaaacttcaaaggattgtaaagttagtgttttttaagttgtattatctctttagtactcttcaacttgccatgcttttatgtttgtgatccataatgatg

SEQ ID NO: 88832 - DNA, 492 bp, Glycine max
  unsure (1)..(492): unsure at all n locations
  Clone ID: PAT_MRT3847_51222C.1
gtgatacacggatgaattggtgtgattgcatataactgacatgaaccacacgattcagccatttgtttcttttctttttgctttgctttcactaattatcatcaaataatatgaaaagacataagcctaaattgtcaaacgaaaagaaactgatagagcactaatgaacacatctgcaccctatttgattattctacagctctctttattcttctaaaatagattcactttcacatagtcattcattctatgcacttaatttggttgttttactgctctgttttcattcttctgaaattgtggtttcacacactcatccattatattcttatgtgttgtgagactaacagataaatgcatgtntataaagngnnaaccccnncttatgccattgaatgggaatccaacatactttctctttcatgttttgtttaatggatggaacatgtgcaatgggtgcttcagtggataagcaaaaacacactaagtagt

SEQ ID NO: 88833 - DNA, 723 bp, Glycine max
  Clone ID: PAT_MRT3847_51223C.1
agaggccccatcccctgccggtctacacggagatcttggctgctaacttcccacagactctccaggacgggggcctctctcatttggcatatctttctttttaatctactgttttcactttgtgaaattagcctttgggtgtttcgagaatggctttatgaactaaagccatctgctaatattgtgtttcttgtcttttcctccaacgtttttacgagccgtcgaagatggggtacttctcatccagtgtggttttgcttgtggccatttccagtgcgtttgaatttggacccgttgctgggagagaccttgccatcagagataacagcatttgggaccagaaagaacctgccgtacgcgatcggtctttccagttcgtgccttccgtggggatacagaacagtaagtcgcttaataaaacttgctgtctgaatggagggacttgcatcctggggtccttctgtgcctgccctccttccttctatggacgcaactgtgaacatgatgttcgcaaagagcactgtgggtctatcctccatggcacctggctgcccaagaagtgttccctgtgcagatgctggcacggccagctccactgtcttcctcagacctttctacctggctgtgatggtcacgtgatggaccaggacctcaaagcatcccaggactccgtgtcaaacgccgtctgtgacgaccacttttatgctagctggcgcctgcctt

SEQ ID NO: 88834 - DNA, 228 bp, Glycine max
  Clone ID: PAT_MRT3847_51224C.1
ggcacaaggcatttggttgatcaatatacgtagaaccagagcgaggaagatcaacgccctgcaatactgccatccacaaaattcgcgggcagaaccatgctatggatcgcacatgatcccgcgacgggtttggactagctacagtacgcgtaggcctttcatcaaatacgccggtatgttgagtgatctagcatcatacaggatcataggttttctgcaccagtcttc

SEQ ID NO: 88835 - DNA, 515 bp, Glycine max
  Clone ID: PAT_MRT3847_51225C.1
caaagaattccctggatatttgagagatccaggcccaatactaactctccaattgactaaccactattccttagccaccttcctatttataggcagcatgccttatttctctaattattccggctctcagtttaccaactctaataatttccccaactaacttaattaactatagggattacctttcagaagcattttcagaacacaaaaatccaaaggtaaagcagttcaggggttttctaatttggagcatgtcagcaattagctataaagctcaaacataattgctaaataactgactgccatcttatgggatgtggtgatatcttactaactttcaaagaattctttgggttgtttcctataacacttctctttattttttcttttttagttttttctgtgtttcattgtgaatgtgattgcaacctattattgccactacaattgacaaatacggcatagttagtgccatttatgcacattagagtggaatatacctgaggggatagctg

SEQ ID NO: 88836 - DNA, 222 bp, Glycine max
  Clone ID: PAT_MRT3847_51226C.1
ctcggggacctgtgcaccgactcccctgacttacgctgctggaacccatcactggataacgttttcgctatacatattcctctgcttactctaacctgtcacaaacagacgctccacttcatcaatcattactacttcgcatacgtgccttaactttgctcatctctccaatgtcctccaccagtagcttcatcaacacagctttatcatgcaacccattcc

SEQ ID NO: 88837 - DNA, 1070 bp, Glycine max
  unsure (1)..(1070): unsure at all n locations
  Clone ID: PAT_MRT3847_51227C.1
cttgtctttctctctctcccgaantaaggcagagaagagaaggagagaggcttgtacctggagagaaaagaggagacaataatacatggggaagcagggtctaaacacggtggagcaacaatctgtggcaccgacagcatccaagtttccgttgagcttttgggaagccacggtggcttcaacggtggcgctggtttttgcggtgggtcttctcggcgtgtacctcactatgcccgattccgattacagcttccttaaactccctcgtaccctcgaagaccttcaactcctacgggactgtgttcatgtcattgcttgctggagcactctttggagtctttaaaggtgtggctctggttgtgttcactgccacagcaggagcttcttcatgctatttcctgtctaaacttattggacgacctattctctcctctctgtggcctgaaaagttgaaattcttccaaacccaggtggctaaaagaagaaagggtttgttgaactacatgctttttctaagactgactccgaccctacccaacacatttattaattttgcttcaccaattgtggatgtgccttatcatattttcttcttggcaactgttattggactaatacctgctgcttatgtcactgtcaaggctgggttggctcttggagagttacaatctgtgggtgatctttatgatttcaactcaattgctacattgttcctcattggtgtagtttcagtcacacccaccactaataagcaagaacgaattatagaatttcagaagccaagaacctttgtgaatgaagcccatattctcctgacagctcagtatttgtacagatctccaaaacaaaaaaaggaagaagaaaaaaagaattgcattgtgattctctgctaatagatttattgcaaaatgctgcagtagttcaagacaagcatatgattggtcggatctgtgccagtggcaagaaacgacgtttggctgaattagttatgtacattgttcatgagttgatttgtgtaaaacatttacttattgaatgatggtagttgctttgccatgttttttccatgc

SEQ ID NO: 88838 - DNA, 1427 bp, Glycine max
  Clone ID: PAT_MRT3847_51228C.1
attgggctcgagctcgagccgaatcggctcgagcggctcgagacggctgctatattactacagaagcgtgcgtacgctggctcgagacaccaaaacttgtctcactctctcctgaaggaaaaactcttgtctctctctctcctgaaggtaaggcagagaagagaaggagagaaggaaagaggcttgtccctggagaaaagaggaggcaaatacatggggaacgagggtgtaaacacggtggtggtggagcaacaacctgtggcatccacgtccaagtttccgttgagcttttgggaaaccacggtggcttcaacggtggcgctggtttttgcggtgggtcttctcggcgtctacctcaccatgcccgattccgattacagcttcctcaaactccctcgtaccctccaagaccttcaactcctacgggataaccttgagagctatacaagtgactacactgcacaagtcttggtggggtactgcgtggtatatattttcatgcagactttcatgattccagggactgtgttcatgtcattgcttgctggagcactctttggagtctttaaaggtgtggctctggttgttttcactgccactgcaggagcttcttcatgctatttcctgtctaaacttattggacgacctattctgtcctctctctggcctgaaaagttgaaattcttccaaacccaggtagctaaaagaagaaagggtttgttgaactacatgctttttctaagactgactccgaccctgcccaacacatttattaattttgcttctccaattgtggatgtgccttatcatattttcttcttggcaactgttattgggctgatacctgctgcctatgtcacagtcaaggctgggttggctcttggagagttacaatccgtgggtgatctctatgatttcaactcaattgctactttgtttctcattggtgtagtttcagtcacacccacactaatgagcaagaacgaatcatagcatttcagaagccaagaatctttgtgaatgaaggaagcccttgttctcctgacaactaatatcagctcagtatttgtacagatctccaaaacaaaaaaagaaaaaggaaagaaaaagaacaattgcattgttgattctttgctattagatttattgcaaaatgctgcagtagttcaagacaagcatatgattggtcggatctctgccagtggcaagtaacgacgtttggctgaattagttatgtacattgttcatgagttgatttgtgtaaaacatttacttattgaatggtagttgctttgccatgttttttacatgcccaaaagatgttttccctgatctctcctatcatttggtaactttggttacacagtttcttatccacttactgtgtttccttttataaaaaaaaaaaattaattatcttataatag

SEQ ID NO: 88839 - DNA, 262 bp, Glycine max
  Clone ID: PAT_MRT3847_51229C.1
acgacccacgcgtactaataaattcatatcattttacacactttcctttctttttaaaagttctataccacgacgcgcttaattatccaaggtacatctccctacctttttaacttgtctcttcacacattttgttaattctttacaactaccattttcactcacgtataactgttctactgtctccaataaaaatttaaattcatctctctctcacaataataaattcacaacaatctcatcttacaacaaacatttcttc

SEQ ID NO: 88840 - DNA, 226 bp, Glycine max
  unsure (1)..(226): unsure at all n locations
  Clone ID: PAT_MRT3847_5122C.1
acccgtatgacaaggaagcatgctctgtccatgttgtagttgtgttggacactatccgtgttagacactttaaatatttctagttgcattttttaattttttttttgttactctttttttttttctcaactatactccaatacaaaatagaaatcacaaaaaataatatactatggcattttattatgccttaaatgattcatgatcacttttaaaacatcanana

SEQ ID NO: 88841 - DNA, 146 bp, Glycine max
  Clone ID: PAT_MRT3847_51230C.1
ggtctagagcgcgagcgtgcgctcttattattcttgtcttgagaggtaaccgccctcattggtcataggcctgagggtgaagtcaaggaacaaagtgtgtttctatttctcaattgcagagcggaagttgacaacgagacttttgc

SEQ ID NO: 88842 - DNA, 179 bp, Glycine max
  Clone ID: PAT_MRT3847_51231C.1
tttttatacacacatgaacctacccctatatatacatagaaaccaactacaggattcaacaactttcatatgacacattaccaaagatgcatatggattatgctaaatctataactacgaccatttgtactgtttaagaatgaagctctctaacgtaggctacgcacactagtacacag

SEQ ID NO: 88843 - DNA, 480 bp, Glycine max
  Clone ID: PAT_MRT3847_51232C.1
aaagggaacggggggcccaaaaatattcaaaccaaaaaagggaaagaccccccattgggggttaattaagtgggggcaaaacccaggcaaaggcgggaaaaaaataaaaaaattggaaaagggcaaaaaaaaaaaaaaaaaaaaaaaagggaaaaagggtttggaactaggagccccctcccaaaaccaaggacccccggaaaaaaagtaaatactataacaaaccaaggcgacggccgggtttaaggggccaaaaaaaaaggggtaaagggaaaaccaggggcaacccgggggaaatggaccccagggggggaaaaggccaaaaaaacaaggttggtaataattaaagggcaatttcccgggctgggctcgttaaatcccagggctgaaaaagggggaaaggctggaactaaaactggggctaaggctggaactttcctccctaaaagacccatggagcaaacccggtcccctaaatgg

SEQ ID NO: 88844 - DNA, 263 bp, Glycine max
  Clone ID: PAT_MRT3847_51234C.1
atttttatgcaacgacgcatgatagttctttctctaccatggctcactttaagggcacaggccatcaatagcctattttcaacactgcgtacatatgcgctctcgggaaggggatttttgcttctggtgaatcaaccaccacaacttggtccattttgggcacactctttgtaataatgtggtaatcatcaaaaattcattcatggaaggacgcatcaaccgttgccgtgctgttaaaaaatttcaaggtgtcatacactttt

SEQ ID NO: 88845 - DNA, 309 bp, Glycine max
  Clone ID: PAT_MRT3847_51236C.1
gttcacccatcgagcggacgctatcagaaaattggtgcattggaaaggcctcctacacagagaaactgtggcccctctgggacatgataacaaaagaggtaccttctcgggctattttcctacagtgaacctgatgggaaaaccggacaatgtaatgactatggcactgccccgaggggctttccttgccggcttgtgttgcaatcacactaaggcgatgatgacctatatctgggccaacgtaccagaattgggcccttgcctttggacactcctcttttggggaatgcgccaaaaactgaaaagcaa

SEQ ID NO: 88846 - DNA, 165 bp, Glycine max
  Clone ID: PAT_MRT3847_51237C.1
atggactgggatgaaataatgcctattgacactagttggagcataacacatgagcggtacatctgctacattctgacacttatcatacactcggctaatggactccgacgtgaaactatgaaaacgagccactctatgggccgcactcatctagggatttctctt

SEQ ID NO: 88847 - DNA, 635 bp, Glycine max
  unsure (1)..(635): unsure at all n locations
  Clone ID: PAT_MRT3847_51238C.1
ctcctcagatggcaacaaaaggattcgaacagctgactgaacaaataatttgggcccaagttgaaggaacatatgcagtactgtgttgagcaccctgaagagataagcaagcttgctaaggtgaaagctcaggtttctgaagttaaagatgtcatgatggagaatattgaaaaggttctggacaggggggaaaagatagagcttctggttgacaaaactgaaaatcttcatcaccaggcacaagacttcaggaattctgggaccaaaatccgtagaaaaatgtggctgcaaaacatgaagataaagctgattgtgttggcgattttgatagccctgatcctcataatagttctctctgtctgccgtgggttcaattgtggaaaataagcatcattttccgaggagtcattttaccttgttattttgaccttgtgattattttatgaggaaaagatatggaatgaatgcatgattttgtatgtagtaaagatatcagatcgttatactgttcattttaaaggtttcacagtatcatataagaatgctttggaaatattattttgtttgtgtattgtagttcccnnnnnnnnnnnnnnnnnnnnnnnnnnnnnnnnnnnnnnnnnnnnnnnnnnnnn

SEQ ID NO: 88848 - DNA, 2365 bp, Glycine max
  Clone ID: PAT_MRT3847_51239C.1
cgcttgcaggggaaatgaactatttggtgccgcagagatcatagctaggcaagttgatgcgactgttctagtaatgggccttgaccaaaccatagaagcggaaacaagagatagggttgggcttctcttaccaggccttcaacaagaacttgtgactagggtggccagggccgctaagggccccgttatcttggtcatcatgtctggtggcccggttgatgtttcgtttgctaaaaataaccctaagattagtgccattttgtgggttggttatcctggccaagctgggggaactgccattgctgatgtgatctttggtgcaaccaacccaggaggaaggttacccatgacatggtacccacaagggtatttggctaaagtgccgatgacaaacatggacatgcgtccaaacccagcaacaggatacccaggaagaacctacagattctacaaaggaccagtggtgttcccatttggacatggactaagttactcaagattcagccaaagcttagcacttgctccaaaacaggtctcggtgcaaatactgagcctccaagccttgacaaactcaaccctctcaagcaaagcagtgaaggtgagccatgccaattgtgacgactcattcgatatcttttcctcatatcgagaagacgacataaggggactcatcgttctctctgttctttctctctcaaaggaaagaaaaggaaagaaaagaaaagaaaaagaagagagtgtaggtaaacagaagcacacactacacagttaccaaaatcaggttcaaacgcacagatctgggagaagagaagaagaagaagaagaagatgggacaggatcagaaccagagatcgctgatctacgcgttcgtgtctcgcggcacggtgattctcgccgagtacactgaattcagtggcaacttcaacacaatcgcgttccagtgcctccagaagctccctgcctccaacaacaagttcacctacaactgtgacggccacaccttcaactacctcgtcgacaacggattcacttattgtgttgttgcggatgaatcgattgggagacaggtgcctgtggcttttctggagcgtgtgaaggatgactttgtggccaaatacggcggcggaaaggcagcaaccgtggctgcgaacagcctgaacaaggaattcgggtctaagttgaaggagcacatgcagtactgtgttgagcatcctgaagagataagcaagcttgctaaggtgaaagctcaggtttctgaagttaaagatgtcatgatggagaacattgaaaaggttctggaccggggggaaaagatagagcttctggttgacaaaactgaaaatcttcatcaccaggcacaagacttcaggaattctgggaccaaaattcgtagaaaaatgtggctgcaaaacatgaagataaagctgattgtgttggcgattttgatagccctgatcctcataatagtcctttctgtctgccgtgggttcaattgtggaaaataaggcatcgttttccgacgaggagtcattttaccttgtgattattatatgaggaaaagatatcgaatgaatgcgtgatttgttgtgggagcccatccagtcctcgcttatgctgcctgttgtgaaaagtaggcttgctaaggtgaaagtgctggtttctgaagttaaagatgtcatgatggagaccattgaaaaggttctggaccggggggaaaaaatagagcttttggttgacaaaactgaaaattttcatcaccaggcacaagacttcaggaattccacaacaaactcacaaaatggataagcaaattttgtttcttcttccccttctcatcatgtccctcttcactgtttcaatagccgctgaatcttccagctcatgccccatggatctcaactatgttgagacctttccatgggactcttcatcctgcagagaccctgttgacaagaaccactgctgccaagtcttgctaagtgtaattggcataggactttcccaacatctcaaacaaacttccttgtttcaacttcccaatgaaaccatttcctccattgcttatccatttacatgaagataaagctgattgtgttggcgattttgatagccctgatcctcataatagtcctttctgtctgccgtgggttcaattgtggaaaataaggcatcgttttccgacgaggagtcattttaccttgtgattattatatgaggaaaagatatcgaatgaatgcatgattttgtatgtagtaaaagtatcagatcgctcatactgtgaaacctttaaaatgaacagtataagcgatctgatactgttcattttaaaggtttcacagtatgatataagaatgcttttggaagt

SEQ ID NO: 88849 - DNA, 234 bp, Glycine max
  unsure (1)..(234): unsure at all n locations
  Clone ID: PAT_MRT3847_5123C.1
atganaaacaaagaaaggaaatatttgatctttgaaaatgttgggaggaaagaaagcttgagagtccatcaaggtaacagctgcaaacattggtgcttctgccaaggctggcattgagaaaaccattgccactgtccatgagaaggcagatagaatgacggcacgtgatccgatgcaaaaggagttggcaacccagaagttagaggcaaagatgagccaggcagtgctggacaa

SEQ ID NO: 88850 - DNA, 779 bp, Glycine max
  Clone ID: PAT_MRT3847_51240C.1
gccgtcaaatttctattccatagacatttgagttaaaacataaccttaagttacaaaaaaagtttcaaattaataataataataagtcctactttgctaatgtaaattgaacagaaatctaagctaaaaagtcagacttagtagttgttactagctactagaagctacaaaaacaacggcttctaatttgtctaattaaaataaaaaaaatggacaactaagtatagcacttagttgtggaataataactagatggcacatcacaaggaaaagaggaagtatcccaaagcagattatttgacttccaggcatctccaatattcaaaggcatagtaacacttaatggaaacccaatggatcgttgtactactgtctccaactccaactctgggtcatcaacacgaggcacattcacattaggaccctttaccaatgcataaatattatcacaatattgttgttgctggttaccaaatgtggtttgcatattctcacgtagaaatggtattgggtagccactacagtgctcttgcaacacaccaaagtttgaagctgcatttgtatttgtgtcctctgaagtagtcttgttaaaatctccaagcactgaggatgacatgttcaacagcatggaagaaacgtccattattgtagatttgggattagtttctgatgtttcaaagggggtgatgagaatagcaagctagtgctaaggtcttcatttgaaatgggaaaatgatcaaaggctttgtaaagcaatgggttaatgatggatttgcatg

SEQ ID NO: 88851 - DNA, 467 bp, Glycine max
  Clone ID: PAT_MRT3847_51241C.1
tgtaggtatgtccctagaaaagatgtagcaattgacaatgtggtaacaagggtcttgtttcttttgatatgaataaaagcgtctcttctgtgtttcttccccatgaaaaagagccaccgtacgcatcaagtaagatcctaagaagatttcacatgttcagtttgggaacgaagtttgttaattaatttgtgtcgttccatttcaatgatgggagaaaaagggagctacgaagcaaaatatacaccaagagattgtgcatgctttctccgatatatccccatcttaaaggtacaagggcatctatactatgattgttctccattcttaattatttgatttttgcagcatgtccctattaaggactgccaactcccacatgggaatatgcccctaccattttctagattccgatcgcatgcagttaattttcaattacagatgtgattttaataattactcgttacaaa

SEQ ID NO: 88852 - DNA, 441 bp, Glycine max
  Clone ID: PAT_MRT3847_51242C.1
ttcagaagttatttcatgaattcaattctttttggagggtgacttctgtgttatatgttaatatcagggagtaaatagtgtataatttcaaaaagctgattccttttttacattttttttgtacagcttctcacattttctatatattttaattgaatgagttggcttattgataaatgtgacggttggaaacttgttctggtatatcaggttttaaatggaaaccatttttaacctctgccaacatgaatgagtttccaacagccgtgatgagcctctaacatgtaagaaggaatccctagtaagattacttcaatgaaatttacctgttacgcttggcttctgagctttaataatttgttaatacgattctggcctctctttcctttgctaattaactattttctcttaatgctaccctctctttcctttgctaattaa

SEQ ID NO: 88853 - DNA, 233 bp, Glycine max
  Clone ID: PAT_MRT3847_51243C.1
gttataatgcagagtcatccagtattcctgttaagacagtgcttaactgatgaatctgcaagttataatgcaaaatgtgtaataggtgataatttagggacatgtactactaccacattgcattattctagagatgtctcttttagaacaaatgatagtgtagttactaatagatttgtttcaggaaaatttggcatatcagatctgcagtctgctgatcttccagagacaac

SEQ ID NO: 88854 - DNA, 315 bp, Glycine max
  Clone ID: PAT_MRT3847_51244C.1
atcaagcgttcgtgtctactgctgctcatttattcagatagtgcgttctggctgtacatgccctcgcgcgcactgcgtgagttctatggagctaaagtgtctgcctgcacctggagtatctactgaggtagttgatgctccatcttgtccttagtgactgcatgcatatgtctaccaggtgaccggctgacgtctgtagattatccatgtgctgcgaatcgacatatgatccgagatcgactgctgatgatgtgcatgaccatcagaacttgtgctacttgtactggtaaggactacttattaacacatattctc

SEQ ID NO: 88855 - DNA, 495 bp, Glycine max
  Clone ID: PAT_MRT3847_51245C.1
tagaagtttcaaaattactattacgtgtgataagtaacgggacaagtcccgatgaagattagtttcatgtctaaagccgtatatgcgacaaaagaaatctggagcgagagtaaaaacccaaaacacagtgacacaaagtgctcataaaccaccacgtcgtcagacaagtggggaactgtcctccaaaaggtttgtgcatgtttatggtgaagaaagtgatcggtatgaggaaatgttaggtttggaaaatggaatctctctcatcttatctctcctgttctgttccgttcccaagcccatacacctcacctcaccactgtctcttgctctatatttatgattctactcagagaccttttacacctcctttcaactctttctttgatcagttgagactacaagatccaaactcataatctgttccctgctttttaaattcccctcttcccattctactctctcctctgttacactggtgtaccatttggtctgata

SEQ ID NO: 88856 - DNA, 2998 bp, Glycine max
  unsure (1)..(2998): unsure at all n locations
  Clone ID: PAT_MRT3847_51246C.1
ccacgccgtccgaaaaatagataaattcttaattatcaatccgaaattcttcagaggctgactggtaggtacggtgtggcggtgtttcttcatcaatcatcagcaacctaagacaaaatcacatttcattagagttcccactttatactcccatgttgttggttcgctccaatttctagggtttatcacattcatatatatgctattaaattaaatggccggcaccggcgacctagatgccaatgcggtgctcagcgacgtcgaggacgacggcggcgatccgtttccgaccgccacgaagcttccctcgccggaagacgtctccgtcgagaaattccgggaggctctcgcggagctcgatcgggagcggcaagcgcgcgttgctgcggagaatacgaagtcagaattgcagngtttcgttcaaccgattgaaggcgctggcacacgaggccataaagaagncgcgatgagttcggtcgccagcgagacgacgccattcgggagaaggaggagacggcgacgcaattagaagaaaccgcgaaggaacgcgancgcgctgcgatcgggagattggngaattcgagccancatgatgggtcacccggcttggtgaaaatctcggcgaaggtcagcagcttcgccggcaacgcgctgccgctgccgcggtcacagaaatacacaggcatggcggcggtggcgtacggcgtaatcaagcgcgcgaacgagatcgtggaggagcttttgaagcagaacgaggcgaccgcgaaggcgaggaacgaggctcgggagcagatggagcagcggaattacgagattgccattgaggtttctcagcttgaggccacgatcagtggcttgagggatgatgttgcaaagaacgcttcgattgttgaggatttggagagggacttagctgttagggatcagaggctgaacgaggtttcggagaatttgagtaaggagcaaagcgaggctttgcagttgaaggagttcgttgctgagtgtgaggagaagttgagtaacttggaatctcggatggaatcgcaaaggcctttgttgattgatcagttgagttttgtttccaaaattcataaccagatttgcaatgttgttaggataattgacgacggtggcaccgatgagctatctgaatcgttgtttgtcccgcaagaaacggatgttgaggagaatattcgtgcctctttggctgggatggagtccattatatgagttgaccaagattgttgttcaaaaagctaaggatgtgcttgaggagaacgatcgtgagattaagagtttacatgagacgttggctcggttagttagggagaaggatcaaattggttcttttcttaggagtgctttgtctaagaaggtggcaggtgatccgtcttctagaaagagtgagctgtttcaagctgcagaataatgggttgagagaggctggaatagattgcaaattcagcaggcttcttggagctgggaaagttgcagcttcaaatgacaagtctgatacaacggaaaaaaaagaggatgaaatatattccctggctggtgctttggaggatgttgttaaggcatctcagcttgagatcattgagctgaagcatactgtgggtgaattaagggcagagttgagcttacttaagcagcatgtagaagctcagggcaaggagcttgaccatagaatgcatcgggtagaggaacttgaagagaaggagagagtggcaaatgaaaatattgagggactgatgatggacattgctgctgctgaagaagaaattaacagatggaaagtggcagcagagcaagaagctgctgcaggcagaggcgtcgaacaggaatttgtggcacagttgtcagcacttaagcaggaatttgaagaggcaaagcaatccatgttagaatcagagaagaaactaaatttcaaagaagaaacagctgctgctgccatggcagccagagatgcagcagaaaagtctcttaagttagcagacttgaggtcatctagactaagagacagagtagaggagcttactcatcagctcgaagagtttgagaacagggaagattcaaggagccataatcggcctagatatgtatgttggccatggcagtggctcggcatggactttgttggatttcagcagcgacccgatacacaacaggaggcttctaacgaaatggaactttccgaacctctattataattgggcattttcttttctcttcttttttatgttcttttgtgtatttatgttaatttcttcaaattaatgttacaaagttgtagtttataccatcaacatgttccaccatctcttagaatgcaaccatggtggttactggttgagcattaggctcctgtaaagtgagaaagtgtctgaagtgtgaagtatacaagtgagggtgtgctcacgcttgaattaaaataggttaagttcatcaaacacttcaattctaattgacataaaatgcatcttcacttattcacaaaaaaaaaaaaagggcggcaaatgagctgtttccctgcattatcatgttgcagctgcttctggcttgggtagcttgctattgtactttggttgttttgaacgaacatgtcaagaaagcaataaacaaataccctgtcattacattacactcaaaagtctagacgtgtccacgggaagcttctgtatggtcaattctttcattgagcaaattggcttttgagggatctatggattcgtcagtctctcccttgtccctagcaagtctatatttggaacaggtggaacaagtggatcggtcaaccactcaacctgacaaatctctagtatatccaatacaattttattaataaaattaattattttttttagctttattttacttttggtaccaagagatccagacatttaattttgcggtagcccttccgctaatttaaatgtctggatctcttggtaccaaaagatccagacatttaattttgcagaagggttttctttaattt

SEQ ID NO: 88857 - DNA, 513 bp, Glycine max
  Clone ID: PAT_MRT3847_51247C.1
aaagcaggtacagtagttcatcaaccctaaagtgttgagatcttttgagtgggatactcagattctgacattgcaagatgcaaactaaataaaaaaaaatacaagtggtacttgtcacttattaggacatggcctagtatcttggaatagcaagaagcaagcatgtgttgccttatctacggctgaggctaagtacattgctgcaaggagctgttgtgcacagattttgtcacttaaacaaatcctttctaattttggattgcatttagaacacattcctttaagatgcgataacagtagtgccattagtctcaccaaatatcttatcatgcattctaggataaagcatatagagattaggcatcatttcattagggatcatattcacaaaggtgattgtgatatagattttttttatcgactcacaactagttgatatcttcactaaacctttagcaaggactcttccaccttcataatgaacttggcattctaagtgagtctaatcttact

SEQ ID NO: 88858 - DNA, 703 bp, Glycine max
  unsure (1)..(703): unsure at all n locations
  Clone ID: PAT_MRT3847_51248C.1
ggggagggatcaatggaaccgcttactcatgagggttattaattaattttttgattctattgagcagggattcctcggcgaaacttggaacacaaggccttgaggctttaaagcagctacctagagcaaaggtccagttagcaaccaaatttggcatttcaaggatggattttcctaatgtacaagtcaaaggcacaccagagtacgtgcgctcgtgttgcgaagctagcttgaaacgtcttgatgttgattacattaatctctattatcagcacctatagaggaaacagatggggattccttcttctgatacacttttaaatgactttaaacttattaagttcttgttacatttttgtgcatattctgtcattatttggctcatctcactatatacatattattaataagtttgttctattattataggtaggtgaacttaagaaacttgtggaagagggtaaagtgaggtatattgggttatctgaagccagtccagatacaataaggagagcacatgcagttcatcccatcactgctgtacaaantggagtggtccttatgngagtcgtgacattgaggacgaaataattcctctgcagagcttggcattggaattgtactatatagtcctcttggtcgaggctttttcggtggaanaggagttctgggaaaatatgcctgcatatacaaccctggtgaa

SEQ ID NO: 88859 - DNA, 198 bp, Glycine max
  Clone ID: PAT_MRT3847_51249C.1
tcggaatcccgctcgagctcgagccgctcgagccgtacggattccagttctctcttgtcacgcatgtatcgggactgctcaatcacatgtcttagccgctgtacgaggtcagattatggttctctcgcctcgctgaataagagcttctggaacataatccgaagtggtgagatctatcaatggatgagtctgaatggt

SEQ ID NO: 88860 - DNA, 1863 bp, Glycine max
  Clone ID: PAT_MRT3847_5124C.1
ccttcgcgtccgcggacgcgtgggttcgctaaatctgcatcaatcaatcaatctttgtcttcctcacaaccaccaccattctccgccggtcaaaccaccgtttcagtggcgggaaccgagcttgaccgttattaggtgcatccctgtttcgtttagacatggaggtttccgtttcgtcgccgccgagaaagtccatagcggagaaggtattcggaggttactataacgggaacaatagccacaaaaaacgtggcagtgaggctcacgatgatgacagcgatggaggcatggaactcatggagattggcgcccaaaggaccaagaacgtcttgattctcatgagtgatactggtggcggtcacagagcttccgctgaagccatccgtgacgcctttcaaattcaattcggtgacgaatacaggatttttgttaaagatgtttggaaggaatacactgggtggccgttgaatgatatggaggggcaatataagttcatggttaagcatgtgcagttatggaatgttgcgtttcacagtacttctcctagatggattcactctgtgtatttggctgccattgctgcttactatgccagggaggtggaggcggggctgatggagtacaagccagatatcatcatcagtgtccatcccttgatgcagcatattccattgtgggttttaaagtggcaaggtttgcagaagaaagtgatttttgtcacagtgatcacggaccttagcacatgccatcctacttggtttcatccttgggtgaatagatgttactgcccatcacaagaggtggccacgaaagcctcacaagatggccttgaggaatctcaaattcgagttttcggcttgcccattaggccttcttttgccagggcagttcttgtgaaggatcaattgagagaagaactcgggttggatcacaacttgcaagcagttttgctgatggggggtggtgaaggaatgggccctgtcaagaaaactgcaaaagctctcggagaagcacttttcgataaggaagctgagaaaccaattgggcagttagtcatcatatgtggccgtaacaagagcttagtatctacccttgaatctcttgaatggaagattccagtaaaggttagaggatttgagacccagatggccaaatggatgggagcttgtgactgcatcataacaaaagctggaccaggtacaattgcagaagcattgatcagagggcttcccataatcctcaatgactacatccccggacaagagaagggtaatgtgccttatgtggtaaacaatggagctggcgtcttcactcgtagtcctaaggaaacagcaagaattgtggccgaatggttcaccacaaaatcagatgagaggaaaacaatgtcagagaatgcacttaaactggcacagccagaggccgtgtttgacatcgtgagggacattcatgagcttgctgagcaacgagagccagcaaactttccatacttgttgacctcatcatttactagcctaatctgattgattatttgtgcttctttcacgttagctttcttccattaaaattgacatgtagagttagctttattgattatatcattctttatcctagtgatttggtttaactgtgagctacaaaattgtggtaaaaccaagctcaggttttataataattaaagatgcttgccaggtgatgggttgtctgtaattgcaagaagggttaacattctactaaaaactgtctaatgatttttttttcctatttttttctctggaattgtatttagcactaaaaactggctttgtaattggcttctttatcaggcaatgtaaattgtcaatggtcatcctttggaagaacgcc

SEQ ID NO: 88861 - DNA, 1081 bp, Glycine max
  Clone ID: PAT_MRT3847_51250C.1
tacggctgcggaagacgacagaagggggaatcaattgaattgaatctctccaaatttcacttcaaatgcgagtagtgttgttcttctctgttttcattgttgattaagtagttgtgaatcttttgccctttaccatatgaaggtgttaactcgttctctatgctggattttatggaactggagggataggtaaaacaacgaccgctgtagaagtaattgttatagttagttgttgttttacctattccacccattccatgtatccctttcctgagggcgcggttaatttcttacttttcactgccgattccgttgaagctttgtgttttaatcagacgaatgaaagtatattaagtttttgctctggatttatgtgccagtaaaatgatcttaagattctaactttattatttgtttatgggatttttttttcttttttggccaatagttcacagatctgagagtttcaagttttccctcttgttttctatgccagtaaattgattttaagattgttaactggatttttgttttttttttttgtttatttggtattttttttctccagatgttcatagatctgggagtttaagctttgatggttgttgatttgtcttagttatatctgattgtgatgtgtttggtgttccgattttgaagatctattatttcaaaattgagaattctattaagtttatttaaggttcatgaatcggtggaaagagctcagatcttggttggtttatcctgcaattagttcaatgttgtttttcttgttaattgttagtaggagggatcgaatcctttatctcctaggtcaatgttgtttgaaaactcggcatatttgtttattttttcttttttattgatcgaatttattgatgttataacatatcagttgaattgcttcagaatgatcttacttgtttaaagaagctctaatcggtttattgggagcttattgaagaaattaaagggattccacccaacttaggaacattctacggtccgaattttaagaatgttttgagggagtttatttttgaatattttgtgaggatcttcaaaaagctgcacttta

SEQ ID NO: 88862 - DNA, 942 bp, Glycine max
  Clone ID: PAT_MRT3847_51251C.1
accaggtcaaattgcgtctggcgtccgcgtgtatgcgcgtctctctgtttgtttgtttaagcctttaaggttacagttggagagcaagttcaacacttttaagcttttcttccgatcacattcaaacaccccatctcttctcatgcctttctgctaacatcaccaaatacagatctgaaacaaacaaacaaaagaggatattataatcagccttagtcgtcaaatatggcatcaaaattgtttagggaaagccgatcatctatatcatcatcgtctgatgcacccgatggccagaagcctcctttacctccaagtgtacaatttggccggagaacttcctcgggtcgctatgtcagttactctagagatgatcttgacagtgagctagggagtactgacttcatgaattatacagtgcatataccacctacccctgataaccaacctatggatccatcaatctcacagaaagttgaggaacaatatgtgtcaaattcacttttcacaggtggattcaacagtgtcactcgagcccatctcatggataaggtgattgaatctgaagcaaatcatccacagatggctggtgcaaaaggatcttcatgtgcaattcctggttgtgattctaaggtgatgagcgatgaacgtggtgctgatattcttccatgtgagtgtgattttaagatatgcagagattgttatatagatgcagtaaaaacaggaggtgggatatgcccaggatgcaaggagccatataagaacacagaactagatgaagtggctgtagataatgggcgtccccttccacttcctccaccaagtggaatgtctaaaatggagaggagattgtccatgatgaagtgtccccttctggtcggtctttctcgacagaccggtacgagacgacgtggagtcgaccacggagaattccggacgcggtac

SEQ ID NO: 88863 - DNA, 535 bp, Glycine max
  unsure (1)..(535): unsure at all n locations
  Clone ID: PAT_MRT3847_51252C.1
aattcccgggacgacgagaactaaagtcggcggccgccctanaaaaaaagggggggttttttagagaaattcggtgttacacacccgggagagtgtttttatgaaaagaacagatcagtcacaacactgtcgacacaagggtaaccaaaacccacggtcaagggttttaaaaagaaaaaacaaatcgcttaagagggaaaaaaatggcaaaccaccaggggctaaaaaagattttatgaaaattgaaaaaccacgagaaaaaaaaaagggggctgaaaaaaaaaaaaatttaatcatgaccaaaaaaaaaggagaaaattggggacaaaaaaaaaaagccctcaaaaaaaaaaagggggaaaaatcccccccctttgggggggaaaaaaaggggaatagaaaaagtgggggaaaaaaaacaaagcccaaaaaaaagcctggtcaaaaaaaaaaacaaaacggaaaaagccttaagaaaaaaagggtcaaggggaaaaaaaaaagaaaaaaaagtgtgcaaaaaaaaaaagcccaa

SEQ ID NO: 88864 - DNA, 252 bp, Glycine max
  Clone ID: PAT_MRT3847_51253C.1
cctactcctactcatgagcctactctttcagttcattgactcaacgggtgcggcttcagcaaagcggaggtagaccctgatcagggtgagacactcacggaaaacaagacgaatgtctcactttgtgtgagtcgtcactagataactctgctgtacatacagatcttcacggcagctgactatgctgctaatctccaccaaatctaccattgctcgctcgatgtgctcgacgaagcgatgtgaacactcata

SEQ ID NO: 88865 - DNA, 599 bp, Glycine max
  Clone ID: PAT_MRT3847_51254C.1
ctgtttctttgtgtctgaattcttggattcatctgacaaacatcttcaaccttcaaaaacatcatcctgtttacatctagaaccagggttctgaatttttgtagctgatatatccagaagagaaataggaaattggagaattaagtatcctcgttgcatgatcattgatgaactaaaatatctatatcaactctgtttgtgttaatatagaacaaagtttcaagcggtaacaacaggttagaatggattcattcaatcagagtcatcaaactaccagcttcaggtacaacccaaactcgaacacagtgaatcatacagatgataatgacgatgatgcagagttctcagggattcttgatatctatgttcatcatgctaggaacattcataacatatgcatctatgataatcaggatgtgtatgctaagttctctcttacatacaaccctgatgagactctctccaccagaatcataaatggaggtggaaaacacccaatattcaatgaaaacttgaagatgaagataacccagatggatgctgttctcaagtgtgagatttggatgttcagtaggtcaagaaatcacttggaagaccag

SEQ ID NO: 88866 - DNA, 492 bp, Glycine max
  Clone ID: PAT_MRT3847_51255C.1
cccacgcgtccgtacggctgcgagaagacgacagaaggggacacacttttctttcattctttgtgtctgaattcttggattcatctgacaaacatcttcaaccttcaaaaacatcatcctgtttacatctagaaccaggttttaactagtctctggtattactcattcaactaggttagaaaactctgttcaagttctgtttaaccctttacatgctttctttctttccaactatccactgatttgaagcttgttattcaaatgaaatcagggttctgaatttttgtagctgatatatccagaagagaaataggaaattggagaattaagtatcctcgttgcatgatcattgatgaactaaaatatctatatcaactctgtttgtgttaatatagaacaaagtttcaagcggtaacaacaggttagaatggattcattcaatcagagtcatcaaactaccagcttcaggtacaacccaaactcgaacacagt

SEQ ID NO: 88867 - DNA, 412 bp, Glycine max
  Clone ID: PAT_MRT3847_51256C.1
agcagactgcgagatcacaaaaaacacatggcaacaacactgaagaaaacaacaaccaaacaggaaacaaacacaacgaaagaacaacaaacaaacccaacaccggcaaacaagaaacccgatccctgcaaccggaggcctccacccgacgaaaggcccgagcaaccggacaacaaggtccaattgcctaacgcgagtgacaaatcggatccacagcgaaaaccgggcctggacccaagccagcccacatccaacctaacagcgaagagctacacggcgaaaaacccgaaagacccgacaaagaaaaccgtgcaaacgtctacgccacatgacatcactaaccacacccccattgcatccacactcgcatcccacgtaaacaaagggtaccacaaataaacgccgggaccca

SEQ ID NO: 88868 - DNA, 504 bp, Glycine max
  Clone ID: PAT_MRT3847_51257C.1
cacgcgtccggatgaatccaacaggtgtgcagtggaagatgagtggtgcgcgcagggctgcattgaaatcaccactagggcctgacacttgtgcaagaagcctggcctactacacagaggtgacttctcacacgtgagagcataacagtcactcgtctgaattcaacgccccggcctcctgcgctctttgatactgaccattcatgtttagcacatatggaacatcaggtcgaggttcgtaaacacgcactgaaaacagatatcatcaactctacttgaaagttgtaattttgactcttgacgacgataaaacggattacaaccggagatattgcctaccttgaacggtgtggcagttccctactcaagactgcttagacaaagctgatagagcgaattcaaggaatggtcacttgtactaatcggacagggttaacacgcacatatggtaccaaacacaaccatattatggaaaaactatcttaatgcaaggaatgcctcgag

SEQ ID NO: 88869 - DNA, 469 bp, Glycine max
  Clone ID: PAT_MRT3847_51258C.1
gaagacgacagaaggggtacttcttatttttataggattttagttagcaatctaatcaggaaatcaactcagcccattcgaactggttaacattattgggtcctctttaataataattatgttcacaatcaaaatttatgagattaattcttgaagtatagaaatcactaaagtaacttttatctctttaaataaagttttttttatatacataattagagaattaaactcctgtcggtatgtataagaaaatcttctctataaacttattttataatctattttagtcattatcatccaaaattgtaaagaataaaatgaatttaaaaatataagtgtgaagactaaaaaatatatgcataagaattaaaatgaatagttttcaagtgtaaagagaagaagataaagattgtgcagaaaatcaaatgaataattaaacaaacttttagaatatagagacctacttaat

SEQ ID NO: 88870 - DNA, 3037 bp, Glycine max
  Clone ID: PAT_MRT3847_51259C.1
aaaaatacatcccacaagataaaaaaaattaaaatttataaaaaagaaagaagagagattatagaaagcgaaagagagagggttcaagttcaacaagcctctcttctttgtgttcttgcgaagaagaaaaatccctccgagtcaactcggacgagttgcctcatcgtacggttccttcctcggactctttcctcttcttccccttccgaatcaccgttcgcagggttttgctctctctctctctctgtctctcgcttcgtttctagttcagatctcgcattggcttcagctgaaaccacgcggtttaatttcattcccttaaattagggatttatcttatgtcgaaacacttgaagtgatgatggtgtggttgttgtgagaaattaatgatcgttgagggtgtgggacattggtacagagctttcagtgtagttgacaactacctaggagggaagaagaggaatctttcttccgccgttgtcgtgtgccgtggttgttgtactgttgatgtctcggaaactcgacagccctgtgcagactcagatggctgtggcagtgataaggagcagtccacttgggagagagtaccacgggaagcaacccgcgggtcggaggcgcgtgttcgtgcagacggagaaagggtgtgtgttgggtatggatttggatcgcggtgacaatgtgcacactgttaagaggaggctgcagcttgccctcaatgtcccggttgatgagagttatctcacttttggggatatggtcttcaagaatgaccttagtgctgttcggaacgataccccgcttttgctcactagggggaaaaataatctaatgcctaggagctcctccacgccgtgtctgtcgccgaaggggagggacattgataaaagtggacctatcgagatattgggacagtctaaccggcttgatgggatcaagcacatgatcaaggacattatgaaggcgattaagatggggattgaaccgattcctgtgcatagtgggcttggaggtgcttactatttcagaaacagtaagggggagagtgttgcaattgtgaagccaaccgatgaggagccttttgccccgaataacccgaaaggttttgttggcaaggcgccttgggccccaaataagccgcgatctgttcgggtcggggagaccggatttagagaggttgctgcttatcttcttgattatgatcattttgctaatgtgcctcctactgcgttggtgaagattacccactcggtgttcaatgtgaatgatggtgtcaatgggaacaatttatggaggaaaaggctgtttagcaagattgcgtctttccagcagtttatccctcatgattttgatgccagtgatcatgggacatcgagcttccctgttgcttctgtgcatcgtatagggattttggacattaggattcttaacacggataggcatgctgggaacttgttggttaggaaacttgatggcatcgggagttttggtcaggtggagttgattcccattgatcacgggctctgcctgcctgaaactttggaggatccatattttgagtggattcattggccacaggcttccattccattctcggaggatgagcttgcctatattgaagatcttgacccttatcatgattgtgagatgctgagaagggaactgccgatgatccgagaggcatgtctcagagtcttggtgctgtgcactattttcctcaaggaggctgcggcttatggcctttgccttgctgaaattggagagatgatgactagggagttccgcaggggtgaggaggagcccagtgaacttgaggttgtttgtttggaggcaaggaagatagtggtggaaagagacagggaggaactgtctcccaggtctgagatgagagatgatgagtttctgtttgatatagattattatgatgaatttggatcagattttacgccaaagatggcaatagatgaccctttaaccagagcaacttttctgcctgcacttgggaatgggcattctcgtaacccgctttccaaattggatgaatgcattgaggaggaagaggaggaagaggaggaagctgagggagaatctcctaaggggtttgttacttctgctactgaagaaaaaatcccatgtgtttcagaactttctgtgtcactgaaaaataccatgttagatgggaaaaaccagaatcagcagaaatattcaggaggaaaggtggagaatggtcattttgcaaatacatcatctggtcataagagtgccaatgagcagcttcctccaagcataagctttgtggatgtgacagaaatgaccgaggatgaatggccattgtttctggagaagtttcaagagctgctgtatccggcatttgccaagaggaaatccataaccttaggtcagaggcagagacagaggcttggtacttcctgccagttttgaagttgagcgatatgctggtatgataggagaggactatagaatgaagaagaataaggctttgtaggtttcagggaatgaatgaagggttgctaagatagtgttctggtttatgagatttggatgagtgctttggttggaaacgtcgtaggaaaacctgctgtaaatatacttggcatcagctaagtggtgagccgattagttgtttgtattttgatttcatgatttcatttcttcttttccccttcttcttctttgtaggataaaattgtgaaatgaaatttgtgtatatagtcaaatggcatgtgccttgtcttttctccccttaataaggtgtctgccaatgttttaaattgcaatcgggagttcgtctcgttttgtttcttgatattgtgagaaattgcggataaatatgtgattgatgcagctacaattgcgacaccagtacttaaaaaccttgatgttgtgactgaaattgcagtcagtagattattttttggtgatgatgagtgggtgttgtggtgctagcatggagtcttcaatgagtttcccatttgaagagagaaaaactagagggagagagagaagtggtgttagctag

SEQ ID NO: 88871 - DNA, 110 bp, Glycine max
  Clone ID: PAT_MRT3847_5125C.1
atcagagaatattgaatctttttgcgtgaacgtaggagaattgaaccttagatggtttaatgtgtctttgctcagaacatgcaaactttgactatataaatcttttgtct

SEQ ID NO: 88872 - DNA, 357 bp, Glycine max
  Clone ID: PAT_MRT3847_51260C.1
ctcgtaataattctcgtggagcaaagctgatagaaacatttttttatcatcaaatcagtgcattggggataggggattatgaagacatgttgggtgctgatgaaaccggatcaaatatctctataccgtatacattgagcatattcagcttgtttaggaatggatctattttgtgtgttccccaatgtatcgttgcttaataaaaatgcgtaactgcctgagtttttttgaaagactaaattcatggtggtgagtatagccaaatttttatgaaggacaaatcctggttgaaaaaaccgaatattaacgatctgggccagcacatggagattgacagatcgtctttggatgatcaac

SEQ ID NO: 88873 - DNA, 876 bp, Glycine max
  Clone ID: PAT_MRT3847_51261C.1
acggctgcgaagacgacagcaggcgggggtccggaaatacaaagcacaagattaaaaaacaatttataaaaaaagaaagaagagagattatagaaagggaaagagagaaggttcaagttcaaggttctcaagttcaacaacaaagcctctcttctgcgtgttccgaggaagaagaagaaaaaaccctccgagtcaactcggacgagttgcctcatcgtacggttccgtcctcggactctgtcctcttctttcccttccgaaatcaccgttcgcggggttttgctctctctccgttttttgttcagatctcgcattggtttcagctgaaacgacgccgttcaatttccttcccttaattagggatttatatcttaggtcgaaacttgaagtgatgatggtgtggttgttgtgagaaattaatgatcgttgagggtgtgagacattggtacaaagctttcagtgtagttgacaactacttgggaggagggaagaagaggaatctttcttccgctgttgtcgtgtgccgtggttgttgttctgttgatgtctcggaaactcgacagccctgtgcagactcagatggctgtggcagtgataaggagcagtccccttgggagagagtatcatgggaagcaaccagcggggcggaggcgcgtgttcgtgcagacggagaaagggtgtgtgctgggtatggatttggatcgcggtgacaatgtgcacactgttaagaggaggctgcagcttgccctcaatgtcccggttgatgagagtatctcacttttggggatatggtcttcaagaatgaccttagtgctgttcggaacgataccccgcttttgctcactaggggggaaaaattatctaatgcctaggagc

SEQ ID NO: 88874 - DNA, 739 bp, Glycine max
  Clone ID: PAT_MRT3847_51262C.1
taacccgctttccaaattggatgaatgcattgaggaggaagaggaggaagctgagggagaatctccaaagggatttgttacttcttccactgaagaaaaaatcccatctgtttcagaactttccgtgtcactgaaaaataccatgttagatgggaaaaaccagaatcagcagaaatatggaggaaaggtggataatggccattttgcaaatacatcatctggtcataagagtgccaatgagcagcttcctccaagcataagctttgtggatgtgacagaaatgaccgaggatgaatggtcaaattttctggagaagtttcaagagctgctgtatccggcatttgctaagaggaaatccataaccttaggtcagaggcagagacagaggcttggtacttcctgccagttttgaagttgagcgatatgttggtatgatagagaggactataggatgaagaagaataaggtttgtaggtttcagggaatgaatgaagggttgttaagatagttctggtctatgaaatttggatgagtgcaacgtagaaaaacctgctgtaaatatgcttggcatcagctaagtggtgagccgattagttgtttgtattttgatttcatgatttcatttcttctttcccccttctctttgtaggataaaattgtgaaatgaaatttgtgtatatagtgaaatggcatgtgcccttttcttttctccacttaaattggtttctgccaatgtttt

SEQ ID NO: 88875 - DNA, 527 bp, Glycine max
  unsure (1)..(527): unsure at all n locations
  Clone ID: PAT_MRT3847_51263C.1
ggagctcctccacgccgtgtctgtcgccgaaggggagggacattgataaaagtggacctatcgagatattgggacagtctaaccggcttgatgggatcaagcagatgatcaaggacattatgaaggcgattaagatggggattgaaccgattcctgtgcatagtgggcttggaggtgcttactatttcagaaacagtaagggggaaagtgttgcaattgtgaagccaaccgatgaggagccttttgccccaaataacccgaaaggttttgttggcaaggcgcttgggcagcctgggctgaagcgatctgttcgggtcggggagactgggtttagagaggttgctgcttatcttcttgactatgatcattttgccaacgtgcctcctactgcattggtgaagatcacacactctgtgttcaatgtgaatgatggtgtcaatgggaaccatttgtggcggaagaggctgtttagcaagattgcgtctttccagcagnttattccttatgattttgatgccagggatcat

SEQ ID NO: 88876 - DNA, 440 bp, Glycine max
  unsure (1)..(440): unsure at all n locations
  Clone ID: PAT_MRT3847_51264C.1
cgtacccnttngtggtggctgtcctccccnatgtgccttagtatcaccgtaagatcctngantctcagggctgcgatctttcgcgagatcgggccggtttacccaccctaaaaccaaacccatttttccatttcttattacntcatcaactactccaanctccgtatatgggagtttgttgagtacatcaagattatatactttaacagagacattgaggtatatgataacatanaccacctattttacctacctgatggtaacttttactctgtgattgattttttctgcgagaagacattgagtcacacccctcaatacaaggtgggttacttccatcaattcccttataatgttctgttgcccacctaattgtgtcatcccccttctctttactttaaccctggcatgttcgtgttccaacccaacatctccaccta

SEQ ID NO: 88877 - DNA, 402 bp, Glycine max
  Clone ID: PAT_MRT3847_51265C.1
tttttactaccaaaggtttgccgcaaaaattggcaaaccaaaatttgcattttttacttttgtttctttcaaacattctggtgatggctgaacaaaatgttacaaggtatacaacactcatttttgtttggaaccagaaactagaacacatttcaatgcaaaatgaatgaattaatgccttataaaacaactagtagatgaaccacagaggatatctgaagaacgacaaatatgtgaggtgattcctaaagaaatcactctgcacctctctcaaagatttctaaatgtgatgacatacagataaaagtggttcaagttcaagctgaggctggctcggaagcagctgcagcacgcttcttggcaaagtattcatcagcacgggcaaggtttttagcaactgat

SEQ ID NO: 88878 - DNA, 196 bp, Glycine max
  Clone ID: PAT_MRT3847_51266C.1
tgggagtaacatcttgcagagaaacaaacttacaagtggaggaaattaagaagatcattaatggcttctcttgcaaccttagctgctgttcaaccagctgcgctcaatggccttgctggaagttccctctctggaactaagctctctttcaagccctcttcccacactgtcaaatccaataacttcatgagtggtg

SEQ ID NO: 88879 - DNA, 499 bp, Glycine max
  Clone ID: PAT_MRT3847_51267C.1
cgaacattttctcttatttttagtatcaattacaatgcttagtgtttttatatgcttgatcacctttcaaatgttgtgctggctcatttttatgatactaataatgagatataagtagtatgcttgctgcgtttggtaacataatgaagttaatccagggaaaaacaactttgggcaattgcttcttgcactccattttttgtttcctacactttcaaatgttttaaaattctaatattacccgcctttattatggaatgatcattctgaaagtatataagtattttagaatacctattataggtattccacgttaattgttttggaatatgatttttataaaaatggaatgaaaggaaaaagaaatatgtgcataaaatgaaacaactatcccaaataataaaaattgatatgtaatatacggtaaaatgtaatgcaagaagcacaagtgggacatttccatctatgtcgaatcaatccccctttgtcaatttgattt

SEQ ID NO: 88880 - DNA, 447 bp, Glycine max
  Clone ID: PAT_MRT3847_51268C.1
tggcgcgcatgcaggtacggatcctgtatagcgggcgcgatccacgcgtccgacaaatcttttgaaatatattttttataattttgggaatggtgatcgttcttttggtcgaaagacagcataggaacatgggcatatttttacggaggaatcttaatgcgaggcacaataacaagccacctctgcgtggccctgctccagttagtattcaactgaaacggcatatccgggacaacgactgactatggctcaatggtgaaaaccctgtttaaccttttccaacatttaacaaaaaacaggggtggtttggctcactacgccaaaaccgattggaaaaaagaaaagcggctctccctcaaaatcgaataattaaacgggtatagaatggcacatcgtaaatgggcttttttgggggcgcaaagagggcaaaccgcaaaaggtttcgct

SEQ ID NO: 88881 - DNA, 335 bp, Glycine max
  Clone ID: PAT_MRT3847_51269C.1
aacacgacagaagtgggagaagacggcattagggtgtagaaaggaatgaatgcctcccagggggacaacctatctaaccgcctcaaagcgggctataccactgctacaccagactttttccttcataataacgactcaaataaagcctttacttgaacatgtacacggaatcaatcactcactctctaaacatcataacagaacacgctatgctcgactacatactccacaataacactgctttctacgatctgatgaaccattttcattattccgctcttcaaaagtaaaatgcttaactagtactaatactctcaacaaatacactttgttcc

SEQ ID NO: 88882 - DNA, 323 bp, Glycine max
  Clone ID: PAT_MRT3847_5126C.1
gagtccaaacatttcgagcccacacgcacccggggcaagcgactccaaggccccccaaaaaggacaccaaaaaccgatacacaagacccaagttaacagggaaggggcgggaaaaaccaagggggggccccaccaaaaccccccggaaaaaaccgaaagtccagaagggggcaaaacaaaaaagagggccaaaccaaacggcctcccaaacagggggacaaacaaaaaggccaacggggcgcccccttaaaaggggaatcaaaagcggggggggaaaggggcacccccatagtggcccccacaaaagccaccgcccaaggggc

SEQ ID NO: 88883 - DNA, 263 bp, Glycine max
  unsure (1)..(263): unsure at all n locations
  Clone ID: PAT_MRT3847_51270C.1
tttagggaatttttttttttttttttttttgctttttttttttttttttttttttttttttttttttttttttttaaggaaaacagcccacactttttttcatacaaaaattacatttttgggatttttgtttggccaaacacagggatnnctggctttaaaacatattccttaaaggccacaggggcaccccgtgcaagtgcaattagggccacacttgcccttcccataatgctaaggtgggggaacatccatgaaaacag

SEQ ID NO: 88884 - DNA, 561 bp, Glycine max
  Clone ID: PAT_MRT3847_51271C.1
aaaccgggaaaaaacccaggccccgaaaaaggaattctttggggcaaacaaaaaggacaaggggtaggggaaaggggaaattaagtgattccccccccaaaggggaaattccaaaaaaaaaaaaagggggggggccccccccaaaggggaaaaaaaatgggccaaaacaaggggaaccgcccttttttttaggggcccaacccagtttaaattaaaaccacttacccccattctaaaaaaacttttcctaaaaggggaaaaaaacccccttggccaaaaaaaccttggacgccccagggggcccattaaaaaaactttttgggggaaaaaaaatgggccccccccctttccaaaaacacccctaaaaaaaaaccaagggggcccaaaacccccccccgggacaaaaaaaaggcccggggggaaaaaaacccccccccgggggaaagaaccccctcctttttagggactggaacagcccaaagggccccctttttaaaaaacccggggataaagcagggcggactaaccgaattggggttccctccaataaaaaacaccccc

SEQ ID NO: 88885 - DNA, 264 bp, Glycine max
  unsure (1)..(264): unsure at all n locations
  Clone ID: PAT_MRT3847_51272C.1
ctagtntcttacaagcctctactatactgcttcnccttctgctctagaaaattcagtgctgnaacatggnttcggctactctctctgtagccaaaccagcccttcaggcaaatgggaaaggcttctctgaattctctggcctccgaagctcatcaggcttccttccctttctaganaatcttcagaggatttccttctgtccatgccttcccaganntctgnnnaccnaancagtggaggntacaanannggtgtgacagaanc

SEQ ID NO: 88886 - DNA, 438 bp, Glycine max
  Clone ID: PAT_MRT3847_51273C.1
cacaaacaggcacatatcgtaataactacagcacacagcatcttttgctatgtagctgcatcaagtatgcagaaaattagcaaagaaactgattagctttcatgctgaatccatattgggctttgagaagaagctctttggaacgtgtttgtggtgttgttaaagcaaactttcaaaagccattgtatattagttgaatactctctttagaaacaagggttttagcatgataattatggttcatgtaaaactacatactataagatttcacatgttgagcctgaagtttgaatattcgaacacattattttcctatcactatttctcttctttgtcttccccactcaaatcatttaatctgagtatatttagtccacttgagttgctgaataagacaattaaaaagaggggtaaaagaaacttcaaaagaggggaaag

SEQ ID NO: 88887 - DNA, 138 bp, Glycine max
  Clone ID: PAT_MRT3847_51274C.1
cacgcgtaaatcgaaatccggtccaaggggaaaccataattacaacggcaatggtgccgggaaccttaattggaggggcttcaaatgccaaaacaagttcaaagcacgcacaaattggccggatgaaaacaactgcgg

SEQ ID NO: 88888 - DNA, 240 bp, Glycine max
  Clone ID: PAT_MRT3847_51275C.1
cactctcacatggggttttctcagaacgccccaggaatctgttctgtgccctaagcaccagccttttgctgtgctagcgcacaagcgtgatcactggctcacgactcagacagcgccacctcccagctgcttctctgttcggagagcagcagcacctgcttcgatgatgagtgtggcatcgttgtgatgccgcagatgggtcaactgcagactctcgcatcagtgctgggcacaccatga

SEQ ID NO: 88889 - DNA, 204 bp, Glycine max
  Clone ID: PAT_MRT3847_51276C.1
ataaagtgagatataaggcttgcacgatgcttttaaagagcctaccattttcgaaactagtcaaacagttatccaagtcaaccataagaactctatatggtcattcccaactctgtttttgtactgttaatattaaactagcggcataactacttgttccatcttctttctagttcaacttctctcttagtcttcctttaaaaa

SEQ ID NO: 88890 - DNA, 401 bp, Glycine max
  Clone ID: PAT_MRT3847_51277C.1
caacttgttgtaccaggttcactacaaacaagtcaatttctgtcctacaatttatacgacaaggacaaatgttcaaacgccaatgtcacaactagggggaccaggaacactacatatcattaagtttcagccatggagactattcatcctcctggttacgcaatctggccgttccattggtcacaacaacataaagctgcgcggctctctcgaggatatcgtttctctttctagaggatatattgggggcaatctcaacacaatacgccctgtggtgcatcatgagccgtttcaaatccttcacattgcgaacaacagagggcttgaaaccattcataacattttgtcgggacaacttgtctgaagcaaaacctatgtacggcatgaaagtgcgtcccttg

SEQ ID NO: 88891 - DNA, 320 bp, Glycine max
  Clone ID: PAT_MRT3847_51278C.1
acgcatgaatcttacattaatgctactcaaatattagtatcttcacatttccatgacgtcaaggcgatcacatgtatggcatggaccattacatatacttaacgactattatcctatgactgatccaataacctataggcaccgtctataatctgagcattcatccatatttgaagcacacgaatcgagacctaaaccggagagagctataacgctcttcaagcctgtcgtacattccccttgctcattctctctcactctcgattctgaccttatgaaaagaactaggtaacaatcaatatctgtggtccaaacaatgt

SEQ ID NO: 88892 - DNA, 377 bp, Glycine max
  Clone ID: PAT_MRT3847_51279C.1
tttgtttttttttttgaatatagaactatgatggtatacgcacatctttatcgaatttatatcaaatgccacagagtaatatctgacattatttctcgagtctaactctaaaaacacgaactagaataatataacaaagagtacgcaaaattatatcggatatagctggtgtttcaggacatggatttcctgcactcgtggggagtactttagaccagactggttgtcatgtccataggtgtttgacttcaaaatccgagtgacgcttcaggcttgctgtcttactcgtctgattgagctggctacacctcatgtacgttgctgctaaacggaagcattccaaacgtactgcatcagactaagccgttcttgtttga

SEQ ID NO: 88893 - DNA, 396 bp, Glycine max
  Clone ID: PAT_MRT3847_5127C.1
gcccgtcttcttgaacttggttacaaacaacaactcaagcgtgatctttcgtaagagccatttcaaatttttccctctcgatttaccgttttatcagtgctgactgcgctcaccaccctatccaacactgggttgaactacggtggccccgtttcaatgcattatgggggtctctattattggagtgccaaacttgctggccctacatgggcacccttagcttcctggattactggctgggtcaatattattggttagtgggcaggatcaacaagcgttaatttttcacttgcacatctaattcagggatatcattcttaggacagctggaaactatctggaatgctttaggcgttcgtctgcttatgattctcattacatctgatgcaaccgcaa

SEQ ID NO: 88894 - DNA, 293 bp, Glycine max
  Clone ID: PAT_MRT3847_51280C.1
ccacacacctcagccttcacaccgtcaccatgggtaaggaaaagactcacatcaacgtcgtcgtcatcggccacgtcgactctggcaagtcgaccaccaccggtcaccttatctacaagtgcggtggtatcgacaagcgtaccatcgagaagttcgagaaggaagcccgtgtgctcggcaagggttccttcaagtacgcctgggtccttgacaagctcaaggctgagcgttagcgttgtatcaccatcgatatcgcccctttggaagttcgagaccccgaagtactattttac

SEQ ID NO: 88895 - DNA, 493 bp, Glycine max
  Clone ID: PAT_MRT3847_51281C.1
cgttcatttcagaaccataaataactcccacacgctcctatatgcgctccttgaccgtctctctctcccacgatcacaacatcagtcggcatccaatgctaaacgccctatctgctatggcagaccatgatgactgccacttaatgtttttgaagctgaatacaatgaggacacaccgcatcatagtttttaagattgatgagcaacaaaagcagctcattaaggagaagcttgatgagccagccctaggctatcatgattacactgtcagccttcctgctgataactgacggtatgctgtttatgatcctgagtatctgactgaagggcatgttcctaaaagcagaacacttcatcattgcatggtcccgtgacacatcaaggttgaggagcagagatgatctatgcaacctgccaagacagattcaagagggagctggatggaattcaagacgagctgcaagcaactgatcctactgagatatgtcttgat

SEQ ID NO: 88896 - DNA, 568 bp, Glycine max
  Clone ID: PAT_MRT3847_51282C.1
caaaggtgacagcgtcgtcgtcgtcgagtccgacaaggccgacatggacgtcgagacgttctacaatggcatcctcgccgtcatcgttgtcgccgagggccagaccgcccccgtcggtgcccccatcggcctccttgcggagaccgaggccgaagttgccgaggccatggcagccgccaattctgctccactcccctttttagcttccgatacttctccggcgccggcaccggcgccggaagtctctgattcaccacgtaaggcggttgcaacaccgtatgccaagaagctcgcgaagcagcacaaagtgaacataggttcggttgtcgggactggtccgtttggaagagtcactcctgctgacgtggagaaggccgccggtattttgccggcggagagcaatgtagctccggcggcggtggattcggctccaccgaaagctgctgctgcggctccggcggcatcctcggcttcaattccaggttctagtgttgtgggctttacgacaatgcaatctgcggttgcgaagaacatggtggagagtctctctgtgccgacgttccgtgtt

SEQ ID NO: 88897 - DNA, 222 bp, Glycine max
  Clone ID: PAT_MRT3847_51283C.1
gagagataaaaaaagcattattaatgtgccacaatggcgtataacacactccaaactaacgttcacgggatcttattaccaaccccctaagcaataaaaataataagaggttgagaccacacctactacgatacacaacgtgcttctcactccccctcagagacggccgacacggggaaagggagcatactactagacgttgatgcaagagagtaaaccatc

SEQ ID NO: 88898 - DNA, 332 bp, Glycine max
  Clone ID: PAT_MRT3847_51284C.1
gatcgcatgacatagcactcaccctcattaccaaggcgagggcatagccaaaacctactttcgaaggctctgattttcctaatggctccggcagaggcagataagaagccaccagagaagaagccagctgcggaaaaagcaccgacggataagaatccgaaagcacgacaagaagatctcggatgaaggaaggcgcgagaagaaaaagacgcgcacgaagaagagcgtggagacctacaagatctacatcgtcaaggtcctgacgcaggttcaccccgacattggtatcaccagcaaggacatgggcatcatgaacagcttcatcatcgaca

SEQ ID NO: 88899 - DNA, 256 bp, Glycine max
  unsure (1)..(256): unsure at all n locations
  Clone ID: PAT_MRT3847_51285C.1
tctgatctcactcaccattcacaaanntgnttntctgntctcttatttcccttgcncaaggcgaagangaagaagatgccttcntcagaatcatcaanaggcttntccgacaccatttgtntgaccggcgatggtggcttcatcntctctnggntggtcaaactcctcttggagaaaggctanactgtgnagacgaagactnaganacncagatgatnnnaagantgggnattaanagagtttgaaggagttcccc

SEQ ID NO: 88900 - DNA, 747 bp, Glycine max
  unsure (1)..(747): unsure at all n locations
  Clone ID: PAT_MRT3847_51286C.1
gaggactgagctgtgtggttagaanntcaggtaattagtcagaaatcacaagtggtgatctactcgcttaagcaagacatgttgtgtgcttaagcgagccaagacagatggaagttgagaagtcactgacatttttcactcaagcgaccctctttagtcacttaagcaagaggaattaagatctaaaatgatggaatttggctcgcttaaacgcaacattttgggcgcttaagcgagctcaaacagagaacccagttaactccaatgaaggttcttgcttaagtccactacaggaaggcttaaacgaggacaaccaagtcaggacacacatgaaggcctcacttaagtgcaacattttggacacttaagcgagggaagacattggacaacaaaagttgaaagaatgagccttgcttaagtaagggtgtcgcgataggcccaagtccatatcagtttataaaaattgttgtgctaatgagagaggatctcaacacgaattagagcaattgttcttcgagagagagtagatcattcttaggcttttagctcgctattcttatgctttgtataaattcttccaaggattgtaatcatgctatgagcaattaatctcctcatctgttgggattagaatgcctgacctaatttcatgtaattctcccttttaatataattgtttatgtgtttattaaaaaaaannnnnaaaaaaaaaaaaataataaagaaataaaaaagggcgggccccga

SEQ ID NO: 88901 - DNA, 362 bp, Glycine max
  Clone ID: PAT_MRT3847_51287C.1
cgaccccccccgccttcgtctttttgggaagagacagcaacatatagggggattgatgaagaggggcctgcttgttaacaatgacaacgggtattgcaacgaaggcaaagaggatgggaaaaaataagaacctgaaaccacaggttgttggggggctttaactaataactgaggggaagtcgaaagaggggaaggagatgcccgtatctaatattaggggcggggaaattcatggtgattaaatacccctaagggcgccagaagaaaatctggtttctagagcaagggagttcaaaactgcaacggtgaagaaaaatagcaaggcttaagctactggaatggatgagggagctatagaaatt

SEQ ID NO: 88902 - DNA, 628 bp, Glycine max
  unsure (1)..(628): unsure at all n locations
  Clone ID: PAT_MRT3847_51288C.1
ttttttccaaactacagacaactattaaataaagataactagaacagggtaatttgataaagatagtgcacacaccgaangaggacacactacatcattttccaaatgaaaggataaaaaaagagattttttttctggtttttttgctggggagtttataagggagaaagggttatagttacataattggatggtttttataaatgtgttgctaaggaatattggaaggagatagggaacccaggtttgaaaactttgaggttagaaagatgaagataaaaaaaaagtcttttttttggtttttttttggggggagtttatatgctactagaaagggtagagttacataattggatggtttttataaatgtgttgctaaggaatattggaaggagagagagtacccagggttgaaaagtttgagattacaacgaggttgtgtgcaattgtgggattaggaagtggaacatatgggattatgaagagattaatgggagatgatgatgatcgaagtggatggggtgtgtctgttgttggtgaggttggaatggaatcggagaaaacttgtgacaagggttgtgatgcaacttggaagttggagaaaagggaaaagctagcttgggctcgt

SEQ ID NO: 88903 - DNA, 284 bp, Glycine max
  Clone ID: PAT_MRT3847_51289C.1
atcagaactagtatcataatacggtttcctctgcttgggtcgccgggatacagtgatcctgacatcactttgctgtcggataatgagtaatagaggataagaataccccgatctctttaacaggatcagagttctactacgttctcgttatgaggcatcattgactcaatagtctcatccagaggctgcacagcttcacttcagaggatgagaaactatcgaaagctgcagagcatgaagtattattcaagggaatgcacaatgcttctcaggcactatttgtc

SEQ ID NO: 88904 - DNA, 213 bp, Glycine max
  Clone ID: PAT_MRT3847_5128C.1
ggacaagcttaggtgtgaagttggaatcaacccatactccatggaatggactggcttggccaatagattactgagtaagggcaatgatattctgtgctgcgattatgctagatttgatggtgcgattaccaagcaagatatgagcaagagggcagaaatgataaacagtctttgtggtggcgatgagaaattgatgcgagaaaagacgcacct

SEQ ID NO: 88905 - DNA, 728 bp, Glycine max
  unsure (1)..(728): unsure at all n locations
  Clone ID: PAT_MRT3847_51290C.1
ttcgtccgttcacgcgtccgttgatctacagattatagaaagcaaaccaacattactagctagtggagtatttaattatacttcacatgctcccttataatttttggaaattgatatataccaaagccgtaagatttttcccatctttctcgtgatatagttcttctggctcacaagccaataaaggcaaccacaaccttcaacttcaacagcacttgatcacattcactgtctagtgatccaccttcacttcccgtttccaataatttaaatcacactctaatcagttctcaggattcctgtttgcatcatattcacaattggaacttcaaagtacaagcttttgagatttggaggttagctctttgcaaggaattgaattgttgcacctcattaccatctgtgacatctgaaattcaggtttcttagtattatttgagaccaacacaatggtgtctgcttgtgtgaccttgaaagccaatacccatttagtaaaatcgagaaaagacaatacttttcgtcaagatagtggttttttaggtgagagaatcaaagggggtctgaattacagtccctggatcattaaccaattggcctcaagtttgagaacccaagagagggtgaagaaggccaaacctggtgttgtttctgctgttcttacatcaagtaacaccaaagaatcagtggcttttcaaatgccatcgtttctcagaagaaaggcntgatcc

SEQ ID NO: 88906 - DNA, 129 bp, Glycine max
  Clone ID: PAT_MRT3847_51291C.1
ccgaactgtataataaaacaatcaggcgttatttcaacaccaacgcttcctgattccaaatataaaggcactcttatatgaacaacattaaattccaattacagacctgccaatccttgatcgagacca

SEQ ID NO: 88907 - DNA, 287 bp, Glycine max
  Clone ID: PAT_MRT3847_51292C.1
gcttctgaaagaacatctggattccgcctcaggggacatattttatgatgctagtgaagatttttctggcactgtatctgttgatgatggtgatgataatatctgcagaattttgactgttgaagatagtttgggtaccaatgttggagtatatactgatgatacagaagaaacaacagacatgctacatgcacctcctccttctggaccgaataagagaagaaaattaatgaattcctttagtgctggagttgaagttgatagctactcgacagctgaaattgata

SEQ ID NO: 88908 - DNA, 1223 bp, Glycine max
  unsure (1)..(1223): unsure at all n locations
  Clone ID: PAT_MRT3847_51293C.1
attatagaaagcaaaccaacattactagctagtggagtatttaattatacttcacatgctcccttataatttttggaaattgatatataccaaagccgtaagatttttcccatctttctcgtgatatagttcttctggctcacaagccaataaaggcaaccacaaccttcaacttcaacagcacttgatcacattcactgtctagtgatccaccttcacttcccgtttccaataatttaaatcacactctaatcagttctcaggattcctgtttgcatcatattcacaagttagttcaattctggttcttcattgttcatacttcatactctaactgttcaccttaaatttcctgtccaagtaacttgggtgatgtagagtttttttatttcttcaccttcctgggttttacttttcatattcctacttcatttggggtagtttaaaattggaacttcaaagtacaagcttttgagatttggaggttagctctttgcaaggaattgaattgttgcacctcattaccatctgtgacatctgaaattcaggtttcttagtattatttgagaccaacacaatggtgtctgcttgtgtgaccttgaaagccaatacccatttagtaaaatcgagaaaagacaatacttttcgtcaagatagtggttttttaggtgagagaatcaaagggggtctgaattacagtccctggatcattaaccaattggcctcaagtttgagaacccaagagagggtgaagaaggccaaacctggtgttgtttctgctgttcttacatcaagtaacaccaaagaatcagtggcttttcaaatgccatcgtttctcagaagaaaggctgatccaaaaaatgttgtttccatcatattgggagggggacctgggattcaactctttcctcttaccaagcgagctgccacacctgctgttcctgttggtggatgctacaggcttatagacatcccaatgagcaattgcatcaacagtggccttaacaaaatatttgtactgacccaattcaactctgcatccctcaatcgtcacatttcccgcacctattttggaaacggaatcaactttggggatggatgtgtggaggttctggcggctacgcanacacaaggagaaactggaaagaactggttccaaggaacagcagatgctgtgaggcaatttacatgggtatttgaggatgccaagcacacaaacattg

SEQ ID NO: 88909 - DNA, 475 bp, Glycine max
  Clone ID: PAT_MRT3847_51294C.1
gccccgcgtccgctcatatgtctcggaagagtgcttcttaagaggaacagaattcttgttctggatgaagctactgcttccattgattctgccacagatgttattcttcaacaagtcatcagacaagaattttcagaatgcacagttataacggtggctcacagagttccaactgtaatagacagtgacatggtcatggtcctatcctatgggaaagtggtggagtatgacaagccttcaaagctcatgggtacgaactcttcattctccatgctggtagctgaatattggtccaactgcaataggaattcgctcccaaaagattagcatgtttcagcattagcactgaggagaagcaatataatgagagctagaatgtaaagttcaataattttctttacacgtatgaaactcaattattattttttattggttacatgagctaaaaatgtatgaaactcaattattatttttt

SEQ ID NO: 88910 - DNA, 410 bp, Glycine max
  Clone ID: PAT_MRT3847_51295C.1
tcggttttcggctcgagcttttatggggggccgccattccttataaatccctatactatgatataaaagataattgtaaaaataaaagaaggatctaaggaaaatacctaacatactttagaatgaatcaaaaagaatattaacttcaaataaattttacatagaaaaaagacttaaaaagggggggggggaatgccagatctaaaaacatatcttctccgagccaccagaagtaagtactctatagttcggggctatgacagctctcttgatagagaccaaccgatttttttccagatgcattgatattcccttttttttcattctagttatggacacggaaaggggtgaagaagactatacacccaataaactgtcaaagatatggaatcaatatgtaatgaacctcc

SEQ ID NO: 88911 - DNA, 258 bp, Glycine max
  Clone ID: PAT_MRT3847_51296C.1
tacggctgcgagaagacgacagaagggaccgtgctgtcatttgatttaaatttggatttagaaaagagtaaaagggaattaggtaacaagttttgttcatgaagtgataactaaaaggcactccttttgggtacggaatgtatcatactaaattactaatataatgtgtataaagctttcattgccaaccaatcagattggttagtgagcttccctagatggagtacattacaattgttaaatgtaaagtgtagtata

SEQ ID NO: 88912 - DNA, 121 bp, Glycine max
  Clone ID: PAT_MRT3847_51297C.1
gctcaactcgatagaggtatgtggacctaataatggatttgaaaagtgaacatctgagcggacaaagcaaactaaacgggattcgagcttgctcattgacaaacccaaacactctacagct

SEQ ID NO: 88913 - DNA, 148 bp, Glycine max
  unsure (1)..(148): unsure at all n locations
  Clone ID: PAT_MRT3847_51298C.1
gagataccagcaaganaagagacacagaagagttgagattccctttgaaganaagatggcatcccatangcaacgctanggagctggtccaactangggccgaactgaggananggcgacccagacgatgggcaatattggagagnag

SEQ ID NO: 88914 - DNA, 274 bp, Glycine max
  Clone ID: PAT_MRT3847_51299C.1
gcaaatattaattaagaccctcacctgctagactataaccctagaagtctagagctccgacaccttcgacaacttatacgctaacatccatgacacggacggtatacccccagaccatcctaggctgatttttgatggcaagcatctcaaagaccgacctacccttgctgactacatcatctacaatgagttatctctcctcttagtgttgcgtcttcgatgaggactgcagatcttcatcaataccctcacgggtgagactattaccctccag

SEQ ID NO: 88915 - DNA, 351 bp, Glycine max
  Clone ID: PAT_MRT3847_5129C.1
tcgcttacgcgtgcgctttcgacgacgaatgtgtcatatatatatgcgagggacaccgttggtggtacaatctactgaccgcgctattttggtatggtctgcacacagccacatatatatcgggcgctgagacgagctgccgcgtcaatacacccatctacgcatggtcaagtaatctaacctattttttcgaactgtagcatgtgcttagtgcatgctgctgaggtgcggagatttgggaggacaggctctcattgtattgcactgagccagagagcgatgatacctaactctttatgcattcttgctatgatctactggggatagctgagatgtgcatggaggggagat

SEQ ID NO: 88916 - DNA, 478 bp, Glycine max
  Clone ID: PAT_MRT3847_512C.1
gggagccggagcggcagctggcagcgttctctccgcaggtcggcaccatgcgccctgcagccctgcgcggggccctgctgggctgcctctgcctggcgttgctttgcctgggcggtgcggacaagcgcctgcgtgacaaccatgagtggaaaaaactaattatggttcagcactggcctgagacagtatgcgaggcccgataaaagtgaaggatgtaatagatcgtggcccttcaatttagaagagattaaggtattgacttttaattatatttctactgcagagtgttgacctagattaactcttttcttcacaagcgtaccttcaaagtcatctttaaaattaaggggtcatgaatgtattcaccaggattgagcccttgctgctgttttagtaagtatagttatctcgaccccacaaattacaccaattgaccttttccctctcctcccctcccctgccctgtgcccaagccact

SEQ ID NO: 88917 - DNA, 262 bp, Glycine max
  Clone ID: PAT_MRT3847_51300C.1
gagaatccgaggcgaagagaagagaaaaattaagatggaggggaaggagcaggatgtgtcgctgggagcgaacaagttcccggagagacagccgtttgggacggcggcgcagagccaagacgacggcaaggactaccaggagccggcgccgacaatattggtttacccgtcgagattgtcgcactgaacgttttcaagcgcggggttatcgcatctaatgccaactttcccgttccaagaaatcatggacttaaccgtcatg

SEQ ID NO: 88918 - DNA, 211 bp, Glycine max
  Clone ID: PAT_MRT3847_51301C.1
gggggaccttttttaaggaaacaccggccttcccaacaagacaggaagaagatcccaattgcttcctacttcatggggaactatttcttcagggaaagaaaatcactctatgggctggccacagacttctcgaatcattaaatgtaccactctaaggtgatgcgctgaacactttcccataagatataggacttcatgtgagatgtaaact

SEQ ID NO: 88919 - DNA, 517 bp, Glycine max
  Clone ID: PAT_MRT3847_51302C.1
ccacgcgtccggtcgtcttagttaagttactgattgcatgatgacaaagatgttttgattgtggtaattaggattaaatcattgcacttcaaggtttgactaattttcaaatactttacaaagcatagaccatagagaatgtgttgtaatgttataactcctgttgatcttcagccataagttcctatcattgatccaacatgtccttatccctttttcacttcttttgcttttatgtgttgacagaggctaaaatcatatatgcatgggttcaatatgtagctgggtctatccaaacatttttggtgcttgaataacgtgcagctgaatgctggaagctttataattatttttgtaaccaatttgaacgcaatagaacaattctgattgaatagcaccagcgtgctgattatcatcatattagtgctcaagctagaagggtttttatcggcagcatttaattcacaggtggagcgggaaacttttcgcatggacctttaagcaataatgcaatgca

SEQ ID NO: 88920 - DNA, 368 bp, Glycine max
  Clone ID: PAT_MRT3847_51303C.1
agaccacgtccataacctgggcaaaaaatccttactattaggcacactgaacatggctggcaccatcttttgccgaccaaaagattgggactactcactatgatgcgtatgcccatgtaaaacaagacccaaaagatcgcctgagccttacttttgagaggattgctggtgtattaagttctatgcacactgaaaaacatgggccaccacacacctgtccgaatctcaaaagcggtgcttatccaagcgaggtgaaaggcagaattgcttgctaatcctaacataccactgtgatttctttttcacactgtgaacgtttgtgatgtccacaaactccggcttgtgggaggcaccaccaaccgaatatg

SEQ ID NO: 88921 - DNA, 275 bp, Glycine max
  Clone ID: PAT_MRT3847_51304C.1
aattaatctaaagcaagcaatgtttatcaacctagtgtcacacaacacaagatgcatgcactagcctttccctctatcccctttgttccttcatagattgttcttgaaccttagagttgtttcatgttttcatttgaagatttaacctttccatcttgattgtccctttcaacctttccaaggccatttaggtatgaagatggtcctttaataagtggtgttgttgatgcgtgaaggtggcttgcaatgttcattgttcgatgacaatgatgaga

SEQ ID NO: 88922 - DNA, 230 bp, Glycine max
  Clone ID: PAT_MRT3847_51305C.1
aaaaattattttttccatcaaacccaaccaaacctttcccccccttttttctccaaatccccatcttcctttacttcttaactcttaccaaaacccacaattaaccttttttcacactctttcataaatcaccctttccttaacacaaactccaactttaaagtaattcttctccaccccaaaggctcctgcccttaccaatatctcataaaacttttctttatacccca

SEQ ID NO: 88923 - DNA, 344 bp, Glycine max
  unsure (1)..(344): unsure at all n locations
  Clone ID: PAT_MRT3847_51306C.1
gcatgcacgcctactttagatgataatttggctgaatgtcaatactttatcntttaacgaaatataggacgctataaatgtggtatatacgatattggaatcaacgagttaatactataaagggctattctgtaaccacaggaaatgagatcggaattcctaggcgaattccaagtccacattttcaagtaataaggaggccaacatgtacatatatgaaatggaattatgtgttctgttattaggcctatcctgtaactaatggaaatgatatctgtaatcctcagagaattccaattactcattttcaagacataaggaagccaaaatgttcatatattaat

SEQ ID NO: 88924 - DNA, 147 bp, Glycine max
  unsure (1)..(147): unsure at all n locations
  Clone ID: PAT_MRT3847_51307C.1
cttncnctctctgaagcaagtgcagagcaattaataactcaagcttngnntcactccgtgncngtgatgatcgtanagnnattgactnttgagtgatgggtnngngctctacggtccccagaaacgcnaacgaagacannaagctca

SEQ ID NO: 88925 - DNA, 814 bp, Glycine max
  Clone ID: PAT_MRT3847_51308C.1
ggttttagtcttttttattttaattaattcatttaatttaatttctcaatataaatattattttttaaaaatatattaattaagggttggatttgaagaggtgtgagaagaagctcgcgggccacgcgtccggaaagttttatggttaaaccacaatatcttttttttttttttttcttcttcttcttctttctcgtagcgtatggaaaaccaccaaaatcacaaggtagaatcagaaccggacatagagaagaaccaccatcaccgccaccaacagcagcagcagcaacaacaccgtaacgaagtgtggggcacgtgggaggagctgttgctagcgtgcgccgtgaaccgccatggcttcaaggactgggacgccgtcgccatggaggtccagtcgcgcaccacgcgcctcctcgccaccgcgcaccactgcgagcagaaatttgacgatctcagccgccgattcgccgaccaatgcaacgacgacgttccgccgtcgcgccagaacggcggcgccgctgctatctccgatcacgtcccctggctcgacgaattgcgaaaactccgcgtcgccgagctccgccgcgaggtccaacgcagcgacgtttccatcctgtcgttgcagttggaggtgaagaggttagaggaggagaaaacgaaggagaaagacggaaaggacgacaagaaaccagatctggcggtttccggcgagttgcggccggaaaacgacaaaaccggcggggaagttgacgaggcttgaccggcgaattctgaaccggaggagagaaccgcgaacaacacagacaagacgttg

SEQ ID NO: 88926 - DNA, 540 bp, Glycine max
  Clone ID: PAT_MRT3847_51309C.1
gtccattttttagacaaaaactgaaagttaccaaatagatttgtttcttacactcaactgaaattttctcacaggaaattcaatcagggtgggaaattcatgtagtcagtatttggtagcaatttatatttttaaatcaaatcaatgttgtacttgcactgcaaaataattaggttcaccttattcatattcttaccagtagagtgtgtttaataactgtgaaaaccccgcagaaggagaagcgggataaactatttaatgccaatcttctaatcttttctggtaatcctgcctgtcacactgctggagcataaaaaatgtacatgaagtgaattttctgcaatctgcggaaggaaaatgtcaatgaaaaatatttactggaatgccaattttgcttgctctggaatattttactgtgccttttgttttatataatttcaggattatgcacactggactgcaatggatcccctaccctcctatggtcgaggtatagatgttcctgttgggagataccgcaagttgatttatggacagaac

SEQ ID NO: 88927 - DNA, 298 bp, Glycine max
  Clone ID: PAT_MRT3847_5130C.1
gacagcgtttaacaaagcttagagaaacctccaggagactgctatcatggcagagaagcccaagctccactacttcaatgcacggggcagaatggagtccacccggtggctcctggctgcagctggagtagagtttgaagagcaatttataaaatctgcagaagatttggacaagttaagaacatgatggatatttgatgttccagcaagtgccaatggttgagcatgatgggatgaagctggtgcagaccagagccattctcaactacattgccagcaaatacaacctcttgggaaa

SEQ ID NO: 88928 - DNA, 304 bp, Glycine max
  Clone ID: PAT_MRT3847_51310C.1
aaaaaaaaagggccaattttttttttttttaaagggggaaaactttgttacaaaaagcaggaaactgatcaaccaagcttaattttaatttttaattataacaatgggggcgggggcataaataattattttgggaaaactcccctccattttaaaaaagttggaaacattttttgctaaactgggtgggccatccaaggggcgagtttctcaatgggtcttttggttcccaagagcttttaaactgaagctggccccaaaaaaaaccttagttgggagcaaataaagccccattttttaaagg

SEQ ID NO: 88929 - DNA, 272 bp, Glycine max
  Clone ID: PAT_MRT3847_51311C.1
tcaatactgtgccggttcgtgacactactctactttggggacaagcaaaacattcccggttgcacaagatcttacagggggcgccgcttttaggatccagcatcctttcctagacgtgcgcggcctagatcacttgtggtacgcgccctgtacataaacgtgagggggaatggcactgccgcaatggagtaaccccggcggttctcagctatataccccttgtttagattgacttttttacatggggggggatgtggcaccaaagttccttc

SEQ ID NO: 88930 - DNA, 595 bp, Glycine max
  Clone ID: PAT_MRT3847_51312C.1
caaaaattaagctcattgtccttatacgtgatgcttcggtcgggtgcggatattaatggatttctcttttctaacccacatccgtccgaattatctgaatttaatcaatttttttattaaatcgaacccaaagcccaaacccgaccattcgaaaacattgtttttaagctgggttactcggttttcagtcaggtcagtgatttttgctcactcgtagtatatactatatatttgtgtttatggttcttccactttgacaattattgttctacaactccccttttttattgtgtcatataataatcataaatgatgaatctactttccatgattattagttattctcggcacgtcctctccatagaccattagtaaaactagatatcaagcttcataggtaagtattagccaaacactgacagcaggttggcaataatgtttttttctctggggaattagcatgtttgtcaagtacatggcatgaagattttgtataatcttcctcatttaacctactgaagaatctgtttctatattacttgtttttataatatactgatcacaaggtggaacctctatttgatttttcatttgt

SEQ ID NO: 88931 - DNA, 463 bp, Glycine max
  Clone ID: PAT_MRT3847_51313C.1
caaccccaaacccccggccctccccacgccccaaataacaccctcccgagggaacaaccccacggggggcccgtgaaaaaaacccggggggcacaaaaaaccagcgcccccaacaagaagcgccagaccgccccccgcaaccaacacaacacgcacgccgcggccaccacgaaagccccgaaaccacagagcgaggccgaggacaaaccccacaacaagcgcaccggaagcgcccacgcgcgggacaccaacccacacacaaacagccgccacaagggcaacccgcaacacacacccaaccgacacgagaggcactggctggaacaacctcaaaccccaccttcaggaaaaggaaaaaaaggcgcccaccgaagccaccccccaccaagacaaagccaacacagcacaggccgacaccgaccagaaagggccccacggccaagactgggccacccggaaacag

SEQ ID NO: 88932 - DNA, 128 bp, Glycine max
  unsure (1)..(128): unsure at all n locations
  Clone ID: PAT_MRT3847_51314C.1
atgataggggcgtatctgagggtaaacaaattgtttatcgaatataatgaggctcaaccagacagggggnattcancctatctcgaattgaaccttgacgaagtggaaccatgcatctctggacccag

SEQ ID NO: 88933 - DNA, 1065 bp, Glycine max
  unsure (1)..(1065): unsure at all n locations
  Clone ID: PAT_MRT3847_51315C.1
gcgtcaaacttattaccatctttccgcgttctgagccacgcgtccgtacggctgcgaccttcagtgagtaggggagagactttggtctcatgaacctgcagtgactagaacctgcttctttgcctcctttcaagaagggtttacactatagttagtttgtagtgtagtgtgtgtgataatagtaacttcacttcaaggacattatccacttgaggtttgtttgtaactgataagcagtaattgaaaacatgaagaaggtttctggcttctttgttttgctcttggtagttggagcaactctgtcgttccttaacttcttaagtcccacttgtgcctcatggttttctgatttgattgctaccaactgtggtgataaagctacactgattgcagtaagcaggaaacttaaggaaagtgacagtagtactattaaaagcagatctaacaataagggtgatataggtcaggtgactctgaatgattacaatcccattgatccagtgccaagttcatcaaaggcgtctattaatccaggacctattgagcatggaacccctcttaatccatatattatcccaaaaccttcaccccctaatcatcctaagcctggagattctaactaacttgatgttcaagctagtgactatgctcaaaagaggaatgctattcatacactctttttaacatatttcctattatgggcaacaagaaattgttcaaaagtgtgtgttggtagtagtactttttttggtagcattcctcatgctgaaaatgaagattgtggacttcagttttcacacgttgtttagtcagcttttttgtacattgttatgctcgtattctgtttgacagactctaatcctagttttctcatgtgctagttgtgaaaaaaaaaaaaaaaaaaaaaaaaaaaaagcgggcctttaggcatcctctgtagtggccaatgtacgtactaagaaggatcatgcggatccctatgtttgttagtttgtgtttgtgcaacttcagctaatgtttatttttccttctcttttgatctttcttccttataaggtnnnatta

SEQ ID NO: 88934 - DNA, 471 bp, Glycine max
  Clone ID: PAT_MRT3847_51316C.1
aggaagacattccgcgtttgcgggaggaggatcgagcagaaagttgctatctgctgtttttggatcaattgaacagacagaaacagaaggatcaatcctcgcagccatcagttttgaggacaataattttatgccattggaaagaaattttaatatcaggattctttgcattgcttaaggtagttgctctgtcttcaggacctcttcttttgaattcttttatattggttgctgagggtaacgagagtttcaaatatgagggttttgtgttggccatatcacttttctttacaaaaaacatagaatccttatcacaaaggcaatggtacttccgctgcagactcattggtgtgaaagttaggtcgttgctaactgcagccatttatagaaaacaattgaggttatccaattctgctagattgatgcactctggtggtgagataatgaattatgtgactgtggatgcttata

SEQ ID NO: 88935 - DNA, 260 bp, Glycine max
  unsure (1)..(260): unsure at all n locations
  Clone ID: PAT_MRT3847_51317C.1
aaaagcccaccgctgtattgaangcattgcaaaactattangaagcttacaatgcanatgtgcatatngggcatacatatcttgagtgcangggncacagacgagtatgaatcagctagaaggaangctgcttcttttataaatgctatcgattncaganagattgtattcacanaaaatgctnctgangctatcaatcttgntgcttattcttgggggttgtcaaatttaaaacctgacgatgagatcatacttacagg

SEQ ID NO: 88936 - DNA, 1506 bp, Glycine max
  Clone ID: PAT_MRT3847_51318C.1
cttgatcatggtcacgatgtaaccttaactgataaaaccaacacaaccacacaactcaactccatctccacgctttctcaactgagtcttctctgcaacttcttctataaaaaaccatctttgttttgtttcttcacttgtttcctcgtccaccttctgacttctgagtaagtcgtcttcttcagcgagacacgatccagaaattgatgaaggcattcataatgttaaactctactcctacaaacaactaagaaatgccactgaaaagtttagtccagccaataaaattggagagggtggttttggttctgtctacaagggacggcttaaagatggaaaagttgctgcaataaaagttctttcagctgaatcaagacaaggggtgaaggaattcttgacagagattaatgtgatctccgagatagagcatgaaaatttggtcaagttatatggttgctgtgtggaaaaaaataacagaatattagtctacaattaccttgagaacaacagcctatcacaaactcttctaggtggaggtcacaatagtctctactttgattggggaactcgatgtaaaatatgcattggggttgcacgtgggcttgcctatcttcatgaagaagtgaggcctcatattgttcatagggatataaaagcaagcaatatcctccttgacaaagatcttacacccaagatttcagattttggtcttgcaaagcttattccagcaaacatgactcatgtcagcacacgtgtagcaggaacattaggttatttggcaccagagtatgcgataggggggaagctaacaaggaaagcagacatttacagctttggcgtcctccttgcggaaattatcagcggaagatgtaacataaactcacgattaccaatagaagaacaatttcttctggagaggacatgggacctttatgagcgaaaggaattggttgaactggtggatatatcactaaacggggaattcgatgctgagcaggcttgtaagtttctgaagattagccttctttgcactcaagaatccccgaagctccggccatcgatgtcttctgtggtcaagatgctcactggaaaaatggatgttaatgacagtaagataacaaaacctgccttaatttctgattttatggaccttaaagttagaaggaacgaagaaagtagtattgatatgaagaattcatctatgtatacaacctcttcttcagacaaccatgatagtaccatgtcatttgccacaactactacctttgcagcaatatatgatgaaagcatgtaaacattgatcaataagatttgtcctttactaaaaaaaatgttttgatttgtttaggcatgtatctcatgtaaattttgcaaccttttagatactttttgagtgatttttttcctggatgtagtcctccatgactaggaagttgctatgtgctgttctgtaaatataaacggggtttgtgttcgatgataaatttgaagatcttttagttttct

SEQ ID NO: 88937 - DNA, 232 bp, Glycine max
  Clone ID: PAT_MRT3847_51319C.1
tgaagtcgcattaagcaatacggctcaccatgttctgaggatccgtaccttcattgccacatctaactgtcctactgcggatcacgtcgtacagattgatctttccacagctgagattcgctagatgtactgtgagacttgcagagaatataactctgcctccgattcaacgctttcttcctctattgtcaccttacaggctctgacttcgactgagaatgctcatgcttca

SEQ ID NO: 88938 - DNA, 506 bp, Glycine max
  Clone ID: PAT_MRT3847_5131C.1
acgaccacgcttctggttttcgcgatcaagctgagagccgtgcagaccagagctgaattttcccgtcggcctatggcagtccgttcaccgcttattatgagcgatcaatccccagtgctgctgtttatagaaacgttgagcacacatctcttctgccaaaggtctttgtggaggcatgaattgcacgtctgacaactataagcacaggctggcacaaattgaagttctggccctgctcaagagacataatatgttatataggcagagaacgcttacgctcagttggagcgtgactcaaggaaacacatcgggctctgcctgactgaatagcacaatgatcccttgaattacactcatgtgtctggattggcataggacctgctaatacaatgtgaaaacgacacattgacgattgtggcgacaaattgcatactgatgaacaatgatcgccgacggaggaatctgcactgtctacagaggttattgagagagaggctgtatcagga

SEQ ID NO: 88939 - DNA, 1553 bp, Glycine max
  Clone ID: PAT_MRT3847_51320C.1
ccacgcgtccgattgagtcttctctgccactacttctacaaaaaaacaaaaaaaatctttgttttgtttcttcatttgtttttcctccaccaccttctgaggtgaccttgaaagtgatttcattggaagcaattgataccagttgacatttgaagcagcttgtacttcattcagttatgacttgttttcctttattattcagcattcataatgttaaactctactcctacaaagagctaagaaatgccactgaagattttagtccagccaataaaattggagagggtggttttggttctgtctacaagggacggcttaaagatggaaaagttgctgcaataaaagttctttcagctgaatcaagacaaggggtgaaggagttcttgactgagattaatgtgatctctgagatacagcatgaaaatttggtcaagctatatggttgctgtgtggaaaaaaataacagaatattagtctacaattatgttgagaacaatagccttgcacaaacccttctaggttcaggtcacagtaatatcgtttttgattggaaaacacgatctaggatttgcattgggattgcacgtggacttgcttatcttcatgaagaagtaataccacatattgttcacagagatataaaagcaagcaatattctccttgaccaaaaccttacacccaagatttctgattttggtcttgcaaagcttattccatcatacatgactcatgtcagcacacgtgtggcaggaacaataggttatttggcaccagagtatgcaataagggggcagctgacacgtaaagcagatatttacagctttggtgtccttctcgtggagatagttagtggaagatgccacacaaattcacgattaccaataggagagcaatatcttttggaaatgacatgggaactttatcagaaaagagaattggtagggcttgtagacatatcactagatggccatttcgatgccgaggaggcatgtaagtttctgaaaattggacttctttgcactcaggacacgtcgaagctccggccgaccatgtcatctgtggtcaagatgctcacaagagaaatggatattgatgaaagtaagataacaaagccaggcttgattccagattttaacgaccttaaaatcaaagaaaaaggcagtgatattgataccaaggcttcgtcatctttctataatgcatcctctgcctcagacagccagagcaataccatgtcatatgctgcaagcacaactacaaccttcactgcgaaatatgatcaaagtttgtaatcattagttgtcaatggttttctttgatttgaaattattttatttcatttttatgaggtctcccttgcccaatgtaaatttgctacggttccatagatttgtcatttgcgtgttaatattttttttaaaactttcgtacgatgtcccgtgactaggaagttttgccgaatttacactgtcttgtaaatatgaaccgtggttataatcaaatgctgaatctgaatatcactctcatttacaagccaaaaaaaaaaaatataa

SEQ ID NO: 88940 - DNA, 2282 bp, Glycine max
  Clone ID: PAT_MRT3847_51321C.1
taagaagacagctcattgtattccaggtgcctctctgacttgtgggaattatgctgtgccttgcaaattttgattgaactggtttgccttcaccttgcgtctggtgggaagcaagactaaaagaataataatgatgctaaactgccttgtttgttaacggaaacatgaagattatcttcaggatgttattgtatattatattattttcagactattaattcatcactttcacttcttacacgaaaagatggaaagcttatcttttgctgtttatgttattaacttccattttttacctatcattcatatctgaaatttaatggtgcatgttttatttcatgtgtacgaaaaggaaagaaatagaagattcaaagcgagtacgctgtgtacgcgttggttcatggtttcatcttgatcatggtcacgatgtaaccttaactgataaaaccaacacaaccacacaactcaactccatctcccgctttctcaactgagtcttctctgcaacttcttctataaaaaaacaaaccatctttgttttgtttcttcacttgtttcctcgtccaccttctttctgaggtgaccttggaagtgatttcattagaagcaattgataccatttgacatttgaagctgacttgtacttaattcagttatgacttgttttcctttattattcagtaagtagtcgtcttcttcagcgagacacgatccagaaattgatgaaggcattcataatgttaaactctactcctacaaacaactaagaaatgccactgaaaattttagtccagccaataaaattggagagggtggttttggttctgtctacaagggacggcttaaagatggaaaagttgctgcaataaaagttctttcagctgaatcaagacaaggggtgaaggaattcttgacagagattaatgtgatctcagaaatagagcatgaaaatttggtcaagctatatggttgctgtgtggaaaaaaataacagaatattggtctacaattatcttgagaacaatagccttgcacaaacccttctaggttcaggtcacagtaatatcgtttttgattggaaaacacgatctaggatttgcattgggattgcacgtggacttgcttatcttcatgaagaagtaataccacatattgttcacagagatataaaagcaagcaatattctccttgaccaaaaccttacacccaagatttctgattttggtcttgcaaagcttattccatcatacatgactcatgtcagcacacgtgtggcaggaacaataggttatttggcaccagagtatgcaataagggggcagctgacacgtaaagcagatatttacagctttggtgtccttctcgtggagatagttagtggaagatgccacacaaattcacgattaccaataggagagcaatatcttttggaaatgacatgggaactttatcagaaaagagaattggtagggcttgtagacatatcactagatggccatttcgatgccgaggaggcatgtaagtttctgaaaattggacttctttgcactcaggaatcgccgaagctccggccatccatgtcttctgtggtcaagatgctcacaggagaaatggatgttaatgacagtaagataacaaaacctgccttaatttctgattttatggaccttaaagttagaaggaacgaagaaagtagtattgatatgaagaattcatctatgtatacaacctcttcttcagacaaccatgatagtaccatgtcatttgccacaactactacctttgcagcaatatatgatgaaagcatgtaaacattgatcaataagatttgtcctttactaaaaaaaatgttttgatttgtttaggcatgtatctcatgtaaattttgcaaccttttagatactttttgagtgatttttttcctggatgtagtcctccatgactaggaagttgctatgtgctgttctgtaaatataaacggggtttgtgttcgatgataaatttgaagatcttttcattttctatgtcgtgcatcgatcgaattaatctgtttgctatgctcctagatgtattgccgtacctttctctgttgggggaaaataaattagtttcttttgctcatctccctgctaatgagcaaaaaactttaaccttctattaagttactttcactgcaaagattgtgaccacataaccttgcatttccttttctttctgcttgccttctgctgtaaaaatatttaaccatacaacagtatataattatattgtgccttcctttac

SEQ ID NO: 88941 - DNA, 179 bp, Glycine max
  Clone ID: PAT_MRT3847_51322C.1
ggagggaaaggaaaggcccggaaatggcatgaaaatttatcaaaaggctttgtcattgggacaacaactgacaaaggctgtttttggaaccattgacacttgtgctaagaataaagccggcaaaaaggttttttgtttctagggaggcccggcaaatgtgcctccagagacgggctttt

SEQ ID NO: 88942 - DNA, 1019 bp, Glycine max
  Clone ID: PAT_MRT3847_51323C.1
tggaaacaaataactaagaatgaaagtgaaggtgatggggttcagcgtggtacccaaaatcagaaggacagcagcgtttgcttgttctccgttcgagcctgccatgatctccctcatggaccttcctgcatctacgttggccccctccacaccgcaacccaagagaccctcgaagctctttactctcaggctcgtgatgcttattacagtggagaccctttgatacttgatgacatgtttgatagagtagagttgaagcttaagtggtgtggttctaagttagttgtcacgtatcccagatgcagtatcataatgcaatgaacatatgctgaggctgagcgctctatgtctagctatccgcttctgtattcgctaccccatgccaccattttctcgcccttggctgatccgcgtgtatttttacacttttctacacaattaacatcgctagtaacaaagaatgcgaatcggaaacaacataaattagattttagagaggaggtgtaagtgtaataaacactaacttcaggaggaacgcgtgtaatttactcttatttatattatattaactgcacattttcacagttaaggtacttcaaggtttgtggaggaatgatttagcggcactaaagggttcttgtccaaattgtggagaagaggtatttgcatttgtgagaacggacaaggctaacaactctccccatagagcagattgtcatgtgtgtgaatgcttattggaatttcgcaccgaagttgagcaatcggctttaagattagggagacaatgggtttatgggcctatttaccttgttcgcagatccagacgccaaggagacccgtaaattttcatcgcatctggggcttatatgattgtgatgatagtagctattaaggaatggataaaaccgaattatgttcagttcttcttattacaaaacagttttgttagaactcagaagccatcttgtaacagtttcataaaggaaataattgacatgtcaatggttgatttgatggcc

SEQ ID NO: 88943 - DNA, 1649 bp, Glycine max
  Clone ID: PAT_MRT3847_51324C.1
ttttagaggttatttggcaccagagtatgcgataggagggaagctaacaaggaaagcagacatttacagctttggcgtcctccttggggaaataatcagtggaagatgtaacacaaactcacgactaccaatagaagaacagtttcttctagagagggtatgcatgtctcatattccccatcgtattggcatatcttttactagcatcaattcttgcagccagtttttcttattcaatcatttattctaactaaacatgaattcaccatgttcatttagtaattacttgcctgaagtcacaaatgtttattggaccgtgtgctcgtctacatgtaaaacttgaactccctatttggtttgaactgctagcaaaatacagaatcatattcatatgtgaaaggatatgcaaaccaaaccattagtaatttattttgttccataaacataaagtataaattaaaatgatatcagaattgtgctaggcaaatacattggtgattcttataggaatatattaggaagccacctattactaaggtgcatattaggtaggagggcagagaatccagggcttagggagagcatgttgatataatagattgcaagacaagcaatcaaggggaactggttgggaaaatttgacctgcatagatatagaaaggagagaggagaagatagaggggtaagtaaaaaaatagtttagagtgagggagagcgaagggtctctcaaatactgtgctatcttttttctgtttcagttctttgaatatggttgtaaagcctccacataggtactgatttcagactgatatcagtatctgcagaagaataatacagtagattttaccatgtctgagtgtgttttgatccagtttttatcagaatatctgttctccctctctcaagaaaaaagtctttcttgtcataatctgaaattgctaacttcacattttttttctaggctttgtcatttcattgcataagtgtgatcatattctagagcattataatatgagatttctggaccatctcttaattagcttatgtttttgcagacatgggacctttatgagcgaaaggaattggttggactggtggatatgtcactaaatggggaattcgatgctgagcaggcttgtaagtttctgaagattggccttctttgcactcaagaatccccaaagcaccggccatccatgtcttctgtggtcaagatgctcactggaaaaatggatgttgatgacagtaagataacaaaacctgccttaatttctgatttactggacctcaaagttagagggaacgaagaaagtagtattgatatgaagaattcatctatgtatacaaccttttcttcagacaaccatgatactacctcgtcatttgccacaactacaaccttcacagcataatatgatgaaagcgtgtaaacatcgatcgatagagatttgtcctttaatcaaaaaaatgttttgatttgtttaggcatgtatctaatgtaaaattgcaacctttttcatactttttgagagtggttttgtttcctggatgtagtcctccatgactaggaagttgctatgtgctgtcctgtaaatataaaccgggcttgtgttcgatgataaatttgaagatcttttcatttcctatgt

SEQ ID NO: 88944 - DNA, 332 bp, Glycine max
  Clone ID: PAT_MRT3847_51325C.1
ggctcgagcactgtcgcgcatggggcatacagattttctttttcggatctcgatgtggtcccttctgccatccggcggaacgtgatgacgcaatgcattgcctatcaaccggcctgtatggcaagctaatgccttcatggcggcatcgtcttgttgcctggacatgccttgatctggagcgcgagcttaagctcgaccacccaccctgtgattgcggacccaacttccgcctccgctgatcaggagaggtggattgcgggtttgttgctcataccagggtcgtggttgtcgtcctggcttcagttctgtgcttgtggaatataagtaggggg

SEQ ID NO: 88945 - DNA, 616 bp, Glycine max
  unsure (1)..(616): unsure at all n locations
  Clone ID: PAT_MRT3847_51326C.1
ccacgcgtccgaagatttgttccacccaagagcgcagcctctcactttagaatttctattcttttcttccaaatcttaaatgcttggagcattcaacatttgctccacgcataacaccctttcggctcttaacttttcggttcggccttggattcattctcttccctctctctcaaaaaacactgaaacccataatcgttaaaattagggcttcggtttggtatcttctctccttttcatgggcaacatctcaagcagcggcggcgtcggcggcggcaatccccgtcgccgacacagcggggcttcacggcggagtcaccctccgccacctcctccggtgacgccgcagcctgagatcgccgcgaatccattcgtgtaccatggtgctgcttcaccgtacccgaaccctcccctgcattaccctcagtaccattaccccggttactatccttcggtgccacctcccatgcctcatcatcctcatcatcaccatcatcaacatcatcatccacacatggacccggcgtggattcaggggcgttacccttgtgggcccatgatgcctaaccctgcacctttcgntgagcatcagaaagccgttacccataagaacgat

SEQ ID NO: 88946 - DNA, 218 bp, Glycine max
  Clone ID: PAT_MRT3847_51327C.1
aatgactctcgatgcaatcttcgacagatgtcatattgtagccgagcatgatgggagtgaacctttatcaagctatgctcatacctatgatctgattcacgcgacaagcattgtatgacttataagggatcgcagctagtgtcagatgcagatgtagcctacgagatgtgcgtgatgaacttgatcgaatgatacgcccagaaggcactgaccacagt

SEQ ID NO: 88947 - DNA, 549 bp, Glycine max
  Clone ID: PAT_MRT3847_51328C.1
cgaaaaagaaagagtggaagattcaaaacgagtacgtacgcgtcggttcatggtttcgtgatcttcactgataataaaaccaacacaatcgcacaactcaaccgtatctccacgctttctcaattgagtcttctctgccactacttctacaaaaaaacaaaaaaaatctttgttttgtttcttcatttgtttttcctccaccaccttctgaggtgaccttgaaagtgatttcattggaagcaattgataccagttgacatttgaagcagcttgtacttcattcagttatgacttgttttcctttattattcagtaagtcgtcgtcttcttctgcgagacacgaaccagaaattgatgaaggcattcataatgttaaactctactcctacaaagagctaagaaatgccactgaagattttagtccagccaataaaattggagagggtggttttggttctgtctacaagggacggcttaaagatggaaaagttgctgcaataaaagttctttcagctgaatcaagacaaggggtgaagggagtcttgactg

SEQ ID NO: 88948 - DNA, 185 bp, Glycine max
  unsure (1)..(185): unsure at all n locations
  Clone ID: PAT_MRT3847_51329C.1
ccaccccaaaccttcaaaataacacatctttctccaaactctttcacaagcccatatccctnccgcacatgtaaaggtgtctatgttatccttggcttcgtccatattcaaatcataanntngnnnacggaaaanccccgggggcttnntnggnaactttnnagggtnnnggncnaaaantggtc

SEQ ID NO: 88949 - DNA, 341 bp, Glycine max
  Clone ID: PAT_MRT3847_5132C.1
cattgatgacgacgacatggacgaggacgtagagaccgatcccgacctcgacattgatagcagtggagaaatagtttatgcaatatgagctgctggcagacaatgcaaactgacttctctgatcaatttatatatatagtatgccatgggttgttcaaagggtttggaatatctggaaggaaaagatttcacatctgaagggaaggattctgtgaaaaagtttatgttgtgaggatcattcctgcttatagtcaatggtcctttcatgattacatgctgctttgtattgatagtgtgtcattgttatattatgaagtggttgcctttcccttttccaaaaa

SEQ ID NO: 88950 - DNA, 309 bp, Glycine max
  Clone ID: PAT_MRT3847_51330C.1
cctagtcctccgtatgggtcgccaagcgggttgttaagagccatggtgcacgtcactttgtacggaaactattaccgaacgtataggaagccttttaatacgtaccagaaggagtgcttgaacgcccagttgaacctcgtctgtaagttcggccttcagtgcaggatggagttatggagggaccagtgcacgctgaaccgcatccttaacaacatccgaaacctcttgacactcgttgtgacgaacgctgagcagatctctgagggtgtagtccttgttcaaagaatgttccgatacatactccgttac

SEQ ID NO: 88951 - DNA, 227 bp, Glycine max
  unsure (1)..(227): unsure at all n locations
  Clone ID: PAT_MRT3847_51331C.1
gtacttgagannaagtgttcctacgttggttggcnttgaatgtcccaaggttgagaaacttcctacgnacncaaaatttttgacaaacctaagaacgcgctgcttcactattctccctatggngtttagtcttgtggtccgtcaaaagtttttnagttttgtgaggttcttntgatgaacagggacangcttngttgtcaagttggntcaacccatactccnnggaa

SEQ ID NO: 88952 - DNA, 261 bp, Glycine max
  Clone ID: PAT_MRT3847_51332C.1
tggagatatactttaatcaaaagacctccaaggttgcagttgtgtgtgcggacaatgtcgaagcaagaactgcactttttctcatggagcttgaggaaaaaagagctattgaggttaattagaaagagcactttgagaggactgtgtctaactttctttgctggactttgcttctctatgttctcaccagcatgcaacatagcagcagatgacctatggaatacctttagaaaaggggttccccatctgacagtatatact

SEQ ID NO: 88953 - DNA, 194 bp, Glycine max
  Clone ID: PAT_MRT3847_51333C.1
gaacaaaagggaatgggatctcattgcccagttactcacgaggacgccacggaacagtgtgagcaacagtgaatttgcgattcagcactctcatggtctcaaggatactctattgggagtagacttaggcccccactgatccccagtaaccttgaaggcgatgagtaagtaccgatccatgctgaacttgtaaa

SEQ ID NO: 88954 - DNA, 500 bp, Glycine max
  Clone ID: PAT_MRT3847_51334C.1
acccactcgatcacttttccgtttcttcagcgtgcacgcgagcggaaaaaggaagaaagggtggtagaggacgtaccagggccagtgtataaatggggagaaaaggaataccacaagggaatcatccgtcctaacgccctgcttagagatcaaacgggccataccacgcagcaaacaatttacaggaacacattggctccttagaactgcaaatactgggctgatatcgctaccaataacacggggctaagggcattctgaccaacggcagtctacaccatgttatctcataacaataaatccgattaagttaccccgcaaaacaattcatctgattgttattattatgagggctaaacaaatagatgatcattattgtatgaaatggttttcgtacatgactttttctatatgaatcttgagtatcgcccgctgggattatgaactattcttgcatttttaaaagagaatgaatctttgctttgtcatcgactgaaggg

SEQ ID NO: 88955 - DNA, 441 bp, Glycine max
  Clone ID: PAT_MRT3847_51335C.1
gaatcatcgaaacgctcatggatataacagggagtattcatgtacatgcaaacaggaaactagtagtgacggactacactgtccatagatcatcgccatgctaatgaagacttattccacacaaatattacaaatccggactatacgaacttgtaatcctacgaacatgattcaccctctggaccaacaatgctcccttaggatgaacgatcacctttaaccggtacgatatggcacagatgttgtgcgcaaactttgacatcctaaagcatacgcacctatgcaaagtctggtcactgccagctgcacgtaacattctaactgttatgccagtgcaagggatcatccatgagctcctaacatgctccaccttgtcctagaggcacttgctagtcatacccaatcgccagcagatttgcatccagaggctacgttggatgc

SEQ ID NO: 88956 - DNA, 180 bp, Glycine max
  Clone ID: PAT_MRT3847_51336C.1
ctttcttgttgtatcaaaaaaaaagaatattataagacaacaatgcgctcatgatgaaactcaatacaaagcaccattcacactacactgactttcccttgctcaccaaacatacacctacaagcacagaattcaaccagtattaatattactttggaatatgaaacatatatgaactgg

SEQ ID NO: 88957 - DNA, 280 bp, Glycine max
  unsure (1)..(280): unsure at all n locations
  Clone ID: PAT_MRT3847_51337C.1
agcagctccttgagttgacatcaaatgcagttacagatggataaaccggnccattctttggtgcgggcgttataacggcacggccggccaatatatctatcattggaacaccatattaagttgtttttgtcgaaagggaaatacatttgatatcctccatcgatgacatttgctcgtagttgcttccaatgtgagattatatgcgtacacgaatatagtctattatgaacccagtgctttcaataatacctttgagggacaatattttggccatactttt

SEQ ID NO: 88958 - DNA, 291 bp, Glycine max
  Clone ID: PAT_MRT3847_51338C.1
gggcagtcataagacatcctaggcagcagcaatatctagcgagtaagtctttgttcttgttctcatcattcatcgcagcttattcgatcaggggatgtgtacgtagagttattgattcagagcctgatcgactgtatagttcatatcacatgcgaagttgtcatttccattggggaggttttggcacagcaagctacctcagtcacattcatctggttgatacctccacttatctcaatgcacccaaatgcattggcatcttcactgagcaatcaaactgttatgatgtcc

SEQ ID NO: 88959 - DNA, 390 bp, Glycine max
  Clone ID: PAT_MRT3847_51339C.1
gggacacagggtgcttttacacgggtatttaaattcgcaacatgcagcatattacctgcgtggggactaagatacgtagggggcccaactatggcagtcattgaactaaaccgcccatccatggaacttgctgttgctgatatctctaaataccgcatcgcatatctggaacattgaccaacttgctatctatgaacctgaccttgatggtgtagcgaagcaatgccggggcaagaacctgttcttgagcactgatgtctaaaagcatgtctttgaggctcacatagtgtttggctctgtcaacacgcgaaccaaaactcatggtcttggagcttgtaaagcagcagacttgacatattgatagagcgcatctggcatgattgctgatgc

SEQ ID NO: 88960 - DNA, 432 bp, Glycine max
  Clone ID: PAT_MRT3847_5133C.1
aaagggctcgctgaaaataatttttatggaacccggggggaaaaagggcccgaagggcccaagacagcagaggccggagggcgaacgggcaaaaaagttacaacaaggacggggggggaacccatgggggcgggaacctctccaaaagcccccccggggagcccaaaaggcggggcgaaaaaaaacaccacccccccggaaaacggaatcccggccccgggaaacaaacccagggtaaagggacaaaattccaaggggagggggaaaaaccccaacaagaagcccctttttaaaagggggggcgaaagaaaggctccccggggcccccggggaaatttggggaaccaaaaaggggaccccaggggcccgaagaaaataaagcccccccactaggagggcttgggggggccccttaaaaaaaaacccccaaaa

SEQ ID NO: 88961 - DNA, 404 bp, Glycine max
  Clone ID: PAT_MRT3847_51340C.1
gaaaaaatgtgagattgggtaaaatggtgtctttttgaaagaaaaaaaaaggcggaaaaggtaggaaatgttggctggggggggtgcaatttggggggggttcccggtttaaattttccggaaaagggtttaaaaaagcggataaaaaacattttcaaaaccggttttttttttaagggaaaaaaaaaaaaaaaaaaaaaccaaccaaagatgtttggggagtttgaaagtaaaaaacaggcaaagggaaattgcggttgggacatcgaaatgtcaaagaacagaaaggggaaaaggggggaggaaagaaccatagagccaaaatcaaggggggggagaggggcgaaaaaaggcccaaaaatccccaagcacggtgcccgggggggggtaaaaaccctttaaat

SEQ ID NO: 88962 - DNA, 366 bp, Glycine max
  Clone ID: PAT_MRT3847_51341C.1
aacaagaattcaataaactaacatagttcacacccaatcaaatataaattcatacaatacaaaacatataagttcttaaaataaaaacatttaaaaaacatagaaatagttcatgtgtccatcaatcctctaattaaatcatctccaatatcaccatcactgccatcatcttcaagttattcttcagttgagaagtgatcgtcaacattgtcattcaaaactaaactgtcaatatcaaatgtatccaaagttggatcagttaaacttcctttaaccaagtcaatattgtttcaactacctctttcaccaagaggttgcttaacttggacattgtcttcataaaaaaatatcaatcttcctctttct

SEQ ID NO: 88963 - DNA, 258 bp, Glycine max
  Clone ID: PAT_MRT3847_51342C.1
ggctcgagctcaaattcaatcttcccacatacactgtatgcgtctttgaccacatctgcttcttcaatgtggaagctttgtggacaccctctatagctcttcctccctaggtgacgaatgtgtcaaagggcacatatatctatagagttcccattgtctgtgaaggaaagcttcgaccttaggagtgttttggagagtaacatgttttcttttgatgatgactaagcgtagaggatggttgctttgtgaaacagagaa

SEQ ID NO: 88964 - DNA, 787 bp, Glycine max
  Clone ID: PAT_MRT3847_51343C.1
actagaacaaaaaagcaattaatttagaagaaagcaacgaataaagagggggtgttgtttttcactgacatggtaccacattgcatatacgcttgagtcttagtatagctgattcataacgcctatgaattttttattatgaaattggtgttggtacgtcttgaatcgagtgtgggattcatgtgtaatgtaattgatgattgaaaaatgagttttaaatgataaagtgatgaagtgacgtgaattgtattaagttgaactatgtgataaatatttttataatgtattttgcttatgtatttgtttatctatattttatttaaaaatatgataactcactccctacgtgttgtttgtgtttagattttgtgatgatctcgaaccttgttttcatgggagcagatgactaggtggacgactttaaagaacctcgtgctagaggacgttgtgacataatgctctgataggatgtgacattggggcatgagattttgttttaattgcataatgttctgaacatgctattttactttattttatttcgctgcttaatttgtttccttttgtaaacttggacgaccttattttgagccaaagatgttttaataagttttatttgataacagtgaagtgaatgtgaccatgttatccacgtggatttgtttatgtgatttgaataaaattgatttaattaaatttcatatttttatatatttttcttatttatatgtatgttgggatagatggtgtcacatttttcacttttcatctaatgaaacctcgagcc

SEQ ID NO: 88965 - DNA, 436 bp, Glycine max
  Clone ID: PAT_MRT3847_51344C.1
ggctcgagcactaaccctcttctgcttggaggcgcgatcctttctttcaggtggatccggcaaacggagtgcaggctccaaaggataagacccttcgcgcagagccgagacctatcatgaagtttgcgcctccttcgccgatgcgggagaataccacgtaccagctgcatcaccgtattcagcggctgacgtactcacacacggatggttatgcaaggagatgagtgctgaggacattgggaggaaccacctgcccatcataacagcgcatactgtgatatgttacacagatccagagtgatgcacaggctggccacaatcagtgagtgtttcctggaagcatcatattgggttatatctctgtaccggaagaaaagattccagccaacttgactatccctatctgatgaggcctcacttgaatgcttcaagccca

SEQ ID NO: 88966 - DNA, 253 bp, Glycine max
  Clone ID: PAT_MRT3847_51345C.1
ctattcttctttattactcactcacaagcagtacataaaaaaaattcttagctcttaatcttcttaacactaccattcactactctaacaactccacaatacttctctattacataacctactcaccataactctatttctcacactatctctaacttcactccaccaaccatctcttcttcaaacacacactcacacaactctctacacattccattatcccccatctaccatactctttttaacctacacc

SEQ ID NO: 88967 - DNA, 1878 bp, Glycine max
  Clone ID: PAT_MRT3847_51346C.1
gtgagcgagtttgaccacgcgtccggttttgaaggtggcagattttgggttggcaaattatgtcaattctgggcacaggcaacctctgacgagtcgtcttgtcaccttgtggtaccggccgccagagcttttgctaaggttgaaagattatgatccgtctgtggatctttggagtggggggttgatgtttgggaaactgcttgttgggaagcctatactacaggggagaactcaggttgaacaactgcacaaaattttcaggctctgtggctccccacctgacgaatactggaaaaagtctaaacttcctcatgcaactttatttaagccagagcaaccatatgatagttgccttcgacagtcctttaaagatttgccaacgaccagtgtacatctgctacaaactcttctttctgttggaccatacaaacgtggaactgcaacatctgctctatcatcagagtatttcaaaacaaaaccttatgcatgtgacccatcaagcttgccagtatacccacctagcaaggaaatcgatgcaaaacacagggacgaatcaaggaaaaacattagcggacgagttcgaggaactgcaacaagaaaaccgtcaagaaaacctctgggattcaataaactagccccagcagagggtttggcaagtcaaactcagacttcccagaaggtcaatggtagatctttccacatccttgaagaagagaagattaaaataggtgacaaagcacaaaagccatccagtggtaaacctgaagatgcttcccatatgaagaatgcatcgcaaggagatattcccctttctggaccattacaagtttcaacatcaagtggctttgcatgggcaaaaagccgtaaagatgacacttcatttcgatcccattgtcgaactatttcaagaggacatactttcaatccattagaaccttgtacattaaattcaaggaataatttggacaccacaaaccaggaaaataaggagttttctgggggatgccccaattctaggggccatgaccttcttgaaatttctaagctttcaatgcagaaccagtggagtaagtttgatcgcccagactcatttgatgcttcagatgagtaccattcgcaagaattgtctatcgccctttatcatagagaagattcagcttccaagagaagtaacctgagttttcaagatcaaggggaaaaggttgaattttctgggcccctgctatctcaaatgcacacagttgatgagctcttggaaaggcatgagcgtcacatccggcgaactgtccggagatcatggtttcagagaggtaagaagcttgggaagtaaatcaagtaattgcatgggtatttactcttgtagggcacagaccttgagcatcatatcaaaatgatagctgggaaggccatcttctttccccaatcacaccactataagcagagaatgaacatctgacttatacaatgacacactgtctagcagcctgatctgttatatagaagctgggaaactcaacaattcaagaacaccatttccagcttccaatttacagaaaattgatgaccaatgcaaagaaaagaagaaaggtttgagttccccttttcggtcaattatagataaaaattcgtttatgtatggtctaaactcctcccttttcctgtctttgctaattgatttatctacatgcaagtttcgtcaggcaattgtatatatttcatctgtcgtggctgacttgagaaatatagttactctactcaccattattcaatccttttttaggcttttaatgaaccagatatagcaatttatatatctaacaggcaatttatctagggagcaaggagcctgtttatgcatcatactttattctccctact

SEQ ID NO: 88968 - DNA, 227 bp, Glycine max
  Clone ID: PAT_MRT3847_51347C.1
accagcaacgacatgatagcttctttattgaaaagaacaaccaacgtcttaacaaaatatgcctaaagttaacatcatattttaaaaagataaagcttagaaaaagaacaatttttttaaaaataagctagaaagaatatctttggacaaaattctaaaaagaatgtgacatatcattgtgtaattttgtccaaaaataagctagaaagaatatctttgctcgagcc

SEQ ID NO: 88969 - DNA, 338 bp, Glycine max
  unsure (1)..(338): unsure at all n locations
  Clone ID: PAT_MRT3847_51348C.1
agttcgcaagctcaacccaatcaataccatctcttttgttcagatattgggaactggcatggatactcaagatacttctccgtcagtcttgcttttcttcgacaatcaaagatttatattcaatgctggggagggattgcaaaggttttgcacggagcataagattaagttatcaaagatagatcacatattncttnctcgtgnctgttctgagactgccggtggccttccaggcttactgcttactttggctggcatgggagaagatgggatgtctgttaatatatgggggccatctgatctcaagtatttagtagatgccatgagactttatccca

SEQ ID NO: 88970 - DNA, 261 bp, Glycine max
  unsure (1)..(261): unsure at all n locations
  Clone ID: PAT_MRT3847_51349C.1
gctttgaatctccctgttgacatacatgggtttgcttctctgattacaaaaatcacttttggggagatggggaggttnnnnaacnntnttntnnnnnganncattatntttccaattggttttaggttttgtnnnanagattaaaaatttttaattaaatatataataaanaaatgtttttgattatantaacacgnttaattaatttaaaaatttnantgttttanattgannnatggaaantttnanntaaattaagga

SEQ ID NO: 88971 - DNA, 154 bp, Glycine max
  Clone ID: PAT_MRT3847_5134C.1
acgagaaaaaaacagtatcaatatatatgtacacgtatacactgcggtgtgaaaaaataattatctggacacaatatacattagcacaggaacaagattgaaagaccaacatatcatatcgatgctagggaaactaatgaagttaattaatgta

SEQ ID NO: 88972 - DNA, 209 bp, Glycine max
  Clone ID: PAT_MRT3847_51350C.1
accaatctatgccaagcccaatacatgcaatctctatcggaatcacttacactcaagtgtgcatggctagcctcacagttggattcatatctgttgcattatgaagtgatgtggtgaatgcactgatggagcatgcgcatatacagtaccagcaggtgccgagtgaagcggacagttgggtctgctagattgaaaaagtagaagctcgc

SEQ ID NO: 88973 - DNA, 824 bp, Glycine max
  Clone ID: PAT_MRT3847_51351C.1
tcgcatgcacgcgtacgtaagctcggaattcggctcgagaatttaaacccattttagtcactttttttttcccaaaaatactgccagatgctgatgttcagtgtgatcctttgcctgttgagttacagaaagtggtgctcagttgtagaatgtattgtacctttaacacctgatgtgtgcattcatgtaacggaaagggcaacaataaaatagcgatcctaaagaaagagtatggcagaaagacctctgtaagcacagccttattttcctctgttgtccagaatacttacaattcttgagcctcccagaaattggaagctaaataaagcaactcgagtttcctttatttttgcacttcagtgacagtgactgtgatgaaggtccgtgcacggacgcttagcatttcctacacgccctgaattccgagagcaggcaggaagcaccccgagctagggaactacctcagagcacacagacggcccatggctggcaggattgcccttgatatcctggtgcatgtgggagtgacaggtttgcatggggcctgatgctttctgaagggaaggcaccgactggcagtgggtacgccggggaggatgggcctgcctgttttctcgtcactcaggctgccttcaagagcagtggctccttggcttgtccagtcggaaacctcagtacagtccttattagatgctatcagatgtagtgattgagtgcccgtagctgtttgcttgtagacacactaagtgcagagcggcaaggcgattagattattaggaagttgtactcagtgagtacttgacttgtcatgtgtgcctctcaat

SEQ ID NO: 88974 - DNA, 303 bp, Glycine max
  Clone ID: PAT_MRT3847_51352C.1
attcccgggtcgacccacgccgtccgcctgcctgccagatgagcgaagaagagggaagggggacggtgcaactgaaagtgctattccggggtgggtgttggtcactttagctgatcataaatattagatgcaaatgttcaagaagcccatcacaaacattaccatctcaagggctgaagaaaacacttaccccgacacctttgaaggggctttggatcattacatcataagcttggtctttgggatcggaacgttcagctattgcgtttactatcgcaaggtcagccgctactgagctgacga

SEQ ID NO: 88975 - DNA, 252 bp, Glycine max
  Clone ID: PAT_MRT3847_51353C.1
ccgctgcccccatcacctctactgtctcctccctgggctaagcaggggagaagcgggctgggggtagcctggatgtgggccaagtccactgtcctccttggcggcaaaagcccattgaagaagaaccagcccagcctgccccctatcttgtcctggaatatttttggggttggaactcaaaaaacaaataaaaaaattcattcttttctcgggcaaaaaaaaaatgccaaaactaactaaaaaaaagggggg

SEQ ID NO: 88976 - DNA, 491 bp, Glycine max
  unsure (1)..(491): unsure at all n locations
  Clone ID: PAT_MRT3847_51354C.1
aattcggcaccagctggaactaaaattccaaggtggtttattaaacaaaatgtgggtagttcaataagcatggacctgtctcgtgttattgaagacctatattgtagaggtgttgcttgttgtgcaatattntgtggcacatngatgatccaaataataatnttcgataanttggcggggaacctccttatgattatattgaatttggttttgaaaatttaacgaatatgtgtagcctcactttcccggttccaattcttttcaagagagctttggtgacagttggattcgatcacttgttaataatgtttttcagccgagaactactcactgatttagcaagggtacgttcaaatggtcttgatacagtgaaatttgtagccaactctggcccttattatgaaggtttgcgtttggaggtgaaaagttgtgggtatcatttgctatttgaagaccatcttcaacgattcaaatcaaacatgatgttctct

SEQ ID NO: 88977 - DNA, 478 bp, Glycine max
  unsure (1)..(478): unsure at all n locations
  Clone ID: PAT_MRT3847_51355C.1
tacggctgcgagaagacgacagaagggttgtcaaactctcacgatgatagatgacaaaaaacaccatagttcctttgccctaaataaagtatcgtatttgtagataaaatttattgcaaaataagttttgtatttagctttttaatgtaatattagttttttctcattaatatttctgataagtgacactttagttattcaatgtaatatgatgttgtaaaatcaatactttaatttatttcttagtttttctaatacaggacaacacttattttaaaacataataagtacttatttattatgagggtaaaaccatctaatggaggcgtgtgaaaataaaccataaaatccatgtcatcaaatcaaatcatgtataaaagaatttgtagcattacattangcaagttttgagtgcgtttggttgagacccgtgatttaatctgtacaagtaacttgccatttatttttaaaaaaatga

SEQ ID NO: 88978 - DNA, 461 bp, Glycine max
  Clone ID: PAT_MRT3847_51356C.1
tgcttttcggtgggcttgttcctcttgttgataaagaaaaacaaacccagcaaactaatgctagcaaccttcgtagtttgctgggtttgttggtgggtatcatgcttttcggtgggcttgttcctcttgttgattttaggtttgggggtttagtggagaatgttcctggtactggtaggtctaattatgttagtgatagggtgtatggtcaaggtggagggaaggtttggtctttgaatggtcgtaggaatgggtctgaaagagatgaggatgtagggttttctaatggtgggaggtttagtgtttctgacagagtgaattatgagcgaggccggaattttagagaagaaaggcatgatcgtcggaaaggctcggatgatttcggtcgtcagggcaatgccagtgagcctcttgttgcttctctgtatgtacctaggaatgataagatggtgaagattgat

SEQ ID NO: 88979 - DNA, 1893 bp, Glycine max
  Clone ID: PAT_MRT3847_51357C.1
ccacttgccccggggcctcttcatttcagatctcataaagaacacgaaacagtgtaaaacacgcgctctctctttctcttgaactttcttcttccttttcgttttctcactctcttgttcttcattcacccccacacattattcttagggtttccaacattttctccatttccctttattttttcatttttataattttcgaattcggtgtttgaattgagaagcggttttagacgattccgatgtcggcttccacggtgtccatcacggcggcgaacccggggactcgtcggagaccggtgatcgccactgagaagaaaaccgccactagcctcgaactcctcgctaacgacgttcgccgtctccccgcccgtcgccacttccggagacggcgccacggggcgccaccccagccttcactcgatcctcgagcagggcaatgctcgaccgtgcgccccgtgacttgaagcaggcgctggtgtaagcaggcggcggaggctcgattttgcatccaaccatggaagcccttcacacacatgtatatatcgcttgagagttcatggtcacgagcctgactcggtctttttcgggaagatggagttgctctttgcatgtcctggctgctttgaattttgttgatctggctgatattcgttgaaatctggcgatgacatggcgggcgggttggttgggttttcggaattcgaggcccggatttcggatgtggaggctgcgttgaagaagacagccaagatgattcaggttcaagttgatgtggtggataagaagattgaggatgaggttagagggttaaggagggaactaaatgagaaaattgaagagaaaggggaaattttggaaaatgggttgaagaaaatggaggcaaagaatgaggaattggagaggtatttgagtgagttgaagggggaggattggttatcaaaagaggagtttgagaagtttgttgatgaagtgaggagtgtgaaggggagtgggtatgagggtggtgggttggatgagataagggagtttgcaagacgggtgattgagaaggagattgagaagcatgctgctgatgggcttgggagagtggattatgctcttgccagcggcggtggtacagtggtgaagcattcggaggtgtttgatctggggaggggcaattggttcttgaagtctgctagaaatggtgtccaccccaacgcggagaagatgttgaaaccgagctttggcgagcctgggcagtgtttccccttgaaggatagtagagggtttgtgcagattaggctccgcactgccatcattcctgaggctgtcaccttggaacatgtagcgaagagtgttgcatatgatagatcaagtgctcctaaagactgcagggtctctggttggctgcaggagcataatgctgattctgcaattaatactgaaaagatgcatcttctggcagaatttacatatgaccttgagaagagcaatgctcaaacattcaacgtgttgaattcagcagcttctggtgtcatcaacacggtaaggcttgattttacgtccaaccatggaagcccttcacacacatgtatatatcgctttagagttcacggtcatgagcctgactcggtttctatgttggcactggagttataatgttgtcttgtttgctttgaattttgtcaatttctgtgtaattgtccagtgtattttctttagatgtaggataggatgtcatggactccttaattactagatgcagaaatttaacttcttattgctgcttcaaatggactttgtatctagtgtatgaatctgatttaggctgtcgatagatcttgggtattgcaaagcaatttttttgtcttttaattttagtgcaatgatactaggcaaatcaagtct

SEQ ID NO: 88980 - DNA, 490 bp, Glycine max
  Clone ID: PAT_MRT3847_51358C.1
acgcgtgcgcacgctcggaagctcggtaatggtgtcgagagggagacatcctgattgagaggtccacaaaccttgactgggacatggggacaactgtgcttgatgcactcgaccagattagtgagcccaagaggccctgtgacaagcccctcaggctgccccttcaggatgtgtactagactggaggtattgtgactgtgccagggggacgtgttgagaccgagagtcttgaagcctgcaatggtggtgactatatgcaccaactggactgacaactgaagtcaagtatgtggagatgcaccatgaatcgattacggaagcacatcctggcgacaatgacggattcaatgataacaatgttgctgtaaggacttgagcgtggctagggaggctcatagctaaaggatgaccctgcataggacgctgctgactttacagtccaagtcatcatcatgaaccaccctggtcagaacggaaatggctatgcccc

SEQ ID NO: 88981 - DNA, 371 bp, Glycine max
  Clone ID: PAT_MRT3847_51359C.1
tccaggatccaggaaggtttcccgttcatgactgtatgacgtcctccttctttgggggggggggggggataacgatgaaatcattaggagaccggggaggatgagggtgctgaggtaagcaagcgacgtagggttaaaacagatagttgagacgacaggcaaaatgcgcatatggataaggtagcacaaaactgatttcacaggactacttgagtgaacctgacagtagaaggtgaggaacgttagttgggggcgggatgccgtcttgggcgtggtagtatacgggtggtatgtagcgtggtaattgtactagagggaacgtgtagcgccaacgattctgttgcaagagtgtggaatgtgcttgtgattag

SEQ ID NO: 88982 - DNA, 343 bp, Glycine max
  unsure (1)..(343): unsure at all n locations
  Clone ID: PAT_MRT3847_5135C.1
gtcgcatncannagtnagtaatncggctcganctcttctctnactcttcncncntccacttgtnngnccttnntngcggtatctcagtgcaannctgtctccntnagaagcnnntcaancaatcggagtacaaacccngtcgacggcttntcgnccggtanggncgatnanaccaanattntcnaatgnagtgtcgcatacnttcgancggaaatactcaatacntngggggaantgtcaatggattctgagtttcccatccaattaaccatcatngncnagttcagttaagtncactntcnangctatggcatccnaaagnatttcncgatggncngntntn

SEQ ID NO: 88983 - DNA, 797 bp, Glycine max
  unsure (1)..(797): unsure at all n locations
  Clone ID: PAT_MRT3847_51360C.1
atcagatctcatataaaacactaaactgtaaaacacacgctctctctttcgcctgaaattttcttcttccttttcgttttctcagtctattgctcttccttcaccaccacgcattatttttagggtttccaacatttccatcattttcctctcttttttttctctatatttttttgttatttatttatttatttttataatttttgaatttggtgtttgaattgagaagcggttttcgacgattctgatgtcggcttccacggtgtccatcacggcagcaaacccgggggcgcgtcggagaccggtgatcgccatcgagaagaaaaccgccaccaacctcgaactcctcgccaacgatgtcgccgtctccccggccgtcgcaacttccggagacggcgccaccgggcgcgacctcagccaccactcggtccgcggcgaggcgctcctcgaccggacgccccgtgatttggctccggcgaagaaggtcgccggcgggaactcgtcgtcggtccctccgcggcgtgcgcggaagctcgccgcgaaggccgagaagccgcggtggctcacgttggtgagcattttcgggaagaatatggtgctcttggtggtgctggcggngctggtccagttgatctgccggatttcggatgtggaggggctgttgaagaagacagccaagatgattcaggttcaagttgatgtggtggataagaagattgangatgaggttagagggttaaggaggggactaaatgaganaattgaagagaaaggggaaattttgaaaaatgggttga

SEQ ID NO: 88984 - DNA, 298 bp, Glycine max
  unsure (1)..(298): unsure at all n locations
  Clone ID: PAT_MRT3847_51361C.1
gggagaactaattttataagcttaagcttttctattgggggtaangattgacatgtgatttggaaggattaagaatccaagaggatatacaaacttggcttactattgcataattggttggagaggtaagaggatggataatggtaaagtttttggttctgatggtattcttattaacgtttggaaatgtgtagaagaacagtgcatcatttgttttactgagttatttaatgagattttaaatctaagaaaatgtcaaatgagtgaaggagaaatactttggttcctaatattcatt

SEQ ID NO: 88985 - DNA, 418 bp, Glycine max
  Clone ID: PAT_MRT3847_51362C.1
tcgttcacgctttcgtgaggggtttcctcatgtggggtcactcaaaagtggtgagggaggcaaatggggatttgtttctggggatggtgaagagatgacatcgattcctggaaccagtgtcgaagaggcttacaacaagctaatagatgaacttgatacaagggttcctacattgggtggcattgaatgtcccaaggatgagaaacttcctcgtggcaaaatttttgacaaacctaagactcgctgctttactatgctccctatggagtttaatcttgaggtccgacagaaggtgataaatattgtgaggatcattatgaagaatagggacaagcttagttgccaagtaggaatcaacccatactccatggaatgcactggtttgcccaatagattactgagtaagggcaactatatt

SEQ ID NO: 88986 - DNA, 273 bp, Glycine max
  Clone ID: PAT_MRT3847_51363C.1
cgtcattcgtaagcattcctatagaaatccttctcttcaggagcgaacaattcgttggaatatggattgcactaaccatatatatgattcttcgtatgttagttggtatatggaggatgtgaacagggacaggaccatggtactatcttagcgaaggaccatggtgttatatgagaggccactcattgccatagagtattgatcttatcaacaaggagcatcacatgtttgctatgaatcaattgaccacacgtcggatctatatgggtcctc

SEQ ID NO: 88987 - DNA, 519 bp, Glycine max
  Clone ID: PAT_MRT3847_51364C.1
tataaagagaactagttattattttctttcagtttcgaaagcataacccttataaactggtacatgagacagggaacatgaaatgacaaaaataaatttaacatcaaacattattttgcttcaacacggccacaggtcaccccaaatagatcttttggcctgttgatagcaaggtaaggttcttggtccgagtgacgacaatacggtcatatgaaccctctgagagcatcccttttggtggatctgcacacattcatggtgacttgtctaccccttctgacaggcatgaagacaatcctgccccagccacctccaagatcagcactgcctctttcttcttccctttcctcgtcctcttcactatcaatgggaccatcagtttccacagcatcatcagaatcataagttacagcattcactacttcacgaagagcgtcatcagtttccaaatcatcagcaatgtcagtttctgcatcagctacttcatgaagagtgtcatcagattgttgcaacttcaac

SEQ ID NO: 88988 - DNA, 176 bp, Glycine max
  Clone ID: PAT_MRT3847_51365C.1
gacacgtctagtccattgtaggttcaactcttgttctatcgcaacattgacagtgatggaagggatcggcaactgcaaacccaggcccgattgacagaagaataacaagagcaatgtaaattaaaggccgaggaactcgaaatggcattagagaacatctctgaggtctgacttgc

SEQ ID NO: 88989 - DNA, 842 bp, Glycine max
  Clone ID: PAT_MRT3847_51366C.1
ctttgagacgattacttactgcatatgctcgacataacccctcagttggttactgccaggccatgaatttttttgctggcttattgctacttttgatgcctgaagaaaatgccttttggaccttaatgggcattttagatgattattttgatggctattattcagaggaaatgatagaatctcaggtggatcaacttgtttttgaggagttggtgagggagaggtttcccaaattggccaatcatctggattatctgggagtgcaggtggcatgggttactggaccatggttcctgtccatttttgtgaacatgcttccttgggaaagtgttcttcgagtgtgggatgtgcttctttttgaaggaaaccgagtcatgctctttagaactgcagttgctttaatggagctatatggtcctgcgttggtaacaacaaaggatgctggagatgcagttactttacttcagtcgttggctggctccacatttgatagcagtcagcttgtactgacagcttgcatgggttaccaaaatataaatgaaactcgtttgcagcagttgaggaataaacatcggccagctgtaatagcttccattgaagaaagatcaaaagggcttaaagcttggaaggattctcagggactagcatcaaagctagctgatatgcaagtgcttggcaatttatctcgtacagaatctggttccactaatgcagatgaaattctgattagtctgactggagagggtgagatagatgctgttccagatcttcaagagcaggttgtctgtttgaaggttgaactttgtagactactagaggagaaaagatcagccattcttaga

SEQ ID NO: 88990 - DNA, 283 bp, Glycine max
  unsure (1)..(283): unsure at all n locations
  Clone ID: PAT_MRT3847_51367C.1
gtcgcatgcacgcgtacgtnagctcggaattcggctcgagtgaagcagctgtcattgatgaagatgtcctgcgctaccagtttgtgaagaagaagggctatgtgaggntacacaccaacaagggtgacctcaacctcgagctgcactgtgacctgacaccaaaaacctgtgaaaacttcatcaagctctgcaagaaacagtattatgatggtaccatctttcacagatncatcaggaactttgtgatccagggtggtgaccctactggtacaggcacaggagg

SEQ ID NO: 88991 - DNA, 384 bp, Glycine max
  unsure (1)..(384): unsure at all n locations
  Clone ID: PAT_MRT3847_51368C.1
nttcncgcgtacgtaagctnngaattcggctcgaggtcgntatcnganttgcttgngttgtgtngtgntgtttgttcnntttctgcntcntctngnaaaatgtnctttgncngacggtnagtcgactggtgntgtngcgnaagacancntaacanagatgtcngncaancgtgcttgnccggntcggctctcanaggatantatcaccataancttggactgntnncntcccgngntncgtagncnanccagcactgnggaannctttaggnccaggnnnaagngntnaccantgnatagcgcntcgnatgcngntcatgtagctnggagaatgtggtngtgtgncccggctngatnaatcgnattngacngcnangattggnt

SEQ ID NO: 88992 - DNA, 289 bp, Glycine max
  Clone ID: PAT_MRT3847_51369C.1
caaaaaggaaaaaaattggtattaggaggtctgggaaaaaaatttctgggacaaaaaggctacagggttgggtggctaaaaccgtcggaaatatcaaaccctaaatatgttaaacccctttttaccggttaaaaaataagagggtcgaaatcatcacttgtttcctttagcgctccgggggctcattactggggagcccactgccctttttgacccccaccaggcaaagcccaagcctaaaaaaaggcccccgggggggctgggggcccccccctgggctctcccccca

SEQ ID NO: 88993 - DNA, 738 bp, Glycine max
  Clone ID: PAT_MRT3847_5136C.1
ttgcttttgaaattctcaccaccacctattccaccttggtaatacttactctttcacttaccaaccaaccaccatggtttctgagacactccaaagccaaaccaagaacgtgtgcgtgattggagcaggaccatcagggctagtggcagcaagagagttgagaaaagagggtcacagggtggttttgttggagcagaatcatgatgttggaggacagtggctatatgaatcaaatgtggaaggagaggaccctttagggaaaaagccttttctaaaggttcatagcagcatctatgaatctttgaggctcacatctccacgtgagatcatggggttcactgatttcccttttttggtcaagaagggtagagacatgaggaggttccctagccacacagagctgcttatgtacttaagggacttttgtgaacattttggcttgggagagatgataaggttcaacacaagggtggattatgtgggaatgttggattatggtgtctgtagtaatgatttgaagtgggttgttagaagtgaaagataagaagagtgaaaagacggtggaagaagtgtttgatgcagttgttgttgccactggtcattactctcaaccaagattgcccttcattcaaggaatggatacatgggaaaaggaaacaatgcacagtcacatttacaggaccccagaaccattccgcaatgaaattgtagtggtggttggaaattcctttgagcggc

SEQ ID NO: 88994 - DNA, 218 bp, Glycine max
  Clone ID: PAT_MRT3847_51370C.1
tagatcgcgagcggcccccttttttttttttgggtcctcttctgagacacattggcttaatgtccatctttcctggtttaggacatcttgatggctaaaattataccaggaatttgttccatgggatgcctaatactttggagttttttaatggggcttggatccaatgtttaaaccggaaatggataccaatcaatgtgccatcccattgagctttt

SEQ ID NO: 88995 - DNA, 243 bp, Glycine max
  Clone ID: PAT_MRT3847_51371C.1
gggcccccttttttttttttttttttttttggagcgccgcagtggggactccctcgaagagaactagaaaactggacatgactctgttgctgatcagggtgaaaagcgcgaggagaaaagtgcaggacgaggagagagcccacacgaggcaagagggctgatgcgcttggtagagctctaaagggcagatgatgtttgggcgagggaaccgagataaatagacttgctcatcccataggtctg

SEQ ID NO: 88996 - DNA, 490 bp, Glycine max
  Clone ID: PAT_MRT3847_51372C.1
aatatccctagctttatgttgttattcttgttaacatttgtcaggttttaagcctttaaatttggttaaaagatgtttataatttggaaattttttgcaattacatttttaatttgttattattttggatatattcaaccttattgttatgctttatctaatactttcgatccttatgatatattagaaattgaaagaatctcaacacaagatgaaatacgtcaagcatataaacgtttagttaaaaaatggcatcctgacaaaaataaagagttaaatgctgaacaacgatttttagatataaataaagcttataagattttatcaaatattgaaaaacgccaaatttatgacaaaactggaataactgaagatcaatttggagatgtacaaggttatgaacatttctttcgcgaccagcaacgttttcaatttcaatatgttcgttggtctcctcctcgaagacagcaaaatgatctcttacattttg

SEQ ID NO: 88997 - DNA, 144 bp, Glycine max
  Clone ID: PAT_MRT3847_51373C.1
ggggaaaaaaggggaagtagaatggtgattattagacgtatgcgtggttccattgaagtggaaacagaactaaatattagggtggtgaaggtgaaaagctacaaccaaatgggaatgttcggaagtgcaaataaacaaagtggg

SEQ ID NO: 88998 - DNA, 334 bp, Glycine max
  Clone ID: PAT_MRT3847_51374C.1
tggatagtaggcggtgtccgaccattgcggcttcgacccctctttcactttgggtgacatcttttctcaaacgttgaagttgaattcttccacttattatacatattttccagtttgaaacaatagtttactcttacaatgtctttcgttgttttctttcttttagtgcaactggattggtccatgtttgacattttagttgtacgtgtgtatccgtgttggctaccctcgagctctaattaataattgtcttcttttattttaatttttaattggtattattttcaagagtcaaatacttcatgcaggtcctctctatattaacataggaaga

SEQ ID NO: 88999 - DNA, 398 bp, Glycine max
  Clone ID: PAT_MRT3847_51375C.1
ttctacgttgtttggaccatgcaccgccttatcgccgatcgtggaccacgtatgcctgactccacagttctatggctcgaggtctgactggatgtctgatgttgccggtacagacatctaaattccttaatacacctggtgtctgtagattatacatgctggcatgacgcctgcacattgtagaaatgcaactgtcaagcgcatgggacgcgaagcattcataaaacacaggaggaggataagatatactcttgacgaggacctacagacggatggtcctaatataagatataagcctcgctcaattgaccaaattgtatggaacgtattaacagggctgtcgagagaaacttgttttcatatgctacctgttagtgatactcactaagaatccatgg

SEQ ID NO: 89000 - DNA, 285 bp, Glycine max
  Clone ID: PAT_MRT3847_51376C.1
acgaacagtggttatgtagaagatcaaaaggcatctctactgtctcaattgatacatatcacagtggaagatagactcaaagttgataacatacagcgcaacaaggataagcagcaggcaatagagagagctgaactgtatgaagaagtgaggaagcagttatggctagcagggcctttaatatctgcttgtatgttaaaatattcccaacaaattatatctgttatgtttgtggagcatctcgggcaattgcctctttctggtgcttcaatggcctactttttt

SEQ ID NO: 89001 - DNA, 469 bp, Glycine max
  Clone ID: PAT_MRT3847_51377C.1
gtttgcgtagttttagcggggcaaaagacgccaaacagaggaaggggcggataaaatagaaacaaggccaccaggcgcctcggacaggaacgaggaggagacaggaaaaagcgccggaaagacgggggagaaggaccgctacgaagcagagaagaaagggagcagagagcgctggaaccggggacagagacctgccatggggagaaggagaggcccaccgggaagaaggggaaaccgcgggggaggaagaaagtcggggaaaataacacaggccggcagcgcgagcgataggggctaaaggacaggacgtacaggtacggacaacacaaagcaagacagaacgggaatgacaacagacaaaggataagcgccgataacactggcgagagaggaaaacagagagctgatttgaagtccaggatggcaagggcaacccaagatgccaggggagtgggaaagcagggacaaa

SEQ ID NO: 89002 - DNA, 392 bp, Glycine max
  Clone ID: PAT_MRT3847_51378C.1
tcgcgcttgcgtgggttgctgtccacctgtaatgtaacaagtaagctccagcactgtctcttattacctttattctctctctctatctctacttcctttgatccatggaagcctgcgatctctagagaaagttgacgtgatgcctaagaaccggattcgagccttcaaaacccgttggcaccttcatccgcaaaaccataattgcgacaatccaaaagcaagtgcaacacctgcagacgatgaagaatctccacctcagcaccggcgtcgaaaccgcataactcgccttagaactacacaccgactgagaccaccaccgaatggacatatcctacggtctaaacgtgtgggcctacacaaactcgccccgaaacaccaaagcctacagtgac

SEQ ID NO: 89003 - DNA, 749 bp, Glycine max
  Clone ID: PAT_MRT3847_51379C.1
aagaacaaaacatagatactcatcatcagggtctctctgtttcggaaaagcccacacttgttcacacacttctatggctggccttcaacaatacaacttcttccccaccgatctcttgtaccctcgtccacaaccccaacaagcttctcctaaacccaccgtgcttcccctccaaacccctaatgttcaagatcacactcagcctcaacaaccacccaggaccaatgccaccccttcaacctctcctgtctttctttttagccaaaagggtcattctattgctgccgttgacctgccgaacaagatctccaaattctcatcagacccgctttcttgtttgctttggatttcggatgatgaaaatgatgaagatttttgaattttgaattagagtggtctgctccaccaatcatgagtggtgtttcggttctggtccaaaggaataagattatcataccatttcacatgaatcatactgtgccgttggattaaagaccaaagaataagattaaatgatcatttcatgtttatagttatttggacactgtaaattattattattattgaagggacttattcctcttcttttttataccctttctttacttttaagcctttgatcaattatcctttttcacttctttttttcattggttttcatgaacatttgagttagtttacactatagaacctgaatggtcctactcatacgtacaagatgaaaatcaataaaattgaagcttgtgttt

SEQ ID NO: 89004 - DNA, 232 bp, Glycine max
  Clone ID: PAT_MRT3847_5137C.1
ttccacgcgtccggaaaaagagggtcccattggatgaatcgtaagcagaggggaggggtgaggatgaaggaacatgtcacgcactagaaatgggcctacatgaccatgttgtgcacacccttgagcaattcatatattatcctgttaccacggtactctatttattaccataacaaacacaacacgtggatcgcataacatacttattcaatatatgcaacgtcaacaccca

SEQ ID NO: 89005 - DNA, 939 bp, Glycine max
  unsure (1)..(939): unsure at all n locations
  Clone ID: PAT_MRT3847_51380C.1
gacttacacctcttgtatctgtttgagtcgagtttattttcttctcttataacgatactccataggatattttgacccgatccaaggaattaagcttaagcgtagagagtttgtggaatggggaatggtaataaatattaatgaagaatgatttgtggaaaaagggggagatttcggggaaggttcgcgtcgcaggtgtgtgactggtgggacttggaatagaacgccaaataggaatagtgagggaaatctcaactcaacgcatctgccttctgcctcgcttgccagatctcttctctctgatggggggttcggtggtggaggacaaccacgacctcgaccacgacctcgacctcgacgatactcccttagcatctgcctcttctaaatcccaccagcaattccatagcttcgatttcgaggatacaagtgttctagatttgcggcgctcatccatctttaacataacacgtatgagcaggagtatttattttgtcttaattaaagccaagatcaacctcttgcttccctttggtccattcgccattctcctacattacgtaactggacaccatggatgggtcttcttcttcaccttattggggattactccttcggcagaacgtctcggttatgctaccgagcagcttgccttctacacaggccgaacagctcggtttctgcttaatgcagcttgttttctatgcaactgacatgattatatcaatttatgcattgacaagcaatattgcaactgaaatgtcagcaatccctactccgttcgatcgcgttctgttggcgtcgatctcgtagctgtgcattctatactagtggccttgcacattgacaacaaagtacagtttttgataangcggctactgtagtcaattctggcttactcttgatggctgtgatgggaatactattcctgctgtgctg

SEQ ID NO: 89006 - DNA, 569 bp, Glycine max
  Clone ID: PAT_MRT3847_51381C.1
ggctcgaggatactcactcatcacatcagggtcttctcttcttaattttctcactgctttttcctcttctatggctggccttcaacaatacaacttcttccccaccgatctcttgtaccctcgtccacaaccccaacaagcttctcctaaacccaccatgcttcccctccaaacccctaatgttcaagatcacactcagcaccaacaaccaccaaggaccaatgccaccccttcaacttcttctgccgttgtttatagccaaaagggtcattctattgctgccgttgacgacaacaacaaggtctccaaattctcatcagaccctctttcttggttgctttggatgcccgaagatgaagatgaaaattgttcggactcttcttgaattgtccttcaattctcctcttcgagagagtggtctaatgactctggtgaggtcgactacatggatcatactcgactacatgaatcatactgtgccgttggattaaagaccaaagaataagattaaatgatcatttcatgtttataggagtttggacactgaaaattattattattattgaagg

SEQ ID NO: 89007 - DNA, 621 bp, Glycine max
  Clone ID: PAT_MRT3847_51382C.1
gaacggacagatagaaacatttttactcgtttagttcttatttctgttcatataactaacacctttttccagataaaacctaacacattttttcatttcttctttatttttattccctccccaatatcatttctaatccaaacaaatgttccttcgaaacctactccaactatcaccaattgcacaaagttgaacgatggatatttttaaaaaatacgtattgattaaaatcaactcttgccaggtaatgacaaaatttaaattcgaactaaatagcttttttcataaatcagtagcaaaaattttaagccaactttttcagtatttcaatcacctttcaatggataaataaggaaggctttaagtccacttaaaacaaaaatagaggtcctatttgagctaagggcaaaaattactctttaaatttggaagtgtcctctaccaaaatccaatacttagaaggggcaaatatccagcagctacaagatttaatattttgtagcttttacactattaatttaatattttcgggaacagaattttattaaaatttcatcgtataaattatattatcgaatcttatactaatccaaacgtatttatattttatagatatatata

SEQ ID NO: 89008 - DNA, 250 bp, Glycine max
  unsure (1)..(250): unsure at all n locations
  Clone ID: PAT_MRT3847_51383C.1
gcttttcgagtattcagtcttctaccatcatcaatcagcccatcccatntcttgtactcagaaacaacaacacccgcaattaatcaatatgtctgatacatacaagcccaccgagcacganggcctcaagcagganggccccccnganaagtgtgttggccanggngccttcgccnaggggnngccncnncnnacggggnngnaangggggcggcacaccttgggtnggggggaancccnccgngggggg

SEQ ID NO: 89009 - DNA, 286 bp, Glycine max
  Clone ID: PAT_MRT3847_51384C.1
gtaacacatataacaataacttaagttggtactattgcgcaacattgtgcactcgcactacagaaggcacaaggcacatctgtgtcaaattagactaacagtctaacacacaagaaatgcataacggaagctagcgactcttacaccatttcttgaagctgcttattggtttcttcaaacaaacacaatgtaatgagaggcaaacgctcaaacaaaaaaaaccctacaatatcctataaacaatccatgtaatgaccgctccccgtagtaggatcgatgacacatg

SEQ ID NO: 89010 - DNA, 614 bp, Glycine max
  unsure (1)..(614): unsure at all n locations
  Clone ID: PAT_MRT3847_51385C.1
aattggaggacaagtgttctggtgaaaggatccatgctatcgctggaaaaatggatgctgcaagtggctgagtttcatgctaatgctgtagtttctgtgaaacctaaaaagccttcctttaaagaaaggaaacagaagttgcttacctttctacaagagaagtatgaaccagtttgtgctaagtggactacagaacgatgtgctgtatgtagatgggttgaagattgggattacaacaaaattatcatttgcaacagatgtcaaatagccgttcatcaagaatgttatggagcaagaaatgttcaagattttacgtcatgggtttgtaaagcttgtgaaacacctgacatcaagcaggaatgttgtctttgtcctgtaaaaggtggtgctctaaagccaaccgatgttgacacattatgggttcatgttacttgtgcttggtttcgacctgaagtatcttttgctagtgatgaaaagatggagcctgcattgggtattctgagtattccattgaattcttttgtgaaggaaattcatggttcgtgcacacaatgttgcaagtgttccacttatttccatgctatgtgtgcatcaagggctggntatcggatgga

SEQ ID NO: 89011 - DNA, 1003 bp, Glycine max
  Clone ID: PAT_MRT3847_51386C.1
ggctcgaggttccttgatgttgcaagagaggctgaatgcactctctgctgcagacaatgcactttatcctgttcatcccacatattccaggattgttacaatagcagagggaagttctattgtgatttaacgattcatctgaagatgttgaaggtggactctgatgatgctgtttctgaatcttcttgattgctgcttacactgaccaccggaggtctaagatactagagtaaccacgttgctcttaattactcgctgtattaacggcatagtatccactggtaaatatcaagtggacattttctcgaaaacatggagctctatcagacttggctgatcttcttgtccaaaacaatttatatgatatggcttttacaatccttctcagatttttcaagggttcaggactgaagagggaactggaaagagtgttgtctgctatctcattgaaatgctgtcttgacaaagtggaatcctcttgggttgaggaacacagtcatttattgacctcatcaaagcatgagatggttgcccatggttcacctgctacagtttccacaactccacaaactgacagaaacagttgttgggcaacactcaagctttaccttgttcgtatcttctgctaccattagatgattttacatttttatgcttcatctattcataactggttttttaatgtcattcaatgaataataaagggcattccccctcatcctatgagttagcttttgggattgagttagactcaaaaacccacattctaagatgctatcagcctattctagatccattcaaaggatcacccaccatgttatccacgcaccaagcccaaaaggattgggcatgaggagggtgtattgggaaaaacctaagttctacattggctagtggtagtgccaagatagagtatataagtggggggacaaccctcaccctatgagctagcttttgggattgagttaggcccaaaacccctcattctaaggccacctaaaca

SEQ ID NO: 89012 - DNA, 568 bp, Glycine max
  Clone ID: PAT_MRT3847_51387C.1
aaaaaaacccaaaacaaacgtttaaaaaaaaaaaaaagggccccagggcccgggtcttaaaaaaaaaaacaaattctacagaaaagaagaaacaaattttgccccaaaacaaaaaaaaaaattcccatgggaaaacccaaaaaagctaaaccaaaaaacgcccaaaaccccaaacttggccccccccatgggaaaacccacaaaaaaaagggctccccccccccccccagtaaaaactggggcaaaaaaaaacctttttttggggggggcccccccccccggggggggcaccacccccagtctggggggcaaccttaaaaccccaaaagaaactttggctctcaaaacccaaaattttggggcctggctggggggggggccaaacccaaaccctgggggggctaaaacaaagggccgggataattgcccccccctcgaaagagaaaaaacccttccccttagccaaaccccaaaaaaaaaaacccccatttttccccccccgggcacaaagaggcccctcggggaaaacaccaccagttttcccacccccctggggcccaaaaggggg

SEQ ID NO: 89013 - DNA, 396 bp, Glycine max
  Clone ID: PAT_MRT3847_51388C.1
gattactgtattatacagaacacatattgagaatatcttgtgacttatactctacgagtccttatcgagcatatagggattcaagagggtccaatgtgatggctacttctgcactactgtggtggagctctaccagtggctcctgatttcttgcagaaagctggaattgacacttcagttcctaacactttattgtgtgatctacaacagtgcatggatcatcagctttttttctgcatggttctagtatatggctctatcgaatttgatagggaatccgtgcaactctgctactagagaccaccttttgccctctgagaagtacatatacagaggctcatggaatgcagtatttcacgctatgcataaatgatgaacatcgagagatagccaatg

SEQ ID NO: 89014 - DNA, 388 bp, Glycine max
  Clone ID: PAT_MRT3847_51389C.1
cattgagatttttgtcttgtttcttagggctgtctatttggtgattttgctctctccttgtatagctatggctcctttagttgatttttttggcactcaatttagaaaaacatggattcatgttgttcgagttacacttgaaaaagctggtccagcattcattaagtggggtcaatgggctgcaaccagacctgatctctttccaagggatctctgtgatgaacttgctgaatttcaaacgaaagcgccatcacataaatttagctatagcagaaaatgtattgaaaatgcatttggtcaaaaattatctgaaatctttgaaaattttgaggaggaacccatagcttcaagtagcattgctcaagttcatcgagctacactaaaatac

SEQ ID NO: 89015 - DNA, 571 bp, Glycine max
  Clone ID: PAT_MRT3847_5138C.1
gatttgatccctttgtagtcgataaatgcgatgtgatcaatcccgaggcggcatacgcacagaatctttgagagaggatggcgcaggcaagcaaggagccgtgcaagaaagaggcttgtgacattcaagcttgcctctccaagaacaactttcttccacaaaagtgccttaaagttattgaactgcttgactcctgttgtgcaaaatgcgattataactcaactcactgtgcttccctctccggacttttgaaaccgaagccaaagcctaagagatgagttatattttcagataaatgatgaccagaaggttgcatattcttcttctgtctacagaaaaatgggaagagtagttgagggagtgcaaaaaacaaatgaagggctagtatatttcttttctttaatttctttcaaatttgaattatgaacggcttcaccggtataccgctgtaatattctgttcctctacatgctttgtcatagaatcacggtattgtagagtttagacatattttactgtaagtaataatcaataataaaagtgaaaactaatatttattatttgttgtacc

SEQ ID NO: 89016 - DNA, 490 bp, Glycine max
  Clone ID: PAT_MRT3847_51390C.1
ctaaccattccctgtcagaaacagcaccggaatcaggagttctgcctctcgatttccttttaaagctgccattccaatcctcattaggagttctatgctttctttcatctcgctgttttcttctacctgaatgaccgcaatttaactgatccatctccctagatcttgaccttcttctagagtggcacgttctgtcagaatctgtttttgacaaactcatatttccttgctccattgaagtctcataatcatcagaataaccaaataaagcgatcattttttttacccaaaatttcgggggaggtttgtcagaatcggcccattcatagtctccgccgggattacgaaaacagtggataaaattgcatgttgttccatgagaacaagtcttgaaacctgatttcatatactcgccacatatggcaaccttccatcgtgtcaagttaacaaattgacaacttacctgtttcccagcaaagtagcgaccatt

SEQ ID NO: 89017 - DNA, 292 bp, Glycine max
  Clone ID: PAT_MRT3847_51391C.1
tacggctgcgagaagacgacagaaggggtgggagaagggtttggaaaaatgacactaccttaccatgcatcatgtcaagatacactgtcaattttcaccctcttccctcaacttagctcatgtttacttgcacaaggcacgagattaatttatcaatctaacaaggctgtcccacagaatcatttgctcaaactttataaacctatgttagtatgtaaccaatatattagtgcattattttttatttattaaattctatatgctgccagatcttcttgttcagctgcgcaag

SEQ ID NO: 89018 - DNA, 327 bp, Glycine max
  Clone ID: PAT_MRT3847_51392C.1
gggggggggacaaaaaaattgcctttaaattttcaagggttaaatcaaaaccctttttttttaaaaaaaaacgggggatccttttttcaaaaaaaaaaattttcaattgctcaaaagttacaattgggcctgccggggtatattttgttttcctaattttgcaaacaaattgcttgccaactggttaaaaaatcaaaaaggaccccttggaaaatattatcagcccgattttccaccaggggaattttcccccccagtgaaaaagacatttttaccaaaaaccattttcacagaggggaggtgttcaattgaatcgacaattttttt

SEQ ID NO: 89019 - DNA, 535 bp, Glycine max
  unsure (1)..(535): unsure at all n locations
  Clone ID: PAT_MRT3847_51393C.1
gtcccaacattgataattcagatatggattttaaaaaaaaaaatcaggccaattaaaacaaatagatcacgaattgtccaaaacacaagtgcccaacctataatcatccttcaacatctacttccagaagcactacgcatgatgcatactcctcgatatacctatgcgggtattattctatgtgtgtctcaatatactttccttacctcacgttatatatacacttatatttcagcaaattcactaaaatataacgatgtattttaaaaacccacatcgattcatgtgtgactatatacattgaaatgttaaggaaaacactatcttctacttctggtggttgcttgcttctttggattggaaatggtgtcgctttccactggacatgccactatcactgacacttccttcacccataatatcatgaacatcagaaaattctgacattcgtgatctcaagggaacaagatcacaatcatccttggtgtttcgtgtccgctgctcctcatggcgtttcacattntctgatatctga

SEQ ID NO: 89020 - DNA, 187 bp, Glycine max
  Clone ID: PAT_MRT3847_51394C.1
cttgaacccaaacgaacaccatttgatcatctttaacatatgagaatgctatgtcagactttctgacctagccgaccgagtaatcctagccctacttacttacatacttacgaccagttccgcaaatatcctgaatttctatgttgttcttcatgacaagtctatctgacacggaggaattgggata

SEQ ID NO: 89021 - DNA, 499 bp, Glycine max
  Clone ID: PAT_MRT3847_51395C.1
ggctcgaggaaaactctgcaaacatgttggtttatcatgacctccttacaggcgatgagcttgtgtcggactccttccgttacactgaaattgagaatggaacgctgtgggaagttgaggggaagtggatagttcagggagcacttgatgtcgacattggcgcaaacccttatgctgatggtggagaagatgagggagtcgatgacgcagctgccaaggttgctgacattgcagatacaatcagacttgacgagcaacctgcttttgataagaaacagcatgttaccttcatgaagaggcctatcaagaacttgactcccaagctcgatgcagagaatctagagttgcataagaagctcattgagggatcaaccataaacctgctatctaagactaatgatttccagctactcgttggggagagcatgaatgatgatgcttgctaggtccttgcatactacaaagatggtgctgctgatccaaatacttatactttgca

SEQ ID NO: 89022 - DNA, 104 bp, Glycine max
  Clone ID: PAT_MRT3847_51396C.1
aacagatagtatatgtagggagttgcagggattcactaatctgatcgagcgcctatgttacgtaccagctcttgatggcgtcgctcatgcaccctgaatgaggt

SEQ ID NO: 89023 - DNA, 270 bp, Glycine max
  Clone ID: PAT_MRT3847_51397C.1
accggtatgaaggtggattctggacagaccatgcaaagcatgttccattggacaatgaaagacatgttgcaatagtcacaactgctagtcttccttggatgacaggaacagctgtaaacccactatttcgagctgcatatttatcacaatctgctaagcagaaagtcactctgctggttccatggctttgtaaatcagatcaagaactagtttatcccagcaatgtcacttttacttcgccagaagaacaggaagcttatatacgtagct

SEQ ID NO: 89024 - DNA, 408 bp, Glycine max
  Clone ID: PAT_MRT3847_51398C.1
ggtgggtaaaaccataaacggtttttaaaacttcgttttaaattaaatgcaccttaaaacatccctcaccggcaagggaatgggcctaaaccccttttgctgtttgggaaattcgaaatttttaaaactttttttcccataaaaacaaaaaacagtcctcttcaaaaacaaacagcattgaaatttgccccccgccgttcaaaaccctatttttgaaggttccggttccttgaaatcggcggaaccttaaaattttaccttaaacaaaacccctaagactttgcggggttaaacctcctttaagggggtacccccgttgttgttcccttgtgctggcaaaattgcccaaatgcaatcacttttttttggcagcggccttggtgaccttggctccgggggggttttttt

SEQ ID NO: 89025 - DNA, 434 bp, Glycine max
  Clone ID: PAT_MRT3847_51399C.1
gtcgcaaggacgccgcaaagatcatcacacagcaagatgaccgtctcctggtcatggttggaccttgctccatccacgaccctgagaccgccattgagtactgccagcgcctcaaggcgctcgccgagaagctccaggacaacatcctcatcatcatgcgcgcctacctcgagaagccccgcacaacagtcggctggaagggtctgatcaacgacccggatattgacgagagctaccagatcaacaagggtcttcgcgtctcgcgcaagctctacattgacctcacatctcaaggcatgcccattgcctccgagatgctcgacacaatctccccccagttccttgcggacctcatctccctcggcgccattggtgcgcgcacaacagagtcccaattgcaccgtgagcttgcttctggtctttcgttccccatt

SEQ ID NO: 89026 - DNA, 560 bp, Glycine max
  Clone ID: PAT_MRT3847_5139C.1
ctcttccccccccccccccctctcttcttttttttttttttttttttttttttttttttttttttttttttttaaaaaatggaaggcggcttttctccaaaagaaaaacacaaataattttgattttttgaatatataaaaaaaaaaaactggccttggcccctggggggggcctgggcccccaaaaaataacagactgggcatcccccttgggacataatttaaaacggaccacccgcccttttgggatttttcatcaaataaatggggaaaggtgaaacaatggtcctttttttacaacaaacccctgaactgggtttgcaagggcccaggcccaggggggggggatcaacaggttatttagtcaaccaggctaaaacctttattttttttaaaaaaaaaaaacatcccttcccctgtttctcaaatggaagacccctaaacttccctttaacaaagggggggcaggcacaaaaggacttttttatgccaggcttgcctttaataagggacaatgaaacaacaaatcccccgggaagggggtttgcatactcccaacc

SEQ ID NO: 89027 - DNA, 657 bp, Glycine max
  Clone ID: PAT_MRT3847_513C.1
agatgacttaggactttaatgttttccatgcagtcgattgaaaacactgatacatgaacaaccagaaaaagacctcagcaatgtatagacctggaatatatagtgttgccctggttaaactacaagaacagccacgtgatcacagtttgagggtggaaggcaggggtgtgactgagttttgtttaacggcctaaccgaaaagcaaagaatcaaccatttcttctacttgtggcaagaaacgagagtcatggtggaacgtgtagatccttctcatgacgcagctttaaaaggcagtagatggagagcacaggtgactagaacggacgacagtcatgcacaaagtcatgggctgaacaaaactgtttcattagaaatataaaggcataggcataaaccgtacggtgtttaaaacaatacccactacataaacacagcataacacacctatctctttatgggaatttcagtacacagatccaaaacgctcgtgagtcgctgttgacttgaaccaactgctgcagaacccagcaaactcactgctgtcaatccagcccacagggcctccaacctcctaataataaccagttggaaccagcagggcaaagcccaaggcagtccacctagagaagggggcagcaaagatggctgacaggctga

SEQ ID NO: 89028 - DNA, 1587 bp, Glycine max
  unsure (1)..(1587): unsure at all n locations
  Clone ID: PAT_MRT3847_51400C.1
ggacaaccgagctcctccactcgcaacacccagtcgacccacgcgtccgtcttcttttttggaaccagcacctcctcgccgcaccccgcgtctgcgctccacacacccacctttttagttttcgcacttcttcctcgtaactctcacctcatcgccggaaccctagttcgatccgccggaaatcgaatccgccgatgactgtacgattggggaataggtgagatcaaaagggttggatttcctcgccggatggagggagggattcacccatggattatgatgacaatgattttcaaaaccagaatctccatttagctggtgaagggagcgccaaatttcctccggtattaaggccatatgctctccccaagtttgattttgatgaaagccttcaagcgaatttaagatttgatagtttagtagaaactgaagtttttcttggcattgaaagtaacgaagataaccagtggattgacactttctcccgagggggtagtggcatagagttcagttcaactgcagctgagtcttgctctatatcaaggcatggcaatgtttggtctgaggctacttcctcagaatctgttgaaatgcttttgaaatctgttggacaggaggactatattcctagacaaacagttattcaggaatcagatgcctgtgatgaactggcctgcttagctaagcaaatggacaccaatccaaaatttgatgataaaaatgaatttaaacatagtgtttcagatttacatccacctggtggcacccatactagtttttctggattgaaagaggatgtaggaatggagaagcctcagggtggagtctcccaaggtcatgatggggaattatccattgatggaacttcaagtaaccctgaactaagtgatatctgcagaaatattgacttgcccgtgtctgaggggagcctgactcttgataccaatgacaaaaataacaatacaaaccaaagagaagttgagactgttgatgatgactcacatcatggcaaaactcaagatgattcatctgcagtgcaaactaatattgctgaatcatctataaaaaatatgggtgatgacaagagagatcctttacaagcacaaacttataatcaagatttggaatcttctctgatggataaagaagctgttgtggacacacaaactctggatcgagacatggttgggagtgatgcacatcatctggataaacccctttgttcaatccccacagaagaaaatttggaagggggtgtagttgaaggtcttgagactgggataagtagtttagagagttccttaagaatggaatctgttgctgtttcgcagaaagttgaaaaaagcagtgaagatatgtgtttcagtgctctgtctcagaacattgtaagtgaagatgtaatgttgcttaacgatgtggtaatggatgaccaatctgtaccaaatacaactgaattgccaaaaccttcaattaaagatgattctatctctgaggggcaagcggntgaggttagtaatttacattgtgagaattttcccaatatgcagcagaatgtggatgtcatggagaagacgacatacgatgtcg

SEQ ID NO: 89029 - DNA, 251 bp, Glycine max
  Clone ID: PAT_MRT3847_51401C.1
atgtatagaccaacccgtcttttgttgcgaagtttttggactagaggagacaggctaaggggggccccttacgacatgataccaatcctaagagagaccaaaatcaaaaagaggggcgccgcattaacacaaagacaccgggaaaaccaaagcgctacccaaccaacaagccaagaaaaacaaacacacctcagcagaagggggaaaatacgaaaggagcccaacgatagcacattccaacagatagagca

SEQ ID NO: 89030 - DNA, 573 bp, Glycine max
  Clone ID: PAT_MRT3847_51402C.1
ccggtaatctcccgggtacgacccactccgccgttctttttctacaggcgtccccaaacccaaacccaacaacgaacaacaaaacaaatccactcactccacacatctttttcagtttcgctcgtacttcttcctcgtaactctcaccctcatcaccgcaaccctagttcgatccgccggaacacgaatccaccgtagatgattgtacgattggggaataggtgagatcaaaagggttggatttcctcgccggatggagggaggtagcgtctctagacttacttgttctgggattcacccatggattatgatgacaatgattttcaaaaccagaatctccatttagctggtgaagggagtgccaaatttcctccagtattaaggccatatgctctcccgaagtttgattttgatgaaagccttcaagcaaatttaagatttgatagtttagtagaaactgaagtttttcttggcattgaaagtaacgaagataaccagtggattgacgcattctcccgagggggtagtggcatagagttcagttcaactgcaagcgagacttgctctatatca

SEQ ID NO: 89031 - DNA, 1248 bp, Glycine max
  unsure (1)..(1248): unsure at all n locations
  Clone ID: PAT_MRT3847_51403C.1
tttgcaatttgtatcattatcatgccactttattagagacaaattataactagaaatattctaaacaatataccagataatgtgaagagccgtgtttatttatttccacacattcatatgcaattacataatcgtaccgtttcctttttgtctgaatatcaaactaggtcgattaagaatgataaacagtggatcaaagttcaattatggtttgttaacattttttctttcttttttttaacactggctgcttcaagcaggaacatatcttgagaaatgaaaatgagcttttggagaaacaggtaaaaatgtatacaaagtcatgcactgaaagttatatgtcaatactatcattctatgtggtgaacatactttttttttactcaattcttgaactcagtataaataaatagaaaggcaatattaattaaggctgaatacaccctaatttatgcatttaaatgacactcataaaaacactatgattggcctagtgggtagaggttgggatagatatgcaaaaacttagatntgatcctcattattgtcatcatacaccaaagaatacggggaggaatcttgtacattctgttgtaacaaaaaaaagcatacggaattttagactaaaatttgcgttaaatactttcgaaggagcctattagttgaacatggtgcataaattattgtaatttttggtatttatctttgattatctacaaataacaaatgttaaatcctttctaaaacttatctaagtcgttatcttatactaatttaaactagttatcggatcagtcagttaactggtgagcccattcgagctgcaatttatagattataacagtgaacatactctttatcccaataaaactaatatagacattctaatttctatcaataatagttttttcacctgttgcagattgaggcacagaaaaaagctgatgacgtcaataacgtggtgacacggtttattgactatgatcaaacagatcgggtgacgcataatctgctccctggtttgtaaatgcagctgaaagccaccactatggatataacttgcacgaattttccaattgaaaaaaaaatacatgcatagggaactatgccatggtttagctacttgccttctgttatttctattctggttgaaacatggaccatctagagaagctcttaaacataatgttgccgtggggaagtttgcttcagctactagtctgtgcctaattaaattagtgacatatt

SEQ ID NO: 89032 - DNA, 820 bp, Glycine max
  unsure (1)..(820): unsure at all n locations
  Clone ID: PAT_MRT3847_51404C.1
gtccggnaatctcccgggtacgacccacgcgtccgcaaaacccaaacctcaataaaaccgaaactcacaaacacttaaacagaggaagtaacgaaccaaccaacctgacacagccgccacaaccataaacattagcataaacaaaaaaccgttaatctcgcgcgttcttttttgttgttgtgtcgtgtcccttttggatctccagaaaatgcaggagaataaggatccagcaattaagctcttcggccagaagattgccttcgccggagaagtcgaccctccggccatttccgccggcgaaattgactcgccgccggcgatggatgtcgacaaggacgaagaagacgactttggtgactcagagactgaagatgagaaagacaaggatccccgagctgaaaaagttagtgagaaaacgaaagaagctgatcctcctccaaatgctgcagactcaaagaagaccccagagggtattcagaacccaaacacaccttccatagacgaagaatctgcaaagtcaaaaaccaacaagtcagagaacaacaacaacaacaaaacactgaagaagccggacaaaattttgccatgtccgcgctgcaacagcatggacacaaagttctgctactacaacaactacaacgtcaaccaaccacgctatttctgcaaggcgtgccaaaggtactggactgctggcggcaccatgcggaacgtgccggtgggagcggggcgaagaaagaacaagaactcagcctcgcactaccgccacatcacaatctctgaagctcttcaagcggccagaattgatgcccccaacggaact

SEQ ID NO: 89033 - DNA, 504 bp, Glycine max
  Clone ID: PAT_MRT3847_51405C.1
ggggtttgtgcgtttttagcttttatccgttttcctgtgagtgattcgggaggacaaaaaatttaaagtgaactttgtcattttataaaagaggccacacccggaatttgtaaaccccaccaggcttacaaaacccttttttttttccccgccccaaaaaaaagaactcccccctttaaagggggggtctttttggatggggagagattaaaaataggtttttccccccccctttttatgagaaggggcctttagccccccccccggggtaaaaaaaaatctgctttttgaaatggggggacattccaaaaaacccccccctttatattctttggggggaaatccttttaagccccctatttcttttttttccgcggagggaccccccccccaaaacctaccaaatgggggcttctgtttatttggggaacaccccgctggttttttttccggccgggggaacaatcttttccagttttttaaacccccccagagctgggcaaa

SEQ ID NO: 89034 - DNA, 922 bp, Glycine max
  Clone ID: PAT_MRT3847_51406C.1
aaaactcaagacaagtatggctgtcggaaagaacaaacgcttgactaagggcaagaagggtggaaagaagaaagtcgtcgacccgttcacgcgcaaggactggtacgatgtcaaggcccctgctatctttttggagcgcaactgcggcaagactctggtaaaccgtacggctggcaccaagattgcgtcggaaggactccgcggccgtgtgtttgaggtttgccttgctgaccttaacaaggacgaggaccaggcttttcgcaagattcgcctctgcgctgaggagatccaaggcaaccagattatcactggctttcatggcatggactttacccgtgataagctgtgctcgctgatccgcaagtggcagacgctgatcgaagccttcgtggacgtcaagaccactgatggctacttggtgcgtctgttctgcattgcttttaccaagaagcgtccaaaccagatcaagaaaacgacctatgccaagacagctcagattcgtgctatccgtaagaagatgacatcgatcatgacggaggaggcctccaagtgcgacatcaaggacctattcctgaagtttgtgccagagatcattggcaaggagatcgagaaggccacccagggcatctacccgcttcagaatgtgtacattcgtaagtgcaagatcctcaagaagcccaaatttgacctggtccgtctgatggagctccccgagggtggtgcccaggagaagggtgctaaggtcgctcccgaggaggaccagctggtggagtccatggctggccctggtggccgtctgtaagctcgttcattagcttggcagctcagttacccagttagtcatgggttttgttgtccccgagtgctcgaatgggtactttttttcgaagacgatggagaataaaggcgaaattcttattcc

SEQ ID NO: 89035 - DNA, 323 bp, Glycine max
  Clone ID: PAT_MRT3847_51407C.1
atagactgtacattcaatgtaaggagaaggggtcttattattcggaaatttgggtgatgacaccatcaattttgaggcttttccccacaagctggtgcagttgggacagatttatgagggaaaaatataacatgcttttgactagtggcacacagctgaagaactttctgtctggccataatatcaccaggacaacaggcttcgatttaaaatgggaagttgtgtcagatataaagttttcagattgagattttgtcagtggaaactgtactgagatgtctgatgttgagagtgtggatgctgacgacaaggcaaagattatg

SEQ ID NO: 89036 - DNA, 454 bp, Glycine max
  unsure (1)..(454): unsure at all n locations
  Clone ID: PAT_MRT3847_51408C.1
gtgaatgggaatgtcctcagtgtgatttctataactatgggaggaatatgacttgcttaaggtgtgattgcaagcgacctggacaaatatctctgggtgccaccaataccatgccaaatatggggtacgaaaatggaaacaatcctaatacttcagacattgatgctaggttagctgctaatgaagaaaaagcacaacgttggtttagcaaggtttctcaactagacagcagtgctgatattaacagtgtcatggcagatgaagattttcctgaaataatgccattgaggaaaggagtgaatagatttgtcgtgagcacaagaaagactccactggagaggaggttggctaatgctcaatacaagagaaacttgtncaataatgacattcccgggatgaggattctaaagctggggagccaatcaaatcccatgacaatctggatgaaatgcta

SEQ ID NO: 89037 - DNA, 480 bp, Glycine max
  Clone ID: PAT_MRT3847_51409C.1
gggctgctgccgtgccgtaccggttcgccggttcgacccagagcgaccggtctcgtttgctgtaccgcgaccacaggggggcgcgcattgtaacggacaacactggcgatcggttcacggttagacaaatgtctccaagtagtcccacgtgtagaggtactacttcgtaaaggagctaatatcagtctctgagctggccgctgagttagtgacacactcactggagcactctgtgtctaattgctgaacactcttctatacgacataggacttcatgtcagatttaaactctgtgtgtctctttgtcagtaccctgattaattcgaagtgcaagctcgagaacacgcgggtgagtactcccacgctcctatctggtataggatttggtggagagactatactatagagtactgtagtttcactctctacttctcactgatccgcatagtcattcatagtggcctgagaagtactccactt

SEQ ID NO: 89038 - DNA, 281 bp, Glycine max
  Clone ID: PAT_MRT3847_5140C.1
aggacaaaaggaaaaggcaccaaattaaatttaagtggacacctttattcaaaattttagaggatgaccgatcaacattaaaaatataataaagcccttttaaacttggcttcttattttttcgcctaacacattgaaaattctaaaaatgttacgagcaagtcccatcactacttatttcactcggatcaggacaaccttcaggaacagaaatatttacttgccaagtttgctttgcctccaattcaagattggaagaaagttcccctggtgatagcatc

SEQ ID NO: 89039 - DNA, 344 bp, Glycine max
  Clone ID: PAT_MRT3847_51410C.1
ggaaatggtaaatggataaagcatgcatacttttttatccacgaaactttgaatagtctttcccagttttctttggcaagattttctgtcttcttctcaggttccttctttccttttattttttctaatcaaggcaccccatactttttttgttcaaagtgcaaacacttttgaaccattgaaccaagaatttaaattgatgtgggattggggttttgccatgaccattgattttggggaaaattgcggacaaatgtagctacaattttggatggctttgtagttgcagaaaccttaaaaacattaacgttgcatttgaaatagcggtcacgggcccgtttttt

SEQ ID NO: 89040 - DNA, 1148 bp, Glycine max
  Clone ID: PAT_MRT3847_51411C.1
acccacgcgtccgtacggctgcgagaagacgacagaaggggaacactgatataaagtgaaaatcattgtctcatcacagtagtactcacactatacggtggcggaaccagagaaaaccaaccagaccgattactcttgaggaaacaaaaatctaagatgagccgccatccttctgtcaaatgggctcagacgtctgatgtactctacttaacagttgagctgcctgatgctcaggatgttaagctcaaactggagccagaaggaaaattttacttctctgcaactgctggtgcagagaaaattccttatgaggttgacattgatctgtttgacaagattgatgtaaataatagcaaagctagtgttggttcaagaaacatctgctacttggtgaaaaaggctgagaacaagtggtgggacaggttgttgaagcagggagggaaatctcctgtctttctgaaagttgattgggataaatggggcgatggagatgaggagcaagataataaacctgcagcatctgatatggactttggtgacattgatttttctaagttgggcatgggagggggtgaaggattggattctgatgctgcaggcaatgacgatgctgatgagagtgacacagaagaggagtttgtagctgaagcatctgctagtaaagaacaagatacgaaagatgctgtaagcagcgatgcaattccaaaggatgcacctgatactaaagcataaaaaaattcgagaatggtgaacggtaacatagctttgactatgtaagggcaagacaagcatttctgaaaggttgcttaccataaatctttgcagggttaactgatggttcggtaatggcatgttaacttcttttcagcgttttgaccctggatttttaacaagctagacatatgtgttggccatacataatacaatttgagaatggaagtgttattatgtctttgtttcgcttggaatgcaggggtcaatgagctctatagtttttcagtgaagttacacttctctgatcggtgagaaagttcgttttagaaaaggcaaactagtttgagttttgatcaatgttttgaaatttgggatggtcatttaaccagtgtagacgttttgaattagtgacaatttaaggtcctgtttgggcc

SEQ ID NO: 89041 - DNA, 1111 bp, Glycine max
  Clone ID: PAT_MRT3847_51412C.1
cagaaaccgaattgaagcttccaattattgacttctccattgagtacttggagtccaattctgatcagtgggaatcagtgaaatcccaagttcacaaggcccttgtagagtatggttgctttgaggctgtgtttgataaagtccctttggaccttcgaaaagccatttttcttgaagtggaagagctgtttgatctccctttacaaaccaaacaacgagttgtgtctagtaaaccataccatggttatgttgggcctcttcaactctatgagagcatgggaattgatgatgtagatgttcatgacaaagtggaaagtttaatcaagatcttatggccacaaggaaaaccaggttttagcaaaaatctacaatccttcacagagcaagtgacaaggttggatcagattattaggaagatgattttagagagtttaggtattgaaaaatatatggacgagcacatgaactcaacaaattaccttgcacggcttatgaagtaccaaggccctcaaaccaatgaagcaaaagttggcataagagagcacacggataagaacatattgaccacattgtgtcaaaatcaaattgatggtttagaggtacagaccaaaagtggagagtggatcaaatgcaagccctcaacaccaaatagtttcgttgttgtcaccggggacacactttatgcatggacaaatgggagggtgcatacgccggctcatcgagtgatgatgagtggaaatgagacaaggttctctattggattgtttacagttccaaaaccagggttcataataaaggctccagatgagcttgtgacagaggagcaccctttgcttttcaagccctttgtccagagtgagttcatgaagtttcttcgctcttctgagagtaccaaaaatgccctgaaggtttattgtggagtctgagattttattcaaatgacactagtgctccctctacacaatcccttttggatttttcataaaagtgtgtaatatttgaataaagtttgcaatatggtgtgagtatgtatgaaccttttttctccaattcatatggacaaagattgtgagttttgtattgttcaaacccaggaaaaaagtttgttttt

SEQ ID NO: 89042 - DNA, 454 bp, Glycine max
  Clone ID: PAT_MRT3847_51413C.1
ctctcttccatctctgtttctctctctagattctcgctccgaattcgttccttcgtttgttcctttttcgcattcgtcttcgcgcggatccgagtgcgtcaattcgaatttcgaaagcctagggtttctggaaagcatggttgcggagctagggttttgcgcggatctagggtttcgcgggttctgagggcttcgggtgtcgaattaggagggggatttgatggtacgcgttggggaaaatgcgaggctatgcatgggcgtggaggtgagaagggtaagaggactcggcacatgtggaaatcctccacacgtggcgactcgtccctgaacagccgatgtttcttcgtcttcttcttcgtcgtcggcgtcagtgaagtcgttctgtaaggacggtcgcaaaatcagtgttggtgaatgtgctctccttaaaccacccgaagatcgcccaccattt

SEQ ID NO: 89043 - DNA, 587 bp, Glycine max
  Clone ID: PAT_MRT3847_51414C.1
ctgtcttctaggtaacaaacattatccttgcatatttaattatttatatatgtatgtatttgcttattaagtatgttctttctatcaagttgcatcttaaactgagtggagatggctcatgattgtattatgggcattgcatgaatatcctggcagtgggattggctatgatacgagtgtatgcatgattgtgcgagagagttgaggagagaataatggaggaggtgattggctatatttgttagtttttggagcacataattctgatgttatgactacacagggggtttgagtcccattatgtgtacttattgaaagtgatatgtgcttataaaattataattatattcaaaggattttcccttaagaatttgacttgaaatgatgtgtttttttaaccttatacatgcccttaagaattcttgaaaatgacatgcactcattcaaaagaattggacttgcattaaggtattctgcttcttatctggacatgttattcattgtttatatcatgggaagatttttgaggtgacagtttaatgtgcttatagttcattggaacccctcattggatggctccagaaggt

SEQ ID NO: 89044 - DNA, 320 bp, Glycine max
  Clone ID: PAT_MRT3847_51415C.1
gtgtagcattcaacattccattgtaggagtacgctcacgtttggagtctggtgtagagcttcaggtaaaacattttgtgattttctctagagatcattttttggttttttttttctgaggggtattgcatgatgtcccatgaaaagtttgtgttctacatgactgcagtaaattgtaccaccaaccaaaattggtagagaagggggaaactgcatttgctcacattttgccatgacttgagaaattattcttttttttgcaggagttgagaacatcaacgtatcacctcagctattattattatcagtcttcctatctct

SEQ ID NO: 89045 - DNA, 445 bp, Glycine max
  Clone ID: PAT_MRT3847_51416C.1
atagttattatttttgcaatcaaaatatatgaaaaacttaacaaattaataacttggttttttctactgttttttggaaaaaaaaaaattggagaatcccacatcagcggaggggggcccaaaaaaagcataaaacaagagggcttttgtttgatttcttaacaccggaaaaggaaagaaagggccttagggaaaagaaaaaaaaagcgtaaaaatccttggatgaccaaaaaaaaaaagaaaaaagcttctggcggatggggggcaaaaaaaaaaaaaaggggataccttccccgccgaagaggggggggaaccccaaaaaaaaccgcctctttaggagaaaggggggagcaaaatgtggaaaaaaacccccccctcggaggggtgccccccaccaaacatacggagaaccccaagtcctcgacgaccggggataggaagacgg

SEQ ID NO: 89046 - DNA, 369 bp, Glycine max
  unsure (1)..(369): unsure at all n locations
  Clone ID: PAT_MRT3847_51417C.1
nttnnnnnnntnnnnttttaaaaataaaaaaattgaatatcatataaggaaaaaaaaaagacttataagcacatgcactgaggtggtatgatagagggtcgtgacggatcagacaaaataatacactttaaaaacttaaaaaacaaaatagaacttgttacaaaatgacacaaaacataatgtcgaaaaaatgacattaaacctaaaaacataaaccttcttccactcaattcaacaacatgaacaaagtagaaaaatacaactaggagtaaaagtaaaaacataaggccatgcatgcaatctattttgccttgaacaatgtgcttcaaggttgggggctcgcgccctggcgctcttgagagtttttac

SEQ ID NO: 89047 - DNA, 313 bp, Glycine max
  unsure (1)..(313): unsure at all n locations
  Clone ID: PAT_MRT3847_51418C.1
ggacagcaaagatgttaaactaaatagtaggaaaaacataaattagtagtttttcagtggttgctttaggtgatacctcaaaaatatttggcataatgtgaattaaacaaaatgtgtgaattctcaaagtcttcattatacaatcactgcttcaaagaagatttttatttttattttattaactgaattcttaatcagatgagcatgaatacatttttgtaatagaaaacacatagtaatatgagacttgaagattttccacagggtanactctggtttcaactgaatggaaacccanctctattttttgaat

SEQ ID NO: 89048 - DNA, 466 bp, Glycine max
  Clone ID: PAT_MRT3847_51419C.1
gtttattttttgccatcctaaaaaaaggtctaatgatgacacttgcgcagctgcctgatgcgctatggggtgcatccctggtggacaggtaagattgaaaggactgcaaattgctctttgcgaagagaccagatgcattcttgataactagacgtcccgaacgggacttaagcctgactcttgacggatcactttccctaggaggcatgaattaactgccttttacctttcttaatgatttatgtgtagtgaaatcggacatttatatatcttagcctctttagggaaagtcgatccaacatgagcgtactaaaacctcgtcggacattagttatcaagaatgcactgagatttgaaagacactgtgcaatccttactaacctctagtccaccggcgatgacactctatccgctcgtcggctctgcaaatatcaacattaaaacacttttttgatgaggaaaactt

SEQ ID NO: 89049 - DNA, 429 bp, Glycine max
  Clone ID: PAT_MRT3847_5141C.1
acgattggctctattgaagggtgtcagtggagctttcaggccaggtgttctcactgctctgagtgggtgtcacaggtgcaggcaaaacaactctgatggatgtactcgctggtagaaaaactgggggatatattggggggaatatcacaatctctggttatccaaagaagcaagaaacatttgcacggatttctggatactgcgagcaaaatgatatccactctcctcatgttactgtatatgaatctttgctttactcagcatggcttcgactgtccccagaaatcaatgctgacaccaggaagatgttcatcgaggaagttatggaacttgtggaactgaaagcactaaggaacgcattagttggattgcctggtattaatggtctctcaacagagcaacgcataaggttgactattgcagttgaac

SEQ ID NO: 89050 - DNA, 260 bp, Glycine max
  Clone ID: PAT_MRT3847_51420C.1
atcctccccaattgggacgtcatcggactacgaggcaccggaagccacgacgttgtcgtcagcgacgtcattgtgccagagcaatggaccttgatccgcggcggtccggcaacacttgatgggccgatctatcgttatccgtccgtcgctttcgctgcgcaggcgcatgcggtcgtcggcatcgggattgcgcgagccgcaatagacgaggtgatcgccatggccggaagccgcgcctcgatcactggagcgcccgtgac

SEQ ID NO: 89051 - DNA, 521 bp, Glycine max
  Clone ID: PAT_MRT3847_51421C.1
gcctaacaagccccactaaaccatacacctctactcgttcacgctaccccttgctgctcttcttgtacctttaagcggaaaagataaagatggcagtacattcctatttaccttacagtcacgtgaacgagggacaccctgacaagctctgcgaccaaatctacgatgctgtactcaacgcttgccttgagcaggacccagacagcaaagtctgctctgcgaaacatgcaccaaaaccaacttggttatggacttcggacaaatcacgaccaagggcaacgttgactacgagaagattgtgcgtgacaccagcatgaacatcggcttcgactcatatgatgcgagactggatgccgacaactgcatggacctcatggacattgagcatcaaaaccatgatattgctcaaggtgtacacggacaccttaccaaaaaaccagaagaaattggtgctggtgaccagagtgacatgttcggctatgccactgatgaaaccacagaattgatgccattgatccatg

SEQ ID NO: 89052 - DNA, 443 bp, Glycine max
  Clone ID: PAT_MRT3847_51422C.1
gtcatccaagtatatacagtaccaattttattcgacgttacattggaatgagaccaaactcttaatagtcaagacgcccaatcacaaggcagtacttattcatgggcatatataaatacaaaggaccaccaactaatcatgaatgagaaatatactaacatatccgcgttaataacatgaacccttgtgaaccaacattaataatcctcttgaaagagatgtttccatccaaagagatatgcgaaaaactaataataatattaacaacacatgggactaatatgagccatcctatgatatctgatcatcacaaactcaagcgatgtagtctgagagcgttgtaagccacatgctcagaaggtggagcatgaggcttgttgctatgtgtcccccactaggattttcacggcacgtatgaaaacgaattctcgttagggcataga

SEQ ID NO: 89053 - DNA, 243 bp, Glycine max
  Clone ID: PAT_MRT3847_51423C.1
aattatctctgacatattccctaaaataattatttttatagtgaatcatttattaagaaaaataaataaactgaagggcttatttattagttttgatcggttatacttataccccttccttctatcagagagggtgtccatcattccccttttcaagtatgaacttaataaaatcagtcttgtcctagtagaattcagtgatttgtatcttggtaccagtggtaccccttttataatatattt

SEQ ID NO: 89054 - DNA, 454 bp, Glycine max
  Clone ID: PAT_MRT3847_51424C.1
gtggcgaatccatgatttttgcaccgaggtactgaaaaaacaaggtggcactggggaattcaaagggccatggttcaccaaaatgcactatttgatcacttgtgactccctcaacgtgcaacacatgctctgcaagagctttgacaactacatcaagggacccgagtttcgcgagattttcgaacccttcggagatggggttgtcactgccgattcagagacatggaagtacttcagaaccgtcctccattccttgatcaaacaaagaaggttcgaaacgttcgtcgataaaaccgttcagaagaaggtgcacacaagccttcttccgatattggatcatgtacaacagcaaggggagatggtggatcttcaaggatgtcttaaaccggttcacgtttgataacatatgctccacaatcgtgggacatgatcctaagagtcttcccattgattt

SEQ ID NO: 89055 - DNA, 352 bp, Glycine max
  Clone ID: PAT_MRT3847_51425C.1
tttgcttatgtgtacctttgaaaaatttccgcggcaggctaagtctacaggtctgatctggcaattgtctaataacttagccactttgtgacgtgtaatgaagttgataacagatttagcgtgaatgaacggctcatgcatgactaaaatggttgtcaatcgctaatgcccctgtaccgcacgatagatcgccactacttgtggtatggcttaaaaccaaagccggtctgcactgtaacaatttgtgggagattgtgttgttattgtgagaaccacttttccgttttttgaagtttttatggggggtccttttgcccaagtttggttttggagactggttttctatgtgctt

SEQ ID NO: 89056 - DNA, 1794 bp, Glycine max
  Clone ID: PAT_MRT3847_51426C.1
cccacgcgtccgcccacgcgtccgtccacgcgtccgcccacgcgtccgcccacgcgtccgggctttcacggcgggttccacttgtttctttttttctcgctgtcactatccctcttttattttttctcggtttttattttgtatagaaaaaaagtaatatagtcatcccaataaccctttatttttctcgttttttttttttttataaaaaaaaagaaaaaagaaacatattcttgcaatttcgttgtacaaacaaaattcccctattttcggcacgcctttgttgaatttccaatctctatttttctttctttctatttatacgtaataattccaaaaagcctaacgcgagagattcatcagtttttcaattattcctcgaattttgaaggaatcatacaaacgcttgaaatattcgtcatcaacaacaacctcacgctgctatagatttttttttttctcttcttacagatccaaacatggccgaagaacaccgatgccaagctcccgaaggtcacagactctgctccaacaactgcggcttcttcggtagccccgccacaatgaatctctgttccaaatgctacagagacatccgtttgaaggaagaagaacaagccaaaactaaatccacaatcgaaaccgctctttctggatcttcctccgccaccgtcgccgttgcctccgccgtggattctcttccggcgccggttgaatccctccctcaaccgtcggtggtgagttcgccagatgtggccgcaccggttcaggcgaaccggtgcggcgcgtgtaggaagcgcgtgggattgactgggtttaagtgcaggtgcggaaccacgttttgtgggactcaccggtaccccgagaaacacgcgtgtggcttcgatttcaaggcggtggggagagaggagatagcacgggcgaatcccgtgatcaaaggcgagaagctacggaggatttaatctgcaccgttgatatgatgatcgaagcgattagggtgagttgatcaggaccgtccgtcgtgggccgttgatacgaacctatttcgagcgtgtgtaagaaaaaaaaaatctattagttatgacgacattgggaagggttgaataagtcatattttggaggctttgctttgtgtttgttcattaaaaatggaaaatgttaggtccacccacgttcggaaattgaggggtttgtttagaattgcaatgcaatgtaaaaaagtgtagtttaatatttttctacaggcatttctatttttcttccgtttgcgagaaaggtaaattatcgtctgcgttgtatccaaaaaaaaaaaaaaatccgatagtgggaagttgtgatcacattatacattggctcattataaatgtgtggggataaatcaaaactattctggaaggaaggctgtggccgctgtgcactgtttcttccgtgggacccaaaaggtgtgagagtggatgaactcaaggcccaattggggtctcccagttgaggtattagcttttgtgaatggaaaaatgacatttgggatatgaaagctactgtatattcattactagtagtttcttgcttccttaaaattatattcgagatatagaaaattacattttcatatgtaaaaccgaacatactagtagttggactttaacgattgtcatctagtttcgggagcgaatgttaaacgcaatctactctttatagctaaaaagcatgtttgttgttgtgttaatcggttctaacttgtatattttgatgttttttatctatactaattataaaatgatgtattatgtatgt

SEQ ID NO: 89057 - DNA, 1112 bp, Glycine max
  Clone ID: PAT_MRT3847_51427C.1
aatttcgcataattgtctcctccaagtctcgattaactttccatcccattaattaattatcctcttaagaatgagaagttgaaaatgatcaatacccatttgtctcctttcgcggtggcttcctcttatttttttctttctctctctctttctcactcttatatcctttccgagttccgactctgttaatcattctccgttaagattctttcttctttcctctttccactcttggtcttatcttcttcacaatcccacaaccactccttgttataaatcagatttttttttctcttcttacagatccaaacatggccgaagaacaccgatgccaagctcccgaaggtcacagactctgctccaacaactgcggcttcttcggtagccccgccacaatgaatctctgttccaaatgctacagagacatccgtttgaaggaagaagaacaagccaaaactaaatccacaatcgaaaccgctctttctggatcttcctccgccaccgtcgccgttgcctccgccgtggattctcttccggcgccggttgaatccctccctcaaccgtcggtggtgagttcgccagatgtggccgcaccggttcaggcgaaccggtgcggcgcgtgtaggaagcgcgtgggattgactgggtttaagtgcaggtgcggaaccacgttttgtgggactcaccggtaccccgagaaacacgcgtgtggcttcgatttcaaggcggtggggagagaggagatagcacgggcgaatcccgtgatcaaaggcgagaagctacggaggatttaatctgcaccgttgatatgatgatcgaagcgattagggtgagttgatcaggaccgtccgtcgtgggccgttgatacgaacctatttcgagcgtgtgtaagaaaaaaaaaatctattagttatgacgacattgggaagggttgaataagtcatattttggaggctttgctttgtgtttgttcattaaaaatggaaaatgttaggtccacccacgttcggaaattgaggggtttgtttagaattgcaatgcaatgtaaaaaagtgtagtttaatatttttccaaaaaaaaaaaaaaaaaaaaaaaaaaaaaagcggccgctc

SEQ ID NO: 89058 - DNA, 1378 bp, Glycine max
  unsure (1)..(1378): unsure at all n locations
  Clone ID: PAT_MRT3847_51428C.1
tggcatataatgcccatgcaccacagcagggaccccaacagcagaggttctgcancatcgacatgatcaaaaccttaaaatgacatctaattaacatgaactgcattaggtcagcttcataacacattcttcaccaataatgaccacacgggacttggatattattattattttgacatcttanaatcactctctgtttagcatgcataaaagtgaatcttcttgtttggtgagtccgttggaatttccatgttataaatttgttctgattttggcataagcagaaaatttacatttcaacaaaagaagacttttgtttcgaaaaagctcaaaggcgatttggtgattttaacaattatataacatgattaaactaacccataaaatttttcaattcagacacaaacagactaaacataaatgaacccattcattactttatttagttccacataacccataaaatcacctgtatctccttaaaaaaattaagaggacaatgaaatttacaagactaacaaagaaaggagtattagcaacttaaaaaggcttattatccttgaaattgaatgatctaggcaaatgcatcatcatatttaatatcaagttagcatggttcatggatatgttcacaaaaactccggtcattgaagacaggtttttacttattaatgctctggctcgccgatataatacaatcccaaaaaccaaaagaaaatatgattgaaggaaagaagagatgaatagaaacccttagagcccccacttcagaagttatagaacattagaacactataaaattgaatttcatctttgttcttgaagctcggctttttctactctttaaaaatgattgcatctggaaacactcagagatcttactttctgatcctttttgagttacccttcttaggcccttctgctcgatgttttctcttggaagtactgctgcaacccacagcattagaggcagactgagatggcatatgatgcccatgcaccacagcagggtaactcaaaaaggatcagaaagtaagatctctgagtgtttccagatgcaatcatttttaaagagtagaaaaagccgagcttcaagaacaaagatgaaattcaattttatagtgttctaatgttctataacttctgaagtgggggctctaaggttttctattcatctcttctttctttcgttcgttttctcttttgttttattggatttataaatacggtcgaacttgttagaggttctgtgatatgcttttttaggtgctgttcttgtaacttatattgggaccataacatgttgcgttcttatctttaacatatacgtcngtttgagtttttggcagttcaatgaaacttattgtttgcaccatat

SEQ ID NO: 89059 - DNA, 1590 bp, Glycine max
  Clone ID: PAT_MRT3847_51429C.1
tatgtgcggattgggaagtcccctcactcgagcccccctttatttttttcgttttttttttatggaaaaaaatattgtagcaatttcgtcgtagaaacaaaattcccctattttcggcacgccgttgttgaatttccaatctgtgattttttttcttcttctatttatacgtgataattccaaaaagcctaacgcgagagattcatcagcttttcaattattcctcgaattattttgaaggaatcatccaaactgcttgaaatattcatcatcaacaacctcacgctgttatagatattctctctctctctctccctctctctctctctcacacacacacacacacagatccagacatggccgaagaacaccgatgccaagctcccgaaggtcacagactctgctccaacaactgcggtttctttggtagccccgccaccatgaatctctgttccaaatgctacagagacatccgtttgaaggaagaagaacaagccaaaaccaaatccacaatcgaaaccgctctttcaggatcttcctccgccaccgtcaccgcaaccgccgtcgttgcctcctccgtggaatccccttcggcgccggttgaatccctccctcaaccaccggtgctgatttcgccggatatagccgcaccggttcaggcgaaccggtgcggcgcgtgtaggaagcgcgtggggttgacagggttcaagtgcaggtgcggaacaacgttttgtgggagccacaggtaccccgagaaacacgcgtgtggcttcgatttcaaggcggtggggagagaggagatagcacgggcgaatcccgtgatcaaaggcgagaagctacggaggatttaatctgcgccgttggatgatcgaagcgattagggtgagttgatcaggaccgttcgtcgtggaccgtttacgaaccgatttcgagcgtgtaaaaaaaaaaaaatctattattatgacgacattgggaagggttgaataagtcatattttggtggctttggtttgtgtttgtgcattaaaagtggaaaaatgttaggtccacccacgttcggaaattgaggggtttagaattgaaatgaaatgtaaaaaagtttagtttgattatttttctacggcatttctatttttctagtgggtggcgcgtttgccagaaagggaaattatcgtcggcattgtatcctgtcgttctctctttatctctttctttttgttgttgtttggatttttggttgaaaaatgaatataggtaaaaaatcaagtagacgcctcgaatataatttctaaatccgatagtgggaagttgtgatcacattatacattggctcattataaatgtgtggggataaatcaaaactattctggaaggaaggctgtggccgctgtgcactgtttcttccgtgggacccaaaaggtgtgagagtggatgaactcaaggcccaattggggtctcccagttgaggtattagcttttgtgaatggaaaaaagacatttgggatatgaaagctactgtatattcattactagtagtttcttgcttccttaaaattatattcgagaaatagaaaattccattttcttatgt

SEQ ID NO: 89060 - DNA, 654 bp, Glycine max
  Clone ID: PAT_MRT3847_5142C.1
acccctcttaataccaattttctagggtttatacaattttcgatggcttcttcagatgttgagtaccgttgctttgtcggtgggctcgcttgggccactgacgaccaagctctcgagagagccttctctcagtacggcgaaatcgttgaaacgaagattatcaccgatcgtgagactggcagatccaggggttttggatttgtgaccttcgcctcggagcagtccatgaaagatgcgatcggagcgatgaatggacagaacttggacggccgtaatatcactgtcaatgaagctcagtcccgcggtggcggcggcggcggcggaggaggaggatacaatcgtggtggcggtggatatggtggtcgtagtggcggtggcggtggcgcgtgacggtggttatggctggtggtggtgggggttatggcggtggcagagaccgtggttactctcgtggtggtgatggtggtgatggaggctggagaaactaaggcttgatgtcgtcaattagggtttatgattatgccccgtatttttagttgttgtggtttgagttcgagtttctttatggtttcgtgttaccgtggttcttgtttttgaccaatatatctggttgtttatagttgatttagtgaaatgataatcagtaattggagt

SEQ ID NO: 89061 - DNA, 1409 bp, Glycine max
  Clone ID: PAT_MRT3847_51430C.1
gaatctcgataaataaattattttctcttctccaaaattcaactcaataatcccttccctggttcccatcatggacgaattagaagaaaccctactcacccaaatcgactgggaatcgttcctcgacgacatacctgaacttaacgtcgatgattttttgcaggacgacaacgccgttcctgttgttaccgacaatcattcctccccgaacgacgaccccgttttgtccgagatcgagaacatgctcatgacgcaggccgaaaacgacgctgtcgttttgcccgagacgccgtcttcggaggccgggtattacaagctcttcgaggagattctggtggaggagcccaaggaaggacccgtgagcccgccttcaaaaatagagtccgaggaaggctccgacaaagacaagaccgatgatgctgcttccgatgaacccatgtcgaagaaattaaagaggcagttgaggaacagggatgctgctgtgaggtcaagggagaggaagaagttgtatgtgaaaaaccttgagatgaagagtaggtacctagaaggggaatgcagaagactggggcatttgctccagtgctgctatgctgagaacaacgctttgcggctttgcttgcaattgcgtggtacatatggtgcttcaatgaccatgcaggagtctgctgtgctcttgttggaacctctgctgttgggttccctgctgtggtgcatgggcatcatatgccatctcagtctgcctctaatgctgtgggttgcagcagtacttccaagagaaaacatcgagcagaagggcctaagaagggtaactcaaaaaggatcagaaagtaagatctctgagtgtttccagatgcaatcatttttaaagagtagaaaaagccgagcttcaagaacaaagatgaaattcaattttatagtgttctaatgttctataacttctgaagtgggggctctaaggttttctattcatctcttctttctttcgttcgttttctcttttgttttattggatttataaatacggtcgaacttgttagaggttctgtgatatgcttttttaggtgctgttcttgtaacttatattgggaccataacatgttgcgttcttatctttaacatagacgtcgttttgagtttttggcagttcaatgaaacttattgtttgcaccaaacctgctctaaaaaaaatgtaaattttctgcttatgccaaaatcagaacaaatttataacatggaaattccaacggactcaccaaacaagaagattcacttttatgcatgctaaacagagagtgattttaagatgtcaaaataataataatatccaagtcccgtgtggtcattattggtgaagaatgtgttatgaagctgacctaatgcagttcatgttaattagatgtcattttaaa

SEQ ID NO: 89062 - DNA, 483 bp, Glycine max
  Clone ID: PAT_MRT3847_51431C.1
gaatgttggtacggctgcagctcccgcacctgcacttcccggaatcgtccgactcgacccacgcattccggctttaaaacagactcggctccatggacctcggcggagacataaaagagagtctacacctatagggggaggctctggcacaaaaagagctgttggaagcgatatgccataggcgcatctttgaatgtggtcatgctaagcgagctaacgaatctgtagaagcatgtaggacatgtaagtctcacagtacaagttccggctgttgacaagttgtattcgactaatgggcagatgacagcaaaaattatgaacccttgacacacagccggtggcgatctgaaaagactcactgatgggaagtagtgagagggtcacaatatgaacttgtctcacattggtgcacgcaaggactactatacaacattctggaatgtggcatgacaaaattgtgtgctatagcgcatgagatttcag

SEQ ID NO: 89063 - DNA, 301 bp, Glycine max
  Clone ID: PAT_MRT3847_51432C.1
cggtctcgtgggcggacgcgtgggcggacacgtgatttcgctcttaaccgccgtgatggcccttgttcgtcaacgacggcactcaatcctacgtcttcaacttcccgagccctcataggcatgactctgtttacagtttcctataagttcgaaaagctatgaaaaactacagctttgattgcatcatttactgcgtcgaacacattaacaaaggcattcttgtgcgctgtaacttctatcaatgatacaaatttcgtctcatggctatcttatccaactacacagtgtagatcatcaactc

SEQ ID NO: 89064 - DNA, 295 bp, Glycine max
  unsure (1)..(295): unsure at all n locations
  Clone ID: PAT_MRT3847_51433C.1
ctctctcattgcgtgcaccaccccaaaaaaaaatatacatatagatatgtacataaaaaaaacaacccccccccccccaannnnnnnntntanngggncgcagttggtgacggcgcaacacagcctggaaattggattggtctataaaaccccttcgggggctctccactttgacgggcaggggaatttttcatgggaggaaggaaaaagtttggggctcatgtgagccggattttgggtgaggaaagagcaaggtgaagaacaccttatctcatggctttcacttgggaaaggg

SEQ ID NO: 89065 - DNA, 342 bp, Glycine max
  unsure (1)..(342): unsure at all n locations
  Clone ID: PAT_MRT3847_51434C.1
gaattggagcttgctgcaatgatgcactagataagtttaggggcggtgaatgaaaattgaacagtttatattttgactgtttattttaagtttaccccttcaggtaaaatatgattcgcctgatcttcatcgggggacgtccattacctgactgcggagatgccataacactcttactgaacacaatctggtttcgtattggggttctcttcttaaataattnnttataatttttaaatcataccaaatataactaacactccaatatatttaatttcttctnatctcttcttacacctctcctttatggggtcaatttgggtactaaattttaatgttctg

SEQ ID NO: 89066 - DNA, 154 bp, Glycine max
  Clone ID: PAT_MRT3847_51435C.1
tgggggagttggattatcaaaagagatggcgagaaacgcattgagtgtcgtctgcacacatgtcgtcgcttcagggcttcaccatcaccagctaccatttagtgcatcaggagtaatacgtttcacactctgcatactccttggtgcatgaacg

SEQ ID NO: 89067 - DNA, 345 bp, Glycine max
  Clone ID: PAT_MRT3847_51436C.1
aagtaactttaatcaagataaggggaacttctttagaaacatttttcccagtacatgtgagatcatggcacatcctttattacatactatttatcctctatatggatgatatatgggagcaattggctcaagcaaacggactcagccagttacaatttactttgtcaactgcccttattgccactactgaggagatcctatcggatggagccgatccgatcgactgccatattaacaggcttgcatccctttctcaagttactggagatttcagtcttatatatcaattctgtatgttaatgtatttgcgaagaaatgatgagtggaagagctattcaataacat

SEQ ID NO: 89068 - DNA, 409 bp, Glycine max
  Clone ID: PAT_MRT3847_51437C.1
ctgtaaatattaacatcatttttttgtttttttgaaaaaaagggccaaaatcggtttggggtttgtttaaaaaaagtgtctaatgtttttgactcccattttccccttcatatattttctttcacacaaaaaactcccccatttgagggtttgtgttttttttaaattacccttataagcctaagaatattcattagggagagggagagggaaaaagaaagttccatgtgaaatacacatgctgtatatcggtgcattcatttgaataaaagaaacccgtaactctcagtctacatataatttttatttaatttcatgcttcaatctgaggcttaaacccctgctatgggggccaaaaaaatgggggtgagaactccgggccttcataattgttaaaaattggtggttt

SEQ ID NO: 89069 - DNA, 433 bp, Glycine max
  Clone ID: PAT_MRT3847_51438C.1
ttgtcgcgttttagcaaggggcaacgacatagttaatcttacgggccagccacttaatatatatgtatatatatatataaatgtatatataacgtgagaaagtgaattattgctcacaacatatgaggcaatagcaggtgcaggtcatgtgagacgcgaccagactattataaaagcaaccttaatgactattttggggcgaggttagagaacactgttattacagtatgcatctctaaacttatttgtatgaacttattgtgacagaagtagaaaatggtactgtaagtataaggtagagagcgtgtattataatcttgagtgagaatgtcattgggctaaggagggaattattcttgtgttaccgctataaaagcaagtgacttagacgattactactacaatgaccactacgatatgctccatgattttt

SEQ ID NO: 89070 - DNA, 436 bp, Glycine max
  Clone ID: PAT_MRT3847_51439C.1
ttcaggataacctacaattgttaactcattcctttctttccttttataaaacacggacattttccttcatatgtcccggataaactaccacacctgtgtgtatgtccctcttcttcttctagatagcgcccccccctattttatattcacactcacatttcccacacatgggaatatgatgtcacttatatacacactcgcttttgctgacacccccaatattcgggggtcaaaaatatctgccctttggggtgtgcccctttgtttgaccctttaaacttgagatggcgctgtctctgatatataagattagaggcttgtcttttgcccttgaaaaagaataggggtgaaaactctaaacactctgagaaaaatgggctaaaatcaaagcgctattatacaaaaaaacacccacattttggctataaaagtggga

SEQ ID NO: 89071 - DNA, 425 bp, Glycine max
  Clone ID: PAT_MRT3847_5143C.1
tgtatggggttccaggcttacccctcttaataccaattttctagggtttatacaattttcgatggcttcttcagatgttgagtaccgttgctttgtcggtgggctcgcttgggccactgacgaccaagctctcgagagagccttctctcagtacggcgaaatcgttgaaacgaagattatcaacgatcgtgagactggaagatccaggggttttggatttgtgaccttcgcctcggagcagtccatgaaagacgccatcgaagggatgaacggccaaaaccttgacggccgtaacatcactgttaacgaagctcagtcccgtggtggctatggcggtggcagagaccgtggttatggtggtggtggtgaccgtggttactctcgtggtggtgacggtggtgatgggggctggagaaactagggct

SEQ ID NO: 89072 - DNA, 176 bp, Glycine max
  Clone ID: PAT_MRT3847_51440C.1
agcaagaacctttacttaccagtcaagagcttatttttttgagatattggcattattaaaactggccaatatctgccactccccagaagaaaaaaaaccgccttgagcgcgtattccagagcttaccagcgctgggcatgcgcaagggattgactcatctatgagcgtccttaagc

SEQ ID NO: 89073 - DNA, 178 bp, Glycine max
  Clone ID: PAT_MRT3847_51441C.1
aaaacggaggatgaaaattgctcatctgactcatatttgctcaaggccagatgttgttgaggtgtgggatgctactgtgtcacacccatgattgctggtgtctttacagtcttatgagaatactgaatctgtacctaggcattattgccagaacaaaacatgcttaccaggggagctg

SEQ ID NO: 89074 - DNA, 313 bp, Glycine max
  Clone ID: PAT_MRT3847_51442C.1
gtggagcaatcatggaggagttcgaggatgcagtctttttttttatctaaaaacagcggtcttgaagacgttcccagaagggttaaggtggggatctatatccattgacaaaattaatcacaggttgggccccatcgatacaaccacgtccaaggatttttttaacttttcaggtgcgtgcgaaaatgggacaccgtggaaatacgtgtggtgaattattaccagaagatgccaagactgaatacctcaaactgctagatcgatttgatcccaaatggcgggaaactttttccaacctttcaaaacatttcaa

SEQ ID NO: 89075 - DNA, 583 bp, Glycine max
  Clone ID: PAT_MRT3847_51443C.1
ggtggtcttgaatatacaacaattcaccaattacacatattaggtattattaacaagtgcaaataagaaattgagccaataatataaccaaagcaggggttcctttataaattgacttcaactgtgcacgggctttaatgggcatagaagaaaaaaaatacttttaagttatttgttcagaacttggagagtaaacgaaattgggtttcgggacatacacgagacgaggtgtatataacaaccttaccagtccatgtcgtcatgtcgtgcacactgactaggcctatttattcttccacttggttttccaaaaacctccaaggaagacaaatttctttggtggagaaaagcaagtggctagagatcagacttgaccaaatggtcgtgttcttcttttagctctctctccaatcttgaatttccatggtgaggtttctggtctatccaaccaataatatccgagaatacaatctgcaaattttctggtgggtctccatacaatagaccgtgccacatctttggataaaactttagtgtcttatctgagcttggcggcacatcatataggtggttgctaactggt

SEQ ID NO: 89076 - DNA, 372 bp, Glycine max
  unsure (1)..(372): unsure at all n locations
  Clone ID: PAT_MRT3847_51444C.1
aaaanagnataagtgcgtnaatggataaaggtnctgagganatttgcgagacgttgtctgtgcntntgnntntgtgnncnactgtntgcgatnctgtgcgagntgctagttagtgtggngtgncgttcaaggnngngttcanatnancccgcagagggatttnnttagntacttgatagngtaaagatatngnagntgctcaantcagnnaatnncggaggttaggtnatgtggngatangtnacagtananagtcaaagtnnntgatgttnngtgtnntganttgtttnntggnnatttntgngcatcgcttgnantgtgtcanaangaggcnaagatctgtattcttanntcttgataatgncnggaaag

SEQ ID NO: 89077 - DNA, 195 bp, Glycine max
  Clone ID: PAT_MRT3847_51445C.1
cggcgacggcgagtgtacggattcgctcgtgtgtcgatggtcttcagctccttagattctggctatctccatttgcataagaaaaagctgcgttctcctcactcttggcttcttcaggtacttcctggggctgggtattggaggagactacccttagtcttctaccataatatcggattttgcgaccaagaagac

SEQ ID NO: 89078 - DNA, 290 bp, Glycine max
  unsure (1)..(290): unsure at all n locations
  Clone ID: PAT_MRT3847_51446C.1
gtcgagcccacagccgtgtcgctaccggacgccgatgacagaccgacatggaagaggagagagctatacagagaggaggagaagaagctgtagaactcatagtcaggcacgaatnagctatgactagcgactcatgaagctcgatgcactgagcgtccaagacgtatgctcaacatgctggggacatgcgcaggacatgctccatcaacgtcaaatccaatccttgcaaggttgtacaggacagtacgtgaactacaggcaagcatgggcatgctctgagtgactcagat

SEQ ID NO: 89079 - DNA, 393 bp, Glycine max
  Clone ID: PAT_MRT3847_51447C.1
gcggaaacaatgcaaagggtcacatcagattgaacggaacgcgaagatacgagtacatgcgggtggtgagggggaatcaatgcgagaaacgaagtgccacctgcggaaagggggtgtgctttttctgaagagtaagatgaagctggagagcgagaccattagtcgagctcctcgacggtggggccgtcgtcgccaccgggagcagcaccaggagcggcaccaggagcaccgacgggcatgccaccgggagcaccgccagctgccgagtagatcttggtcatgatggggttgacctgctcctcgatctccttctgcttgtccttgagctcgtcggtcgatgcggtggtgttgctgtccaaccactcgataccttgcttgacgatcttctcgagc

SEQ ID NO: 89080 - DNA, 257 bp, Glycine max
  unsure (1)..(257): unsure at all n locations
  Clone ID: PAT_MRT3847_51448C.1
gatataatgtctctgaaacaaccatggcggctgcatccacagcaggaagatcggtagcagcggctgcaaactctttggtaaatagcagctatttttcaaaaggagccttgtgggtgtcaggtgctctaacctgagctngctcgggttanagcacctgnnanccanacggcnnctntgngtntctggtgcnctnacncgagnagctacggtcgcttcngnnaaatggggacccncagggtaggtantaaatnaagcct

SEQ ID NO: 89081 - DNA, 339 bp, Glycine max
  Clone ID: PAT_MRT3847_51449C.1
aattttaaggtctggaaggaagccgtagaaatggttttgggttgaccggttttggccttggccctgaggttggattgcccaatttccattttggaaccttttaatggggtaaaaatggaaaggtaggatcggcccacccgaatgtgcctaatgatcatgaaccgctctattccagaggcggttcgggctctattctgaggtcaaatgcaagaaatcctgaggaatgagcatcttgtcaaatgaaagcgagacagacctttgctaactattcatgagataagcaagggactaagagtcatatgagatgtcatcttgataaactcagtactaagtagagct

SEQ ID NO: 89082 - DNA, 701 bp, Glycine max
  Clone ID: PAT_MRT3847_5144C.1
ggctaagatcgatcggcttctattcggttctggttttgttttttcgtgctgttttgctttagatctgataattgttttactgtcttatgttcagattatcaacgatcgtgagactggcagatccaggggttttggatttgtgaccttcgcctcggagcagtccatgaaagatgcgatcggagcgatgaatggacagaacttggacggccgtaatatcactgtcaatgaagctcagtcccgcggtggcggcggcggcggcggaggaggaggatacaatcgtggtggcggtggatatggtggtcgtagtggcggtggcggtggtggataccgtagccgtgacggtggttatggcggtggctatggtggtggtggtggtggtggttatggcggtggcagagaccgtggttactctcgtggtggtgatggtggtgatggaggctggagaaactaaggcttgatgtcgtcaattagggtttatgattatgccccgtatttttagttgttgtggtttgagttcgagtttctttatggtttcgtgttaccgtggttcttgtttttgaccaatatatctggttgtttatagttgatttagtgaaatgataatcagtaattggagtatcgagtttctacaggtttttaattgtacgctggatgtggaaaattattttaattcactaatgatgagtaattttattctggtc

SEQ ID NO: 89083 - DNA, 720 bp, Glycine max
  Clone ID: PAT_MRT3847_51450C.1
gtgagatgtatttttattcatcatccaaaataaaagatgatattttgggggtttaatgatcctaaattgaatgatatgtttgacttattccttaatcatgtttatttggatgacatgtttgaattttctttgagtatggttgttgagatgaattatttaatcaccatctaaaaatgatatgatgttattgggttttaatgaccctaatttgaacggtatgtgtaagttgtcccttaatggaattgtgagatgaattctttatttatcataaacaaataaaaatgatatttttcaggcctagcgacaccaaattaaaatgtatgtttgagttgtcccttaatttcgatgcaagattaattcatctcaattctaattattcaaaattgagcacacaaaccataaacttcaatttgtttttagattcactcgttcaaaatcgactacacaatctcaaagtttaatttatctttgctatttcgtaactctgtatgatgatttggttgaaaaatcttgtacaaatttatgttagatgaacaatataaaaaactataaataattcgtgttggagcaactgaacgatatttctctttgtcaagcatgcatatttgcctacttctcaaccttttactaaactttgtattgaatccttttatttaatgcaaatttcatattctttaaattattaaaaaagtacaagggcatggttttttccttactcat

SEQ ID NO: 89084 - DNA, 549 bp, Glycine max
  Clone ID: PAT_MRT3847_51451C.1
aaaaaagaaaatgcttgtaaaacacttatagaagttaacgttccatgttgttgcttccttatcaaggggaaaaagtaaatcaatatttgcaaaatcatgacagaatcaaacacactgttactcttgttcttaaaatcaaatgccaatgagtgcagaacagtatataagttgcacctcaggaattgagagaggagcgtgtgggactttcaaacaccccacaaagcacaaaggcagagctggaaccaatgaagcacggagacctttcttgtttgaaggggctctgtgtcgtttttgacaccgacacactgccacatttggtccacacttttctgatttaaaaattattttttttggcttcaagatttaagggggtatctctaccaactgatatacttgtaaaaaacatagaagcttgattttaaaaaatatctatttattgtgtatgcgggggccaaaattttaaacattaatttgggcaaaaaaggtgcccataagactccggggttcataggctggaacaccaactttttcataggtaaaaatactcaa

SEQ ID NO: 89085 - DNA, 194 bp, Glycine max
  unsure (1)..(194): unsure at all n locations
  Clone ID: PAT_MRT3847_51452C.1
cgagaaagaccacgaatactgccaatagattccagacataattcaaagtttactagtctcgaagcccggcattgtgttgtttgaattttgggcatgaacaagtctcaatcttnccttctctaacctttaaagaantaaacatactataaggaaacttgtcattttctttccatccttaaagcctcactcttttt

SEQ ID NO: 89086 - DNA, 712 bp, Glycine max
  Clone ID: PAT_MRT3847_51453C.1
cccacgcgtccgaagcaattcaaattgtcctaaggtaaggtgtttgaatgcttacatacatagattaaggattttaggaccaaagagggagtcatgaatgtgacaaacaaaccaaacccatatggttccaccaatgggtttcagtctctgcttcaacaaaatgggtgggaacagggatcatctagactcagacccactaagctttaccctgcaccaacggctcgctaccaggacattgttcgtgatgcaaacctcttctggggaacgcttcaagcttttcacaaaacacttggcaccaaatataagatttctactgtgggaggaacgccacttgatctacatcgtctttttgtcgaagttacatctcgcggtgggattgaaaagatcttatgattagaggccaatcatgccaaccctatagctccacaaccattccagaagttgctgctgtgaatgattcacctgttcagagtactccagtacaggcacatgatgatatggtttctggaacaattgatgcgaaatttgatgttggatatgtagttacagtgactctaggttctgagcagctgcaaggtgtcctgtttcatgttcctgataacgtgtcccagagttctcatgccgaaggcacatctagttcacagaatcttggtgatgacacgtctaatttacagagtcgaaagagagcaaaatatgcaccacgtgatccatt

SEQ ID NO: 89087 - DNA, 1391 bp, Glycine max
  Clone ID: PAT_MRT3847_51454C.1
gcagtatataaaggattttttattttatataacctagtgagttgtgtgaatctatagatacataaattgagctaagggaaggtgtttgaatgcttacatacatagattaaggattttaggaccaaagagggagtcatgaatgtgacaaacaaaccaaacccatatggttccaccaatgggtttcagtctctgcttcaacaaaatgggtgggaacagggatcatctagactcagacccactaagctttaccctgcaccaacggctcgctaccaggacattgttcgtgatgcaaacctcttctggggaacgcttcaagcttttcacaaaacacttggcaccaaatataagatttctactgtgggaggaacgccacttgatctacatcgtcttttaggtgatgttacatcgtgagtgggaggaagtgagtctgaccttcaatgtcaaagataccatatgattctgatcatctatggtgcgcaaatcctatctattgatgcttttacactatgagcaagtgtattattttgggattatcactttgagcaagtgtattattttgggaggcaaggcattcctcccacaacacctgatcttatgattagaggccaatcatgccaaccctatagctccacaaccattccagaagttgctgctgtgaatgattcacctgttcagagttctccagtacgggcacatgatgatatggtttctggaacaattgatgcgaaatttgatgttggatatgtagttacagtgactctaggttctgagcagctgcaaggtgtcctgtttcatgttcctgataacgtgtcccagagttctcatgccgaaggcacatctagttcacagaatcttggtgatgacacgtctaatttacagagtcgaaagagagcaaaatatgcaccacgtgatccatttcggccaaagtcaaacaggagcggttacaactttttctttgctgaaaattatgccaggctgaagccctcgtatcatgggcaagagagagcaattagtaagaggattgggtttctgtggaacaatctgtcagaagcagaaagacaggtttatcaagagaaagggataagagataaggaaagatacaggactgaactgatggagtacaaatccaataattcaactccaaatgctcaataggctgttttatgtaatccttagactgtcatttcatatgcttcatctgttgttcttttcatgcctttgctatagttaattttcttatccattctacagagaaacttagaagagtagctttgtgacaattctggtgtaaattatgctgaatggttttaataaacatcttgtagcggttaattcattgtagttactcttgaaattaagggtccttcattcaatttaaacatcttatttgt

SEQ ID NO: 89088 - DNA, 209 bp, Glycine max
  Clone ID: PAT_MRT3847_51455C.1
gagggcaaccacttggggcccccccgggtaaaaattttttttataaaacataagcggggaaattaatgaataggatcatggggaatcctttgtttgaagaaaaacccccccgccttgtctaaaaaaacccctcgcttatgggcgggggggaaaaattgtcttccttaaatccaaccccccataccggaaattaaagggccttccccccc

SEQ ID NO: 89089 - DNA, 184 bp, Glycine max
  Clone ID: PAT_MRT3847_51456C.1
cccacgcgtccgacaacacgatcaaaaactttttacaaatccataatacttctaaaacagcgttttcaacctaacagtggggatacaactaactataaactgaaacttaatacgcttctactgcatcagcaacaactcaaattttaacgaataaccaactttccaaaacaaacctaaatattca

SEQ ID NO: 89090 - DNA, 324 bp, Glycine max
  Clone ID: PAT_MRT3847_51457C.1
ccacgcgtccgtcagggcgtccgtcgggtgctaggtatcgacaaaaaggtaaggctgctaatagaccatattaaggtactgatgctataatatgatgagagggttctgctgattaaagtcgactggtatggtttgtcctgaaaacactatctatcggtattggtactacttaatgatattaggggaccgtctgtcataagaatatactccgaggttgcaatatctataaagtatcccactatcaataggtattgccattcacttcgctggctccttatcgtacaactcttcaatgatttctcataatgtcaatttcctcgactt

SEQ ID NO: 89091 - DNA, 221 bp, Glycine max
  Clone ID: PAT_MRT3847_51458C.1
cggccgccccttttttttttttttttttttttttttttattttttttttttttattttaaacaaagggggcactgttatttaaaaatttgggggacaacgggcccatataaaaaatcttaaaagaccatttcaaccttaacatttcttattaccccctaaaacattgcaaaggctaaaaaagtctcacgaacgttcgattatcatgagcggaaattctggt

SEQ ID NO: 89092 - DNA, 371 bp, Glycine max
  Clone ID: PAT_MRT3847_51459C.1
gggaaaataaatgggctctcttctttgaaaaaatgccactttttatacatgaaaaatcagccatctcctgttgtgttacattacataaacatcgtgagaaaagggatttacttttcagggcgggccattgacgcatcttgttttggcaatgataatggtggcaacagttttgttttcagacgactcattccacaaaatgggactcactgcgcgagagctgaaaatggctctatgatgtttacttgggaataacctatcatgggtgatgggaaaaggtaactccttgttcatggtggttatgggtgccaggctggctcaccacaggaagatgtaaaatgcttccattaatatgaggagctccttgctttaca

SEQ ID NO: 89093 - DNA, 274 bp, Glycine max
  Clone ID: PAT_MRT3847_5145C.1
cactttcctacaattctcttttcatcacaaaacaacccctcgtatccattatatctccgctgccgcattaatttggactccaccaactttttgtatcttccactgacagctcccccacccgaaatcggctttccccctctgaatgacgcttacccaatggtacctccttattccttccgttctgagtattggacgtcgctctggcgacgctctccgcccgccgaagacacaccgcaaccagtttcaccgggtctttcttcccccccgctcccca

SEQ ID NO: 89094 - DNA, 685 bp, Glycine max
  Clone ID: PAT_MRT3847_51460C.1
acatggacagaccatcttaactgcaactacagcaatagttgttttgacggtattactgattggcggttcaacgggcaccatgctggaagctttagaagttgtaggtagtgacagtcctgtcgagagtcctttggcttcgaattttgagggaaacaatgtgtatatttctcctgatgatgaagaaccgtcatcagggaacaaaatcaagatgaagctacaagaattccaaaggagtgctgcatcttttacagcaatagataaaaactacctcaccccattcttcactagtcaaaatggagatgaagaagatgaagctgtgcctttgactttgaagaacgtgggattggatgaccacgaccactattcgtcatgatatttttgaaacaacatgctcaataatactacttgaaggttcctttttgtacacaccttgaatcatgcaatatatagacaacttagaggaatttccataatacaaggattcagaatcttacgtcaagtaggcagagttaggttggaagacagacatcttgtctgcggctttagtattttatgccatgcaagttgataaccatgcgtgtttactgactctaattatcggtagtccaagaaccatttaccacatacatattaccgaacacatgatcttcatacaaaagaatatgcgtgtacaacgatcgaggat

SEQ ID NO: 89095 - DNA, 412 bp, Glycine max
  unsure (1)..(412): unsure at all n locations
  Clone ID: PAT_MRT3847_51461C.1
gcagtccaatgtccatcaatgcaaaaaaagtgcttttaacaaaactccaaaaccacaacccangctacccgaaacagacggcttggggttgggggtgcaatgttgaaagtgaaaacaataaactatggtggccggtggggacatgaacaaacacgtatatctcttcccaatacactcacatttcacagtctttacaaatcagcaatcacagggaaaaggggcatctctgcaaattcacaaaggcctggcgtggaccattttggagaaaatgtcttcctagctaggtaatcaccaggcatatgaaaaagggcatggggacaccttccacactcattgttctctcacacacacaaaggaagacgataaagccgtcttgctgccacatttgatgaaattggngctagttcttgcc

SEQ ID NO: 89096 - DNA, 216 bp, Glycine max
  Clone ID: PAT_MRT3847_51462C.1
gataaaccaaaaaataaagggcgcctcgttcgagatctataactagctttgacacgtccttataagtgggtccagtctaggattgggaccacgccggataaccacctatggttcttgacgcacctgctgtaagcattatcctgctccctgccttccctggcgggggaactgaaggggatgatagacaaggcatggtttccacgctgtattatagac

SEQ ID NO: 89097 - DNA, 238 bp, Glycine max
  Clone ID: PAT_MRT3847_51463C.1
gacgagtcttaccaagtgcattaattacttctacttcaaaagcgaacggtggcccaggctctagggcctcttaagcgatacccgcctaagagagaaagacaagctgtcatccataacaggaccaaatggacgatacagtctgtcacgtgcagcatgatatatggaaccagagcctaatacatcatcccttacaaactagaaccacacttcacagatgataccgaagggtacctactac

SEQ ID NO: 89098 - DNA, 427 bp, Glycine max
  Clone ID: PAT_MRT3847_51464C.1
ggatgttgaaatgaaggttttaatttgaaccacccttttgaaaaaaaatatgggcagggaaaaaagaggggggaaacaaaccaacctttaaaaaaaaacaagcccggaaagaaattaagctgggtcccccccgtggttccaactttgaaaaagagggctaaaaaggtggattttttctttttttggccaaaaagtttgtaaactgaaactttttgtgggaaaaaaacaagtttttcccaaaaggggccaacacttgcacttttcaacataaaaaacacaggttttttggtgggggggaaacccggtggatggggcccacctcaaacaccaatgttaattgcctcgcccggcttcagagaaaacgtgcgaaaaccccaacccaatttaaaggcctgccttggggggggaatattggcataaccccccc

SEQ ID NO: 89099 - DNA, 612 bp, Glycine max
  Clone ID: PAT_MRT3847_51465C.1
gacaagtttggtgattgacgatgtcgggcttgaagcttggcacgactgcttccatctacgttcgaacagcgaaaaccaaaagcaaacccctcttatcatggagaagcccaccccaacacccccgcagccgcaggtacatgctttccccttccaaaaatcaaatcctagggttcacacctagaaacaaattcccatgctattctttgggaagggctggtcttgtcacagattttggttcgtcagtgccccaacctcaacctcaacctcagccaaagccagagccagaaccagaacctgaaccttccaaattgcttacgttgccaacaattttgactctaggccgtgtcgccgctgtcccacttcttgttgctactttctacatggacggttggcgtggaactgctgctactaccagcattttcgtcgctgcatcaatcactgattggcttgatggctatcttgctcgcaagatgaagttaaaatcttcattcggtgcattcttagatccagttgctgacaagcttatggttgctgctacactggtcttattatgtactagacctttggatggtggtgtgtttggacaagcgccgtggctactcactatacctg

SEQ ID NO: 89100 - DNA, 264 bp, Glycine max
  Clone ID: PAT_MRT3847_51466C.1
gacccgggccgaatttcccgggggaagcgagaggcgtcggccaaaccgtcggcttatccgtggagaagaaaaaaaaacccaagccttgggggaagaaccgcgaaggggtattaggaaattaagaacaaacccttccccacattaagggtttgtgccggtgtgtcctctataccaaaatatcaagatacaatagtggagtaaaaagaagaggggtggaggaaaattctttttgtgtgcatctggggataggggagaaagagaaaa

SEQ ID NO: 89101 - DNA, 260 bp, Glycine max
  Clone ID: PAT_MRT3847_51467C.1
gacgtttgatgcacgcttccctcagcccggaactcggctttagactacagcgaaattctcatcttaccttttcgcttagaaccctgcatcgatcccacgcgctactggatcctgtgattcaccgacggatgtctgcaacgatcagaagaacatcgtcatcccatggcgaacgccacatctggtattgctgcacatgatgactgcaagtaaaagctctaggagcgtgctacagataagacacaccggtccatagttgttta

SEQ ID NO: 89102 - DNA, 161 bp, Glycine max
  Clone ID: PAT_MRT3847_51468C.1
gttcggatcgagtggagtaacggggtgggttcactagatcagtgagaggcttgacagtattggtggacatcctcatacagatacttatgatcgtagtctactagtagtctccgaaggcaggagatcactatccagggcagtctcactttctcccttcaatg

SEQ ID NO: 89103 - DNA, 307 bp, Glycine max
  unsure (1)..(307): unsure at all n locations
  Clone ID: PAT_MRT3847_51469C.1
ttaaaaacantgtaacaaacagaaaaagatactaaatatcgtggcccctctaatcacaatagtcggctatatatttcttgctgactttggctttgcacaactggcggatcttgacctatcaagattaggaggaaaaccaactacacttataggccaccctcatttaagtgtgtggactcaagcatgtgcatcaccaactgctgacactatcgtgatagcagctggcacataccaaatgattgcatcacatgccaaaagtccttgcatggctcctattgaggttcaagctgatggaacaattctagca

SEQ ID NO: 89104 - DNA, 861 bp, Glycine max
  Clone ID: PAT_MRT3847_5146C.1
cttacccctcttagtcccaattttctagggttttattcattttccgatggcttctgcagatgttgagtaccgttgctttgtcggtgggctcgcttgggccactgacgaccatgccctcgaggagagccttctctcagtacggcgaaatcgttgaaacgaagattatcaacgatcgtgagactggcagatccaggggttttggatttgtgaccttcgcctcggagcagtccatgaaagatgcgatcggagcgatgaatggacagaacttggacggccgtaatatcactgtcaatgaagctcagtcccgcggtggcggcggcggcggcggcggaggaggaggaggatacaatcgtggtggcggtgggcggtggatatggtggtcgtagtggcggtggcggtggcggtggtggataccgtagccgtgacggtggttatggcggtggctatggtggtggtggtggtggtggttatggcggtggcagagaccgtggttactctcgtggtggtgatggtggtgatggaggctggagaaactaaggcttgatgtcgtcaattagggtttatgattatgccccgtatttttagttgttgtggtttgagttcgagtttctttatggtttcgtgttaccgtggttcttgtttttgaccaatatatctggttgtttatagttgatttagtgaaatgataatcagtaattggagtatcgagtttctacaggtttttaattgtacgctggatgtggaaaattattttaattcactaatgatgagtaattttattctggtcaaaaaaaaaaaaaaaaaaaaaaaaaaaaaaaaaaaaaaaaaaaaaaaaaaaaaaaaaaaaaaaaaaaaaaaaaa

SEQ ID NO: 89105 - DNA, 498 bp, Glycine max
  unsure (1)..(498): unsure at all n locations
  Clone ID: PAT_MRT3847_51470C.1
ggctcgagccaaagcccagccctctctctctctctctctctctctctcagtgcggaaaaccgccttgcttcatcactctttctctttcttctctcactcactactcactctctctggtgtgttgccacggatgaccaccaccaccatgaaatgtcaaaaacccttctcacaaaacccaccttcccattagatccttcctttcccctctccctctcttagatcttcttcccttgcatgcaccatccattacaatttccaatggggttttagcctcttcgccttctggggttcacctgttttgcgcaaaagtgaaacctttgaaccctttccccaacctggtacctcagcaagggcgtgtttggattgattcattttgagcaaaaaaaaaagggtttaagagaataagtttgtattttttattttttttggagaaatgggtagctcaagtgagtcgaacctgaacggaatcgatgcgtccgtgggtgggtnggtttgggt

SEQ ID NO: 89106 - DNA, 113 bp, Glycine max
  unsure (1)..(113): unsure at all n locations
  Clone ID: PAT_MRT3847_51471C.1
ccatcaatgggcagggganagaccctgtcgatgtgataagaaaggctgtggccaaaacgcntgnnnntttantatcctttgcnagtaagcttnaggaangnctggtcngaaac

SEQ ID NO: 89107 - DNA, 512 bp, Glycine max
  Clone ID: PAT_MRT3847_51472C.1
agctgcgaaacaaaggcatccaaatttctctgcttggagtcaactgggtgttcctgcttacatacaattacatttctagtttggttccttattctaattgcataaacaaaaaaacagtgaaagctgcaggcaaacaagttttacccaatttcaaaatgaaatgaaacgggttggggcttatacataattacatcactaggggacgggtaaaagtaataatcaccccctgtcaacatctagtttttaaccatctaaactaactaacgtgattaaataatgggacaaatttccactataatcagtgagggagaataatatctgttctgctcctaataccatagccctagattttctgactacatagtgaacacaattgtatcatcatgtcatgatctcttgaaaaatttaccacctttcttccccatgcttacaccaacatcagaagggaaaagatattttgtgtctggcctccatttcaactctttgagagtggaaaatagggttgcaagttc

SEQ ID NO: 89108 - DNA, 612 bp, Glycine max
  Clone ID: PAT_MRT3847_51473C.1
catttgctataattcacccttcacaccagaaatatagctcattacacatcttacctcactacattggactccctactaacttactactctatttagctaatcatgctaatcgttaacgccacagcagcatacattgatactaatcgctaaatatctactacatgtattctttgcacaacttctcatatcatttactgtagctttcttagaacatctaatctatcaaacctacatgctacatctttctcatgaggggataacataaccataacctcaaaaccatacacaccatcgattctcgccgcatagtgaaaataccacactatcctacatcgcaataataacatcgatacttacttaaaatcaagacacctagataccgtgaaccctgccttctacttcaataatcaaaaccttacctctgaccaacaaacagctacaactatgaatagctactgcatcacgactacaacgccaactataaatagccaacacatcggaacctaactgctgagaaccttaatcggctagttaaagacctgcaacagatatcctataatcctctcgctctgaacgaagatcctacatacctacaacagcatatgctgcctc

SEQ ID NO: 89109 - DNA, 1579 bp, Glycine max
  unsure (1)..(1579): unsure at all n locations
  Clone ID: PAT_MRT3847_51474C.1
cccactgctccgttcctgcggcccgggccgaatcccaggttcggcagcagcagacaagcatccagcgcagcatccaccacgtccgcaaaaatcccacaccgcttgcttccctggcccctcccctctctcacatcaaatccatttcgccaaatttcacatcactcttcacaaacagaaaaatagtcctccgccgccggcaatcctaggtttccggtgacgatgctcccctacgcttccatcccggaggccgtggcggcgctgggccgcaacctcaccttcgcggagaccctctggttcaactactccgccgccaagtccgattacttcctctactgccacaacattctgttcctcttcctcgtcttctccctcgtccccctccccctcgtcttcctcgaattcaagcgcttctccttcgtctcttcccacaagatccaaccaaaagtccgcttgtccctggccgaaaccttcaagtgctacaaagacgtcatgcgcatgttcttcctcgtcgtcggccccctccaactcatctcttacccttccatccagatgattgggatcaggacgggcttgccattaccttcgtggcgggagatcctctcgcagcttctggtgtactttctcgtagaggattacaccaattactggatccacaggtttctgcacaacgattgggggtacgagaagattcaccgcgtccaccacgagtaccatgcgcccattggattcgccgcgccctatgcccactgggccgagatcttgatcctcgggattccctcctttcttgggcctgccatggttcctggccacattatcaccttctggctctggatagccttgcgccagattgaagccattgacacgcacagcgggtatgactttcctaggagtatcacaaaatatattccattttatggtggtgctgagtatcatgattaccatcattacgttggaagacaaagccaaagcaattttgcttcagttttcacatactgtgattacatctatggaactgacaaggggtataggtatcagaaaaaaatacttcagaagttgaaggaagagttggcaaatggtgttgagcagaacggaggattatacaagactgactgagagactgaagtgtcttaggtggtttcagaatgcgttgcctgttgactctttggaaccaccaaaattcttgtagacatatatatatatatatatatctgctgtggcaaaatagatgtctttggttagcttcagggtggagattagtagaatggagctttacaatttgtggttttgtgttggaagaggaggggggcacgggaggaatttcttctgttgtcatgttctggaattcaaacattttggttttggttcatgtctgtcagaatgttccttctcctatggattgtaaattcagaatcttctattgtcatgttctggaattcaaacattttggtttgggttcatgtctgccagaatgttccttccccagtgggttgtaaactcagaaatatgtaataggcttcctcggctgggatataattcgaaaattataataaaaattggaagttcggttttanaaaaaaaa

SEQ ID NO: 89110 - DNA, 534 bp, Glycine max
  Clone ID: PAT_MRT3847_51475C.1
tgttccacaacagctttcacatgcttatcatgtaggaacagtggacaagcggttgtgcccccttctataacgtgttcttattactatagctgtctgacctaggcagagctgcaaggtgatgatgaccctccactttgagcaacaccatagtgggatatcggagactcatctgctgacacaggacacatttataactggatgtcagagatgagactggacccttatcgtgcttcctttgacggcccgactatcgttatctattgcggcgggagctggctcaccgagtacttatggtacaaagtctgacaagaggcttctgctgtcccatagctgtagaagaaactgatgcgctacagtctgaaggtgggaggagacttggtgtttggggccactggaggctgtgacacgaaagttatacttgcagacctgacaactcaaagtgacatcccgtatcaatggcttggagacgaagtgatcatttgcttagggcttgccaagatcgtgggccttgagaatgaacggtggatatgacta

SEQ ID NO: 89111 - DNA, 584 bp, Glycine max
  Clone ID: PAT_MRT3847_51476C.1
cgggcccacgcgtccggtggcaacagacaagcatccagcgcagcatccaccacgtccgcaaaaatcacacaccgcttccctgtcccctcccctctctcacatcacatccatttcacatcactctacactaacagaaaaacagtcctccgctgccgccaatcctagggttccggtgacaatgctcccctatggttccattccggaggccgcggcggcgctgggccgcaacctcacctccgcggaaaccctctggttcaactactccgcctccaagtctgattacttcctctactgccacaacattctgttcctcttcctcgtcttctccctcgtccccctccccctcgtcttcctcgaactcaagcgcttctccttcgtcgcttcccacaagatccaacctaaagtccgtttgtccctcgccgaaaccttcaagtgctacaaagacgtcatgcgcatattcttcctcgtcgtcggccccctccaactcatctcttatccttccatccagatgattgggatccggacggggttgcaattaccgtcgtggagggagatcctgacgcagtttctggtctactttctcg

SEQ ID NO: 89112 - DNA, 464 bp, Glycine max
  Clone ID: PAT_MRT3847_51477C.1
agtctgaggccttgcatctataagctggatctgaatggaaggctggtagggctgaccgacgtgctctatgtgttgtcaaagcggcttgctacggaccctacattacctttcattatctctataccactctctcttacaaggaataaggacacctgtgtctgcactatacacgcaccgctatgcctatggctctcacgcctttcttttactgtcctaatacgacacaacctcagttagattatttcgaatgcaggaacagctttactatgattatgaccgctcatgttggatacaccgtctatttcattgcatacttctaaagattattgcatacaacttgtctcgggatccggctttgagggattattaaccggccgtgacgctagtgcatggttccttagcgaccatgggactggtagacttgacctctggacgcacaaccttcatcttaaggacagattgtt

SEQ ID NO: 89113 - DNA, 490 bp, Glycine max
  Clone ID: PAT_MRT3847_51478C.1
gtcatttctctttttgttttggacttaatttatatgtgtatacaatatgcaatgattgactttttcccccatctctgttgctgcttggtgaattgatttagttgaaggaagagttggcaaatggtgttgagcagaacggaggattatacaagactgactgagagactgaaggcttctatagtgtcacctaaatccgtgcctgttgactctttggaaccaccaaaattcttgttgacaaatatatctgttggtgttaaaatatatgtctttggttagcttcagggtggatattagtagaatggagctttacaatttgtagtctcgtgttagaagagggggcgcgggaggaatttcttctgttgtcatgttctggaataccaacattttggttttggtttcatgtctgtcagaatgctccttccccaatgggttgtaaattcagaatcttcttttgtcatgttctggaattcaaacattttggttttggttc

SEQ ID NO: 89114 - DNA, 815 bp, Glycine max
  unsure (1)..(815): unsure at all n locations
  Clone ID: PAT_MRT3847_51479C.1
gcagttgctgacaaattgacaggtgaactctctctctctctctctctctctttctctctaaatcaacctttgcttttctctttcttttctttgaattttcatggctgtagctgctgtactggccaaaggtggtgtggatttttctcatgtcttttccttgaagcacaatcctgagttatttattctgggttttgggttgttttatttctgacacaaaatatcaacttccactagatttaagagttgtttgtatctttgatttaattcttttctagatagctatatatatatatgagaagatcttcatggtaacttcaaggtccacatatattgacattccatcttctctcttttcctaccaaagcaagttttttatcagcaaaagcactgcttttccttttccttccactagctttacctttttgctcgtgtgtgatcatttgttaaagagcacaaaaaattaaaagatactatttgttgttattattatttgattattgattcatttacatttttttaaaaaactttataattgtcttagtgggaagccttgctaccttgctttgatttttgttgttaattaacgatcttcaacaatcttttatgtaaacataaaatcaccaccagctatacctcttgaaattntttgttatggtatagattctaatcattctggggcgatcagtgtggtcgtgtaatacatgtactcacctcacataatgagataaggctttcttgntgatgttgtacagattcttgtcacatatgaaagcttataactatagggnccngncnctctctctctctctctctct

SEQ ID NO: 89115 - DNA, 424 bp, Glycine max
  unsure (1)..(424): unsure at all n locations
  Clone ID: PAT_MRT3847_5147C.1
atttgttgcaggcatcacatctgatctcacacgattcggattcggaattttctcgatccctttctgatctgtgatctctgatctgtttgcgttacttgatcttatgatacttgtgttactatatgattcttttattactctcacgccaatagattatcaacgatcgtgagactggaagatccaggggttttggatttgtgaccttcgcctcggagcagtccatgaaagacgccatcgaagggatgaacggccaaaaccttgacggccgtaacatcactgttaacgaagctcagtcccgtggtggcggtggcggccgaggcngtggangtggtggatatggtggtggtcgcggtggtggatatggtggtggtggtcgcggttgtggagggggatacaaccgtatcggtggcggtcgacgctatgg

SEQ ID NO: 89116 - DNA, 367 bp, Glycine max
  unsure (1)..(367): unsure at all n locations
  Clone ID: PAT_MRT3847_51480C.1
agctcggaatncggctcgagtacggctgcgagaagacgacagaagggctaaaatacaatttcctttttttcccaaaacaccctccattaacttggtggtgttttttaccaaagggagcgccttttttttcactttcaccatcttcattctccaacttctatcttcatattttcaaatatagaatcataatactttataatttccccatcttctttttcatgtaacaaatttcatcacaaatggattttttaactaccataatattcacttcacaacattttcaaatagacttgtttttctttacttgctcatttacagaattaaactttattaaacgcatacatctcatttcaacttatttactaca

SEQ ID NO: 89117 - DNA, 1296 bp, Glycine max
  Clone ID: PAT_MRT3847_51481C.1
gtgacttgactctctttctcacacctccttttttccccgatgctaactctacaagcttcgtctcgtaaagaaaattcgaaagctcaatagagagaactcaattgaatcatcaaatgaggacagtgatttcgcgcttgatccattccacgccttccatttccaggctcaatgccacggtagtgtcaatcagcgggagaaatctctgcacagattctaacaaagttgatgggccattcaaagttgaagaagcagagactgtaaatgtgcctccactcccaacagaaaagttgcttgtgttgggagggaatgggtttgttggatcacacatttgtagagaagccttagaccgtgatttgtctgttgcgagtcttagcaggtctggtaggtcatccctgcatgattcctgggctaccaatgttgcttggtataaagggaatctcctttcaactgattcattgaaagaagctctgaatggggtcactgctgttatctcatgtgttggtggttttggctccaactcttacatgtacaaaattaatgggactgctaacatcaatgcaattagagcagcttcagatcaaggtgttaaaagatttgtctatatctctgcagctgactttggtgtagtaaattacttactgcgggggtattatgaaggaaagagagcttctgaaacagagctcctgaccagattcccatatggaggagtaattctgaggccaggatttatttatggtactcgaagtgttgggagtatgaagataccccttggtgtaattggatctccattggaaatggttctccaagttgctaaaccattgaaccagatcccacttgttgggcctctattgacacctcctgtcaatgttactgcggtggcaaaagttgctgttagagctgctactgatcctgtttttcccccggggatcattgatgcttatggaatacaacgttacagtcagcataaatcaaactagaaaattatctatattttgttttctgggtaaatctaatatggggcgatttgcctctgaatatctgtgttttagtattgttaaactgagaatatttcttcattccatatccttgagagaataaaaactgaaagtgcgagcatgtagccatagatctacctttccaattttttaacttcaatacatcagaatctttttggctgatttctttcgccttatgtaattaaccacttaggtgggttccaatgctcgttgtgtaattgatttcttttgaaagatggagagagattgtgaacaatggtttcgtgaaaaaaaaaacaaa

SEQ ID NO: 89118 - DNA, 1090 bp, Glycine max
  Clone ID: PAT_MRT3847_51482C.1
cacgcgtccgcttttatagaaggggggcaaaaccaaggaaattttagattggtgactgtgacaacacttggcttaattgttttggttgacagttttgcctcttggtgtggcaaagactttaattcagacaaaccctgataaaaattgttcaagaaatccttttcggatcttgagttcaatctatcaaaaggctggattcaagggatgctatacaggtttgggtcctactgtaagtcgagcatttcctgctaatgctgcaacaattgtcgcatgggagctagcattgaaaatgctaggcattaagcatgactgagagtctacctaattgcggataatactacaaagttcaggtgttcattcagttatttctttcattcttgctttcattttggatcgtgctgctcatcatcacagacagtttgcattaatcctcgagccacaatccattcagagatctgggcaatcgcaatttgaatccaaaagttacatcaagagttggatacagagttcaaaacgagatgtttaccttggagccaacctgaatggcggacactggcaaatggtcgttattctgcctaaggaaaacctagttgtctggttttgttctttacataacaggccggacaactaccttaagggaataattaacagtgctttgaaaggacttgatgatactccacaacctaaatccaaggctgctgctaggtggattgttgttaagtgtaataggcaaaaaggaatcactgaatgtggctactacgtgatgcactggatgtcctcgataatcttaggatctttcgggaataattgggagacgtattttaatgaagttagaccattggaagtagagagattcaaggcgcttcgcatccagtgggcacaatgttatctaaaagttagaaatctaacataggatgttaggcaactatgtaactttaggttacttaattagtttacatactttgcattacatttttttacaattgttgtttaattttaacattgaataacctttgttgatagctagttttttgctaaaacctatttgaaagcagaatgcaaatgatatatgttgtgtgttgtgtggtct

SEQ ID NO: 89119 - DNA, 411 bp, Glycine max
  Clone ID: PAT_MRT3847_51483C.1
gctggcccgcccctgcaggtccacggctccggaatttcccgggtttgtcccacgcgcccgaataggctgcccgaagaccacagaaggggatcgcacaacattattctttcgcaccttgcagaatcaatattctctctgaatcgactttcatggctcgggccaagcaaaccgggtcgcaaatacaccggcgggaaggctcctacgaagcaactcgctcaccaaggctgcaagaaaatctgcacctaccaccgggggagtcaagaagccttatcgctatcggactgtaactgttgctcttcgagagatccgaaaataccaaaagaggacatagcttctgcaccgcaggcacccctcatgcgcgttagatatgcaaacgctccaagactaccagactgagctgtggagacagag

SEQ ID NO: 89120 - DNA, 700 bp, Glycine max
  Clone ID: PAT_MRT3847_51484C.1
tatttctttaactgccaatcatttataagaaaaatatgtaccaaagttgttttatttgtatatctatcaaagggctggattcaagggatgctatacaggtttgggtcctactgtaagtcgagcatttcctgctaatgctgcaacaattgtcgcatgggagctagcattgaaaatgctaggcattaagcatgactgagagtctacctaattgcggataatactacaaagttcaggtaagctttcataaagccactattcacccaagctaagatttggagaagataataatgcttttaatagaatgtgttttgctttggagcctacctgaatgggtaagtcaaacacaacaactgaatttaattaatctatactactacaataacccatatttgtctctactgcagcagacattggcaaatggtcattattctgcctaaggaaaacctagttgtctagttttgttctttacataacaggccagacaactaccttaagggaataattaacaggtcagtattgttttcaatacattttcattggcataactcaacaacatcaatattttaatgttcctcatattcaacactagtgctttgaaaggacttaatgatactccacaacctaaatccaaggctgctgctaggtagattgttgttaaggtacttgatttaaataaaacttctacttatatatattttat

SEQ ID NO: 89121 - DNA, 872 bp, Glycine max
  Clone ID: PAT_MRT3847_51485C.1
aaaatctttgtaggatattataatagtctaatatatctaaactgtcttctaaaaattagggaatctcctttcaactgattcattgaaagaagctctgaatggggtcactgctgttttacaagatgttgctttagattttaaagaacttgtttggtgagggtccattcttttatcagttttctgtggcaatatatctcacaattttatgtcccgtcttggggtcagccagatctcatgtgttggtggttttggctccaactcgtacatgtacaaaattaatgggacggctaacatcaatgctattagagcagcttcagatcaaggtgttaaaagatttgtctatatctctgctgctgactttggtgtagtaaattacttactgcagggctattatgaaggaaagagagctgctgaaacagagcttctgaccagatttccatttggaggagtaattctgaggccaggatttatttatgggactcgaagttttgggagtatgaagataccccttggtgtagttggatctccattggaaatggttctccaagttgctaaaccattgaaccagatcccgcttgttgggcctctgttgacacctcctgtcaatgttactgcggtggcaaaagttgctgttagagctgctactgatcctgtatttcccccggggatcattgacgcctatggaatacaacgttacagtcagaataaatcaaactagaattatctttctttttgttttctgggtaaatctaatttggggcgatttgcttctgaatatccgtgttttacaattattgttaaactgagaatatttctccataccaaatccttgaaagaataaaatctgaaagtgcgtgcgtgcatgtagccat

SEQ ID NO: 89122 - DNA, 594 bp, Glycine max
  Clone ID: PAT_MRT3847_51486C.1
gatgaattcggaaccacttcattttcttttgtttttgatgaattcaatatatctagcaattgacgttgtttcccttttgaggattcatctgatgctgtctgcgatacaggttcattcatctgcaaatcttgcgaagggtgggttgaaccaattatgttttttgagctttgttttgatctcttggaggcaacagagttcagagttaatccgagatcctctttagcccatttaaagactgcacttaatttcccatccaaagcttgacaaagaacattcaaattattgatttcataacggtagaagagagttttgttgctccaagtgcaagaacaaagctgttttgcatgatcaagacatgcaaagttatctgaacatgaacaacctacagcagacaagtgtaaatcacggaggcaaatactacattcccttttacaagtggcatcaaaattttcatccattctttgtgataccaaagaagtgcaaagaaattttctcttcaaactttcactctggatgcgagagttcaaagcttttattaagaacccattttttttataggcatctttatatgttaagctatctgatgtgctcttc

SEQ ID NO: 89123 - DNA, 359 bp, Glycine max
  Clone ID: PAT_MRT3847_51487C.1
gtagctagccaacaaaggagaagatattggaatagagagatcaaaaggggaggcgatggcagcgtttgggattggaatcatgctattgatggcagcttgcttgcttccactatctgtggaagctatggttcgccactacaagttcaatgtggtgctgaagaatgccacaagattgtgttcaacaaagccaattgtcaccgtaaatggaaagttcccaggtcccaccatctatgctagggaagatgacactgtactggttaaggtggtcaatcatgtcaagtacaatgttagcatccactggcatggggtcagacaattgagaacaggttgggctgatgggccagcatacataacccagt

SEQ ID NO: 89124 - DNA, 392 bp, Glycine max
  unsure (1)..(392): unsure at all n locations
  Clone ID: PAT_MRT3847_51488C.1
ggccgcccttttanaaataaannacaataaaattttttttttttttaaaaaaaaaaccggggaccaaaccatgggcatggtgtttttttttaaatatgctttgttcacaaaaatctgaacccagcaacttcaactttcacacaaaccagtatgtatctctcacaattatgagctcgacaaaactgtaattaagcaatacatcttttatacattattctttcacggaatctaataataaaattctccctcaacatggttccttttcctgtgaaagatcccactgatattattcaagaaaactttctttgaaaattaaaccttctcccttttctaactttttcatctccaccctgttttcaggttaattctaaatatcaatcctataatgcttt

SEQ ID NO: 89125 - DNA, 942 bp, Glycine max
  Clone ID: PAT_MRT3847_51489C.1
cccacgcgtccgacggctgcgagaagacgacagaagggggctcgcgttcacaacacaaaccctagaagccaacatttttcaggaacgagtgcgagcagaggtagtggagtgcggatgcgtaattgaattgccagaattaaaagtgttcattcagttatttctttgattcttgctttcattttggaccgtgctgctcatcatcacaggatctttcaggaataatttggagacgtattttaatgaagttagatcattggaagcagttagattcaaggcgctttgcatccagtgggcacagtattatctaaaatttagaaatcaaacataggatgttagacaactatgtaactttaggttacttaattagtttacatactttgcattacattttttacaattgttgtttcattttaacattgaataacctttgttgatagctagttttttgctctactgctgactttggtgtagttaattacttactgcagggctgtaatataggaaagagagctgctgaaacagagcttctgaccagatttccatttggaggagtaattctgaggccaggattaatttatgggactcgaattgtttcagctccattggaaatggttctccgagttgctaaaccatcgaaccatatcccatttgttgggcctctgttgacacctcctgatgcggtggcaaaagttgctgttacagctgctacggctactgatcctgtatttcccccggggatcattgacgccaatggaatacaacgtttactgtcagaataaatcaaactagaattatctttcttttgttttctgggtaaatctaatttggggcgatttgcttctgaatatccgtgttttactattattgttaaactgagaatatttctccataccaaatccttgaaagaataaaatctgaaagtgcgtgcgtgcatgtagccat

SEQ ID NO: 89126 - DNA, 726 bp, Glycine max
  unsure (1)..(726): unsure at all n locations
  Clone ID: PAT_MRT3847_5148C.1
gctttaaatgtttatacaatgttgaacacnacactattggtgaagttcaattctgatgcaattgatgagacagatatcttgaagaaacactaaagcttcgcgtggagtcattgggtgggacattagaaaaagtaacattaagtggtaaccacatcacaccatgcattcaggaaccgagatggcaggtgggtaaattgtatactccagcagatgctgttgctcaagggcttaaatctctttctttgaatgataccaagatccttgccagaaccattagtgactggttcagacgttttgagggttgaagtgccaggaaagacccgcatttcatacataatgcagtataattttggctataagcaagatagtggatgtattggaacttcgaatctgaaggtggtaattgaagacctatgtattgtatataactcaggttaagataatgattagaatatgtggtagcttataccatttattggattgatgcacatttgcatatgcttcttttctatcaaagctatgcataattttaggctgatgaatgccattctaaagggttggaactctacccaattctggataaatcatcagtttagagtttaaaatgtttctagatcctctaagttcaagcaaatataacagaggtctcacctgtgtgcaatttcagattataatagccatttccaaggtttaatgcagagattatctctttaccatccccccccn

SEQ ID NO: 89127 - DNA, 770 bp, Glycine max
  Clone ID: PAT_MRT3847_51490C.1
ggctactacgtgatgcactggatgtccacgataatcttaggatctttcaggaataattgagaaacgtattttaataaagttagaccattggaagcagagagattcaaggcacttcgcatacagtgggcacaatattatctaaaagttagaaataaaacataggatgttaggcaactacgtaactttaggttaattaattagtttacatactttgcattacattttttacaattgttgtttcatcttaacattcaataaccttgttgatagttagtttttttgctaaaatctatttgaaaacagaatgagagagctaaaaaaaaaaaaaaagaaaaaatatcaatttgaaggagtaattttgagccaggatttttaaattgggccaggttttttttttgggccccgaagtgttgcatctccattggaaatggttctccaagttgctaaaccatcgaaccagatcccacttgttgggcctttgttgacacctcctgtcagtgttactgcggtggcaaaagttgctgttacagctgctactgctactgatcctgtatttcccccggggatcattgatgcctatggaatacgacgtttactgtcagaataaatcaaactagaattatctttcttttgttttctgggtaaatctaatttggggcgatttgcttctgaatatccgtgttttactattattgttaaactgagaatatttctccataccaaatccttgaaagaataaaatctgaaagtgcgtgcgtgcatgtagccat

SEQ ID NO: 89128 - DNA, 295 bp, Glycine max
  Clone ID: PAT_MRT3847_51491C.1
acacctcaaaagacatattaacaaattatcagtattaaaaactggtaaagagcagctacaaatttacaaaaagatataaccaagtatgaattaactaagatctacatatttctaacacaatgttggggtctacaacaacttataaaactttgagaattacagacttcaccaccccataagaagtagactccttgtcctattaaagtcaacattaaagatggggcaagccatcttaatctcgattgttttgcactttcgccattcacagaatcaggagaaatcagcggacgcgtgg

SEQ ID NO: 89129 - DNA, 239 bp, Glycine max
  Clone ID: PAT_MRT3847_51492C.1
ggttaattacaacatatgaattcgatcaaacatgaatattcgttgcagaaacacaatttagcctcttagtaactgttgaagcattgcccaagatcgttctggtgatacaaaagagaccggatttctattcatgggggaattattgggcacgctatacagggaagcatgaaacggtaaatcggaccattgataggcaccgacttatgtgatttaataaactctaaccactctgtctgcta

SEQ ID NO: 89130 - DNA, 598 bp, Glycine max
  Clone ID: PAT_MRT3847_51493C.1
ggctcgagccacaatacaaccacaaaagctttcattgctcctatcaattcacaacaacccttcttttttagctttcacgaaactttccaacaatgaattcctcaaaggcatgcacccttttgaatttggtagcggttgttatgttcgttgccattttgattagccaaagtagggtggaggctagggttttatctcattcggaggaatttgcatttgcaagagctaataatctccaaacatacacctcatcagcctatgagcaagccaagaaaaccatgggtttttggatgcagcgtttggcttctggaccaagtcctaaaggccctggtcattgatacctcaccctaatacaccacatccatgttcacatgtagctagaatagctcaattattttatcactttcgtcaatttattaaaagtttctttattcaatatgatctatcggtgaacacacacctatctatccacatataaataatggatgtatgtagaaaaaaggaacacggatctaacaaatgcaaagatccatctgtatttgaaataggattctttaatttatatacgtcattttttaatttaaaaaaaaaaaaaaaaaac

SEQ ID NO: 89131 - DNA, 244 bp, Glycine max
  Clone ID: PAT_MRT3847_51494C.1
gcaaaacattgatgatttaggttcggaatattggattataatgacccattcttaatacacatgatgttggatagaatcgatgccattttctaataatgttagagtgctgaggaaaaacccctgcttggttttaaattggcggcatgacatgatcaattgaactcacattaaagatttgaagacgtaaaataagcccttacttttaaatagtcagggacaatgctaacatgggtgagagggggat

SEQ ID NO: 89132 - DNA, 815 bp, Glycine max
  Clone ID: PAT_MRT3847_51495C.1
cgctaagcctcggagattcggtttcgagtaaaatctcttcatttttctctctttgttacattttcattatggtgaccaagatatgatctgttatcaatatatattcaatgacatacacagtcccgagtgctaaacctgagtttaaagcttcagatcacaacagatccaccattcacctcaccactttctcttcacaaggcaaatctaacaagaaaaagtagtctctgaagccgatccagtgtcttgtgaatttggaattggtagtgaatttagatctaaaaagccatagcaatgtcttttatcggtacccagcaaaagtgcaaggcttgtgagaaaacggtttatccagttgatcagctttctgctgatggcactgcttatcacaaagcttgcttcagatgttctcactgcaaaggaacattaaagctgagcaactattcctcaatggaaggtgttctttattgtaagcctcactttgagcagctcttcaaggagagtgggtccttcagcaagaacttccagtcacctgcaaagctagcagataagacaacacatgagctgacaaggtctcctagtaaagctgcgagcatgttttctggcacccaagaaaagtgtgccacatgtggcaaaactgcttatccattggagaaggtaacagtggaagggcaggcctatcacaaatcatgtttcaagtgttcacatgggtggatgtcccataacgccgtcgaattacgcagcccttgagggcattttgtattgcaggaacacttctccagctttttaggagaaaggagctatatcatcttactagtctg

SEQ ID NO: 89133 - DNA, 211 bp, Glycine max
  Clone ID: PAT_MRT3847_51496C.1
ggtggatgtgcaaatggtttatgcagccttgtatcttcatggtgagtaacatttaaaaaaaaaaaatgtataattacctttctcatccttataatcgaaagaatcttccttcatagtttaagacattttattatgattcatataattgtaattttcttatcctttcaaaaaaaaaaaatgactataaatgcaaaaagcggccactcgaatt

SEQ ID NO: 89134 - DNA, 110 bp, Glycine max
  Clone ID: PAT_MRT3847_51497C.1
agtgtcaattgtctgttcagtttttacaacaaggtcaacctctctgtgcactataagctggagcaattgattctaatctgaaacttatccttggccccacacacattcca

SEQ ID NO: 89135 - DNA, 725 bp, Glycine max
  Clone ID: PAT_MRT3847_51498C.1
ctcatacctaacaacaccccactctcattcatcgatggggaagaagaaggatagaatcgttcttccaccggagcttccgccggagattcccgacgaggaagttgaagtttccgacgatgacctccaattcgtcaaggagaaccgcgcctatgcctccttgctttccaccttggacacccgttcaatcaccaagcatgttacacgggttgctgatgccaaagacgatgcattggagaaactttatgagaaacgcatgcaaaagaatgctctcaagaaagaaaaagaagaaactggtttgcaggttgatcgtgtagatgctcttccaatcaagacattggatggaaagatccattaccagacagctacgaagacagtattggaaaatgatccaagtgaagagagaactggagagaatgtcaaaaaagataaaggtatggtcaagctaactaaggctgaaaagagagccaagcttaagaaaatgagaaaagacgcaaaacaacaagggaaagaggtggctaaagcagaagtggaagagacaccacaagcagcagtattggctgaggtaaaggaagatcttacagctgaggaggcatttgaaagtaagaagcataaacttgcagaattggggaatgccttgcttacagatccagagtccaatattaaaattttgaggagatggtgcagatatctaaagataatgatgatacccattgtaaacttggact

SEQ ID NO: 89136 - DNA, 1343 bp, Glycine max
  Clone ID: PAT_MRT3847_51499C.1
acaggtgtttgaaggaccaacattcaagattctggaacggtgcagctgttgttgctttctgttcctctgttgccgtttgcctgatgcagacttagttttatgtcatttgtctcaacttgctcttcttcttctctttcaccctccaaattttctcacctctctctttattcaacttcctcttcgtttttttttcctttccttaaccgtcacactatttccccctcttcttcttcaccttttcagtttaaagcttcagattctcaacagatccacaatttttcagtccaatagcttccagatcacaaccgatccaccattcaccactatctcttaagcaaactcaatgttactgacaggcaaatctaccaagaaaagtggtctctgaagtcgatccagtgccttgtgaatttggaattggtggtgaatttagatctaaaagccatagcaatgtcttttatcggtacccagcaaaagtgcaaggcttgtgagaaaacggtttatcccgttgatcagctttctgctgatggtactgcttatcacaaagcttgcttcagatgctctcactgcaaaggaacattaaagctgagtaactattcctcaatggaaggtgttctttactgtaagcctcactatgagcagctcttcaaggagagtggctccttcagcaagaacttccagtcacctgcaaagctagctgataagacaactcctgagctgacaaggtctcctagtaaagctgcgagcatgttttctggcacacaagaaaagtgtgccacatgtggcaaaactgcttatccattagagaaggtaacagtggaagggcaggcctatcacaaatcatgtttcaagtgttcacatggtggatgtcccataacgccatcgaattatgcagcccttgagggcattttgtattgcaagcaccacttctcccagctttttaaggagaaagggagctataatcatcttactaagtctgcatcagtcaaacgggcagccgcagccacagcagcagcaacaacagctgcctctgttccagaatcttgaatgttggttccttcaattgccttttctttttcaaatacattttggtttgtgaagcaggtgtttgtatgtgtggcctttttggtttttgattgttctctcgtgactttgatcatttctgatatttttacttacacatgcgtggcgtgcaaatcttgtgtggtttattcatataatggacatttagtaaagacgagactaatgagagcgtgatttgcaagatatatcattccaggttgatgacaatgccgcccctccccttctcgaccgtgtgctctcctttattttattgtccttatctt

SEQ ID NO: 89137 - DNA, 975 bp, Glycine max
  Clone ID: PAT_MRT3847_5149C.1
tgaaggatatatataagcaccactcagtatgcatgccaagcggaggatacgagaattctatgggttatgttatgcattgaggtggactatagttgctctagtttggggatgaaaattactttgctcatttgcctgttcctcttggtttgaataaattatatttacttttgttattaaaaaaaaaaaaaaaaaaattcctgcggccgcgaattccgtcttagtcccaattttctagggttttattcattttccgatggcttctgcagatgttgagtaccgttgctttgtcggtgggctcgcttgggccactgacgaccatgccctcgagagagccttctctcagtacggcgaaatcgttgaaacgaaggtctgtttgttgcaggcatcacatctgatctcacacgattcggattcggaattttctcgatcccgttctgatctgtgatctctgatctgtttgcgttacttgatcttatgatacttgtgttactatatgattcttttattactcacgccaatagattatcaacgatcgtgagactggcagatccaggggttttggatttgtgaccttcgcctcggagcagtccatgaaagatgcgatcggagcgatgaatggacagaacttggacggccgtaatatcactgtcaatgaagctcagtcccgcggtggcggcggcggcggcggaggaggaggatacaatcgtggtggcggtggatatggtggtcgtagtggcggtggcaaagaccgtggttactctcgtggtggtgatggtggtaatggaggctggagaaaataaggcttgatgtcgtcaattagggtttatgattatgccccgtatttttagttgttgtggtttgagttcgagtttctttatggtttcgtgttaccgtggttcttgtttttgaccaatatatgtggttgtttatagttgatttagtcaaatcccaatcagtaattggagtgtcgaatat

SEQ ID NO: 89138 - DNA, 261 bp, Glycine max
  unsure (1)..(261): unsure at all n locations
  Clone ID: PAT_MRT3847_514C.1
tctctctttctccnntgtcatgnccgctccagnagcaatngccacgcacgtgagtcacgtgatagtagcggcagatttcntctacttcttctccctgtntntttctccttctccatctcncattctcaccgatncgctgcaatcagcntcttcgntgncactcnnanaagnttaaaagncgngtangaggcgcttagagtnttncacagtcncggatcgaagaggggnatactcctgtgancgaggacacgtgtcagaaag

SEQ ID NO: 89139 - DNA, 864 bp, Glycine max
  Clone ID: PAT_MRT3847_51500C.1
gacaacctcaaaccacacaaccacaccacacctcttcttccccttctctctctctctctctctctctaaaccaataattcatattcactcaaaaaattaaaacaccatgcaacaagcaattccttataggtcatggcaacctctcatcacacacacctccaccaccaccaccactcacttcacaattagcccacacacattaacctattcgacagtgtctccaacaggattatctccgaaagacaatatcggtttggaaccgaataacaacaataatggtaatagtcatttcttcatttcctccaaaatggtacccaacatggtgttagaaaacgcgattatagtctttgctagccgcggttgttgcatgagccatgttgtgaagcgattgctattgggtcttggggccaaccctgcggtgcacgaggtggaggagagtgatgaagtgggtgttgttagagaattggaagcaattgtgggtgccaataatggagggaataagatgcaatttccagcggtttttattggtggcaaattatttgggggattggatcgggttatggctactcatatttctggggaattgattccaattctcaaagaagcaggggcactatggctttaactctcttttttttccccttagattaatttttccattttcgttcttggttttcttattgtattatatactattatttgttatttacgtgttaatttccttctccctgggaggctgtagagaaaaaaaaattgaatgtaataaaaaattattttcgatgtgttctctcatccttgggagattttagagtgtgggagtaaaatgaattaatataataaaaatttattctcgaaaaaaaaaaa

SEQ ID NO: 89140 - DNA, 791 bp, Glycine max
  Clone ID: PAT_MRT3847_51501C.1
acgcgtccggtgctcgcacattgggggaaataagtacgctggaaatgtcattatatttggatcaagtatcaagtatcaacagagaagtcactgggcacttgtatggatatgttactccagatgatgtacctttattgtttcaccagcatatcattaaaggggagatttttgactcactatggaggtaatttttatctatgatattttcattagtattgaattttaaagggttttttttttttttctttttagttccatccttcaaaagacactagcaaggattgctctcgtgctggtcttttggagcagaagctgggtctgtggggttagaagttaattttatacaatgttttgtcagagtagaccaacaaaggttgtgcctgaggtggaaattttagctatgttcataaagtttgttgtcatttccaatatttcatattgcttcatcgtacatataattattattctcaataagaatctctctctctctcatgtcatggtacttttggatttgatcttgagacttgagaacgaagtgagtcaaaaatcctttcttcctacatttgttacaactaaaacacttttaacatgctcgggctcttttaaaaaacttgttgtaggtaatggactatgcatccctcccacacttctgcagaaaagaagattccaagtcttccaaacatcatgcattaggaaacattggaaattgtttctccttcatcacgccttccatcaacaactctacaatcacatcaagcaacaatccatcattgtggagtcaatttcaccaa

SEQ ID NO: 89141 - DNA, 406 bp, Glycine max
  Clone ID: PAT_MRT3847_51502C.1
aactctgttttaatggtcacgggcagatgttgaaactcctaacggatccagggcgggtcctaaaagttccaaatgtaaagaggcactggccaaaaacacagctggaggagccatactgcgtagtgatctatgggcaaagtttttgtcagagggcaattttagagcaagtgctgctttgcagtgcactcatcgtatgaaaggaatgagtaaaatggtggccacagaaggtattcctgagaatacaggtatatcattggcctgcgctatgaatacaactttaagggggcgggccagctctgatatgtacaccatctgctctccagactgagaattatggaagcctgcttgcacaaaagcaatgactatgtcatgtaaatcaaacccgtgcactgatgcatggaggttg

SEQ ID NO: 89142 - DNA, 162 bp, Glycine max
  Clone ID: PAT_MRT3847_51503C.1
gatcaccgagtcgtgttgcgattgaaaatggggagcgatgttgtagaatctatgcagtagaggcccagataatctcctctctcttccgactaatactcatgggatgctacttgatcaatatactgtactgacatttcttattatggaggaagtgttttttat

SEQ ID NO: 89143 - DNA, 1409 bp, Glycine max
  Clone ID: PAT_MRT3847_51504C.1
tctcccacgcgtccgcttttgcattgaatttagcagacgcagagccaagtgtcgctgattctgaattgaaggatgatcttaaaccatcatatcatgtggctcttggttcagataacacatggtatctatttacagaaaagtggattaaaacggtatatgggacaggctttcctaatgttccattggctgaaggggatgctcgacctcgagaaattatgagtattctccttgataaggaggacatgaagtgggataagctttctcactccgagcatggtggtttatggttcatggaaggatctctagatacatggtcttggagcttgaatgttcctgttttgagtagcttgtcagaaaatgatgagctactactacagtctcaagactacaaagatgccattgaacgttacaaggaacaaagaaataaagtttcacggttgaagaaaaagatagttcgtagtgaaggctataaagaatattttaaaatcatagatgcagtcaagtttactgaggagaaaatcaagcgcctgaagaatagatctaaacgtttgattaataggatagaacaaattgagccctcgggttggaaggagtttatgcaggttagcaatgtcattcacgaaatcagagctttagatattaatacacatatcatatttccacttggtgaaaccgctgctgcaattcgaggagaaaatgagctatggcttgcgatggttcttcgcaataaaattttactagaactaaaactgcacagcttgctgcagtgtgcgcaagtttggtgtccgcaggtatcaaagtccgacctgggaaaaataacagttacatttatgagccttctgcaactgtaaccaaattcataacgttattggatgagcaaagaagtgccttattggcaatgcaggataaacatgaggtgacaatctcctgctgtttggatagccagttttgtggtatggttgaggcctgggcttctgggttgacatggagagaattaatgatggattgtgcaatggatgatggtgatttagctcgtctccttcgacggaccattgatctgttagttcagattccaaaattgccagatattgatccattgttgaagcacaatgccaaggctgcttctagtgtcatggatcggccaccaataagtgaacttgtggggtaatctctctgcctctgttgaaagatcgtctgtagattttgtatgattaattttcaacaatgtttttatgatattattatcatcattatattattattgacaaaaatttaggagaaagaaaattactccaattcaatgtaaattaaacccaagctggtcagttgtcacttgggctaattcatattggcatgataaaatcattgatgttagaatataaaaaaaaaaaaaaaaaaaaaatatgtat

SEQ ID NO: 89144 - DNA, 1367 bp, Glycine max
  unsure (1)..(1367): unsure at all n locations
  Clone ID: PAT_MRT3847_51505C.1
ntccgcccacgcgtnccgctccccctcacagtcaggagatgatgcactcccatttcccatttcgggcattctcaaatctcaatcagtgcaggcacagaatcctttgaatcaacttctcctagataatgtaatggataatcaaattaccttaaaaagaagaatcctggtcgcatgatttgacagtgattagcacaaaatgcatctggcttccctcataaatccaacttctaattttccattactctcaagccgcacaaccaccacctctttcattttcaaccatagaagaaaaaaatcacagtccaattgcattaggagccaccagtccacaatacagcagaggtggactcttcagggcatgacagctctcgtcactggtggtactcgcggaattgggcacgccattgtggaggaattgacggggtttggagccagagtgcatacctgtgccaggaatgaacatgatctcaccaagtgcctcaagaattggaatgattccggttttgatgtcactggctcagtttgtgatgtctcagttccacaccagagggaggcactcatggagtctgtttcctctctcttccacgggaaactcaacatccttataaacaatgttggtacaaacattcggaaaccagtgacagacttcacaagtgcagagttttctactcttattgatacgaatttgggatccgtctttcatttatgccaacttgcatatccacttctgaaagcatcgggaatgggaagtgttgtgtttgtctcatctgtttctggttttgtctcactcaagtcaatgtctgttcaaggagcaacgaaaggggcaattaatcaactaacaagaaatctagcttgtgagtgggcaaaagacaatataaggagtaatgcagtggcaccttggtacatcaaaacttcattggtagagcaggtgctcagcaacaaagattatctggaagaagtgtactccagaactcctcttaggcgcctaggagatccagcagaagtctcttctcttgttgcctttctttgcttaccagcatcatcatacatcactggccagattatttgtattgatggaggaatgtccgtgaatggtttctacccaacaacacagttctaagagttgcagcttctatcatgcaccttccttactattttttctctacacttgccattcctgtgaaacatttggcatggtgaaggaatggctctctacttccctatcaacttgaatagttttagaatctaagataatacaaggatatgacatcatttaattgattttacttgtaatcataaaaaaaatgttcttaaaataaaaattacaagcattattctgtaagcatctaaaaaaaaaaaaaagaaaa

SEQ ID NO: 89145 - DNA, 291 bp, Glycine max
  unsure (1)..(291): unsure at all n locations
  Clone ID: PAT_MRT3847_51506C.1
gtggtttttatttaaanaccactttggaggaattaaaactgtgataaagttccttaaacatggtgcttttcagaaaatttgagaaatggtggtcttcaacttgggaaaaaagattccgtagacaaaatatgcttcgtcgaggggaaacaccccaaagtgaggggagaaaaaatgtgccactgagggcatagtgtggtggggagatatttctaaggaaaaaacgaaagaaagaactggggctgccttgacatgcccagagcgtgacacctcaatattgagaacacgttatga

SEQ ID NO: 89146 - DNA, 753 bp, Glycine max
  Clone ID: PAT_MRT3847_51507C.1
ttttctagagcttcccctattccacagcattatccctagtactagagagactgagaaatttaagagaagaaaatatctcccaagaaacaaatacaacaacaatctctctctctcctcttcttcttcctcgtactccccaacagaatgaagaacaacaacaacaacaccaagctcatcctccttcacccttccctccacaaacaaaccctgacacccaccaccgccgccgccgcctccacactattctcttcccaccgtaacctctggctctttttcttcttcctcctcttctccaccctcctcttcacctggaccatcatctcaaccgcaatctcctccgccacttcaaccacttcctccaccgttacctcccctctctcaccctccgtcacaaaggccctcctccactacgccgccgccgctaactcctccgccaaacccatgtcccccgccgaaatctccgccgtctcctccaccctcctccgcctccccccgcgccccaacctcttaatcttaggcctcacccacgagtccctcctctgggccgccctcaaccaccgcggcggccgcaccgtcttcctcgacgagaacgaatacgccatctcgaaattcgagtcttccaaccccggcgtcgaagcttacgatattcaattcacaacaaaagtcagcgaatacccaaaactcctctcccaagtccaatctcaggaccacggagagtgtaagaccgtccagaaactcttgtcctccgaatga

SEQ ID NO: 89147 - DNA, 497 bp, Glycine max
  Clone ID: PAT_MRT3847_51508C.1
ggccagcgtaaaaaaaagaatgaaagaataatttagtatttggcacaataataaaaaaggtaaaaaataatgaaagtgaagaaaaaaacaggcagggcagcagtataaataatagaagtttgatgatttatatgcagaaccaacaactacacttgttttctatatattcttgcatgatcatgaattcttcctccatttatattcttgtctttgtccagctttggttgttgagcttaccatgcagagagagtgtgtgcatcccaagtgagcgtgagacacttatgaagtttaagaataatctgaatgatccttcaaataggctttggtcttggaatcataataataccaactgttgccactggtatggagtcctctgccacaaccttactttccatgttcttcagcttcacctccacacctcagattctgttttctatcattactatgatagctactctcacttcgatgaggaagcttataagagatggagctttggt

SEQ ID NO: 89148 - DNA, 481 bp, Glycine max
  Clone ID: PAT_MRT3847_51509C.1
cgagttcgtgttcttctccggtggattcgtggaaccatgccttgtgggaaggtccacgcctgtgagctttgctaatcctaagaggccactctatggacatctctcgagcatagattccactggaacatcaatgagattgacatgggttagtggagacaaggagcctcagcaaatccaatatggaaatggaaaaacagttgcttcagcagtcactacattttcacaagatgatatgtgtagttcagcgctgcctagtcctgctaaggatttcggatggcatgatccaggatacattcattcagcacttatgacaggacttaagccttcaagcaccttctcctacagatatggaagtggctgggttggttggagtgaacaaatcaaattttcaactccacctgctggaggatcagatgagctaagattcattgcatttggtgatatgggcaagactcctcttgatgcttcagaagaacactac

SEQ ID NO: 89149 - DNA, 1659 bp, Glycine max
  Clone ID: PAT_MRT3847_5150C.1
tggtctatcaaaattataataatttataatctgcaagaccatcaaaactaatcttgctctaattatatacaatatatattccctccaggatatatccatagtcctatcaaacgtaagaaaaatccagaaaggggttctgcttgttgccacatacattaatttcagagcttaaagccacgttagatatattctgatattttctctttgcccccccaatcacatacatcattcaagtattcaactcagaacgcattttctcagtggatttgcacattcgcctttgaaaattttacacccaaattaaaagagagaaaaaaaattaataaaataataataacaaacagaaaataacagaagggattaaaaaaaaaaattggagaagttgccttccttcttatatatattttttcacatcgtctcatcataacatgatcatgatcatcatctgacatcatcacaatcacaaccacgtcatcatcaccgctgcaggtccatcatacgagaaaagtcctcgaagcagacgaacccgtccccgtttctgtccactccctctatcatgcgccggcactcctctaacgtgcaccgttcgtcgccgatggctttgaaaaccctaagcagctcctccgccgagatcctcccgtctcgatccgtgtcgaacacctcgaaggcttctttgagctcgtcgggatccgacccagtttcgagacccgacccgacgtagctcatgagagactcaaccgtgatgccgtcgccgtcgacctcgccgagcatgagcgccacgtcgccggggctcggcgacgcgccaaggcgcgtgagaagcgactcgaggtcctggcgcgtgacgacgccgtcgttgtcgcgatcgatgaggcgtaaggcctgcgcgaggtcccaccgcacgtcaacggcggcggtggcgacctcggaccactcgccggagacgtccgggagaacgctggtcggagtttggttaccgggggaaggtttgtgatttgcggtggaagagtcaacggaagaggatccggatccgaaagaaggcgggtcggagcgtgagactaaagatggttcctttttacgaaagaagcgtttggggcttagtttgaggtttttgcccgtggtggcggcggtggcggcggaggcggtggaggtggtggatatggtggtggtcgcggtggtggatatggtggtggtggtcgcggtggtggagggggatacaaccgtagcggtggcggtggaggctatggcggcggcggtggatatggcggtggcggtggcggtggctatggcggtggcagagaccgtggttatggtggtggtggtgaccgtggttactctcgtggtggtgacggtggtgatggaggctggagaaactagggcttgatgtcgttgattagggtttatgattatgctcagtaattttagttgtgtttgagtttgagtatctttatggttttgtgtcaccgtggttcttgtttttgaccaatatatctggttgtttatagtcgatttaatgaaatgataatcagaaattggagtaaaaaaaaaaaaaaaaaaaaaaaaaaaaaaaaaaaaaaataaaaaaaaaaaaaatcaccaaaataaaaaaagaaaaaaataaaaaaaaaggggccgctcaaaaggttccaaccttacttaccc

SEQ ID NO: 89150 - DNA, 260 bp, Glycine max
  unsure (1)..(260): unsure at all n locations
  Clone ID: PAT_MRT3847_51510C.1
gtgaaacggtgcctattctgaaagtcgtctccacgttctcctttgcgcatattgtggggtgtgctgtgctgtgtgtgccactattgtcatattccgcacaatgtgctttctcctgtagagttctgaaccttccttgcttttgtacatgtcaggaccctcttggccgatattgctgaaggctgcattgttaggtcattagtgagtttcggagatctaggtctgttgcaagctgcatttgngtaacgccatgtgttagagca

SEQ ID NO: 89151 - DNA, 133 bp, Glycine max
  unsure (1)..(133): unsure at all n locations
  Clone ID: PAT_MRT3847_51511C.1
cgaaaacattggttaacacgaggatgtgatacgcggatcangctaaatacacattcatagccaacatgcgaagactcatgagagagatcacatggctgaatacgaacaaggttcttacaggcacgtaagctat

SEQ ID NO: 89152 - DNA, 272 bp, Glycine max
  Clone ID: PAT_MRT3847_51512C.1
cccacgcgttcgcccacgcgttcgtcttatctctgcctgttgtacgtcttacatgagcggctgcttaaagtactaacacatcaccacgattcgtgatcttctcatgtacccgacttgtggtcaccactgtgacccatatctgtatcttctggcgaagcactatccgcactttctgacggatcaccgttatcactgttcgacttcttattgctatctgcttaaacgatcagattattcatgggtgaaaagctcatttgctcacttgtataggt

SEQ ID NO: 89153 - DNA, 409 bp, Glycine max
  unsure (1)..(409): unsure at all n locations
  Clone ID: PAT_MRT3847_51513C.1
ccccgggggggcaccgtcccagaacccccgggtcgaccacgcggttttgacgcgcgggagnggacaaggaggaaacaaggccatactccatggaatggaccggtttggccaataggttactgagcaagggcaacgaaattctgagtagcgattatgctagtctagatggtatgaggaccaagcaagtaatgagcaagatggcagaaatgataaacagtctttgcggcggcgaagaaaaaatgacgcgtgaaaggacacacccgccgaaggcttggggctcaaggacgggaaattggaagaaagatgttcggagagctgaaagtggaaacccttccggatttccgctcacagttatatgcaaaagcaattctaatgagaagcccatcagacaaagcaatgaaaaaatact

SEQ ID NO: 89154 - DNA, 359 bp, Glycine max
  Clone ID: PAT_MRT3847_51514C.1
tttactggctaagatggcgcacgagctttgccaatcggctcggctcgcgccgactccctgcgagaaactcgcggattcaaagccgtagccgcatttgacggttgggcgggtcggcgcgaaccaaatagccgagtgtcgcgctcgggcgattttgtgaagggggaaccgacggttgggggttagatagctgaaagggttggggcccggttgattgagggtgtgcatattaaaggacttaaatgaaattaattaagaagatcaattagggttggaaaggggattttagttgcctattggttctagtactgcctgaatttgctgattggggctctgctttctctgtactctcgagccgaatt

SEQ ID NO: 89155 - DNA, 457 bp, Glycine max
  Clone ID: PAT_MRT3847_51515C.1
tgcatcgcgcgcgtacgtattgcgttgctctctagcgggcggtcgctttttttttttttttttttttttttttaaagcaacccaagcggaaagtttgaaaggtaattcacttagctatttcctgcgagtgatggtaatgcctggcccaaacgactggggcaaaagccatccaagctcggacattagggggggaacaactttttattattgaccggtctggactcatctgtgcaaagaaccagaagctatatttctcacgccggagcttatggttttggctgagaaagcttggacacttcgcatatgaacgcaacgtaaatgcttccatcgatggattgcccttatcttcttccgatccatgggccgacccagtaaatccaacgagtccttacgcttgctgtggctacagttgggccaaatgagcgagctggacttattggaccgccactgaacgggc

SEQ ID NO: 89156 - DNA, 263 bp, Glycine max
  Clone ID: PAT_MRT3847_51516C.1
ctcatgatgtgaatgaggctgatctacaggatgcacgagctcctaaggcacgttggattgggtgttctcaatatgaagcgtgctgctagttaaatgagaaaggtgaaagggcaccgaaggatagcgattagacgacgcactagcaaactgtattcgtgtgcaacaaggctgggaaggatgaccttgatagagctgacgagaaaccacgaattaagaatcacacgaacgaaacctgtgatcctgatacaattaaagagaccgct

SEQ ID NO: 89157 - DNA, 569 bp, Glycine max
  unsure (1)..(569): unsure at all n locations
  Clone ID: PAT_MRT3847_51517C.1
cccacgcgtccgttcttttgttaccttcagaagatctggatccggctaatgagccctatggcgataaccccatgttcaagactcatcatggggcggcacacgcgcgtgcgcactattagacaaactttcaaaaagatgcatgggagctggtgaatctggagagacatatgaaggaaccgatggctcggagtgtgccacgtgtgatactacacgagctgctgcaagatgaactggtatcggggggacgctgctgagctgcacacgttcgtagacctcacagatggagatgatctgtttgggcagggtgccagtcgtcatggaagtggtactgccctgaggaacagtacgaacaacgtcacctcnctggataccctgatctttgacggggctggctctacatcgcgctggctatacgcagacacgggggcgaggtccacactctgctgatgaggacgtcgccgctgtctctgcacaggccaaggcgctagccgtgctgtaagacatctgcgaccagctcctgcaggtccgagcaggcattatggaacttggcccagaggcttgcgatctat

SEQ ID NO: 89158 - DNA, 1012 bp, Glycine max
  Clone ID: PAT_MRT3847_51518C.1
cagaaatctcgtcttctccgaaaacgtcctgcgcgtaacaaactcttatataacaacacgccttctggttctcttttcagtttacgtttacgtttacgcattcactcgcttatatcgtcttcctccgtttttttctttctcgtgaaacgcttcttccaactatgcctgccccattgattctggttactggcggagccggttacatcggtagccacaccatccttcagcttctcttcggcggttaccatgtcttcgccgtcgacaacttcgacaattcttccgaaaccgccatcaacagagtcaaggaactcgccggagaattagcaaataacccttccttttgctagcttgactgggcggacaggccgcgtctcgtaaaaatatttatcctaatataggtggtgaggtttattttctgggactaaaagcgggaacatcagttttggagatggttcgagcttttgagatggcatctggaaagaaaattccacttgtgatggctggccgtagacctggtgatgctgaaattgtttatgcatcaacaaagaaagcggaaagagagcttaaatggaaggcaaaatatggcattgatgagatgtgccgcgatcaatggaattgggctagcaaaaacccttatggctatggagatcaggaggattccaccgtttaactatatatatatatagtgttctctttgggttcttttccgaactcccccacaccgtagtccgtaggtcttgtgaatttagttttctcaaaagcttttctttagtccgtaggtcaaggtgacaagtacttgtattattatgattcatagttacatggtaaataagtagtggtttactgcactgtaatttaatttaaaggttctataggttccttcttacaggttattgattattagattcgaatactctcatgttccacatgagcagcatcctgttttgtaaatctgaatcacatgtttgtttaaagtgtaactaacaggtatcctaacctcattattcagatt

SEQ ID NO: 89159 - DNA, 257 bp, Glycine max
  Clone ID: PAT_MRT3847_51519C.1
ttgtttcttcgcgagataactctaactataggggctctcttttaaaaggagtctccgatcataaaacaccatacgcatcatatcatcccactccccctatcaggaatacacaaatcacacgctacgcggttagccaacaaatctcccatcgataacacacatcaacactgggcaccactctggaacaacagcatcaactttcaaaacatcaaaaagcaatcaccctatgcttgcatgattactagagaatagtccaa

SEQ ID NO: 89160 - DNA, 190 bp, Glycine max
  unsure (1)..(190): unsure at all n locations
  Clone ID: PAT_MRT3847_5151C.1
agaaaacaacccaaaggggagangcnatagncaaagagtttaaacggggacgaaagcagggacagacccgaacgcggggggctcaaggagaaagccaacggaaccgccaataacaccgtgccaaggcccacacgaagcctgcaagagccgcccctaacagccacaatgtggaacacagggaggcaaagag

SEQ ID NO: 89161 - DNA, 447 bp, Glycine max
  Clone ID: PAT_MRT3847_51520C.1
ctccttcttctctctcttctctaacttcttaatcatgccaaaccttacatcagtgctctttaactctggagcggtactaatatttactatcatcttaacttctactctttcaccctcttaccctaccctaccctgtcactcctccacaccacacatcttactcaccatcaaattctctacccacactacaccataccaccaccacccttcacacctcacctataccttaccttctaccacattaccctttacccctcccatctaatcctcctactaccatcataccatcaccctacttctcctataatccacctcctctttcgaatcatcctccatataaacctcctgtttcatatcaccctccagttaaacctcctatttcatcttaccctccttttaaacctccttttattacggttcaccctccttttaaacctcctaattttc

SEQ ID NO: 89162 - DNA, 2087 bp, Glycine max
  Clone ID: PAT_MRT3847_51521C.1
cgcaaactttcttccaaacgaacgtgtcacaaaattctcgccttctccgaattatggcatcgcgcgtcagcacttggcaaccttacctcctccgcgccgtatattaattcccctcactttcgctcaccacttaaaatttccaacaacccctctctgcaaaacgcttcgcataaggcacttatgcgcgataagactgtactggtaaccggcggagccggttacatcggcagccacaccgttcttcagctcttgctcggtggtttcagagccgtcgtcctcgaaaacctcgaaaattcctccgaggttggcatccacagagtcacggagctcgccggcgattttgtgaacaacctcccattccacaagtgggacctatgtcccagggattctctagagcttctacttaattccacacaattccatggtgttttttattcaagtagccttagacctttccttcaagactttgtgataatttttcttattatataacaactacttgattccgtcattcactataatagattttctatctacttagatgatgatataaattcgtaatttgcttttgcttaatttatctaatttttattgtagggtttaatatctttttacatataacttatggttttttttgttctttttgtaatctttttccatttgaaaagacatcttttttagaatatggtcctcatgtcgtataattgtaaaacaatattattataatattccaaaaattataggtcacatctggatcacatgaatggggatggtcccagtggaattcttctacaaatcaaccccatctctctgcaattaaccttcatgcaactgcttgtctatacattgttttaatatgatttggggatgattattcgcactgagattggaaagtaattttgtgttgttattttgttcttgtttcagaagattgtcttgtttctgcatggtaaatctaatattagttttatatttttttttttgtttataaggtatgaacagataagtgatcatcattgttagagttgtttaaatgtcattaggtagcatctttaaagtaaatttgtcttgtgatagctggcgtaagaccgaatgtggttgtgcatcaacaaagaaaacggaaagagagcttaaatggaaggcaaaatatggcattgatgagatgtgccgtgatcaatggaattgggctagcaaaaacccttatggctatggagatcagggctccaccgattaaccacttagttttctctttgggttcttttctgaactcacccacaccgtagtccgtaggtcttgtgaatttagttttcccaaaagcttttctttctttagtgatcttaaggtgacaaagtacttgtattattactattcatagttacatagtaaataagtagtggtttactatactgtaatttaaaggttctctaggttccttcttacaggttattgattattagattcggattctctcatgtggaggattctctcatgttccacatgagcagcatcctgttttgtaaatctaaatcacatgtttgtttaaagtgtgactaacaggtatccttacctcattattgagattaatttattttgaatgttacctttagtaataaatagcatttttcatggcttcaatgtaaggcgaaatatggcattaatgaaatgtgccgcgatcaatgaaattgggctaccaaaaacccttatggctatagagatcaggaggattccaccgtttaactatatatatatatagtgttctctgtgggttcttttccgaactcccccaccccgtagtccgtaggtcttgtgaatttagttttctcaaaagcttttctttagtccgtaggtcaaggtgacaagtacttgtattattatgattcatagtcacatggtaaataagtaatggtttactgccctgtaatttaatttaaaggttccataggttccttcttacaggttattgattattagattcaaataatgtcatgttccacatgagcagcatcctgttttgtaaatctgaatcacatgtttgtttaaagtgtaactaacaggtatcctaacctcattattcaaaaaaaaaaaga

SEQ ID NO: 89163 - DNA, 1213 bp, Glycine max
  Clone ID: PAT_MRT3847_51522C.1
cagaaatctcgtcttctccgaaaacgtactgcgcgtaacaaactcttatataacaacacccttctttttctcttttgagtctacgtgtacggttacgcattcactcgcttatatagacttcctgcggttttttctttctcgtgaaacgcttcttccaactatgcctgccccattgattctggttactggcggagcaatgaacccatatggacgaactaagcttatcattgctgacagagggaactcttctgtgcatggaacccatatggacgaactaagcttatcattgaagaaatttgtcgtgatgtccaccgtgcagagccagattggaaaataatattgttaagatacttcaacccagtcggtgcacaccctagcggttgtattggggaggatccccgcggaattccaaacaatctcatgccatttgttcagcaagtagcagttggccgacggcctgcactgacagtttttggaaatgattataatacaactgatggcactggggttcgggattacattcatgttgttgatttagcagatgggcacattgctgcgttgcttaaactagatgatcctaatataggttgtgaggtttataacctgggaacaggaaagggaacatcagttttggagatggttcgagcttttgagatggcatctggaaagaaaattccacttgtgatggctggccgtagacctggtgatgctgaaattgtttatgcatcaacaaagaaagcggaaagagagcttaaatggaaggcaaaatatggcattgatgagatgtgccgcgatcaatggaattgggctagcaaaaacccttatggctatggagatcaggaggattccaccgtttaactatatatatatatagtgttctctttgggttcttttccgaactcccccacaccgtagtccgtaggtcttgtgaatttagttttctcaaaagcttttctttagtccgtaggtcaaggtgacaagtacttgtattattatgattcatagttacatggtaaataagtagtggtttactgcactgtaatttaatttaaaggttctataggttccttcttacaggttattgattattagattcgaatactctcatgttccacatgagcagcatcctgttttgtaaatctgaatcacatgtttgtttaaagtgtaactaacaggtatcctaacctcattattcagattatttcttttttga

SEQ ID NO: 89164 - DNA, 279 bp, Glycine max
  Clone ID: PAT_MRT3847_51523C.1
ataccaaacatagttcatataatttcatgtcatgtaaacaaaattacataccatgacaaataagttgttagactaaacaaccaccaacaaaacaaagaacccaataggaaataaggacttcataaacttcgttacaagttggttaataagggccatttaaactttaacttatgaatacatacccctacctagtcacttaattgcaataataacaatggccacaacaaatacaatttcaattttgaaacccattacaacttataagttgggctttatttt

SEQ ID NO: 89165 - DNA, 869 bp, Glycine max
  Clone ID: PAT_MRT3847_51524C.1
aaccgaacgttcgattgagtcatcaaagtcatatggtttcacgtttcagtcctgatcgagtaaataccaagaagcagcagcgcagtaacgacaccgtttcgatggggaactgtaacagcgaagcctcttcccaaactcagccacattccgatcaccatccccaaccacgctccaactccaacggcatcaccgtccttcctcccaattcgaagccctccgttggccgggtcttgggccggcccatggaggacgtccgctccacctacaccttcggccgcgaactgggccgcggccaattcggcgtgacataccttgtgacccacaaacacaccaaacaacaattcgcgtgcaaatccatcgccacgcccaaactcgtccaccgcgacgacttggaggatgtccggcgagaggtgcagatcatgcaccacctcaccggccaccgcaacatcgtggagctcaagggcgcttacgaggaccgccactccgtcaacctcatcatggagctctgcggcggcggcgagctcttcgaccgcatcatcgccaagggccactactccgagcgcgccgccgcagatctctgccgccagatcgtgacggtggtccacgattgccactccatgggagtgatgcacagagatctcaagccggagaatttcctgttcctcagcaaggacgatgattcccccctcaaggccacagatttcggtctctccgtcttttttaagccaggttagttacttagttagttactcgctgtggatcaacttttgaactagtacttggaggaggaggataccaagaagtagaaagtcaaaatgaattaagcaccaaacatttacctattcaggatagaagaaaattagaagtct

SEQ ID NO: 89166 - DNA, 1850 bp, Glycine max
  Clone ID: PAT_MRT3847_51525C.1
cagaaatctcgtcttctccgaaaacgtcctgcgcgtaacaaactcttatataacaacacccttctttttctcttttcagtttacgtttacgtttacgcattcactcgcttatatcgtcttcctccgtttttctctctctctcgccaaacgcttcttccactatgccttcccaatcggttctggttaccggaggagccggttatatcggtagccacaccgtccttcagcttctcctcagcggttaccatgtcttcgccgtcgacaacttcgacaattcttccgaaaccgccatcaacagagtcaaggaactcgccggagaattcgcaaataacctttccttttccaagctagacttgcgggacagagctgccctcgagaaaatattttcaaccaataagtttgatgctgtgatacattttgctgggcttaaggcagtgggtgaaagcgtggataaaccactgctctactttgacaacaacttgatagggacaatcgttctatttgaagtcatggctgcccacggatgcaagaagcttgtgttctcatcttcagcaactgtatatggctggccaaaggaggtcccatgtaccgaagagttccctttgtcagcgacaaacccatatggacgaaccaagcttatcatcgaagaaatttgtcgtgatatctaccgtgcagattctgattggaaagttatactgttgagatacgtcaacgaaagtgtgcaacaacctctactatactataacaacaacttgactgggacaatcactctattggaagtcatggctgcccatggatgcaagaagctcgtgttctcttcttcagcaactgtatatggttggccaaaggaagttccatgcacagaagagttccctctgtcagcaatgaacccatatggacgaactaagcttatcattgaagaaatttgtcgtgatgtccaccgtgcagagccagattggaaaataatattgttaagatacttcaacccagtcggtgcacaccctagcggttgtattggggaggatccccgcggaattccaaacaatctcatgccatttgttcagcaagtagcagttggccgacggcctgcactgacagtttttggaaatgattataatacaactgatggcactggggttcgggattacattcatgttgttgatttagcagatgggcacattgctgcgttgcttaaactagatgatcctaatataggttgtgaggtttataacttgggaacaggaaagggaacatctgttttggagatggtaaacgcttttgaacaggcctctggaaagaaaattccacttgcaatggctggtcggagacctggagatgctgaaattgtttatgcatcaacagagaaagcggaaagagaacttaattggaagactaaatatagcatcgatgatatgtgccgcgatcaatggaattgggctagcaaaaacccttatggctatggtgcatctgcagattcctccaattgatgtcgatgattgtcggatatagtatatatgttctcttttggggtctttttgaaccctgtcgcccaataggtccctaaagtttttctttagctattctaaggtggaagttaaatcatttcctagtttattatgaattataataaagtggtaaataagtagtggtttagtttacttagcgattctttaggttccaactcacagaatattgaatgggtattctctcatgttcttcatgaacatgactgcatcctgttttgtaaatctaaaccacacattatagagtatgactaaccggtataatcttaccttacctcattatccataataaagttttacatagcattatatgcttttgattttcct

SEQ ID NO: 89167 - DNA, 1566 bp, Glycine max
  Clone ID: PAT_MRT3847_51526C.1
ggctcgagcgaacgtgtcacaaaattctcgccttctccgaatatggcatcgcgcgtcagcattggcaaccttacctcctccgcgccgtatattaattcccctcactttcgctcaccacttaagatttccaacaacccctctctgcaaaacgcttcgcataaggtacttatgcgcgataagactgtactggtaaccggcggagccggttacatcggcagccacaccgttcttcagctcttgctcggaggtttcagagccgtcgtcctcgacaacctcgaaaattcctccgaggttgccatccacagagtcagggagctcgccggcgaatttgggaacaacctctcctttcacaaggtggacctacgggacagagctgctctagaccaaatattttcttccacacaattcgatgctgtcatacattttgctggactgaaagcagtaggagaaagtgtgcaaaaacctttactatactataacaacaacttgactgggacaatcactctattggaagtcatggctgcccatggatgcaagaagctcgtgttttcatcttcagcaactgtatatggttggccaaaggaggttccatgcacagaagagttccctctgtcagcaatgaacccatatggacgaactaagcttatcattgaagaaatttgccgtgatgtccactgtgcagagccagattgtaaaataattttgttaagatacttcaacccagttggtgcacaccccagtggttatattggggaggatcctcgtggaattccaaacaatctcatgccatttgttcagcaagtagcagttggccgacggcctgcactgacagtttttggaaatgattataatacaagtgatggcactggggttcgggattacattcatgttgttgatttagcagatgggcacattgctgcattgcttaaactagatgaacctaatataggttgtgaggtttataacctgggaacaggaaagggaacatcagttttggagatggttagagcttttgaaatggcatctggaaagaaaattccacttgtgatggctggccgtagacctggtgatgctgaaattgtttatgcatcaacaaagaaagcggaaagagagcttaaatggaaggcaaaatatggcattgatgagatgtgccgtgatcaatggaattgggctagcaaaaacccttatggctatggagatcagggctccaccgattaaccacttagttttctctttgggttcttttctgaactcacccacaccgtagtccgtaggtcttgtgaatttagttttcccaaaagcttttctttctttagtgatcttaaggtgacaaagtacttgtattattactattcatagttacatagtaagtaagtagtggtttactatactgtaatttaaaggttctctaggttccttcttacaggttattgattattagattcggattctctcatgttccacatgagcagcatcctgttttgtaaatttaaatcacatgtttgtttaaagtgtgactaacaggtatccttacctcattattgagattaatttattttgaatgtt

SEQ ID NO: 89168 - DNA, 1730 bp, Glycine max
  Clone ID: PAT_MRT3847_51527C.1
acacaattcattttcgaacgaacgtgtcacagaattctcgccttttccgaatatggcatcgcgcgtcagcattggcaatctcacttcctccgcgccgtatattaattcccctcattttcgctcacaacttaagctttccagcaactcctctttgcacaagccactcatgcgcgacaagactgtgctggtaaccggcggagccggttacatcggcacccacaccgttcttcagctcttgctcggaggttgcagaaccgtcgtcgtcgacaatctcgacaattcctccgaggtttctatccaccgagtcagggagcttgccggcgaatttgggaacaacctctcctttcacaaggtggacctacgggacagggatgcactaggcagccatgacttccaatagagtgattgtcccagtcaagttgttgttatagtatagtaaaggtacttcaacccagtcggtgcacaccctagcggttgtattggggaggatccccgcggaattccaaacaatctcatgccatttgttcagcaagtagcagttggccgacggcctgcactgacagtttttggaaatgattataatacaactgatggcactggggttcgggattacattcatgttgttgatttagcagatgggcacattgctgcgttgcttaaactagatgatcctaatataggttgtgaggtttataacctgggaacaggaaagggaacatcagttttggagatggttcgagcttttgagatggcatctggaaagaaaattccacttgtgatggctggccgtagacctggtgatgctgaaattgtttatgcatcaacaaagaaagcggaaagagagcttaaatggaagggaaaatatggcattgatgagatgtgccgcgatcaatggaattgggctagcaaaaacccttatggctatggagatcaggaggattccaccgtttaactatatatatatatagtgttctctttgggttcttttccgaactcccccacaccgtagtccgtaggtcttgtgaatttagttttctcaaaagcttttctttagtccgtaggtcaaggtgacaagtacttgtattattatgattcatagttacatggtaaataagtagtggtttactgcactgtaatttaatttaaaggttctataggttccttcttacaggttattgattattagattcgaatactctcatgttccacatgagcagcatcctgttttgtaaatctgaatcacatgtttgtttaaagtgtaatgacaaaaaaaaaggtgatgccgcccttttttttttttttttagacagctctaaaagtagcacagcccttcactgacaaagggaatgaaatcactcccatataaagcataagaattgggctaaatgtatcacttatggctaaaataaaaagacggatttattcgtttaactatatatatatagtgttctctttgggttcttttccgaactcccccacaccgtagtccgtaggtcttgtgaatttagttttctcaaaagcttttctttagtccgtaggtcaaggtgacaagtacttgtattattatgattcatagttacatggtaaataagtagtggtttactgcactgtaatttaatttaaaggttctataggttccttcttacaggttattgattattagattcgaatactctcatgttccacatgagcagcatcctgttttgtaaatctgaatcacatgtttgttt

SEQ ID NO: 89169 - DNA, 502 bp, Glycine max
  Clone ID: PAT_MRT3847_51528C.1
gcagatattcgtaaaaactttgaccggcgcgaccatcacccttgatgtggaatgctccgacaccattgacaacgtaaaagctgagattcaagacacggaagggatgccacctgaccaacagagacttatctttgcgggtaaacaacttgaggatggtcgcacccttgccgattacgacatcctaaatgaatcaacccttcatctcgtgctccgcctaaggggtggcatgcatatctttgataagacttagaccgggaagaccatcaccgtcgaagtggaatcctcggacaccattgatgatgtctatgccatgatccactacaaagagggcatacctccagatcagcagaggctgattatcgccggtgaacaacttgaggatggaagaacccttgctgatcacaacattcactaggaatacaccctccacttggtgcttcgtgtgagaggtggtatgcagatgttcagtagaactctgaccggacagacccataacctagaa

SEQ ID NO: 89170 - DNA, 278 bp, Glycine max
  Clone ID: PAT_MRT3847_51529C.1
ggaaaaaaagagctaccggggcgtcacacagacatgacgtgacgattcctgcttacccgcagaacttccaggcattttagctccggtcattgccgtatcccttatccggtaaggagccggcggcctgcaaaacaccggtggcatacatcaccactcgatcgtattcgatagttaccattcgtgcttcctcggtaatgttggcatgatgtacttccataaccttcgcactcaattctactcgtcccatccgtcatcgctgaattcctatagtctctcct

SEQ ID NO: 89171 - DNA, 258 bp, Glycine max
  Clone ID: PAT_MRT3847_5152C.1
accaggtcttgtgagacacaactcaaagttcaacttctctccctttttcttccttcaatttcgtgctcctccctctctctttctctccctctttcttttcctccattgaagcatccttccaagcttcttatccaaggctcatcttggtggtgaagctctttttttccatggcttattccttaatggatggcgcctcctctcacctcttctcctttgtcttccgctgcatctccatggtgaaaaatcaccattgaagga

SEQ ID NO: 89172 - DNA, 305 bp, Glycine max
  unsure (1)..(305): unsure at all n locations
  Clone ID: PAT_MRT3847_51530C.1
gcgtgcgaagctagctatnaatttggctcgagcgatcaatgatactactacttcttcaatcacagcagatctattcaaccacataattactactagcaatcatgcaaatcttcgtcaagacccttactggcaagaccatcactcttgaggtcgaatccagcgataccattgacaatgtcaaatccaagatccaagacaaggaaggcatccctcctgaccagcaacgtctgatcttcgccggtaaacaactcgaagatggccgaaccttgagcgactataacatccataaggagtcaacccttcac

SEQ ID NO: 89173 - DNA, 205 bp, Glycine max
  Clone ID: PAT_MRT3847_51531C.1
cttctaaaaggacaccgaatggggactatcatattaactactgcagatgagatcaacggacaacgtgtgatctactaatatatgttgggccatccaacacattacagctgatacagacataaacatgccttaccttgtaggtcttagaatctagttactatatatcatatactatacgtactgcgatccataatgctatatcatg

SEQ ID NO: 89174 - DNA, 350 bp, Glycine max
  Clone ID: PAT_MRT3847_51532C.1
aattcccggctcgacccaagcgtcagacgggtgccaaaagaccaccgaagggggagagacagtggcagcggcggtactctcacactgatactctcactctgaggaacgcacacggtgcgttcgtaaaaactgctaagaagatggcagaactgagtttgggaaagcacacggatatggtttattacgaagtcacgagagatactctacctgataaagatcgttcacgctgccggttctggtcgtaaggacggttgatgctgaagattcactacatgatacgctggctatggctctggagccatggcctcaatgctgacctggctcatgacgtaagttgcatcgttaaccac

SEQ ID NO: 89175 - DNA, 210 bp, Glycine max
  Clone ID: PAT_MRT3847_51533C.1
ggacagagaaatgtcaaaagtgtacatagagatttccgtgatagttcatcttcttcttcgacttcgtcatcaacggtgggtctgtacaatcgtccttgcagcatcatcatggatgatcgaaattgtgttattgatgtaatgggacttccagagaatgaccctcttttccaattgaatttgcctcctggttttcagttttaacccaacgat

SEQ ID NO: 89176 - DNA, 239 bp, Glycine max
  Clone ID: PAT_MRT3847_51534C.1
ctggtatggacatagtagttgttaacatgtgcaggattaggacatatttggtaccgatgtctccttattatatatagaaggatggtgatggatgggttgtactcacatgatatctgtgatagggtcattctgctgaaacgttagggccactgctggcgtgcaaatttcactgagacataggttgaccagctggcattctgatattcaagggaacactgttgaagaatgagttatgtaga

SEQ ID NO: 89177 - DNA, 325 bp, Glycine max
  Clone ID: PAT_MRT3847_51535C.1
cagaataacttgtttcctttctcattctttcaaattttgatgctgacccccttttttccagaataaaaacaaatgtgatctgaatggagaaaatctaacgcaataaaatttacattccataggggggggggggggacctcgcaacaaatgaaaaaaaatcactcccagctacaaaaaatggggcttgtttctgtccaaaacaagcagtccccactgttccttatttaccatagcatttggcctttttgatctctatacctatgaaacctgcactccatcagtttgtgtacaaaatcagctgcaaataacaacattaatccccttt

SEQ ID NO: 89178 - DNA, 360 bp, Glycine max
  Clone ID: PAT_MRT3847_51536C.1
gtctcacggccgccaaacacgagagacacggggggcattgagaaaggacaggccggggatccacgccggcacctgcggcagcgaacggcacggccgggaacatggcaaccaccccgatggcatgacgccaagggacacccaacacggccaagcccacgacgccagcaacaccggcgagagcgaaaccggatccggcaagaacgcccggcgcgcccgaaacggcgatcgaaagcccacagacatggaccaaaaccagtgcgacacagaccgccaacagtaccaccgccaacagcgcaacaccggcaaggaagaaaccgacaacaacgttgcaagaagacacgacaccggaagcaaagagag

SEQ ID NO: 89179 - DNA, 1746 bp, Glycine max
  Clone ID: PAT_MRT3847_51537C.1
gaaatgaacaagtcaatactcttactcctattatttttcctcctcaacccatcccttctcgccacgtcacaccctcttaacccaatcccagtcacgctctccgtcgccgatttcggcgccgccggcgacggcctccgctacgacacggaggcaatccagtcggccatcaactcgtgcccagagggggatccctgccatgttaccttcccagcgccgggaaagtacctgacggccaccgtgttcctgaaatccggcgtggtgctgaacgtggagtccggggccaccatccttggcggcacgaggctggaggactaccccgaggagtcgtggcggtggtacgtggttgttgcggagaacgcgacggacgtgggaatccgcggcggcggagcggtggacgggcaagctgcgaagttcgtggtgagggaagatccgaggaagaacgttatggttagttggaatcaaacaggggcttgcttgggagacgaatgcagacccaggctcatcggttttctcgattgcaacaacgttcaagtctctaacattactctcaaccaacctgcttattggtgcttgcacttggtgcggagtaacaacatatgcattcaagatattgcaatttatggggactttaatataccgaacaatgatgggattgatattgaggactcaaataacacagtaatcactcgatgccacattgatacaggggatgatgcaatctgtccaaagtcatccacaggtcctgtttacaaccttacagtcactgactgttggattcgatccaaatcttccgcaattaaacttggcagtgctagttggtttgatttcaagcattttgtgtttgataatattgctattgttgattctcatagagggattggattccagatccgtgatggaggaaatgtaagtgacattgtattctcaaacatgaatatcagcacaagatactatgattcattatggtgggggagagcagagcctatctatgtcactagttgcccacgagactcaagctcaaaggaggcttcaatctcaaatgtacttttcattaacattactgcaaattcggaaaatggcatcttcctgtctggttcaaagagaggattgttaagaaatttgagattcattgatatggacattacttacagaaggttcaccaattatgctggtgggttattggactataggccaggatgccaagagttggtaaaacacaggactgcagggattatgatggagcacattgaagggcttgaggttaaaaatgttgaaatgagatggtcaaacgatcaactagagcagtggaataatcctctagagttcaggccatctactgtgaataacatctctttccttaattttaattctggtttgtatacaaatagcaaatcaaattattaactttgaatctgcaaagggagaatgtccaaatcattggctgcatgtcaaccatcaagggaacgggggaaaagttcaaaagaaagggaggagcatttgctctgtgcattataaaaaaaaagagagatcaactgttaaaccttgatctagtgcttcgctttctgcatatgaaatatgaatgacattgatttgtaaaattgatacagtttcagtgaaatttggattgatttaatcgagtattggaggtacaaaaaaaaaaaaaaaaaaaaaaaaaaaaaaaaaaaaaaaaaaaaaaaaaaaaaaaaaaaaaaaaaaaaaaaaaaaacaaaaaaaaaaaaaaaaaaa

SEQ ID NO: 89180 - DNA, 304 bp, Glycine max
  Clone ID: PAT_MRT3847_51538C.1
ttacagagtgctccataggaaaactgtaatgccagacattggattgtgtagatgagagagagattacaatggtgtattgatgaatctacttaaacctagtcgcgaaaatctatttcgcttgtgcgggggaaagctctcactggagacagggctcatgcttactgatcacgtgatcaaccagattgagggtggtcatactaaatcatgtgttgatcggaatatcaaaccggataagtttgtcatgggcttaggaaggcgtggaaaccgagttgactatatgaattggagggtgaccaagagatat

SEQ ID NO: 89181 - DNA, 270 bp, Glycine max
  Clone ID: PAT_MRT3847_51539C.1
cgcacgctcgcacgcgtcgcacctcgtttagacgagcggcgacacgcgtcgggaaggtgagaaggagaattgatagaggagtaaagcagaggtaaagctttgacaggagtgcaggataacagaaaaaagaggtgtcaaacatagcgtgagtaaggcctccctagaaatggatgaaattgaggaatttttattgagtggatggagtgttaagaggcgtatgtttttccggtgctgaatttaggcgttattacaaaaaaattcttagtgtga

SEQ ID NO: 89182 - DNA, 598 bp, Glycine max
  Clone ID: PAT_MRT3847_5153C.1
ctttttttttttttttgtttttttttttttttttttttttttttttttttttttttttttttttttttttttttttttttaaaaaggacccccataggaatcacaaaacccttaacaaacttaaaaaaagggaaagacttcccaccaattttcaaaatagtaaaagactaaccccatgtaagggcaggaccaaaaggccggcttacaggaaaaaaaacccttaccaaccccatggggccccaaagttaaacggtttccaaaaaaaaactttcctatgaaggttttaaaaacagccctgttataagccatcgcctatcccaaaaaacaaatccttaaaaaaaaaaacattgggctcaaaactttgccctgcaattttggcaacggggggacgggaggagcaggtttcccaaaacccccatgactggaaaagggccaaaatttgcccccaaatttaaaaaatggccccatctgggttgcccccagaggagcatagctttttggaccacccacaaaaagggcagttgggcccctctgacccccatatgaaaaggaaggcccaacctcctggtaaatcatcaggggaaaagccaatctcgtc

SEQ ID NO: 89183 - DNA, 233 bp, Glycine max
  Clone ID: PAT_MRT3847_51540C.1
ttcggctcgatagtaatctctgggacttctggtctgtttggtagagacgagaggcatagagtagatggaaataactaggatgagtgaaaataggtgtaaataaagttgatattaaatgtgttttgtggaagagaaataaagtagagacgaagaaagagatattgaataagtggaaattagtgtgaaatagtatactaggtcccgtcatgtttaaaattagttgcacctttgtc

SEQ ID NO: 89184 - DNA, 511 bp, Glycine max
  Clone ID: PAT_MRT3847_51541C.1
cgcgcatccgaatcccaccatgggtagccgttacaacaacaacaacaacgccaccggcgagacggctttcgtcgacgacaacgccatcgccgccgccgaatccagagtgcaacccaccgacgcgccgaaaaaacgttggggaggctgctggagccaatattggagtctcggatctcggcagagcagttgaagctgtaagcgaatcggccatgccgaccttggtccaaaagctgttgtttgaacaggttcaggtgatgctgctactgcagacgctccacatccttcaaccggcattgtaatgccgcacattgcccctccatgatctactgcatgttttgtccaatgcgatccacacatgaggtattcaatcaccacctggattacatccactctatgctcttgcggacaacgcttactcttctggcggggctgccaccatgttcaccattgggacatatgcctaagagaccgagttagcttctccactctgtttataagacttgacagctga

SEQ ID NO: 89185 - DNA, 447 bp, Glycine max
  Clone ID: PAT_MRT3847_51542C.1
aggaggaggagggcaacaacaccactttaactttcattttatggaacaatatacatattccatttttaaaaaaaaggggtcagttaacaacataatcaatctcattcctgcaaaggaggaaaaacccttttttggcgcccctttatacacgggattatcacaattcataaccccttcccttaaaaaaacccccttccaaaatatttaacaacaacaactttgggccccaaaaaaaaccggaaaaagaaaaaaaaaaccgggactgggaacccttcgaatgaagggggcctaaaaacaaaagcgacgatcggttgggaacacaaacactttttgggggtttcgcgaacaccggggggagggttggaggaatcaagaaccggcgtcccgggaaaaatgaccactttgtcctcctcaaagggaatcttggggggacccccccccggggga

SEQ ID NO: 89186 - DNA, 333 bp, Glycine max
  Clone ID: PAT_MRT3847_51543C.1
gacaacacaacgcaacacaacgcgcactctcgcttttctctctgatcacagctaccctatcgttcttcgcggtttcgccgattctcgccatggcgaaagccatatccgacgccgaaggcgccgatagacggttgaaacgcaaaggcgctggtgctggaaggaagcaatcgacgaaagctgctaaggattctaacaagccagagagacctccaagcactttcttcggtttcatgtccgaattcatagagcagtttaagatggagcatccgaacaacacagccgtcgctgttgtcggtaaagctggttggtagatatggaaatcgctgtctgatg

SEQ ID NO: 89187 - DNA, 211 bp, Glycine max
  Clone ID: PAT_MRT3847_51544C.1
gcttttctcaccaaacaattattatttgaacaaagcaatggttgatgttgttaaaatttcaaccattgcttttctcaccaaacaattattatttgaacaaagcaatggttgaaattttaacaacttcatggtttattttatattttgtgcatataacttcttataatctcaactgctggtttttaaatgcaatggctattatgtatctaaa

SEQ ID NO: 89188 - DNA, 2120 bp, Glycine max
  Clone ID: PAT_MRT3847_51545C.1
ggaaaatcatatatttcttctgaattcaatcagagtcaattgcattcacgaacgagttgactttgtttctcagacttccatgaagtctgggttaccaactggttctcagaattctgaatttcaggatcaagcataccctccaatgcaggatcattcactaattttcatgcttacagaacctttctctccaaagcatctccctcaggggaacccagctagtcaattgccttcaggctctaatctcaatagagatgattttcataatcaacttcctatgcaggattcaaaattttcaagtaccacatcatttgggagcctgcagcctcaatcaaatcaattttcctggaagttggatgtgaacagactacaacctactctgggtggctagttgccggtagaaggacatcttatgacatcttcccacaacaatacattatcacagaagcaacaaccaatgtataattttcaatgttctgtatccgaggctaatttgggtgtgcctggggagactgttactgtttcaagatatccatctgattttctggatagcaatcattcaacttctcttccatcttttgggggatcaagaatatctgctcactataatccttatgcatcaacctttgagaaaccactaacttccaaattcagttcaagtatttttagacaggaaaatgaaataatccatggtaacaattatgcttcttcaagattgaaccatactcctgtgaatggggaagatggtggtgtggttggatcaagacagtcagcttcctcatcaaaatcagctagagctcttggtcagattttacctaggtctggtggtgaccaatatgacccgatttttgacagcattgaaccatcatcctcttctctgaaaaaaattgattttgatcagaagaaggaagttacaggtgaatccaacatcagcctaaggcccaaaagttcttacatgtctttggactcggatgagaagaacaagcaggaggaggttggggctgttgcctctaccacttctcaaaatattgatgaatatggtgaaacagcagatgcagaagttggtgctgttgaaaatgagagcctaagtgatgatgtggatgttgcaaaactgacttcaggggaggttgagattaatcaggtcaagtctcctgggaaaagaaaaaagagtaaggattccagatcaatgaaattgttcaaagtttccattgcaaactttgtaaaggaggttttgaaaccatcatggcggcaaggtaatatgagtaaggtggctttcaaaaccattgtgaaaaagactgtggataaagtgtcaggagccatgaaaggccaccgtgtacccaagtcccaaacgaagataagtcaatatattgattcatcacagcgaaagttgactaaacttgtgatgggttatgttgacaagtatgtcaaggtatgaaagtgaagtatgcaaatgtttctccaacattaaatgtcaatataggtgcatcatttcaacaggaaacatcgatgcttccctggagttgtctcctctcaattaaaggcatactaggtaggtgcgagaatgattgatcaacattcaagttcctcaagttttggtcgtccccaatatgtatgtattgtattttctacttgttattctttgtgatttgcttttaatttatagtttccccctcatgttatataatagcattttgaagtagtttacccgtgaatattgcaaagttggaattagttctctttttattgtttttataagctaataataactagaacgaattgcaagtaaaaaaaaaaaaaaaaaaaaaaaactcgtgacctcatcaaatatcttccgcgaactgaaccatggaaatgaagaagcttttcttgcagagatgctgttaatcaaatttgtttttaatcgtggaggattggtgatgcattattatattctgattaattataatgtaaattgcccttggtcttttattttatcaaatatttgatttgaagcaagtcctctctccggcagaaataccggctaccatttgagcttgttacttaagtgacaatatccctggtttttgtatagtgcacgagtttagcttgtgtgaaaatttctcaaaaggaaatatttcttgcgg

SEQ ID NO: 89189 - DNA, 198 bp, Glycine max
  Clone ID: PAT_MRT3847_51546C.1
caaccttaagcgagaggttttattttaaccttaaacaaatctgaaacataacacctttcgttacaaatacatgaacaagtgccaaaactaacttcaatggcttttttgtagccgttgatctttacaaaagggaaaataaaggcctgccctttccttggaaaggcattgatcacttttatatttttggcatttgttgga

SEQ ID NO: 89190 - DNA, 1880 bp, Glycine max
  Clone ID: PAT_MRT3847_51547C.1
aatcgatcaagagcagcaatgaaagcaataagtccctccttcctctgccttataattcttgtgacccttttggctggtagcattgaaagtgcaccagcaaacgtgaagccaagccattatgctgcacccttcaataggagtgtttttccttctggttttctatttggaataggctctgcagcttaccagatagaaggagcagcagctatagatggcagaggaccaagtatatgggacacctatactaaacagcaaccagggaagatttgggatcatagtgatggaagtcgaagatttgggatcatagtgatggaagtctagcaattgatttttatcaccggtacaagagcgacataaagatggtgaaagaagttgggttggattcatacagattttccatctcatggtccagaatattccccaagggcaagggagcagttaacaccttgggggtcaagttctacaacgatctcattaatgagattatagcaaatggcttaaagccatttgtcacgctgtttcattgggacctcccacaagctcttgaagatgaatatgggggatttctcaaacctgaaatagtggaggacttccgtaactatgctgacttttgcttcaagacatttggtgatcgggtgaagcactagggtaaccctaaatgaaccataatggcatacatgcgagttgggaatttattggctacagtggtggaaattttccaacgaggttagatgttctcaactaacgttggccaaaaatgcccattactggatgatgcttcgcaccgagacctacatacgttattccacccacttaataccttgctcatggagcagcagtcaattgctacaagaacaaataccaaggcctcatcagtaaaggacaaattagaagtcaccatagtgactattcttctttgaaccaaaatctaatagtggatgctgatcgcaaggacagcaaggcagagctcatggtactttatgtttggctggtttgctaatcccattacatttggtgactatcctgagagtatgagatctttagttggttctagactccccacattcaccaaagctcaatctgaaagtctcaaaggttcatatgattttcttggtataaattattacacctcaaatttcgtggaatatgctccaccaaccaccactaacaagacctatttcactgatatgctagccaaactttcttcgaccaggaatggtgtacccattggcacaccgactcctctgagctggctctttatctatccggagggaatttataagctcatgacatacataagggacaactacaataatccaccagtgtacattaccgaaaatggcgttgcggaatcaaagaatgactcacttgcaatcaatgaagcccgaaaggatggtattcgaattagataccatgatggccatctcaaatccctgcttcatgcgatcaaagatagagttaatgtgaagggctactatatatggtcattttcagatagctttgaatgggatgctggttacacagctcgatttggcatcatatatgtggattacaagaacaatttgagtagataccctaagtcctctgcgttttggctgaaaaaattccttctcaagtgatctaaatctattgttcctttggcatgcatgcccagtttttcttcttgtttgtttcctggatatcacagacatgcagtgtgtatcacttgctcttcgattcggatcaatgtaatcaagtcatcgttgatatcaaataaataatggcatgccagagaatggaataaattatcttttcaacaaaaatgtgttccagttgttgcatcaatgcctatatatatttaataattaaaaaaaaaaatatatttattttttttttttttt

SEQ ID NO: 89191 - DNA, 136 bp, Glycine max
  Clone ID: PAT_MRT3847_51548C.1
ggagaagatatcatagagagtgatagtaattaccgtatccctatttataggtgcagcaactgcagacaatgcatcagctgaagcagacgactctcctaaattaaagaatttgataacatattgcactgcgcacgtt

SEQ ID NO: 89192 - DNA, 327 bp, Glycine max
  Clone ID: PAT_MRT3847_51549C.1
gcccgtgtttgtacttgaatgaccaccctgctgaccgcctaccatatggggccgtacctggctgtcatgagcccatactacacaggacggggatggtgcgcatcacctaccatggaaccaggcaccgatatgagggaacgtcggacaactcccagctgactgcagaaccgcaagatatcataaacgggggacatgctgagagctgctggaccaaaaaattgaccaagttcctcataccacatggctaacaggatgagagacaccgacccagatgaagacctcaatgatagctacacgtgtgttagaaaggatcacaatgattctaca

SEQ ID NO: 89193 - DNA, 345 bp, Glycine max
  Clone ID: PAT_MRT3847_5154C.1
tgacaacccccgcggaggaaggtcgctgtatcccgaccaaaaccaaggcataccgcaccctctgccagggggctaccgtcacgaagcatctattgagaaagcaatcgggcatcattgaacaatacgaccagcaaaggctgtaccagaaaaaggagatgaaggccgacacaaacaaagcgagcctatgcccagtgtgtatataagtgaagaaccggttacctaatgatagtacatgaaggtgtacaacgggagaaaggaccctaaagaacaacggacaggagattaaaagagcaggaggagcaatgatgacagggcaccagagctatgatctgatagcccacatat

SEQ ID NO: 89194 - DNA, 1061 bp, Glycine max
  Clone ID: PAT_MRT3847_51550C.1
ttgggcgacggacattaaaccatttacttgatccaaagattacacggcaaattcacctccaatagcgggtgaactgagatttcggcacctactaaagatatatagtaagtacaacaaaataagctgtaggggaatgctgggtcttaataaacagattacatcaacatcaacaacaaaatgggggtagtaatccacaagcaggttgcaatcgccaactagccggatgcatagtgcacagacgacggatgaacttgaaacaacatcaaactgaacttgctgcggaatcacaggaacaccaaagctggaaatccggccagtcttcgtcgtcaccgtccgccctcgccatgcttcgcagcacacaagagggcacaaaccaccgccgccgccgcctacgacatctacacttgcttacatattttcttttccttggaaattttccgctacctcaagaaccccaaaacaaatccaccccctagcatcaaccctccacccaaccagccgagaatattcacagggcgatagatatctatgtacagggtaattagcggaattatctggaaccaaaggggaacatttttttatgccatccttctctgttacggcttaccagttaccaccaccttttctccactgctatgcagcaccgacccgccgccgaagccgcctcagttgatgaggtcggagacccacccgacgtcggagcctccggttccggcaggtgggtagcaggaaacagcgccctccctgctgagccgctcgaacaccttggcgcggagggcccgcccggactccaccctctccacgggctcctcgtcgccgccgaagctgacgtcaatcggctccaggttgggcatgtagccggaggcggagccggtggcggtggcgagggctgtcggcgtggccctcggggtggagggcaggctgtagaggccgcccgctgtgggcgacccgtaggcagccgcggacgccgggtagccgccccacccgccggacggggacgagctggccgtgccgaggcggagctgacggagcgaggccacggacgagtggcggacgcgtgg

SEQ ID NO: 89195 - DNA, 352 bp, Glycine max
  Clone ID: PAT_MRT3847_51551C.1
gcccggaaaacccggacgacccacgcgtccggcctaaaaaaaaaaaaaaaaaaaaataaattttataattatcaaaacaaaaaaaaacaaaaggggcacggtgaattttatattataaaacaaacctaaaaaaaaaaatattacaaacaacggggtctgcccttttaaaggaacaacattttccttccgcagcttccaaagttttcatttttttatagtgaaaccaaaattcaatttattgcccgttattttacaatgtaggaacttgaaaaacctcggcgttttcaaatttaatgggcttcgtaaattacccttttattaagtttgctaaatataaaaaaaacctaaacct

SEQ ID NO: 89196 - DNA, 495 bp, Glycine max
  unsure (1)..(495): unsure at all n locations
  Clone ID: PAT_MRT3847_51552C.1
gccaaatggcctctgatccatgtagctgacctcacttactcaaataagattttattgttgttgtttgtaggagtgtaactctgaatttcatgctggattttctaatgcttttcattatttcacacctagctgtttgtattgccaatatggatgacagatatgcaattgcaactgagaagtcatatagctacatacttcagtttccgtttctttgggccaactatacggaattgctgtttattatataacaggaatcttggaaggtgatgatttttctgcaagtttgttttactattatgcatactatattctagcaaattccccctggattgtaataccctcaatcgttgccatccgctgctggaggaagatctgtgcagcattctgagttcaaggaggccagaaaaagaagcctaaacttcgttgatgcagaccttttcaggttataggttttaaagatcctgcgctaataatgagttttanggtggtgagata

SEQ ID NO: 89197 - DNA, 241 bp, Glycine max
  Clone ID: PAT_MRT3847_51553C.1
ataagcagaagaggagagggaatatgatgatgacgacaatggacgggatgatggacaagggggtgatggattatggtttcagaaggcttcatgctggtactgttcgggaaataggtgaatttgcacgtgagtcatgacatacggagaatagtgcgtcaagacgtggttcgatggccgatctcactgacgccgattcgacctacgtgcccgcatgtagatctgcggtaatatacatggccaa

SEQ ID NO: 89198 - DNA, 468 bp, Glycine max
  Clone ID: PAT_MRT3847_51554C.1
acggctgcgagaagacgacagaagggtcagacagtatctctcaacagcgtgggatcgttcggtcttaatctaaaaggcaaagcgtgactcgattgtggctctctgagtaatacacttttgcacactgatgttaacgtttcttatcatttttagctattgttattaattgtcacccaccagttcaatgaatttgaacgatcgacccattgaaagagtcttccttacctaattttttaagaatcttccggactctccttgttccactaattgattgggcaaatggatttgcatcataatacttcctgaagcttcgtagcaagtattgcattatcatattcttctaaaccttaggttaagcgtatagttacatttattttttcatttaaaatattgaatatattggccttgttacaatgccaactcactactcttgccagccaccttgaaagcaacaatttctcaatataa

SEQ ID NO: 89199 - DNA, 710 bp, Glycine max
  Clone ID: PAT_MRT3847_51555C.1
attctatctaaacttacaatgataaattatttcaatgcaaatggacatttgagttaaatcaagtttatcaaaccaaattagtctaacattaaatttacaaaatcaaattcaaatactatttaagtcctataacttcataaaatgaatttgtcgatgcatcgctggtctccttactcaaaggactcttgaaacttatttaaatgaatttataaacttgcaaaaagagtaatagtaacctttctggcgtaattcatttgcttcagtaatgaagttttcgatgaccggatcgagccaggcggcgtcaacattttggtggatttgggcattttgggtttggatccgaccaggtggcgttgatgtcgggaaggataatttccactttggacgaaagatgaatcgccagatcctgcaggcacaagagcatcttaagaagcaacctgaggagagagcaatcttgagagaaggcacaaggaagagtctgaggttattaggagttagattgccttgcagtcgcccaactccgagacaataaaggttatttctgagttggagaaggaaatttccgctttcacacaaaacaggtttgtggaactcaggaagaaacaacttgcccttttgttacattgggggggaccctacctcttgttttttatggaaaaccaatggtacttaggttttcttccaaaaccaaacctattttagatcaaaag

SEQ ID NO: 89200 - DNA, 332 bp, Glycine max
  Clone ID: PAT_MRT3847_51556C.1
cggtccggaattcccggtcgaccccgcgtccggtctatggtaggttgaagacacggaaggatggaccgctcttagagaagctattattaacaaacaggataaaatagcaatgattatgatcaagtactattggaatgactatgacaaaaaatattatagaaggttgcctaggtatatagggactgtgagaaggatgaaggacttctacatggagattacattccattttgagagttctgtgatacctttcatctcgaggcttgcgccttcgggtgcttacaggatttgtaccaagggtgggggtatggggctctgtgtgacctggggtggcc

SEQ ID NO: 89201 - DNA, 597 bp, Glycine max
  unsure (1)..(597): unsure at all n locations
  Clone ID: PAT_MRT3847_51557C.1
tggtttctttccaaagttggcttatgttcaaacatagtgccaagacataacctttcggcattaattacaaggcattagttatttcaggtttcttgtggtgcctgaattggaaatcacttgctaattacctgaatacatgtcttaatgttgtcattaagctaaagtctaggatgatagttatcttacataagccaaaatataattcataatggcaaaaatagattgctcagtattgtttttgttttttcctgcttcatcctgagttctacttgttttgttgatcatggtgtttttaacagataagattgtttgggcataggaattcaaatacttgttcaagtgaataaagtgtgatttctttgttttcttccgttatatgctaagaacatctcttctacttcctctcttaagactagtgccattttttttaatctgttgggatttgcaggtgcaaccacaacatctggttatgccttcaatgcaaagccatgaatagtttagatgcttctacgcatcttatttatttccctttaatgcttgtacgcatggcatgggtggaaacaattgtcntgtgatttaatatttaggttctcgtgt

SEQ ID NO: 89202 - DNA, 214 bp, Glycine max
  Clone ID: PAT_MRT3847_51558C.1
gatgtcttacgtttctcctaaccgtgatcaacccccaaagaaagatttggtgggggggaatttttcctttgatattaaatctcgctctaaattgggaaaaatttcctctacaaaagcccaatttggtagtgggaaaaccttcaaatattatataattggtgcttggtcacattcttaaaaaatttttctgaaaggagatcaagaaaacccaaaa

SEQ ID NO: 89203 - DNA, 299 bp, Glycine max
  Clone ID: PAT_MRT3847_51559C.1
gagagatgcatgcttgcatgacaggctgtaagcggccatatgtgtgatgcctgctatgcaacagtgaaagagtgttgggcctagtgatacactgtgttatagcacacaactacagcacacatcattttgatgcatgtaagtggacaagatcacaacctcattattgcaaatcgatctctgcagtagaggtctgtgctcctactaatgggcatgaaatgaggagatctgagtgggcaaatctcactacatggcattagagtatgcttattgacaagcgcaaacatcctacagacattgat

SEQ ID NO: 89204 - DNA, 157 bp, Glycine max
  Clone ID: PAT_MRT3847_5155C.1
taaagaaaacattacttaatgccgagcgggtgaaaaacaaagctcctagtctatagtagcagtccgcaatacgatattgcatactaaacctccactaagagaaaatcctatctatgtcatcaacctgcacgtcttgcaatttaagcaacatatgtgg

SEQ ID NO: 89205 - DNA, 415 bp, Glycine max
  Clone ID: PAT_MRT3847_51560C.1
cccgggggggcactcggcccggattccctgggtcttcccacgcgcccgctcgttggagaagacgacagaaggggtttcctggggaacttattcccaacaccgggtgctatcagagagaaaatgtctatcgatgctggtgggaacactaaagcaagtttcatggatagtaaaatcagcatgggaggaaccttcataggtctggcagcgctggtgataatggtgatcgtgacaaagagagcttatactctaacaagcaaaactacaatttgtcgacttttctgatagttttgaaaccatgttattaaatatgaactgttttcaaactgagatgtgtcgcacttggagatttatttccattaaaataaaatttgtcaacaaaaacccccttaaactactgtacctgcggccctttcta

SEQ ID NO: 89206 - DNA, 251 bp, Glycine max
  Clone ID: PAT_MRT3847_51561C.1
cacagattcatggcttaaaaaaaaataatcacagattcatagtgatctcagctcctaaaaaacagattcatagtgatctcattctcaagtgtattgaattttgcaatagagaatcatcaaataaacagccacctgtaccaatgtcatgacgtgtctgaaaacaagacacgcacctctccatatctttgtcaccttactctatatagagccaccttagcatactgcataatcacagttttcattcaaaattc

SEQ ID NO: 89207 - DNA, 337 bp, Glycine max
  Clone ID: PAT_MRT3847_51562C.1
gcctcgcgttctacttaccagtatggctatccaacactcagtgttagacaggctctagaaaggcagaagccaaaactatcctgcttaagctgttctatagctgctgacatgagctcatgagtccttggtggttcttatctcatcaaattgcaccttcttattcaaccaatcctgactgacagacagatcctgggatcagtgcccttgatcgggcaacattggttgacccatgtctcaaaaagtggacaagggccgagctggagctccacacaagaccacatattcattgtgatacagtcattcctaatgagatacaccttacacatctagagagtta

SEQ ID NO: 89208 - DNA, 650 bp, Glycine max
  Clone ID: PAT_MRT3847_51563C.1
ccatgttccttcttccttctccttcgtcctcctacctaatgaagcaccagagtcacaatgctctctggtttcgaggactcccttatggtagtggcaagctaatacggcacatccggtgtgcgaagagaaccggaaaacagaggtacccatcggagaagaagaggctgaggacaaagcagaaagagctcttatcggattccaaggagaagagcaagtttgagggcacatggaggctcttcaagctcgccgttcctctcgatcaagaccctggcaaagactctctccatgtctccgatgcccttctacaacaaatcgccacagttctcaagttcccggttgcttcgctgttgccaccagaggctttcaccatcgttaggaagtcctttgatgctaggaagaaattaaaagagcccaaatttgtgcatactgtggacatggatgtccaaaagctcatcagtctggagcctcgttgttgggacttcatttctcggctggagcctaaagttggccttgtgggaacgtttgcatgatgaaagagattttgggtgatctggcgagtatcattcacgacagtaaagaaattaagttgcattgaaaggggaaaatggacatagcattttctcaccagagttttacaagaaccaggctac

SEQ ID NO: 89209 - DNA, 1254 bp, Glycine max
  Clone ID: PAT_MRT3847_51564C.1
ccaagcttctcaatcaaagtacaaaggggatgatgacttgttctggggtccaatcgagcaatctaagcaagatactaagcagtcagatttccctcagcttgcaagccagggtagctggggttcgaaaaatggacccttaaaaggtaattctcctggattattgacaagacaaaaatcagtgagtggcaaaccaactgaacggtctctagcatcatcacctgcctcttctcaatcagtgctgaaattgaaaaaagatgccatgacaaggcattctgaggccatggacttcagagattggtgcgagaatgagtgtgttaggcttattgggacaaaagatacgagtttccttgagttttgcttgaagcaatccagatcagaagctgagatgcttcttatagaaaaccttggatcatatgatcctgaccatgaattcattgataaattcctcaattacaaggagttgttaccatcagatgttttggacatagcttttcagagtagtaggaatgataagaaagttactcgacatggtgcggcaggcacggcatcagctaatgcagatatacaggatgtggactacactgaaggaggatcctccaaaggaggtggaaagaagaaagggaaaaaggggaaaaaggtcagcccttcagttttgggatttaacgttgtgagtaaccggatcatgatgggtgagatccagagtgtagaagattaatttaattgaggttgttactgtagatgtacatatattttggtcggactttgtaaatggttttttacgtttttaggcgttgtgttctttttttatacagaaacattagcagcgtttattggatctgcttaaccaattttgttatctaatgtagttgttttgacgtttcattgctttgacaatgattttaatcttatctgtcagtcttaccgtgtttcaagcccatcagttttgggatttaacgttgtgagtaaccggatcatgatgggtgagatccagtctgtagaagattaatttaattgagttgatgaggttgttatcgtagatgtacatacattttggtcggactttgtaaatggttttttccgttttaggtgttttatatgttcttttttatacagaaactttagcagtattgactggatctgcttaaccaattttgttatctaatgtagttgttttgacgtttcattgcgttgacaatgattttatctcatgtcaatcttaacgagtttttcaattcatctttcatcatttaaaaa

SEQ ID NO: 89210 - DNA, 190 bp, Glycine max
  Clone ID: PAT_MRT3847_51565C.1
tcgagccgaatcggctcgagatctatgtccctgacgctgagcaacgaggctctccaattcaaagctctcttcagaatctcttccagctcgtcgtacgatctccgcaaactctcgcgcacttgcgcatccttcctcgctcaactctacgtcgtgtcgcatagtagcgatagctcgacgataatggacatga

SEQ ID NO: 89211 - DNA, 318 bp, Glycine max
  Clone ID: PAT_MRT3847_51566C.1
agccgtgaacaaactttattatgagcttatagttactgttcatttatgccaccgagaacaaacttatgtgctggatttaggaattggacataaagaaccaattttttacctgaggcgtaggtttataaaactgaatattaaaagggagggctattccgggggctttaaaccataacaattggcatgccagggggagggccatttgggggaacttcaccattatcttggaggggccattttgtcttgccattagcatgaccttttataaccttacctggggctctttcttgcttaaccccgggaaggtgaattttaacc

SEQ ID NO: 89212 - DNA, 178 bp, Glycine max
  Clone ID: PAT_MRT3847_51567C.1
acaaaagattttttttaaaaaaaaatttggtggggactatttgtaccaaaaaacaaatacctggggctatgtaccctggcgtgataaccactcccaagtttaaacaaaaattttttttaaaccatgtattctgtttcccaatttccgggttgtcactaaaaacagagacggttatcac

SEQ ID NO: 89213 - DNA, 1139 bp, Glycine max
  Clone ID: PAT_MRT3847_51568C.1
aatttctccaacgctatcgagccaaactcaaacgttaactcagaagaagaccagcagaagaagaagaagaagaaacaaaaccgaaccactttcaactctccaacgtcgccacacgattcgtaattcgaattccatcatcttagatctccgttttttttgctgcttctgcgttttctcgctttctccgcaatcgcaattaccatctttcatcgtttctattattactttcaactctctgaattccttcgaatcatttatgttccgtgtcgacgcgtgcgttttgttcgtcgcagatcgcgtttcgcaggctgcaatggcgacgttcgaactgtaccgcaggtcgacgatcggaatgtgcctgacggagacgctggacgagatggttcagaacggcactctcagccccgagctcgcgattcaggttctggtccagttcgataagtccatgactgaggctctggaaacacaagttaagagcaaggtctccatcaagggacatctccatacatatagattttgcgacaatgtttggaccttcatcttgcaagatgctttgttcaagaacgaagacagccaagagaatgttggacgggttaaaatagtggcgtgtgattcgaagttgctcacacaataatgtgcccaattctgctaccttgtcaacaaggagaaattgttgtcatctgctggtactatggaaatggtggccagaccatagttacaatggtcttaaattcttgccggaactagcaactactgtatgttattatagatttaaaagccatcagtcttcatatcattaggtaattaatgatgctatattgagaataccgcttgggaattggatgagtctactctcttcttttaagtgtattctgttctattcgtccgtgcgactctggtaggttcctagtatagatttaaaagccatcagtcttcatatcattaggtaattaatgctacaatgagaataccgcttggaaattgaatgaatctactcccttcttttaaaaaaaaaaaacaatgtcacctccacaccacaccaaacccaccattgtgttgccacccaaccaccacaatcgccatgtgatccacgaccttgtgcgaggtcgcatcactcccacatagtcaccaattgattg

SEQ ID NO: 89214 - DNA, 967 bp, Glycine max
  Clone ID: PAT_MRT3847_51569C.1
cactatctcatttctttctattcatttcttcattccaccatcaccatggtcaaggagaagaagaacgtggtggtcaagaacaagaagccaaacaacaatgccgacgagcttcacttccgcggcgtccggaagcgaccatggggccgctacgccgccgagatccgtgaccccggcaagaagacccgcgtctggctcggcaccttcgacaccgccgaggacgccgcccgcgcctatgacgccgccgcccgcaacttccgcggccccaaagccaaaaccaacttccccgtgccccccgacgacaacaacaacaacaacgttaacgtgaacaaaaacaagagtgttaacgttaaatctcacagtcccagccagagcagcaccgtggagtccgccaccccggagcgtgaagccacgcgccgctccacctccgccgcaatcgaccgtttcccgttcctacccatccagcagcaaatcctcatgacccaccccgtcgcagcacccatgcgcccggttttctttctcgaccgggcccacttcatgacccagtctttcccgctccggttcgaacccggtccggtccagagcgactccgactcctcctccgtcgtcgtcgattgtcagcccaaaagagagctcaatctcgatcttaacttggctccgcctaatgaatattaacccttttttttatctctttattttttcataaaaaaagatagcagaaagaaaggactaaggagattttttttctctctttttttttttggaagattaatcttccattaagaagttaattagtacatcctttgatgtaaataggttgattttctcttcttttttgttttttaggtccttgatagtattatcagaggacatgatctgaaattgtctagatctgatataatttttcatgtaacatctgaatatctgatgtaattctggctaatatcaattaatcttcttttattacaat

SEQ ID NO: 89215 - DNA, 192 bp, Glycine max
  Clone ID: PAT_MRT3847_5156C.1
tggttgtactgtcggcacgactaatttcgggtcgacgagctcactctccgtggtcgcccttcgttctttttttttatacttaaaacgaatttaggacccatgccactttgactaaatacttaaggggactgttctatattaaacatgtccattcagattaacatcggctgatgaattccattttggcaataa

SEQ ID NO: 89216 - DNA, 509 bp, Glycine max
  Clone ID: PAT_MRT3847_51570C.1
tttgatcttacggatgaagatggtactcagatgcaggcatctatgtttaataatgctgcaaggaaattttttgacaaatttgttctgggaaaggtttactacatttcaaggggaactttgaaagttgctaacaagcagttcaaaactgtgcaaaatgattatgaaatgacgctaaatgagaattccgaggtggaagaggtggtcggtgaagcaagttttgttccggaaacaaaattcaactttgtgcagattgatcaactgggtcctcatgtcaataagtctgagcttgtggatgttattggagttgttaagaatgtgtcttcaacaatgagcattcgtaggaagagtgacaatgagagtattccaaagcgtgacattactattgctgatgacacgaagaagacagtagttgtgtccttgtggaatgaacttgcaactaccacaggagaagagctactggacattgttgataaatctcacgtgttgccattaaatttttaaggttgggg

SEQ ID NO: 89217 - DNA, 193 bp, Glycine max
  Clone ID: PAT_MRT3847_51571C.1
aaaagccctgtcaccttgcactccttcaaaaaaaacacgccttcgttgctcaattgagcatggtccaattctggaccttgaaatacaagacaaacactggatattttggaagtttttaaagacctggctaaacgctaaaacaccaagcccttgcttgaggaagttaaacaactttgttggactaatggcgctt

SEQ ID NO: 89218 - DNA, 439 bp, Glycine max
  Clone ID: PAT_MRT3847_51572C.1
cttttttttttttttttttttttttttttttttttttttttttttttttttttttttttttttttttttttttttttttttttttttttttttttacaaaaaattgggtacattttttttaaaaaggaaaggggttttttacgggggcaaaacggggggggggggggggtttttttctccagggggtacatttgacttttatacggggggtaacaggaaaaaaaaaacaaaggggggtaaaaagaaaaactgggtttggttcctggtaacaccactttttttagttccagaaatttttttttttagggattaaaggggtgggggtaggtccttcctggtagacttaaacagaagggattgggggaaaaacctttccgggtttccaaggcttaccaacttcataatttttggaagcaagggaactgggttgaaggggttc

SEQ ID NO: 89219 - DNA, 351 bp, Glycine max
  Clone ID: PAT_MRT3847_51573C.1
gttatcactgagttgcgagcagcgagcgattttgagaactgggactcgcattgccaaaatcaacagcgtgcgtgcgtacgtcggagatggagacgataccgacgactaagcagaggaggagcgagatcagaagcccgttcagacactaaaatcggccctcgtcatggccttgttctcctgcgtcgcgtgggtctacgacgctggaaggatatggcaagacgcaaagaatcggaatttgctcgctagtcttctgaaaaagaattcaggtcaaaggcctaaaggtcttacagaggaagataagttaatggtgctagggtgcaaggatctggagaggaggattgtggaagctga

SEQ ID NO: 89220 - DNA, 428 bp, Glycine max
  Clone ID: PAT_MRT3847_51574C.1
cactctcccactcttatggaaaccatttgctcctaaccgcaacgttcctgtgacctaaagaaaataaaataaaacaagattaatggctgtagaaatgaaccaatttgatcttttgatcaaattttatccaaatattaataaataccttatttgttatattttactaaaatatctattcttttttactaaaaatttgattaatcacactgagaatttttttatattcacaaaatttaaatccaatatttgcttaagagattcactcaaatattttttttaccctctcaatttgagacattttgtttttagtctcttaatcaaattcacaaaattttaattttggtccctcaacttcattttataagactatgcttttttttttttaagtttctgaaattcactcaagggaactaaaaacgacattatgt

SEQ ID NO: 89221 - DNA, 290 bp, Glycine max
  Clone ID: PAT_MRT3847_51575C.1
ctaggaatcgaagcttgaatgatattattatgatccacatatgccatgccgggagccatgtagacaactagtgctggcaactctactgcctggaacatggcatacagcccgatggattgatgccatgtgactaattctttcgtgtagaccacaactccttcaacacctgctacagcgaatcccgttcctgcaaacacatcacttgcgccatattgctcaagctcgagcccaccgtccttgacgaaatcacggagtggcacttaccggcatctgttacatcgcaaccatac

SEQ ID NO: 89222 - DNA, 502 bp, Glycine max
  Clone ID: PAT_MRT3847_51576C.1
taaaaaagaaactacctgaaaaaatttaaaaactaaaagccatttatggtagcaccattttttgaccatgggcgtgaacacgctttctatttgctacttacagactacacaatcaatcacacactggttgtcaccccatgaagaagacagaattagacgcttatgccatgctttgaaacaagaacattctttaacaggcttatgaagggggggggggataccactgatgagcatatgacttaaaactttaaagggttatgtgaccctcctcttaaaaggacgattagcggggaggtataaacccccgaagaagctaacccgtataccaacttgaacaggatgccaaaaccatttccaacacatgctctatccggacatggaaccatgattgcctacctttatacccaaaaacgtatttctggtcttggccggaacatgcatggagccatgctcttcttgctccaggatgaagcttgtacctccaactacctgctaaccaagt

SEQ ID NO: 89223 - DNA, 899 bp, Glycine max
  Clone ID: PAT_MRT3847_51577C.1
caaacaggcaaatttctcggatctttttccctcccacgttttgccgcggtgatgcggcaaactcacggaaatatgtcacgcactcgtatcgccattcagcgcttccgccacacctacaccgcgttatcatcatcagctgcacttactcgctcccaattccaatgctctcaacaacatctcacgcgcgcacccctcctcttccacgctcctcgtcattattcatcttcccccaaacaagactatcccaccggagactttgatttcaagcccatcacaggctggaaaaagttcaccgtcaacctcaagatgctaacggctttcccctgggagcgtctccgatacggcaccctgttaacaatcaagttgcgcggccagatatcggatcagctcaatagtaggttctccccgggattatctctgcctcaaatctgtgataatttcttcaaggcaacttatgaccctcgaatttccggcatctatctccatattgatattttaaattgtggttgggcaaaggtcgaagaaattcgaagacatatcttgaatttcagaaaatcaggaaaatttgttgtggcttacgtcccttcatgtcgagaaaaagaatattatattgcgtgtgcctgtgaagaaatatatgcccctccaagtgcatatttttctttgtttggattgactgttcaagccccatttctcagaggtgttttagagaatcttggaattgaaccagaagtggaaaggattggcaaatacaaaagtgtaggagatcaacttacccgtaaaaccatgtctgaagatcatcatgagatgcttactgcgttgcttgataatatctatactaattggctggacaaagtctcttctgctagaggaaagaaaagggaagatattgagaacttcat

SEQ ID NO: 89224 - DNA, 305 bp, Glycine max
  Clone ID: PAT_MRT3847_51578C.1
aagagtggaaattgcttttttatttttactagatataatgttaaataaaaagacaccctattctaaaatgcacagggtacattcgtgagcaataataaatatttaagtttatactgctactagaaactactaagctttgcacatgcaaacaggagctgggtacgaatatattgattgatttgggtgcctcagccttagttccccttgtgtattttggtgacctataaccactgcttcctgaaactctgaacactctatgggattattcaggaaaggcggacccatcaatgccataattggtctta

SEQ ID NO: 89225 - DNA, 1354 bp, Glycine max
  Clone ID: PAT_MRT3847_51579C.1
cctcgtgccggttagcgtcgatgggccgccggggccgggggcgtgaaatccccggaatactacactatacttgtcaaccctttgagagttagaatggctgctgctattgaaatccccacaatagtgtttccaaactcctctgcccaacagaggatgccagtggttggaatgggatctgcccctgacttcacatgcaagaaagacacaaaggaggctatcattgaggccgtgaaacagggttacagacacttcgacactgctgctgcttatggctctgaacaggctctcggtgaagctctcaaggaagctatccatcttggcctcgtctcccgccaagacctctttgtcacttccaagctttgggtcaccgaaaatcatcctcatcttgtccttcctgctttgcgcaaatcacttaaaactcttcaactagagtacttggacctgtatctcatccactggcccctgagttctcagccagggaagttctcatttccaattgaagtagaagatctcttgccttttgacgtgaagggtgtgtgggaatccatggaagagtgccagaaacttggcctcaccaaagccattggagtcagcaacttctctgtcaagaagcttcagaatctgctctctgttgctaccatccgtcccgtggtcgatcaagtggagatgaaccttgcatggcaacagaagaagctaagagagttctgcaaagaaaatgggataatagtgactgcgttctctccactgaggaaaggtgcgagcaggggcccaaatgaagtgatggagaatgatgtgctgaaggagattgcagaggctcatgggaaatccatagcccaggtgagtctgagatggttgtacgaacaaggtgtgacatttgtgccaaagagctacgataaggagaggatgaaccagaatctgcacatctttgactgggcattgactgaacaagatcatcacaaaataagtcaaatcagccagagccgtttgatcagcggacccaccaaaccacaactcgctgatctctgggatgatcaaatataaactatttactactatgcagctcccactctatttttataatccatctttttacctcttgtttcattttacgtttaaataattcatgccatgccacttcttattttagatttcacaatcaataaactaggcacgcgcggcacatgatatgaataaactatgttcaatttttttttcttctaataaaaaaaaaaaaaactagacttgttactcttttttttttttttttggtcttttgttgaaaaacttgttttcatcacatgtatgtgatgtgtgtcggtctcatcatctaaagcaaatgtatcaaggatgtgat

SEQ ID NO: 89226 - DNA, 318 bp, Glycine max
  Clone ID: PAT_MRT3847_5157C.1
atggggggaagcaattttggaagtccattgtggttggctttaagcctcccagggaagccatcgaagtgcgaggttgaatgtttcaatatccttgatgcccaagccagccttttcttttgctttgtgacctttttgaatgtatgtcaacaaacttcttcttcctctatcatgaagaattcttcttcttcttccactcagaggaagtgtgcttttgctagaaagtgtgctaggctggtcaaagagcaaagggctcgtttctacatcatgaggcactgtgtcattatgctcatatgctggcatgagtacaatgattcatga

SEQ ID NO: 89227 - DNA, 446 bp, Glycine max
  Clone ID: PAT_MRT3847_51580C.1
ccctgcttccgctgagggttgacctcaacaagcaggcacgcattactggtggaacaggccaagggcgatctgcttctggggatggtgaagagatgacatcatattcgggaaccagggttgaagaggcttacaacaatgcaataccatgaacttgagaacattggtgctacattggctaccattaaatgtcccaaggcatagaaacttaatcctggtataaaaggtgacaaacctaagacgccctgttttactattattcctatggaatttaatcttgaggtcctggcaacatttttaacacctgtgaggttcattattgaagaaaagggacaagcttagttgtcaaattggcatcaacccatactgcatggaatggactggtttggccaatagattacctgattagggcaacgatattctgtgttgcgattatgctagttttgatg

SEQ ID NO: 89228 - DNA, 241 bp, Glycine max
  unsure (1)..(241): unsure at all n locations
  Clone ID: PAT_MRT3847_51581C.1
gaggaagancaacangcagagaagcaaccccganggggcacggaggcagaagagacgcccacggacccccgaagaaggnggncncacgcaaagagcagcgagacaggggacggacaagcaagaanacggggcaagaggggaggaacaaggaggggacagaacanaggcacccaccagagcannacagacaaanngccagacgaaagagaccaaaccaaccaacgaagaaggagaaccgagg

SEQ ID NO: 89229 - DNA, 1291 bp, Glycine max
  Clone ID: PAT_MRT3847_51582C.1
tatcgaagaataaaagtacaaaagtagcttttggcttcttgttctgctttgttggtgatggttttgtttctattagtttattactttcaacttttgttcagaaaattatatcttgatgtttacattaaaattctgatggtcatctagattcttagattgctgttcaagctaactgtactttaacagtttacagatatgaaaccaaaatctgaagcaccttcgactcaaagaaagtctcaggatttaaattataccagaggtgatggaaacatagcttccactaaagaagcggaatttcaacagaaacaaaaacacaaccttcagaaagcagtattgtctactttgtttaattatcaagggcattctgaggaggctcctaaaagaactgtgaaggattttaataagaaatcacgatatgggcatgtggtttttgaacctcccaaagacttcccagaagaattcgattttgacatggacttctcacgacaagaaaatatagatgatccagaggacgaggaagaatacaagaatgtgcgtagagctgtgaaggagtaccgagggacaatgaatgaatattataaagcagcagttgattcatttgcaaagggggatcaaatgaaagcagaaaaactgttagaacaggggcaattttttctaagaaaggctcacgatgctgatgaagaatctaacaaaatgattcttgaaaccagaaatactgaagcacaagaaatggtgcttgacttgcgtgaccatggttcaaaagaggctatacgtctactaaagtgtcatctttcttcgctttctggcattccatcattcgagtacctcaaggttatcgttgatgcaaatgataaagataacactaaagggtctcgcagacgactacgggtattcaaactgttagagcaggaatctataacatgggttgaaggagaaactgctgatacaatattgatccgcttggctagcatagagcgtaaacgcttgagttttgtcaaaacatagaatgccctttgtaattgattatggtaaaacttggcattagggttgtgatttgtggaactattggttgttcggccatagtttcatcaattttttgtaacattttatgaaagacttaaatatgtttttgacccctgatatatatactcgaattttgcatttagtaactaataattttttctcatccccactttttatgtcctgcctctttctgcttcgcatttgggatgttgcctgggcccaccatccatttggtcccctttccccaccccctgggccaggtggtgcg

SEQ ID NO: 89230 - DNA, 330 bp, Glycine max
  Clone ID: PAT_MRT3847_51583C.1
cccgggtcgccccgcgtccggatttttggtgagatgtcacagcagtggcaatggagttccgcttggacgttgcttctctttctcatcttcttcctctcctcaacaacaacaagcaccactgactacgcttgcaaattctcccaggcccaccccttctgcgacacttccctccccactctcacacgggcgcgctccctcgtggccctcctcactctgcctgagaagatgctcctgctgtgcaacagcgcctgctccgtcccccgcctcggggtgcccgcctacccgcggtggtccgagtccctcgccggggtcggggtgggcggccggggc

SEQ ID NO: 89231 - DNA, 296 bp, Glycine max
  Clone ID: PAT_MRT3847_51584C.1
attttcttatgagctggataagaaggggggcatggggatcttatgtttagactctaaaaaaggtttattttttaagaggacaaccgtctacttcatttttttatctatggacgcgaatatattgatttgtcattttaatatgcataacatgtaacatgatgtgatttatgacgttcacgataatgatacaaaagcagggttcaaggggtcgatgcatgagatatatagagctgatgtgagagagcgatcactgtcttacttctaggacaaaactttggtgcaacgatccatatgct

SEQ ID NO: 89232 - DNA, 608 bp, Glycine max
  Clone ID: PAT_MRT3847_51585C.1
tttggggtttttttttttttttttttttttttttttttttttttttttttttttttttttttttttttttgggggggggaaaaaggggttttaaatagaaaaagtttgagggtggaatcttttacctcaagcccctagattaaaccggcccacaaggggggggggggggaaccgtttccggaaccccaaccaggggcccggaggggtttcccggcctaaaaaaaaggaaaaaagaaccccaaagcgggaaaaccgcaaagggaaaaaaaaaggccccggcccgccaatggaaaaaaaagaacaaccccggggggggatgcacacccccccaccccaggaaaaaaaaccccccagggggccgtggattctttcacccaaaaaaagaaaaaagaaccaggggaatggccaacccaaatcggggcctcccaaaggcaaaagaaagaggcccccgccattcggcgggcggggggggaaaaaccaaaattttctccttcaccccccaagggccagggacccaaacccaccccccaaataaaaaggacaaggcaaggggtaggggttaaaagcccccgctaaaaccacaaaaaagggggggggggggaggcttt

SEQ ID NO: 89233 - DNA, 304 bp, Glycine max
  Clone ID: PAT_MRT3847_51586C.1
aaacaccgtatattgcccatggaccatgagcaagtatttaggaatgaacaacttaactcgctgagtctcaatccatgcatctttgtagatgccatgatcactgcatttacattcatacatacccttgttacctccctgaccgtgacctgctaccaaactttgacttactagcttagcatatcttatccctaatgctaaaggcatgttatgcaaactctgcagttacagcgcatggttaacattcctatcacccgatgtccaccatgcgactgatcctgaaccggtctcggcacatgggaccatt

SEQ ID NO: 89234 - DNA, 216 bp, Glycine max
  Clone ID: PAT_MRT3847_51587C.1
tttttgttccgtctctgcggctagctttttgagcatcaatggcggactctgaaaccttcgctttccaggcatggagatcaaccaacttcgcagccgcatcaacaacatctgctacagcaccaatgagattctcttgcgtggactcatcaggaacgcttctgatgcttgggttaagatttgatttgagactctaaccgagaagatgaagctcgatgc

SEQ ID NO: 89235 - DNA, 375 bp, Glycine max
  Clone ID: PAT_MRT3847_51588C.1
aacgaaaggggcactacccactccaaactgtgcctgcatcgtttcacatagcacacgcacgctctctacaccttacccttgggcaggccacaacgcttcatctatccatgggaaaccgcatgctcatacccggtgcaggtccagtagccactgcggatactgctgctgcagacatctagttgattccaacggatcagcaatatctgcatcaaccctgaattcaggttgaacaatgagcgaaggcatgctcgatctgcggagaacttttctgactgagagaagtattgctagcacttactgatgagtatgtgcgcatcagaactacggagatgatgccctgcatcaacagcttattcaatgacacgagtcgcaact

SEQ ID NO: 89236 - DNA, 266 bp, Glycine max
  Clone ID: PAT_MRT3847_51589C.1
atcatgaattattttttctctccactaaataaattttctggatcgccattattcatatgtcagcatcccgctgaatcatctgcgttgtgtttgtgtctgtgtacataacactatacaaactcaataaaatcacattaataagcataatcacacataatggaagattgatgtcactgaaaaaataaaagaatgaaaatgtgacatccagaaaatttggtaaccatagcttcttttactggctgaggctgttcatcaccccattaaca

SEQ ID NO: 89237 - DNA, 391 bp, Glycine max
  Clone ID: PAT_MRT3847_5158C.1
atgagtgaagtttctttgctgtcctggtacctccccttcaagttcttctctcttttttatctccttatcagctttttcaagttattttggtttctcatcaattaagaaactcacctaaaatataaaagaaacaagattgtgttgcttttctatcttttctttcccttgttgtggatctcgtgtaccttacacactgctgcacagtgctttttatgaaggcttttaagtgcttatcggttcctctttgctaactttcttctctggtgaagtgaagccatatctgtgcgaattgacattctgatgctgctgttgagacactgatgacagtgggttgttctgttaggattggattcttttgcactctgatccttgttgtgtgtgtgtgcaagtc

SEQ ID NO: 89238 - DNA, 1465 bp, Glycine max
  Clone ID: PAT_MRT3847_51590C.1
tgcagctttcgaagctggacctctatacggtcgccctttttttttttttttactaaacgtgcaatatattaaccaagcattaatccaaacatacactttataggccaatgaaacaacttgagttatgaatctttggtggaaggatttaggccttttgcttttgagttaaaagaatttataagcaggggaaaaggtgaaaataaaggaagctttttggtattaataaatgttactctttttctattcctagatgcctaaaaactatttgatatcattgttcatcttcatccacagaatataatatcctttgtgcatttttaaaaacaggagaacctttcttggtcctttcaacaatttgcctaatcaattgctgttccacctcagtatcatcaaaaccacaagtttcatctgcagtaccatctaattcataaatgctcccttccatcattgttaccttactagaaccatttgctccaccatgttgaacccctaatgcatgccaatcatttgcatgtgaatcttcctgggggtcatggatgcctaatggcgaattttcttcagagtcatttatctttattagttcttcataggcttcattgtatgcatctagagcttcacctgataaattgaggattaagggctgggacataaggtcacaatcatcattttctttactaaaggaagatgccttttgaagataactctcttgctttgattcgaaaagccgtactttcctctggctattttcaagggcaatctcaagttctttcacgcgttgctcaagttgggattgtataacttcatgcaaacgcaaactcagttcatgaggcaaaactgcatagttggcagggagaggtgttgcatcaccagcatcctcatttgattttggatagacagaatctttcccactgaccatgtcgactcgtaactcaccttgagcaaaatctgctacaaactctgggtcaagctgcaagaaccaacaagctcggacaattttccttctaggcttgatgcattcatgtccaaccccaatctctcaagttcagcttcaagctcagcttcaattttgctcatggactcagaactttgttctaccttttgatgatatgattctttagagtcaattcttggagagttatccacgtgcttttcaggggaaaattcatttagctccttgtcatatgaggaatgatcacatgtatcctgtgaaccataattttcattctgtaactcctttacagtcattgaatctttcaaaaacagttcctcttgtagatcttgaaccaagttttcattctgcttcaacaactctcttaacttgactatttctcttttatttgccatgatagaagttatcatcccgaacgaaatcccaagactgaagagaaatgttttatcaaattgttgagtatggatgagttttccactcgacacattgtcggaagagctcgatcttagacttctc

SEQ ID NO: 89239 - DNA, 171 bp, Glycine max
  Clone ID: PAT_MRT3847_51591C.1
gcgcttgaacgggttgagacccatattgcaagccttaccttgggaatggttgaaccaattaccccaaacttaatcggttaagttctcaagggatttcaataattaccggatttgttaaaatttgtggggccttggaaggggaatgtaatggagtccaaaactacccgggtc

SEQ ID NO: 89240 - DNA, 447 bp, Glycine max
  Clone ID: PAT_MRT3847_51592C.1
atcatatttcccatttaatataaaccaactaaccatggtgttcgcacaagccaaaatcatttagaagtctttaggcctatctttcacatagctccccttacatcctcaatgtgagaatgggagcctggtagaaatgatcattttgtgcatgtatatatagttaatgaggaaggattactgcattcaagctaattgaatgtaataaattgactattgtgcacctacagtggggatgatgaactttccagtcagaagacaaacagctggaattgtacagtagatacaatgggatggaagtgaagggatagaccaacggaattagtgtaggccaatctctgcagccatttcagttttctgctatagccataccacaaagggcagtcactaaagaaaatctcagtagaaccttgagcccatttcagaacttggtggaatcggtctgagatt

SEQ ID NO: 89241 - DNA, 500 bp, Glycine max
  Clone ID: PAT_MRT3847_51593C.1
aaaaacccaaaaaaaatttttttattggggggggctaacctttttattaaaaaatccttggggggaaaagcccaaccataaattatttaattttattttttccagcagaagtaccaactttgggatttaacaaaaagccctgggccacaacacacaaaggattttttttaggcggggaaaccccgggcaacccttaaaaaaaaagggcttcctttttcattcctgggggcaatccccagccaagggaaaaaaaaaaattaccaggtttaaaacccagggccgcaaaggccttttttataccggggcacaatttaccaccagccccgaggggaaaaaacccaaaattttgcccaaaaagatctatggcgcaattaaaaaacctctcaggaaaaaacctttcgggatcttcccaagccttaggatctttataaatggcccaaccctccacaaataataagggctgggggggaatttcggacccctcaaacaggcctttttta

SEQ ID NO: 89242 - DNA, 322 bp, Glycine max
  Clone ID: PAT_MRT3847_51594C.1
gtgggttgcttgagtactggacgtaggcacgggttgtggccgaaccagtataaaacggtgtttgcattctctcttcccttatcttgtttatgttattgcaatcaattttgccttgcatgtttatagaacattattaaattgattgttgttgcttcttctgcattctaagcctatccctcttaagattattgaggccacaaggtccaacaaaaacaatagcaccaaggtgttgtgtctatgaaagaataaacatcctatttgatctgctgcaagactaaaccttaattgataaattttggttatgtccaatattctttaaatg

SEQ ID NO: 89243 - DNA, 298 bp, Glycine max
  unsure (1)..(298): unsure at all n locations
  Clone ID: PAT_MRT3847_51595C.1
agacgacagaaggggattaatcaatcattcagggcgcgcgaggtagccaccctctctctttcttggccgcctccgccgcaaccaccgcccacacattcctatatagctanattattcattcattcatcttcaacaaaacaaagaagtaaattaaatagcgccttgtgcgtatatactacatatgtatatatatatgggagaagtagagcgacaagtgcagttccagcagggtagaacagagttgcaacatttggcattgagaaaaggagcgnntgttgtcgaagcagcatcgatgttg

SEQ ID NO: 89244 - DNA, 1229 bp, Glycine max
  Clone ID: PAT_MRT3847_51596C.1
gaaactctttatatatttattattgttactgacccaaacaaactcaacaaaaccatgatcccaaacgttgaaatccctcactgggacgccgacggaggaggaccactctctccgttcatctcttcttcttccaatgctgacaagtgctcattattattctcctccgaccatttccgaatgttccagttcaaggtccggatctgtccacgtggcaggtcccacgattggacggagtgtccctacgcccaccctgccgagaaggctcgccgccgtgacccccgcaagtaccactactccggcaccgcctgccccgattaccagaaggggaactgcaagaggggcgacacttgtcagttctcgcacggcgtcttcgaatgctggctccatccttctcgctaccggacccacctctgcaaagacggaaccacttgccgccgcagagtctgcttcttcgctcacaccaccgaacaactccgcctcgtagtaacggattcatcatcgtcctcctttgtttcctctcccacttcggtcctcaactcttcgtccttctccgattcttcgccgtacagcttcgtgcgcgaaatagttaactcaacgcggaatgttaaaatcgaggattcgggtttgacccgttgcgtgtttgggtcgccacgtggcgggtttttaagtgtgaatgggtgcgaggaggagcctgctatggagagggtggaatctgggaaagacattagagcgagaatctatgccaagcttagtagggagaacacgattggagcctctgaccctgacattggatgggtttcggaactcgtcaaatgaccgcatgtttgtttctcccttgttagattattatgttcgagacaaagtcattttatcttttctaactctaaaccaaatatgcactgaatggattccgttgcttttcatttgggtctgtatgtatagttaagttgtataatgcaatttgaataaaataaaataaaactctatgtacatagttgagaccgtttgggtctctgtttttgtaatttcttgtctgacattttttttacccttgttcctggctgccgaagattgggtagcacattgttagattttctgttacgatgtatgtgtacgagggacatcacaagatgacagaagaatgatgttttttttttttctttctgaacaatcatgtaacgtaagtatttttttattcgagacttggaagcaaaattcgattaacttgg

SEQ ID NO: 89245 - DNA, 390 bp, Glycine max
  Clone ID: PAT_MRT3847_51597C.1
gggaagaatggtacttttactgaaaggctcacaacacattccttgtggtgcctctacgccggatgtgtgaactgaccttggacacacctgtgtcattaatccaaagcaggtagatgaaatggctattcattctgcttcatatcttataccccccacactctgtgaggagactactactataattattctacccggggcctggacatattatttgacggaccgactcacaaaatcaataagttcgtgttacacaccaaattgactggaactgctgattccaattcccacattaaccgcaactttgttgtgtatgagctacatttagggtcatcttcccagcacgtaaatgacaaccaacagagggatatcacccctagcacccaatggcaa

SEQ ID NO: 89246 - DNA, 1013 bp, Glycine max
  Clone ID: PAT_MRT3847_51598C.1
ggtaccctttataaattcctgattggacccacgcgtccggggaaccactaaacgatgatcccaaacgttcaaatccctacctgggacgcggacggaggaggagcactctccccgtcgatctcttccaatgctgacacgtgctcattattctcctccgaccatttccgaatgttccagttcaaggtgcggaactgtccacgtggcaggtcccacgactggaccgagtgtccctacgcccaccccgccgagaaggctcgccgccgtgacccccgcaagtaccactactcaggcacctcctgccccgattaccggaaggggaactgcaagaggggcgacacgtgtcagttcgcgcacggcgtcttcgaatgctggctccacccttctcgctaccggacccagctctgcaaagacggaacaaattgccgccgcagagtgtgcttcttcgcccacaccagcgaccaactccgcgtcgtgacggattcatcgtcgtcgtcgtttgtttcctctcccacttcggtgctcattaactcttcgttctccgattcttcgccgtacagcttcgtccgcggaatagttaaactggatgaggaagggtcgtattcgggtctgacccgttgcgtgttcgggtcgccacgtggcgggtttatgagtgtgaatgggtgcgaggaggagcctgcgatggagagggtggaatcggggagagacattagagcgaggatatatgcgaagcttagtagggagaattccattggatgagtatcggaactcgtgaaatgaatggattccgtggcctttcatttgggtctgtctgtttgtctctgtacaatatataatgcaattcaataaaataaaactatatgtacatagttgagaaggtagagaccgttttgctctctgtgttttgttttttaccttagttcctggctgcccaaaattgggtagcatttgattgtatcaattgttaattttggacttcattcaagaatcatgtttttcttattatttccaaaaaa

SEQ ID NO: 89247 - DNA, 150 bp, Glycine max
  unsure (1)..(150): unsure at all n locations
  Clone ID: PAT_MRT3847_51599C.1
cataatggtgttgaaatctgcataacttaggnactcagggnaatcctaaggattatgaatcagaccaatatagatatattcaataaataaatatttgtcagttttttttattggttacattgagagtcacaattcaactatgatctacct

SEQ ID NO: 89248 - DNA, 350 bp, Glycine max
  Clone ID: PAT_MRT3847_5159C.1
gaatatctatatcttggtgcccgttgattatgtatccaagtgaggggaagctataaacacccctaagaatgatgccatggtagtgataaaattcttaaagtacagagagccctaatcagtgatgggggaacacacttctgcaatgcataattgaagaagtttctggagtattacaatgtcagacataaggtggccacaccttatcatccccagacaaatggctaggcaaaagtttcaaatagagaactaaagcgaatccttaagaagactgttgcatcatcaagaaaggattgagctttgaagctggatgatgctctctggcttacaagatacgaacttaataaatttgt

SEQ ID NO: 89249 - DNA, 1218 bp, Glycine max
  Clone ID: PAT_MRT3847_515C.1
tccattcgttatgttatcataaagcaagaatcacttgtatgaggttgtttccacttaatgaaatgacctcactatttcctggcgttgctcttgggctgctggtgctggttctggccgccagccgtgatcactccattcgtctttggtggaagggttcaagcctgcggtgctttagaggtcacaatggtcctgtgttgtccctatcaaataaattattgggagaggatggcagaaaagtattggcaagtgggggagaagatggtactgttcgactatggtcccttggctcaagtggcaaacgaggacagcttgctttgaaggctacactctatgggcatgaaaaacctgtaaatttgatgtcagttgctgggtaagtgtttgggatactggcgctgctacatcatctgctgttcgtacctcctgttgtgttgggatggcttctgttcccggtacacccgtaaacatgaaatgccatgaatcactattgtatgtggctgctggttcctctgtcactgcatttgatttaaggacaatgcagaaagttatcaccgcagctgttcatcaaccaaagcctgtgttcatttgatgccatcccttcaaaatatttaatacgcacaggcggtgatggcagggcaatgctctgggatgttaggagaattaaggaaacttttattcaaatgcgatagccgagttggatggacattgtggccaagtaactttactgcacatggatccatacaaaatagttactggcggccctgactatgcttatgtgaatgtatgggaagttgacactggtgtacaaacaaattccctgctttgctcttcaactgatgatgctggatctggctgtgatgccatgactgtagatggttgtagaattactactgctagctattatgaagatttgggtgttctgcgttttagggacttcaaccatgcaacaaatcctgtaacgaaactagaaaatgaaccgtcatcaaaattttggatttctatgtctgatgatgacagggatgactgataatctaggtagctcccataattgcatagatcaacatttgtttttttattttttttcattttcagttggttagaatgttacttttgtacggaatctttattatgtttaagatcaaaggatgatctccaattgctgctaaggatgtcagttatatttatggtcacaaatccttcaatatagtctcatgtgtgttt

SEQ ID NO: 89250 - DNA, 391 bp, Glycine max
  unsure (1)..(391): unsure at all n locations
  Clone ID: PAT_MRT3847_51600C.1
tggacgcgctgtccaagggtgcgcttgaggcgcggggccgggcctactgcccctactcgcagttccgcgtcggcgccgccatcctcatccacccatcttcctcctcttccgcctcctccgccccggagataatcctcggcgccaatgtcgaaaacgccgcatatccagtgggcacctgcgcggagcgcgtcgccgtcggcaccgccgtcacgacctttggttacggccgcggcgatataaaggccgtaggcgtagcaacggacctggccgaccaatactgcagtccatgtggcatgtgtaggcagttcctgaggggagtcctggagctcgataccccgattntcatgcatacgagggacggcaagtacgaggtcaagacgatgggcgagct

SEQ ID NO: 89251 - DNA, 455 bp, Glycine max
  Clone ID: PAT_MRT3847_51601C.1
ggggttaatgatggattattgtacagtttgttttggaatttttatttttcagtctctgaaatgatgggttgtggggattctgacattcccattttggggatttgctgtttttgtgtaatagaatggaaataagaggaacacaagtggaaataaagtgaatggtactgtaaattttacctattttcccttcttagaatggaggttcataacatttttggtgctttagtttgaccacaagttataatgggtgggcggcgggtatggttgacactcttgcaacgtgggcagaggacagttgtgaagtgctacatagcgattagggattcttttggaagattgaaatacacccatttgagctagcgaatgtgtaaatatactagtcaagacttgctgaggtttcatagttacttatgtcaatgataatgaaaattacgggcggcctggaatggaagcga

SEQ ID NO: 89252 - DNA, 522 bp, Glycine max
  Clone ID: PAT_MRT3847_51602C.1
ctactactcattctgttatttcttttttcttatttttttgctagttacatttcctttcttgattatagagttcaaatagctgagtaaatttcataggcaatcttactagtgggtgctaagctacaaatgataacaaagatgggactgaggattcaagacagaggggaagtattcaagggtgcacctgtggttgagccaggagatgacctgttctggttcaaccgtccacgcttccttctcttcatcattcatcttgttctctttcagaatgcctttcaattagcacattttgcatggagtacatatgaattctccataaactcttgcttccataaaacaactatagatactatcattagacttacaatggggatcagggacaacacaaatcaagcagatgaggaaatcaaacggaccctgagagatatgtgtcactgatgatgaattggcaattttaattttcagggttgtcatacaagttctatgcagctatgtgattttgcctctttatgctctagtcac

SEQ ID NO: 89253 - DNA, 388 bp, Glycine max
  Clone ID: PAT_MRT3847_51603C.1
aaaaaacatttccggaaaacgtgtttcttataaatattttcaaagggattcaatccaaaaaatagtctgtgagaactatcatatcaatgtttatgtaccccgaaataatgagatgtgcaaatgtggctagtgcacaatcactaattaattgacctgttacgacctattttgtaataaaggaacattatggcacgatgactccaagttctcaacccctttctcaatctggatatcttcttatggattttccccacagtacggcataaaatcctatcacgattataaccgcaccaatcaaacttccaaggcttaagtgaaaccaactgtaaaacatatcaacgaggacgcgcaatataaaatttgtgggcgtacacagacactaaaactt

SEQ ID NO: 89254 - DNA, 1761 bp, Glycine max
  Clone ID: PAT_MRT3847_51604C.1
tttgtgaacaaaattgttatttgaacacaacatatatcccataattgatactccacatacaaaaaaagaaaagaaatggattcactacttcatatccaaaagcctcatgttgtatgtgtaccatttccagcacaaggccatgtaaacccctttatgcaactagccaaactccttcattgtgtgggtttccacataacctttgtgaacactgagttcaaccacaaccgttttgttaagtcccatggaccagactttgttaagggtctccctgatttcaaatttgagaccatacccgatggcttgccgccttcggataaggatgcaactcaggatgttccagcactgtgcgattctactaggaaaacttgttatggtccattgaaagagttggtgatgaagttgaactcttcttcccctgaaatgcctccggttagttgcatcattgctgatgggactatgggatttgctggaagagtcgcaagggatttgggcatacaagaggttcaactttggacagcctcagcgtgtggttttgtgggatatttgcaattcgaggaactggtgaaaagaggcattcttccattcaaagatgaaaattttgctattgatggcaccttggataagagtttaaattggatttctgaaatgaaggatattagactcaaagaccttccaagttttatcagaacgaccactttggatgatactatgtttgatttcttgggttctgaggcacgaaacactttgagatcatcttcaatcatcattaacacattccaagacttagatggagaagccattgatgtccttaggatcaagaaccctaacatatataacattggcccacttcacttgattgataggcattttcttgagaaagaaaagggcttcaaggcaagtggatcaagtttatggaaaaatgattcaaaatgcttagcatggctagacaaatgggaacctaactcagtcatatatgttaattatggaagtataacggtgatgacagagcatcacttgaaagaatttgcttggggactagcaaatagcaagcaacatttcttatggataataaggccagatgtagtaatgggtgaatctatatctttgccacaagagttctttgatgcgatcaaggacaggggatatataacaagttggtgtgttcaagagaaagtgctttctcatccatcagttggggcctttctaacccattgtggttggaattctacacttgaaagtatatctgcaggtgtgcctatgatttgttggcctttctttgccgagcaacaaacaaattgcaagtatgcatgcacaacttggggaatcggaatggaaattaaccatgatgttaggagagaagagatagcaaagcttgtgaaggaaatgatgatgggagaaaagggaatggaaatgaaacaaaaatccttagagtggaagaagaaagcaataagagctactgatgttggaggatcatcttacaatgatttctataagttaataaaggaggtttttcatcacagtgttctttaagtccttattttataatcaggtgtattaaggtttattagttagataaaaatacctttcttaagttataatgggatggtaaggtcataacatgatgcaattggtttggcctaattactattagtttaaaatgtttccatttatatttatcatgtcatgtgtactaaaattttaatattgtaactctttatgtaaacatccatgattgttccaaaggatatgatttactttatt

SEQ ID NO: 89255 - DNA, 402 bp, Glycine max
  Clone ID: PAT_MRT3847_51605C.1
cgcgtccgtacgcatcggatcctgtataccggacgcccgccacgcgttcggaaaaagaaaaagcattatttttttttgatagagagagaccgatcataaccggaacgggcggaggaagcgctccaattttaagatatagagacttatatagagagaatgtaaaaaaaggggggcccgttttaaaaaataaaaagaggggggccgcttataggcaacgacaaacattccatttggggagccgaagttcatattttgggcggcaggtgaaaaaaaaggggagggggaaaactttgggttgcccaaactggaaaaccccgggaggcacccgatttttcccatgggcataaagggcaacataaccgggagggtgatgcttgaaaaagggtggggcggccgtatggc

SEQ ID NO: 89256 - DNA, 765 bp, Glycine max
  Clone ID: PAT_MRT3847_51606C.1
gcataaaaaacaccacataatttgttacaacataatttacatgataattttgttcgagaaagaaatatatcagaactcaaaaggaactttatgatataataagggagttctgcataattcagaaaaaaggatgtgagagggtttatgcgattatgctatgcatgtaaataaaaaatggaaattttcaaaacaaaggagaggtcattctaattttattgaaacttacaatttactcaaaaagaatgactgaaattttacaattggaaaaaatcaaatgctgatgcaattatacttctctgatagctttgtatggctttccattagatctgccagcaacaaataacttttcctccatgtttttattggaaagaaaatgtaaagcttagacttggccaaatgtatatgatcaacaactgtcagattcagggaatccatatagtacatggctgctttgagtcctaaaaatgggctgaacaatgcagtgtgcaagattaaaatcctctactgtcaaaccatatcttctccatacaccaaagaatgtagcatacaggaccaatttctgcccagaaaaaaaacttttccttctatcctcattcctcgtatatactaaattactttagtccttgaaatgaagaaaaagaggagaaagcagttcatgcagttccaaagaggtttcaacaatccaattcccattactgatcttcaaggataaaacttgttcccattccagaatccagtagtaattctaaatactgtgattgaaat

SEQ ID NO: 89257 - DNA, 590 bp, Glycine max
  unsure (1)..(590): unsure at all n locations
  Clone ID: PAT_MRT3847_51607C.1
accagacacaacacaccataatttattttatatacaatcttatggtgcccaagatgcagatgcatggactaattaaacaacaacgttagtctgataggcagtgtccatagataaattgggtacccataaaatggccttgcttccaaggaaatggcaaacagggttagttccaggatcaactcccatgagttcatgaagcatgtgatgattcattccagaagtatctcttcaaaactatatccttctttagaggtgtctttaatatccgttaaccatgtatatacaccataaggttgtgcatagggacgcttggtgaattgtactttcattgttttgcctggatgaaggtcttctttatagaagaatgtttttgggtactgtgtatcatcaatttgcttagggagttcatcgatttcaacacctgcagggagaggctttagaagctctcgcagtgcagtgggaatgggagtgtttggccaaacagcttcccaataatcttcctcaggtagcgatgcatggacatggctctctcctgcaagagcaagagagaagagaatggtnaaagagatgactgagcatcgaaaatccat

SEQ ID NO: 89258 - DNA, 539 bp, Glycine max
  unsure (1)..(539): unsure at all n locations
  Clone ID: PAT_MRT3847_51608C.1
gaatggcacttcgttgcttggtgatgtccctttctgttctcttcactcttggtcttgcgagagaaagccatgccagagacaaagatttttggcatgctgtttggccaaacactcccattccaagttcattgcgagatcttctaaagcctgnccctgcaagtgttgaaatcaatgatcaccctatgcaaattgaagaaacacagtacccaaaaaccttcttctataaagaagaccttcatccnaacaaaacaatgaaagtacaattcagcaagcctccctttcaacaaccatggagtgttgatacatggttaaaagaaattaaaaacactactaaanaaagatatagttttgaagaactatacatcaagaaagaagccattgaagaagaagagaanttttatacannatccttaggaacagtaattaattttaccatttcaaagctaggaaaaaacattcaaatactttcaaatttctttatcaataaacaagaccaatacactgtagaaaaaataccagatcgtagagacgaagcgata

SEQ ID NO: 89259 - DNA, 607 bp, Glycine max
  Clone ID: PAT_MRT3847_51609C.1
ggcacttcattgcttggtgatgtccatttatgttctctttactcttggtattgcgagagaaagccatgccaaagactaatatttttggcatgctgtttggccaaacactcccattccaagttcattgccagatcttataacgcctgtccctgcgagtgttgaaatcgatgatcaccctatgcagattgaagaaacacagtaccccataaccttcttctataaagaagaccttcatccaggcaaaacaatgaaagtacaattcagcaagcctccctttcaacaaccatggggtgttggtacatggctaaaggaaattaaacacactactaaagaaggatatagttttgaagagctatgcatcaagaaagaagccattgagggagatgagaagtttcgtgcaaaatccttgggaacagtcattggttctgccattgcatagctgggaaagaacatgcaagtactatcaagttcctgtgtcaataagcaagaccaatacactgtggaaggagtgcagaatctgggatacatagcagtgatgtgtcatatgctagaatttagaactgctgtattttacttgcatgaagtgcgtgcaacagcagctttcatg

SEQ ID NO: 89260 - DNA, 472 bp, Glycine max
  Clone ID: PAT_MRT3847_5160C.1
gcgagaagacgacagaagggtggataatgcaagtgttcatgacacacttgactttggaacatttttgtttgttttttgtgaattgactttggaacatatgattgtgctatgtggtggcatggtggttaggtggtgttgtgttatttgtacgtgggacagaaatcgaaaattttagtatttgatagagaaagcatgcattgaatttcttggtgacaagctagatagcttgcctttttagattagaagtcattctttcatgtcaatttctatttgaaaaagagaattgatacccgaaccactttacaatgacaaccccccatccaacacctgccttcgtggcatttttattgtaatttatgttgctcaacattattcttatttttttaaaaaaaagacttaaaactgaaaaaagggaagcaaaaataagtcctaaactctgagcgtactcattctgaaagttgttcccaatcgc

SEQ ID NO: 89261 - DNA, 166 bp, Glycine max
  Clone ID: PAT_MRT3847_51610C.1
cataaacacaaaaactcgagatttaaaaaaacatttgaatctatttcacacttattaaaacctcatccttttaccattctgggtgctataccttccttctaaaaacaactccaacttcacacttaaattctaacacaccttttaattttcccacctttctaaataa

SEQ ID NO: 89262 - DNA, 395 bp, Glycine max
  Clone ID: PAT_MRT3847_51611C.1
tctgttcctgcaagagtttgagtcacaaattttccactcttcctcaccgattgctagaatggaatttcgatgctcagtcatctcttttaccattctcttctctcttgctctagcatgatagagccatgtccatgcatcgctacctgaggaagattattgacaagctgtctgtccaaacactcccattcccactgcactgctagagcttctaaagcctttcactgcatgtgttgaaatccatgaactgcctaagcaaattgatgattcacagtacccatagacattctgctatcaagaatacctttattcaggctaaacaatgaaagtacaattcaccaagcgttcctatgcacaacctttacgtgtatatacatggttaacggattttaaagaca

SEQ ID NO: 89263 - DNA, 283 bp, Glycine max
  Clone ID: PAT_MRT3847_51612C.1
gagagaagccagtttttcaagccccgccgttaaagccaccatcgaacagtccctcaacgccgaccccgtcaccgttaattccggattgggattccggccaagcgcggtggctccggtgaattccgccccggggcggaatttatatctgaacccgcggctacaacagcaggggagtgctgcacagcacaggggcgatgaagtgaaacgaattttggatattttgcatacgacgaagatgaggaacccgatcttggtcggggaatcggagcccgaggccgcgatc

SEQ ID NO: 89264 - DNA, 451 bp, Glycine max
  Clone ID: PAT_MRT3847_51613C.1
ggcacttagttgcttggagatgtacctttctgctctctttactcttggacttgcgagagaaagccatgccagagacgaagatttttggcatgctgcttggccaaacactcccattccaagttcattgcgagatcttctaaagcctggccctgcctgtgttgaaatcgatgatcaccctatgcaaattgaagaaacacagtacccgattaccttcttctataaagaagaccttcatccaggcaaaacaacgaaagcacaattgatcaagcctccctttcaacaaccatggagtgttgctacatggctaaaggaaactaaagacactactaaagaaggatatagttccgaagagctatgcatcaagacagaagccattgagggagaagagatgttctgcgcaagagccttgagaacagcaatcggtttcgccattaccagagctgagaaagaa

SEQ ID NO: 89265 - DNA, 1583 bp, Glycine max
  Clone ID: PAT_MRT3847_51614C.1
accaggtattttgttagcgatacctgctggaacactagcagagccgaaagcatggagctcaaactccgcgcatcaatggcttccattccacgcgcagtcttcaccaattcctcttccttcgttcctttctgtacctacacggttcccgacgctagcaggcgtcgaaacggcaacaccggcagtcgttccactcacaaaatcactcctttgcgtaaggagaaacatcccaatgaacagaaattgaagctcgaccatcaaaaccaaaaccccttgaatgtggacttggtggccctctgtgaagagggtaacctcgatcaagtattggaactcatgggtcaaggtgctgtggctgattatcgcgtttatctcgcgctcttgaatttgtgtgagcatacgaggtcgcttgaatcggggaaaagggtccatgaaattctgagaagatcggcctttcgtggggacgttgaattgagcaacagattgattgggatgtactgcaaatgtggcagtgtgaagaatgcacgccgagtgtttgatcaaatgctggacagaaacatggctacatggcatttgatgattggtgggtacacgagtaatggtttagggtgtgatggtttattggttttccagcagatgaagcaagcagagctgccacctgatggggaaacttttgaattggtcgtgcctgcatgtgcacaggcagaagctgtggaagaagggtttttacactttgagtccatgaaggagtatggaattgttcctagcatggagcattacttggaggttattaacattctggggaatactggccagttgaatgaagctgaggagttcattgagaagataccaattgagcttggagttgaggcttgggagtctcttcgaaattttgcacaaaaacatggagatttagatcttgaagatcatgcggaggaggtgttaacatgtcttgatccttcaaaagccgttgctgataaacttcccccgcctccaagaaagaagcagtctgatatgaacatgctagaggagaagaatagggtgactgagtatcggtattctataccctataaagaagaggctcatgagaaattgggaggtttgagtgggcagatgagggaagcaggttatgtgccggatacaagatatgtcctccatgacattgatgaggaggaaaaagagaaggccttgcaatatcatagcgaacgtttggcaattgcttatggtctcatcagtacaccaccgaaggactacacttagaatcatcaagaacctacgtatctgtggggactgccacaatgcaatcaaaattatgtcaaatattgttggaagggagctaattgttagggataacaagcgattccatcatttcaaagatggaaaatgctcctgtggagattattggtagtgttggtaaaagtactcaactgtacatactattgattgatgctgtactgctagattgtttcttatttgctgccaaaaatgtaaggttcaaatccttagtcgggcagatcaaagaaatttttgttccaactagtgaattgacctgtgtagtgtctttctctctgttgtatagtgtttgttgt

SEQ ID NO: 89266 - DNA, 742 bp, Glycine max
  unsure (1)..(742): unsure at all n locations
  Clone ID: PAT_MRT3847_51615C.1
ggccctttggtgtttggtgatgtacctttatgtgctcttcactcttggccttgcgagagaaagccatgccagagacgaatatttttggcatgctgtttggccaaacactcccattccaagttcattgccagatcttctaaagcctgtccctgcttgtgttgaaatcgatgatcaccctattcaaattgaagaatcacagtacccgaaaaccttcttctattatgaagaccttcatctaggcaaatcaatgaaagttcaattcatcaagcctcccttttaacaaccatggggtgttggtacatggttaaaggaaattaaacacactactaaagaacgatatagttttgaagagctatgcatcaagaaagaagccattgagggagaagagaagttttgtgcaaaatccttgggaacagtaattggttttgccatttcaaagctgggaaagaacattcaagtactttcaagttcctttgtcaataagcaagaccaatacactgtggaaggagtgcagaatcttggagacaaatcantgatgtgtcataagctaaatttcataactgcagtattttactgccatgaagtccataaaacaacatctttcatgattccattgatggctgtagatagaaccaaaactcaggcactttctatttaccactcacatacttctgaaatgaatcatcatatacttcatcaacttataacagttgatcttataactaactctatgtaccatttc

SEQ ID NO: 89267 - DNA, 247 bp, Glycine max
  Clone ID: PAT_MRT3847_51616C.1
ccctttctttcgggaaagacaatgactgcctgtgctggccccagactactggaatcaatagctcacgcacgccgggttcaagagcctgtacactcttgtctacgatcttgggagtcggtgtcatatgggaacgacaatcgctctctgctctggccacagacttagtgaatcactttgttttccactcttagtttattggctctacactctcttattggatttgggcttccagggaagacttaaactt

SEQ ID NO: 89268 - DNA, 779 bp, Glycine max
  Clone ID: PAT_MRT3847_51617C.1
accttctcactcttccaaccgattgctacaatgcaatttcgatgctcactcatctcttttaccattctcttctctcttgctcttgcaggagagagccatgtccatgcatcgctacctgaggaagattattgggaagctgatatgaccaaacactcccattcccactgctctagccacagcttctaaagcctctccctgcaggtgttgaaatccatgaactccctaatcaagttgatgatacacagcaccctacaaacattcttctataaagaagaccttcatccaggcaaaacaatgaaagtacatattcaccaagcgaccctatgcacagaccttatggtggatatacatgggtaacggatattaaagacacctctaaagaaagatatagttttgaacagatatgcatcaagaaagaagcgtttgatgtacaatacaacaattgcgcaaaatccttgcgaacagtaattggatttgccatttcaaagctgctaaagaacattcaagtactttcaagttcctttgtcaataagcaagagcaatacactgtggaaggaacgcagaatcttggagacaaaacagcgatatgtcatgggctaaatttcagaactgcagtatcttactgccataaagaccgcgaaacaacagctatcatgtgtccattggaggctggtgatggaaccaaaactcaagcacttgctgtttgccactcagatactgctggaatgaatcatcgcatgcttcatgaactcatgccagatgatcctggaactaaccct

SEQ ID NO: 89269 - DNA, 583 bp, Glycine max
  Clone ID: PAT_MRT3847_51618C.1
acgagctagaatggaatttcgatgctcagtcatctcttttaccattctcttctctcttgctcttgcaagagagagccatgtccatgcatcgctacctgaggaagattattgggaagctgtttggccaaacactcccattcccactgcactgcaagagcttctaaagcctctccctgcaagtgttgaaatcaatgaactccctaagcaaattgatgatacacagtacccaaaaacattcttctataaagaagaccttcatccagacaaaacaatgaaagtacaattcaccaagcatccctatacacaaccttatagtgtatatacatggttaacagatattaaaaacacctctaaagaaagatatagtgttaaaaagatatgcatcaaaaaagaaacatttaaaggagaaaaaaagttttatacaaaatccttgagaacagtaattaattttaccatttcaaagctaaaaaagaacattcaagtactttcaaattcctttatcaataagcaaaagcaatacactatagaaagaatacagaatcttagaaaccaagcaattatgtatcataaactaaatttcaga

SEQ ID NO: 89270 - DNA, 257 bp, Glycine max
  Clone ID: PAT_MRT3847_51619C.1
ggctcgagcacatatacagcttacataaaaaatattgcttaacccacccatcgatctttgtctattggatgcattgaacctaaaccagcacctcctaatctcctgagcatatataactacaacacatcagcggctggcaaaccgacgcacgaagaatctttcacccgacagatggttgacgtagccaatgcatcagtaccagcagcgaacggctgtcaatcaaatgtcaactatcagccaacaaactcacagtcttc

SEQ ID NO: 89271 - DNA, 517 bp, Glycine max
  Clone ID: PAT_MRT3847_5161C.1
tcctctagagctggccgcccttggtttttcttttttttttttacttgggttggagaaataattatttaagtggtccaccggtacacatgtttactcatctttcgatcccgcgatcctaacattttatttcttattacacatttatacttactccgccctaagatagagtaacatcgaatagaaagatcactttttagtactaaactctttgacgtcacttagcttccagcatgtacgtaccgtgcacgtatgcaatgtacgtacgcaccaaacgttttattcattattattactctgttcattattcagtcgatcacgatgagccgagcagcgtgtgcatgcaactcaacagtagaggttgccccccgggctgacgccgaactggcggcagtagtccttgtagtagtttacccttgggttgacgggcccggggtttttcccgttgcactcgaacgcacctttgaaggcccggatggtggcgccaaacccctgcaacttcacctggggcacgtttgtc

SEQ ID NO: 89272 - DNA, 802 bp, Glycine max
  unsure (1)..(802): unsure at all n locations
  Clone ID: PAT_MRT3847_51620C.1
ggctcgagcggctcgagctaactctcattaattgcaagaatggcacttcgttgcttggtgatgtccctttctgttctcttcactcttggtcttgcgagagaaagccatgccagagacgaagatttttggcatgctgtttggccaaacactcccattccaagttcattgcgagatcttctaaagcctggccctgcaagttagttttgtgaattatcaactctagattcttgattatgggtttatatcttcctagaatgctcaaggttaccccataattggaatggaaaggttgaacgaagaaagagaataaaataaaaagaaaagaagaagaataactatatataaattaccttttattttaaacactccagcacctttttttatctatttatatcatatgatatcataaattctattatatttatatttttctatttatttactcaacttttagtatttaataatataataagtatttatcaaatattttcctttaacaaaacgaagaaagaaaatatatttttatatatgaaaaataaattttgtacatctcttttggtgtttatatctattgagagacaagaagaaaaatgttattattattattattgcaggtgttgaaatcgatgatcaccctatgcaaattgaagaaacacagtacccgaaaaccttcttctataaagaagaccttcatccaggcaaaacaatgaaagtacaattcagcaagccttcctttcacaacatgggggtgttgtacatggttaaaggaataaagacactctaagagntatagtttgagagc

SEQ ID NO: 89273 - DNA, 208 bp, Glycine max
  Clone ID: PAT_MRT3847_51621C.1
tccgggcctcaacaccaagagtgcctccactttgtttcggagcattaattcgaattgccggaggaacaagctctgtctctcctaccttctaaggcctgcacatctggtcaaggacagggtctaaccaatgctactccatttcacacacacaaatagtttcgtggttggacgaatagaaaagaatccttgattcttcaccaaccaagtg

SEQ ID NO: 89274 - DNA, 413 bp, Glycine max
  Clone ID: PAT_MRT3847_51622C.1
gatcaatccactttttattgagcggaccccaccggggaggcggtctggggacactatactttagagtgcccatggagcattggtaaaggatcctcctttatgtgagaagggtgtgggcctatgaaagacgttgaggtgctttgcgcccttctttatgtattagggcacctataaactggactttctcgaatcttacgcgagaggagcccctggggattgactaataacttccaacaaaagaaattgagaatggagaccgtctgttgccaccacaaataaaacatacatcccctcgatgcggggtaaagaataaaaaaaagctttcccaatccttaatccggcaaggcctaatgaaccggcaaggaaagcctttgatttccagcttggctagacccacgcttgaggcctggacc

SEQ ID NO: 89275 - DNA, 522 bp, Glycine max
  Clone ID: PAT_MRT3847_51623C.1
ttgtcaattgaacatgatcgcgacccaatttccaaatttacccatcacagaattttggagaaagaaaaaaatacaaggaagaaagaaagtcttcaacctctattcaattctccaagtgggattttgagatggcatcatttgcaggcactacccagaagtgcacagcatgtgaaaagaaagtgtattgggtggaacagctcactgctgacaacaaggtgtaccacaaatcttgcttcagatgtcaccactgcaagggcaccctcaagctgagtaattattgttcctttgagggtgtcctatactgtaagcctcatttccatcaactgtttaagatgactggcagcttggacaaaagttttgaaggtgttccaagaagtgttagagtggaaagatctgctgatcaggtccaaaccaacaaggtttcaagattattctctggaacacaagaaaagtgtgttggttgcaagaaaacagtgtacccaattgaaaaggtggctgttgatggtaaatcttaccacaagt

SEQ ID NO: 89276 - DNA, 260 bp, Glycine max
  Clone ID: PAT_MRT3847_51624C.1
aaccggcgcacaggcggccaatatcctcgaccccgactacgtgattggcgtgtgggcttcggctagccgcccagccctgcgcacactggtagcccccgacgccaacggcaacaccaccggtgcccaaactacgtcgggcgactacgtgcaagtgtcgcgcctaggcatgccgctcaccaacgaggtggtaaaccccatcggcaacaaagacgagtttaacgctcgcacgccttactcggagaacgccgcattccaagcca

SEQ ID NO: 89277 - DNA, 985 bp, Glycine max
  Clone ID: PAT_MRT3847_51625C.1
tacggctgcgagaagacgacagaagggatttctagtgatattgttactttcatccgatctcaacacaaggataggaaactaaggctgcttaaaatggaggatgtaagcatgggaatgtgggttgagcgatataacaataccattgcagcagtccagtactcccacaattggaagttttgtcagtatggatgcatggagggctacttcactgcacattaccaatcaccaaggcagatgatctgtctttgggacaaattgtcaagaggtcgagctcgttgctgcaacttcagatgaccacacgaacaactttgcttcttggacgtgtcactgtatctctgtattctttatacccttgtgctgatcctaagttcacctaggttaatatctggagaaaactacaatgacaacaaaaggtgctacaaattcaatttgcaagaaatagaattttgtaccaatgtttccaaaagagagcgaaaaaaaaagaactgagatgatgacagatgaagcatcatacagtactatatggttgggctgggggagggggaaaaggtggaaacacagtagttttagactacttccaattgatacttgtgcatacttcttctggccgagggttaaattctgtgggtatttccttgcttcatatcttagtgtctactgtccctcccaggatctctaaggtcatttacttaggtggtggtgcagttgaacagtttgactgctcttactgtccatccaaattgacaactgcaatatacattttttattagtaaaagtttaggggaggggaggggagtgccttatttcatggctaaggtatgctttatttagggcttatggcaatgaaagtatagtagtagaaattgtacctaatatcatgttattttaaaaactcaatcttactgagttattagttagcactgttctttacagttgtgtattagggtttaattttaaataatgcttatgtattttttttaatatc

SEQ ID NO: 89278 - DNA, 785 bp, Glycine max
  Clone ID: PAT_MRT3847_51626C.1
gtttcactttgccacatcaatccatccatcatcacatcaccgagcgagccatggcgaagcccgagaaccgcaccaacttggcttcgtgtttcgtggccaccattttcttgatctttcttctcattgtcgtcttcatcgtttacttcactgtgttcaagccgcaggaccccaaaatcgctgtgagcgccgtccagatcccttccttctccgcgactaacggcaccgtcaacttcacgttctcacagtacgcctccgttaggaaccctaaccgaggcacgttctcgcactacgacagctcgctccagcttctctactacggcagacaggtcggcttcatgttcgttcccgccggcaggactcagtacatggtccgccaccctcaacgtccagtccttccccttgggcctcggtccccccttcgttgatgggcccagtaatgtggggcccacgatggagatcgagtcgaggattgagatggcggggcgcgtgagggtgttgcacctcttcagtcgtcacgtggaggccaaagctcaatgcagggtcgccatcgccatcaccgatggatccgtattaggttttcggtgctaatttagcagtaattctttctttctttcacctttttccttctgtacctgtaaattactactactgtaacagtaaaagtcagcgtaaaatcctaaatttttcatcaagggtttaccaaattatttcatcttaggagctaaattcatcatccaaatgtttagtagcaggaactatctaaatttaataataaattatctttc

SEQ ID NO: 89279 - DNA, 114 bp, Glycine max
  Clone ID: PAT_MRT3847_51627C.1
cggcgctgtaccatagcactcatggacacattctccgtcgtcacgttgacaatggcgctcaagaaacgtgagacacgtggagttgtatcagcgtagaggacggctcaggagatg

SEQ ID NO: 89280 - DNA, 454 bp, Glycine max
  Clone ID: PAT_MRT3847_51628C.1
ctggtgggggccttcccatatcatccgagacagcgtggtatacagcatattcatggagtgtatgaaggattgtagacgaacagatggcaatggtggtggttagctctgacttatactatttggaagcacagaaacaacatcattttctccaatgccactttcaacgctaataaactaatggacgatgtggtgtttcttctatggacatggctcaaatgcttagaaaagaatttcactcttcatttcaatcagtggtcttcaaatctcaaaattggttttcttaggacacgaatataggaatatagtctacattcctgttcatttaccttgctatgggatctttcagcttgtgtaatcattgcttgtcagtgaactagctatgaaaggtcttttaaaacctgtattttttagtacctctggtactcattaatgatatattataacttggctgagc

SEQ ID NO: 89281 - DNA, 483 bp, Glycine max
  Clone ID: PAT_MRT3847_51629C.1
ctagtctcgagttttggtttcttgttcctgttgtttccaaggaagatggatgctatatgcaagcatgaaagtaaagaaacaaagtcagcaaaatgatgccccttctcccacaaccacaaggcaggtgtaacgagggcaacggtggtggtaacaattaagaggaccccactctcttttgcaacttgacatatgtagcttgcagcacaatggggtcacgctcacgggctcattataagcctgtttttacttcttcttttttaccttccccacattgtaaaatacagaaagttagtaattgataacactatatgcatgccacacatttcagaatttttagggcacacgcataagtacaaacataaccatgtgaactgtgaagtgagtacgtgggcagaagttgaaagttgaaacaacaatcactctctattagattagatcagcagtgtaaggtagttctgtgtgagactggtcctctggcctctg

SEQ ID NO: 89282 - DNA, 229 bp, Glycine max
  Clone ID: PAT_MRT3847_5162C.1
gaccgctgtgttttgattcaatggacttagaagcttaaagggccaccctaagaaaaagcccatgagggtcccacatggccactcgtttttgccttgtttggtccttgcgaagcctgaatgcgacttaaataaggagcttggagtgctttacttttctgacagactgcgtatgtggaaagagaaagaggcagaaaaacctaaccagccattgcatgttgcggggcaaaaa

SEQ ID NO: 89283 - DNA, 524 bp, Glycine max
  Clone ID: PAT_MRT3847_51630C.1
gtttacttttcgaaacacatcctgaaacagaaacacaaccaacggaaaacacaacgctaactacagaaacacatgaagaggagaagacagagacaacgaaggcaacttctgaaacacatcctgaaacagaaacagaagcaatcgaaaacacaacaataactgcggaaaaacatcctgaggaaaaaatgaaattaacggaaacacaaactgaagtggaaaaagagacaacaccaacagcaatcgaaacaaatgaaactgaaaatgaaatgccttttgagataaacacagctcaaaccgaagtaaaagaaacggaaacagaggaaaacacaacagaaacggcaacacaacaaggggaagttacaacaacaacaacaactgaacaagaaacagcagcaaaaagtgttgaaggcgatacgactttatatcaagacggcgctttgatggtccaatgtgtgccccccgctgccattcgggccattttcgtcccctcgtcagaattccaaacaacaaatcgctcgctgatc

SEQ ID NO: 89284 - DNA, 348 bp, Glycine max
  Clone ID: PAT_MRT3847_51631C.1
ggctcgagggcaggcggagccagatgttggctatttcgaggaggaggacatcctgctgaaggccaaccaccacttctacagcttgaaggccaagttctccaacacctacaccatcaaggtggagcacgatcatcggttccgcgacttcaggtccatcctgggtagagtctggctgctcactgagctcgacccctacgacgtgcacggcgtcaccaaatgctgcgatctaactgcggacgagttccgtcgccagtgcctcgggctggagccgatccggtttccggcgcacgcccataatgcgcccatcctgggcaccaaggatctcctcagggtattttattggcgaga

SEQ ID NO: 89285 - DNA, 261 bp, Glycine max
  Clone ID: PAT_MRT3847_51632C.1
attgatgaaaaaaagccagaaatatttgtttttaaggtacaaccacgaatccaagaaattcaataaaagtggaaaacaatgcaatatttcaaggaaaacagggtatagccattaacaaaaacaaaacttaaggaacatatctttacaaagagtttccatcaggatggggggtaccattatttagggttgaaaaacccaatgttcatggggtaccttatggtaaaccagaaaatgctcatgtaatcaaagcaaaggcttgct

SEQ ID NO: 89286 - DNA, 677 bp, Glycine max
  Clone ID: PAT_MRT3847_51633C.1
ccacgcgtccggagactttgaccgactcgctctatgtgctacactattttacgcttggtgcggtcatgatttgctccatctaacgcctgattcatcggaagagcctgtctgggatcgcaactcctaactgcattaagaaaagcgatgatggagcgacacattgcgaattgtggcaagcgcgcatcatacgtgggaaacgcacgtgactatggacgacaattgaccaatgcagaacaggcagaatggagagaacctcatacctggatcatggcaggctaggcatcgcgctgcggcatgctatgcgagatggttaccaagaaacgagatggcgagtggtatgtgatcgcgtgatcgtagattcttgtcatatgatagtcaacagattcgcaacagcagcgaagacaacgagtctgatgtcatgcttatggatcaacatgatgctgcttgccgagctatcgcacgagtaataaaggaacgagatgaaggtaggtacttacttgcacatgcagagaggcaggtccctgtgtctgcaccaaatgccataacagcaaatgcccgacgtctgagcaatgggaaaagatctgatgatgatgaggatcaggctcctgatgcgaagaaaactcatggtggaagatctgctagcatgattgctgaactaactgatggcgatgctgctc

SEQ ID NO: 89287 - DNA, 1155 bp, Glycine max
  Clone ID: PAT_MRT3847_51634C.1
tatcgtcatcatctcacaagggatacaatacaataccaagaagctacctagctacaagagactccactcatcaccacctcaagcaactaattaactagcatagggtgttttggattatagattgtacttggaagaagatggaaaacactactgtgacatatcaaactgatctcaacctcaaggcaacagagcttagactggggcttccaggaacagaagaaagtgaggagaaaacattgtcagcaggtgctagaattaacaacaaaagacctttaactgaaacctctgatgagtgtgcttcaaatggtacttctagtgctccacatgagaaaactgaaacagcccctcctgccaagactaagatagtggggtggccaccaatcagatcctataggaagaacatccttcaagagagtgaaggtgctggaatttatgtgaaagtgagcatggatggagccccttacctcagaaagattgacttgaaagtctatggaagctacacacaactgctcaaatctctagaaaatatgttcaagttgaccataagtgagtactctgaaagagagggttacaagggttctgaatatgcacctacatatgaagacaaagatggtgactggatgctagttggagatgttccatgggacatgtttatgacttcctgcaaaaggctaagagtcatgaaaggctcagaagctagagggttgggttgtggtgtgtgacaaacagttaatttactatggctatgatgaggagattaaatcattctttcatcaattcagttcttggaactaagggattttgaatcaatgcttagctatctgtctatctatcaccatgccaatctgggaggactctaaagtagggatatggaaggctctttctacaagttttgtcaatatttctggttattaattttagcatatgtgattgggggtgctatatgctattatttccattgaaccctttcaagaggaacctcagagaaatttgtcttaaacgaagtttgtggacaagagagataaaagggattgatttgttcatccaaggttttttttttttctttttctttttatctcacacaaaaatatagtgtaatacatcaaatattcatgtaatactttgcaattcaatggacacaaaataaactaaaaa

SEQ ID NO: 89288 - DNA, 415 bp, Glycine max
  Clone ID: PAT_MRT3847_51635C.1
aaaacccccttttgggaaaaaaaaaggggctttatttaaggggaaaaaattttccaaactgtgccaaaaaggcaaaagggcccttttaaacccaatttttggaaattttaccggtttaaaaaaaccccgcaagaaaaggggtaggggggtaagaacccaaaaatttttttttaaccccaaaaaaaaaagcccgaaaaggcccgggaaaagggacaacttttggaaaaaaaaaaatttttttacctttcccaaggggggggggaaaccttttggggaaattcggggggccattgttaacgggaaaaataatccaagccgggggggggaaacccccccgttgaataccacggggagaatttacaaccacagcttttgaagggaattggcttaccgggaaaagacaattcccaaaaat

SEQ ID NO: 89289 - DNA, 108 bp, Glycine max
  Clone ID: PAT_MRT3847_51636C.1
caaaaaatccaaggtatgtgattaagtaaataatagagcaatgaccagagtgcactctgaaaaggtaagagaccgagattagctgctgcatgactagccttatttaca

SEQ ID NO: 89290 - DNA, 1371 bp, Glycine max
  unsure (1)..(1371): unsure at all n locations
  Clone ID: PAT_MRT3847_51637C.1
gttagctagtcctgtctgtgctgaatataataattataattttaataatttctgtgttagctgcttctgctctttttctcgtctctctgctcactcaccatattagcctttttcttttgttttgaaatattggtctattgtgtagcctccaatgctggcaaaattacaacttacagtggatcaaaatggtcatcattgagatttctccatagaacatgtctcactcaattcattaaacctttgatctgtacttgtactgttttagtcggcaaagtcacagatagttcagtaatttaatataccttccagcgcgcagattcaggaaaaccacaagttagtatctattaattaatcacgatttgttgttgcttgtattttattagcaagctaggaacaattatacggttcttatcttgactaacaaaaataaatagagtatatatatatatatatatatatatatatatatatattcatcctagctagcttgctagatcaagatattctttttaaaaaaaatatcttcaagtgacaacaaacaatttttgttttgggtggtgcacgggactaactagaaggaacattttcagttacagattgttagacaatggaccacatagagatgaccatattgcctttctctcgtatggaacttccaacaacttatgaatgctttaaagccattggttggtgaccctagcaaagggttaggtgaagcttttatggaaaagattaaccataataaggatcctctctaaaattaacctccaggactgtattatggtgattcttgcttgctatgcaacaaagaaacctacctaatatcaatgcagaaccagcttgtgaaggaaactagggttttctttttcccaattaatttagagacaaccatgctgcgggaaatgggaatttttagaccacctgcgagtacttgcttcctagtgctgagaatcagttcaaaatgagactctcccttttgtttctcccgaaagattttgaaattagaaacggtaaaagcaatttcaagttatggaaaaagcaatcgatcttgcatggccttgaaaaagaagtgcccgatcccgatattaataactataatatatcccacaaggcttcttttttcccccttcattttgtgtatgactactaaatccgacaaaatggtgagcttcagcgccatcaacttttttaggactttttagttggtgcattcacgagcactatgagtccatcgaataaacaagttcgcctctttttttttttttttttttttccagaatcnngaaggcaaggtaagagtcatacgagcgaggccactatatttgtgtgaccaatatcctagcccgcnntgtaaccctctaaccgagcatc

SEQ ID NO: 89291 - DNA, 437 bp, Glycine max
  Clone ID: PAT_MRT3847_51638C.1
ccgtgaaccataattttaattgaatgaacaaggacccagccaaccgggagacacaaatgacaaatatcgaaacataaaaagacatcaaaaacgacctattgaagcaaacaggaaaaatacatcctgaacagcaaagagaataaagaacagcgcaatatggcaaaatgccaactggaaatattcagaacggggcagcaacacaacaactagggcttaaaggaataaaggagctaaactagctgacccagacacgccgaaatcaattgaagactacacggaacccatgctagcaagaatcctacacgaggcggaaggcacaaggagaataaactcgaaagtaccataccaaaagatcgaatggacatgccacgacacccttcacagcagaaggaaagaccaaaataaggttgcgcccatacagaccaagggaagaaaaa

SEQ ID NO: 89292 - DNA, 1389 bp, Glycine max
  Clone ID: PAT_MRT3847_51639C.1
tcgagttcgactgcaagtagttcatcaatcggatgttgatgttcttgttgagtctgaaacgctcgtacttgtcgagtcactcaatgatgtacttgtactattcgagtcactcacactcatggatgtactttcactgtctgactcactcacactcgttgatgtggatgcactttctgatgtggatgtggacgcactgtctgatgtcgacgtactcgttgagtctgaaatgcttgtacttaatgatccacttagcgatgtgcttgcactgttcgagtcactctcgcttgttgacgttgaagcactgtctgatgtcgatgtgcttgttgaatctgaaacgtttgtgcttaatgagccactcaacgatgtacttgcgctattggagtcgctcacactcgttgacgttgatgcactgtctgatgttgacgtacttgttgagtttgaaagactcgtacttgtcgattcacttaatgacgtacttgtactatttgagtcgctcacactcgttgacgttgatgcactttctgacgttgacgtacttgttgaatctgaaacgcttgtacttgatgattcacttaatgacgtacttgcgctattggagtcgctcacactcgttgacgttgatgcactgtctgatgttgacgtactcgttgagtctgaaagacttgtgcttgttgactcactcaatgacgtacttgtactgtttgattcactctcactcgttgatgttgatgtactgtctgatgtggacgcactcgttgaatctgaaacgcttgtacttaatgagccactcaacgatgtacttgcgctattggagtcactctcacttgctgacgttgacgcactatctgatgttgacgtactcgttgagtctgaaagacttgtgcttgttgactcactcaatgacgtacttgtactgtttgattcactctcactcgttgacgttgacgcgcttgttgaatctgaaacgcttgtacttgttgactcactctcgcttgctgactctgacgcactgtctgatgtcgatgtactcgttgaatctgaaacgcttgtacttgatgattcacttaccgatgtactttcacttgttgattcactctcgcttgttgacgttgatgcactttctgatgtcgatgtacttgttgaatctgaaacgcttgtacttgatgattcactctcgcttgctgactctgacgcactatctgatgtcgacgcactcgttgagtctgaaatgcttgtacttgttgaatcacttaatgacgtacttgcgctattggagtcactcacacttgttgacgttgatgcactgtctgacgttgacgtacttgttgaatctgaaacgcttgtgcttaatgattcactcatggatgtgcttgtactgtttgagtcact

SEQ ID NO: 89293 - DNA, 256 bp, Glycine max
  unsure (1)..(256): unsure at all n locations
  Clone ID: PAT_MRT3847_5163C.1
gctgttgactgtgtgtttttacaacatttcgtttacttggaacgtagtgntttctagccttgttgtgaaattacatcagtgaagttgcttatcttttcaataataatactacactatagcttgaaattacaccataacatttttcttataanaaaaggaacggatgtagtaataataatctaagtatgtaagtgtatgctttgaagtttganatgaaggtttaggctatgtttggtttagcgtttggcctccttta

SEQ ID NO: 89294 - DNA, 2637 bp, Glycine max
  Clone ID: PAT_MRT3847_51640C.1
ggcgcctaattcgctctcttctaccacaaaccactcaatcctaagaaatccatttgaaatttcaagtctcgttctggctaagtccatgttcattgtttactatacctcaccactccaaggttctcgtaattttcttcagcagaaaacgaaactattgcttccagagaagagcatcatctacgaccattttggcaatattataaaacaagacaaaaatggagagtgacttgagctgggagcggaacacactcatcaatgagctaattcaggggatggaggtagcaaggaagttgaaggctgacttgaagttgccgtattcagttgacacaagagatctgcttctgcagaggatattatcttcttacgaaaaggctctactgattctaagatgcagcaatgcatcaacttccgagttgcagggcatgaatcaagcaacaccaactttgctacccgagtccccattagcctaatttgctcctttagcctcactcctgctctcttctacgtcaaatcctaagaaacccatttgaaaatttaaaatctcgttctggctaattccatgttcattgtttactatacctcaccactccaagggtctcataaatttcttctgcttccaactctgctgcagaaaaagaaactgttggttctagatacaagtgggtttccagagtagccttccgcagcactcagggctgttgggcaacaaagcaagtgcagagatcagatgaagatcccacaatgtttgacataacttacagaggaaatcatacctgttctcagggaaacaatgccgttctgccacccaagtcaccagaaaaacatgagaaaccagcacacagtcataacattgacattcaccatgcacaggcatcacaagaaagccttgcaaagttcagaagtatcttgtctgtcaacacagataatctggacaatggagatatggcatatgctttcactttcccttccacttcatttggatgcatgaaacaagacaaccacagcttgattcctttggccctggagaatgactccttcttaagcgacctataccaaacacacctgttatccccaacaacaccagaatcaaattatttcccatctccaactttccagatgaatgagtttgatgggatctacaacaggtcacattcgaaatccgatatcaatgagatcatttccaccaacacatcagcaaccaattctccaattcctgatttcaatttctcacttgatccggtggaaattgatccaaatttccctttcaataccccaggatttttgtgctgattgcactataaatggaatactataagaatgtagtcttcataaaacgggacaatttcagacagcagtagaattgtagaataaagaatgagcaactgcagcacttatgaacgtccttgtagtcaatatcagaattgcaattttggctccgtgttagcaattagcagtatgcactttcgaataaacttgtctgtcaacacagataatctgaacaatggagatatggcatatcctttcactttcccttcaacttcatttggatgcatgaaacaagacaaccacagcttgattccttgggccctggagaacgagtccttcttaagcgacctataccaaacacaccttttatccacaacaataccagaatcaaactatttcccatctccaactttccagatgaatgtgtttgatgggatctacagcaagccacattcggaatccgatatcaatgagatcatttccaccaacacatcagcaaccaattctccaattcctgatttcaatttctcacttgatccagtggaaattgacccaaatttccctttcaataccccaggacttttctcctgattgcatttcactataaatggaatactataagcacatagtcttcctaaaatgggacaacttcagacagcagtaaaattgtagaataaagaatgagcaactgcagcacttatgaaggtccttgtggcttgtagtcaatatcagaattacaattttggcactgagttagcaattagcagtatgtactttcaaataaaatagtctctccttatttttgttagttaggactgcaaatttcaagtgaacctgtagactgcaagttcctaccgctgtgccctaactctgggccaaagttggagcatctgcagcacctacgtgcggccctgtggctggtcctcgtggcctgtagtccatttctggctctcagtttgcgctctggggtggctatttggtgtgactgttctttctgctagttcctacacctaattccaatgatccttggtatgcaatcaactatttaatcaaaaaattctcctggacaaaagaatttatttcctctaagaaaaagctccacttattctaaaatgcaagcaatcatcaacttccgagttgcaagccatgaatcaagcaacaccaactttgctacccgagtccccattatctgtccatggaagtcctctgcgcgaggacgttgatgggaccatcaaggatcaccaagaagttaaacatgattcaaagaaaagaaaagcaacgcccaaatggatggatcatgtaagagtgagctgtgaaaagtgtcttgaaggaccacatgaagatagctaccaactgagaaaaatatgtcag

SEQ ID NO: 89295 - DNA, 466 bp, Glycine max
  Clone ID: PAT_MRT3847_51641C.1
cacaactggagtaaatatctttcttataacctattcctcttcttcttgggcaagttatcagactctctactatgatcaagttcgcacggtcttatagaatccctttgtttgagaggcaaactgacgattatggcttctcctgttcatgccactactgtcacttatgcagccaccaaagtgtcggtggcttcattgatgaccctaataagcaacatgatattactggcgtgctatgcccaagaaagacacctttagactttattttggacgaggtttctactttgacactaacaagcaacattattcttctggcgttcctcccggaatagacattggcagagaacatggcactacctacgcttattgcctaaacacccccccacatgatggaacttctggggtgaatcttggaatacacacccctacccatcttcatgggactacccctggttatgctgcatacact

SEQ ID NO: 89296 - DNA, 101 bp, Glycine max
  Clone ID: PAT_MRT3847_51642C.1
aaaggttgttcgatacaaaataccatttattcggctccttaaataagccactactacatggttggaatccttcatgaaatcggttcatgtacgcgcacttc

SEQ ID NO: 89297 - DNA, 1897 bp, Glycine max
  Clone ID: PAT_MRT3847_51643C.1
ggctcgttaaaggagcaagtgggactagtattgattgaatgattgatagaggagtgagtctcggggcatcaaagaagaaagatgggagacgtagcagataaattggcgtatttccaagcgataaccggtttagaagatccggagctctgcacagaaatcctggctgcccacaattgggacctggaactcgctatctctactttcacctcttcctcaaaccctaacaaccctccaccgcctcccgctctggcttggaaactcatcaccctacccgtttccgtcatctccgccagtctaggcttagtttccgccgctatcggcttgggcctatgggccgcggggggcgtcctctcctattccctcggcctcgtgggcctgggctcgccctcggccccattggtttccgtcacggccgccgcttccgaggcgatggatttcgtggccgctttcgagagggactacggctccggtgggcccaatttcgtgggcgagggcttcatggacgctcttcagcgatccaggaactcgttcaagcttctcttcgtttacttgcattcccccgatcaccccgacacgccgtcgttctgccagaggacgctctgctctgagaccattgcgccgtttgtgaacgagaatttcgtgtgctggggtggcagcattcgcgccagcgaagggtttaagatgagtaacagcttaaaggcttctcgcttccccttctgcgctctcgtcatggccgccaccaatcagaggatcgcgctccttcaacaggttgaaggtccaaaatccagtgaggagctgctggtgacactgcagagagtgcttgaagaaagctcccccgtccttgctgcggctaggcttgatgcagaagaaagaagaaataatatgcgcttaagggaggagcaagatgctgcatacagggctgcacttgaagctgatcaagctagggaacgacagagaagagaagaagaagaacatcttgcatgggaagctgctgaagccgagagaaagcacaaggaagaggaggcggctcgtgaaagagcagcacaagaagctgcagagaaacaagctgcattggctaaaatacgtcaagagaaagcccaatctcttggtgaagaacctgaaaaaggacctaatgttacacaggttttggtacggtttccaactggtgaacgcaaggaaaggaggttcaacagcacagcgacaattcagtctttgtatgactatgttgactcacttggatgtttagaagccgagagttacagcctggtctccaattttcctcggactgtttatggacaagagaagttgacattgtcattgaaggaagctggattgcatcctcaggccagcctgtttgtggagctcagttcatgaaaatcaagcttggcctaatgttcttatgaatacaagatgtggcctgcaaataattctgatgtttcattctctctgtttaaaagaatcgacttgctgaacaattataaacgttagataaataggttgtcgtggtttatgtagttttgatttctcttattttcaattgaatcaatcaagcagatagcgttacatggagatgatttagaataatgatatatataatatacatatttggaatttggccattcccttacttaatattcttatgaatacaacatgaggcctgaaaatagggatttctgcgatgtttcattcttctgtttaaaagaattgacttgctgaacaattataaacgttagataaataggttgtcatggtttatgtagttttggtttctcttattttcaattcaatcagtcaagcagatagcgttacatggagacgagatgatctagaataatatatataatatacatatttggaaaatggccgttcccttgaaaaaaaaaaaaaagataataaa

SEQ ID NO: 89298 - DNA, 865 bp, Glycine max
  unsure (1)..(865): unsure at all n locations
  Clone ID: PAT_MRT3847_51644C.1
cggtcgcgtgggccaaaatccagtgaggagctgctagtgaccctgcagagagtgcttgaggaaagttcccctgttcttgttgcggctaggcttgatgcagaagaaagaagaaataatatgcgcttaagggaggagcaagatgctgcatacagggctgcacttgaagctgatcaagctagggaacgacagagaagagaagaagaagaacgtcttgcaagggaagctgctgaagctgagagaaagcgcaaggaagaggaggaggctcgggaaagagcagcacaagaagctgccgagaaacaagctgcattagctaacatacgtcaagagaaagctctgtctcttggtgaagaacctgcaaaaggacctaatgttacacaggttttggtacggtttccaaatggtgaacgcaaggaaaggaggttcaacagcatagtgacaattcaatctttatatgactatgttgactcacttggatgtttagaagccgagagttacagtctggtctccaattttcctaggactgtttatggacaagagaagttgacattgtcattgaaggaagctggattgcatcctcaggccagcctgtttgtggagctcagttcatgagagtaaaactttgcttaatattcttatgaatacaacatgaggcctgaaaatagggatttctgcgatgtttcattcttctgtttaaaagaattgacttgctgaacaattataaacgttagataaataggttgtcatggtttatgtagttttggtttctcttattttcaattcaatcagtcaagcagatagcgttacatggagacgagatgatctagaataatatatataatatacatatttggaaaaaaaaaaanaa

SEQ ID NO: 89299 - DNA, 488 bp, Glycine max
  Clone ID: PAT_MRT3847_51645C.1
gtgggactgccacgctaattgatatctctctctgcgttggtgtgttggtgtttaggatttgcatcaacgaagaaagatgggagatgtagcagataaattggcgtatttccaagcgataaccggtttagaagatccagacctctgcaccgaaatcctcgctgcacacaattgggacctcgaactcgctatatctaccttcacctcttcttcaaacccttcctccaccgacactcccctgcaaccccaccctaacgaccatgttcccttcgcatccaatccccaaccccaaccccaacaccaacattcttcaacggcttccggtttggcttggaaactcatcaccctacccgtttccgtcatttccggcagcctagggttagtttccggcgcgatcggtttgggcctttgggccgcgggaggcgtcctctcctactctctcggcctcgtgggcctgggctcgccctcgggctctggctcgggctcctcct

SEQ ID NO: 89300 - DNA, 260 bp, Glycine max
  Clone ID: PAT_MRT3847_51646C.1
tttatagtcaacccaacaaacagacattgtaaacctaactcactagaacttgcagattaactcaaattaccttaaaaaccctatcagaccatctaaatccaattgctaaccccaaatcgaagtcctcctgctttgaggctaacactcatggatacgtttcggcagctttatgtagtacacgccgaatacttcttaaaaatcttaacaccggatttttataataaacatgatcctgacccaccacttgccaacgcaatccg

SEQ ID NO: 89301 - DNA, 485 bp, Glycine max
  Clone ID: PAT_MRT3847_51647C.1
tacaagaaaatgagtcgttagtactcctcataaattataatagctaatctaaatgacacgagcagaaatctccaagtataacaattatgaaacaggatacaacaggggtggcaatattacaaaagttactatctatggttacaaagaaaatcagattataccaaatggcaaaagagggagggtggttgatcaagctacataaaagggcatataaactacaaacatgtgatgagggtgaatgatcaagctacataaaagggtacataaactaccaacatgttgtgaaggtgggttgattaaaccaaaaaaagggatcataaactacaacaatatcaacacagataaaaataacctgtattaatgacacaataaagtcacttccagagcttgacaaacttgtcatgactggctgaagcaaccaaaccatttacagtagaaaccgccaatgccgcaataagaccttcatgagcagatagagtcatcgt

SEQ ID NO: 89302 - DNA, 362 bp, Glycine max
  Clone ID: PAT_MRT3847_51648C.1
attatgcaccaccaatacacgtgaggacacagtatcttacaaatatcgtattgaaaaattaaataaacacaagaactgatacataaataaaacacagttggctttgaatagtaaaagcagcatttgtatcacacaaatttcttctataaaaaacacattaacacttatcgtatttaatccccaccagaaccatacttttttaccaggacaagtacctgaaatttgtcataaccagaaagcacaccatcaccactaactgcacaaaagatgtttgctcccgcacccttgaacaaagattttgaaccttcatttttcacaatttgtgaaaatgcattcaaagagctcttgtacttgacaggttt

SEQ ID NO: 89303 - DNA, 417 bp, Glycine max
  Clone ID: PAT_MRT3847_51649C.1
aagctgcttcccctgcccgttccggaccggacttcccggcccaccccacccgtttcgcctcgcgtgccacttgttgtgcttaagggggcgtgccaattgtgatcttgacacccgaccagctctctgcactgtggacttcaatatacttgtcggtcaatcgcacatccatttcacattactgcaggacctgatgtctgatgccaggaggtcggcattgaatatgcggcccgcacaacatcgagtgatcgtgggtcatagtgtgtggcctggctcgcaaatgccagacagataggtggctatcatgtggctgatagcataggaagactgggatctgcgtaactgttgccatatgaagacccagatgtgcatgctgaaaaagctgaagatgacttagccttctttcctgcagaggtcgtt

SEQ ID NO: 89304 - DNA, 209 bp, Glycine max
  unsure (1)..(209): unsure at all n locations
  Clone ID: PAT_MRT3847_5164C.1
caggtttaaatgtggtggctactgagaacattgtgtttngtccatgtgattggaagcatattttgtntnttgaatgccaaaccgaataatcctgaagccaatatgaatgttagtcagntnatttcctactggggctatgaaagtnaagaacacgangntatgactgaggatggctatatactcttaatcttccggattccacacaacac

SEQ ID NO: 89305 - DNA, 1422 bp, Glycine max
  unsure (1)..(1422): unsure at all n locations
  Clone ID: PAT_MRT3847_51650C.1
tttagattgcaaagaaataaatcttaagaaatgtccaaggagcactctacaaagccaatgcattaaatatcttggaccaaaagaaagagaagaatacgaagtaatagttgaaaatggaaagctagctcacaaaaaggatggtaggcttgtggacactgatgagaaatccaaatggatatttgttcttagcaccacaagggccttgtatgcggggagaaaacaaaagggtacgtttcaacactcaagctttctttctggcggagcaaccacagcagctggcagattagtggcccatcaaggtgcccttgaggctatttggccatatagtggtcactaccaccccacagaagagaacttcaaagaatttataagctgtcttgaggagcacaatgtagacctcaccaatgtaaagagatgtgctatagatgatgataatccatcacttattgggactaattcatttactgccattaatgaatcacaccaaattaataagggtcctactctttctttttccaattatgtcaacagcaaatagtgtcactattaatgcagcaattaacaaagagattgaaaagaaggtggtcgctccagttcttgacgtgcccaagaggctaacatgcaagtggtctactggggctgggcccaggattgggtgtgtgcgtgactaccctggacaccttcaaacaagggccttggagcaagttaacctatctccaaggcctgcttctgcacgcccatatagttatggtccaattccttctccaaggcccagtccaaaagttaggatgtctccaaggcttgcttacatgggcttgcccagcccaaggatctcaattcctgctgcaagttaagtgcatgcttgtgcagacctttctgcggagtttgttgtatcatttcgaggcaaaaaacacaagagacccaagttttttacttctttgttttgttcattggaaagagtgaaaaatgataataacctcaaaacaaacatactctaaacaacaaaagcattggcagggaattatatatggctaagctcacgccatgtatccatctgtctacctagtgacaaaaaatgtgttagctatgaccacagttgagatgacaccaatagagacttttaactctgtctctctctagcttctatttcggttttagaatttgtttatttaattttttttattcttggggtaactgaggaacattttattaaccctatttgtctttagtttttttttttttttttggaaagaccattcagtcaattcttcattgtaagtagagtacaaaatttctaattaaacatgagatcaatttttgtttgtgtaataaaaattcagctattaataacaaaaaaaaaaaaaaaaaaaaaaaaaaaaaaaaaaaaaaaaaaaaaaaaaaannnnnnnnnnnnnnnnnnnn

SEQ ID NO: 89306 - DNA, 417 bp, Glycine max
  Clone ID: PAT_MRT3847_51651C.1
gacgacagaagggatgcccccttttcttactactagtcatccaaccatttcttttattagcctctgaagtgtaaagtctttcatggctataagaggctaaacctcatttgggagcctagcagccaacgcccttgtaatgcaattgctcttcttatctattaatacaatttcaatttctattattcttttctgcttttcattgttattgtgtggtttggtcatccatgcatatgtttttagggattattcattgggaaatggtaatgtctaaagaaccgggaaacagcatctcaacattggattactaaggaatggagggccttggtggggctctggattccattttaacactaaagggggttaatgattcaatcttggcaaagggattgggaagagagattccttaatttgaacttt

SEQ ID NO: 89307 - DNA, 185 bp, Glycine max
  Clone ID: PAT_MRT3847_51652C.1
ctcaaacctaactcttttttccacaacattaccatattccggggggtttttttccaaaccttcaccattacactcctattccaaactacaatatgacttcctctcccaaacttatcacttactctcacaaccaattacctaaaatcgcattcacctatctttatcactatcaatattcaatattc

SEQ ID NO: 89308 - DNA, 463 bp, Glycine max
  Clone ID: PAT_MRT3847_51653C.1
gaactcggctcgagcttgaatataaaatggtctaaacctcgaccctccagagaacgctctgagacaaaacgaccctctggggccacctttgaaccaactagaccgaattatggagtcatacacacagagccacaacgtactacaaacggcacaaacagtgcaatcacaccggcttatgactttcactcacctgaaagcaacatggaaactgcatgagctgctatcgaatgaggacatgaaacaacaaggatggcaaaaactcactccaaataactagacgcggctacggggcacacgatgacgatggacataccaaaaggactgacaaatcgcagagtgctgtagctcatatcattactgccgctatcagcacaggcgatcaatctaatgcttggagcactaaccaaggctgatgaaatggaagtgcagatccctcgcatggcagagcaaatggaacctaaat

SEQ ID NO: 89309 - DNA, 704 bp, Glycine max
  Clone ID: PAT_MRT3847_51654C.1
ttggaacgcttgaaccctcaggccagcgatcttctccttccccttcttcattcattccaattctcaacaattcaccgctccgaaatgggcataaccgcctccaccaccgccgtcgccaccctcctcctcctcctcttcttcttcatttccccttcagccgcagagatcaaaaccctcaccataacctccgacacccgccccatgatcctcttggagaaattcggcttcacccacaccggccacgtgtcgatctctgtctcctccgtcttcgtggtggcctcaggtgggtcccaacccgatccctcccgattagggttctttctcctgagcgaagagtccctcctgcaagtcctgatcgagatccagcaaaaccctagcttctgcgtcctcgactcccgctacaccacgcacctcttcaccttccgcgaactctctcctccaccctccgcctccgccaaccacacctcccccgtcacaatccccaacgaatactccctcttcttcgccaactgcgcccccgaaacctccgtctccatgctcgtccacaccgagctctacaacctcgacgccgactccgaacactcccgcgattacctgtccgccgggcagacccaactccccactctctactctctcttctccttcgcctacttcgccttcctcgccctctggatatacatctgctactccaacaagctctccct

SEQ ID NO: 89310 - DNA, 252 bp, Glycine max
  unsure (1)..(252): unsure at all n locations
  Clone ID: PAT_MRT3847_51655C.1
gactcacaaactcccaaagaagaggaaaaggagncgccaacaatgaggggtaggacggccggggaagccggcacggcaacgagcaacaggaacagggccacgccccgaaacacgggaggcgggccacgcaaccaaccccgcggcgcgaacaagaggaagaggaagcgcacgcacgagaagcccgccagagacaaacagaacagacccaacgaacaagagaagccgccccaccaaacacgcaaagcgccccca

SEQ ID NO: 89311 - DNA, 319 bp, Glycine max
  Clone ID: PAT_MRT3847_51656C.1
acaaaaataaatacggggggaccatacttaaaattcgcataaaaggcatgatgaattttttttttctatgaatacaaaagcgacccgtgcatactctacctgccacctgcccattgaatatacacacacatcatgtgactatgcggagtcatacatgcattggatggactgtttctaccaaaggactagatccttatatacttccttatttcttaccccccccatggaaccctccttggttaatagtgaacgcttgactaaaaaaactattacctatagggccctgcgatagacattctcttctcgactggggttaaca

SEQ ID NO: 89312 - DNA, 431 bp, Glycine max
  Clone ID: PAT_MRT3847_51657C.1
ttcgaactggctgacgtagcaccaatatccacctacgtagactccggtgagagagatattttgttgcggatgaaagaggctacgatcactggctgtgcataacggctgacgaatttctcttcacatccaagggaagaatcttggacaatcggctcaaactcatcacggtcgtccgggattcgcaatattcaaaaagtggtgtcactgcgaaaacgaatgatggttgcattaaccataccaatcctgtgatgctgcccgctagcatagctgttctacaaagcgacctactagcactccatccaccctcacccgtacgtcctttcttttttgtccaactctcactagcataaaatatacttgctcggctatcttttttaatattaaaaaaacactatttttttttcatggtgatatgcaaacccagatttttt

SEQ ID NO: 89313 - DNA, 268 bp, Glycine max
  Clone ID: PAT_MRT3847_51658C.1
caacaacctatggcacgatcccaacctcgccgcctccgaacctggagtacatctcacgcgcgaacagcggatcaaggccgggctggggacgcggcggccgtggaaggcgatgttcaacttccgatcgctgaaggtccctggcggcggcgtgccggaggcataatcgcggattcggatcaacgtgtcgtatttccgcatgaactacgcaatggtgacgctgctgattctgtttctgagcctcgtgtggcaccgatctccctgatcgtgt

SEQ ID NO: 89314 - DNA, 146 bp, Glycine max
  Clone ID: PAT_MRT3847_51659C.1
ggcagaggtagggttgcaaatctagtgccatgacgccactacagcgtcctactatcttcgtcttctctgcttcggagcaatggacacttgcaacacgttacctggcgttcgcctcattcctccgtcagagtcgtcttcgcgtcggt

SEQ ID NO: 89315 - DNA, 1407 bp, Glycine max
  Clone ID: PAT_MRT3847_5165C.1
gaccgagctagctagctagcaagcaagcacagagatggaggcaaagcgaggccatgccctcatgtgcttggcacgtgtttcactcttcctctgcgctctaaccctatccgctgctcacggaagcaccacggttcaagacatcgcgagaaagttgaaactcggggacaacgagcttctgcgcacggagaagaagttcaaggttttcatggagaattacgggaggagctactccacagaggaggagtatttgcgccgtttggggattttcgcccagaacatggtcagagcggcggagcatcaggcgctggaccccaccgccgtccacggcgtcacgcagttctcccttcccgtctcgaataatgccgccggcggtattgcgccgccgttggaggtggacgggctgccggagaattttgattggagagagaaaggagctgtcaccgaagttaagttacagggtagatgtggatcatgctgggctttcagcaccacaggatctatagaaggagccaattttcttgccaccggaaagctcgtcagtcttagtgaccaacagctccttgactgtgacaacaagtgtgacataacagaaaagacttcatgtgacaatgggtgtaatggaggtcttatgacaaatgcctacaattatttgctcgagtctggtgggttggaggaggagtcttcatatccctacactggggagagaggtgaatgcaagtttgatccagagaaaatagcagttaagatcacaaatttcaccaatatccctgctgatgagaaccaaattgccgcatatttagtaaaaaatggtccacttgctatgggcgtgaatgcaattttcatgcaaacatacattggtggtgtctcatgccctctcatatgtagcaagaaaaggctgaaccatggtgtgttacttgtgggatatggtgcaaaaggcttctcaattcttaggcttggcaacaaaccatactggatcatcaagaattcgtggggggagaaatggggagaagatggctattacaagctctgcagagggcatggcatgtgtggaataaacactatggtttctgctgcaatggtgcctcaaccacaaacaacacctacaaagaattatgcttcttattagctatgcacttaaggaaatctaaataaatatttttcattctaggtgatgtatcatgtatgtaccaaaatattttggtacgtaagtcttttaaaaagtttgcatctcctctttggttttccttagttctgaaagttatctcctaagaagacaatcatatgtactgtacgtagtgtgaagatatagtattgtatgctgcagaatatgattgtctaataaggtggactagctgtaataaaagatatttccaggtagaaaacagagcaaatcatgttaaagagcta

SEQ ID NO: 89316 - DNA, 253 bp, Glycine max
  Clone ID: PAT_MRT3847_51660C.1
accggtgccggaaattcccgggatcgacccacgccgtccggctatgtgtgaggtacagcttcaaaaggggtgcttggagggagccttccttaccatggcttaaaagccagggtacatgcagattttcagagataagacaccactattgctcttgactgactagtcctacttgggacactgagtttgaaccattgcgctgttagattgcactctgcatttcttacagaggcgggaggaacctaaggggctattc

SEQ ID NO: 89317 - DNA, 281 bp, Glycine max
  Clone ID: PAT_MRT3847_51661C.1
tttttcttccatcttcctcttggagaagcagactaattacactctttgaatccccagtccaaaggtcaccagcaaaacctggctggcccgcaaaggttgcctccttccttctttgggatcagatgcaaaaaaaccgattgacatgtgggtgagatgaacgactacaggctccctggaagctaggactaccgtggccagaatcgattgacttggccaagcggttaatggtgccttgtgaacaacgggacggccttttaaaaggtaaaaatcaccctttattg

SEQ ID NO: 89318 - DNA, 382 bp, Glycine max
  Clone ID: PAT_MRT3847_51662C.1
ccgaaccataatcaaagcacgtgaccctcccaagatagagttccaacacaccgagtttgccgaaatagaagacatatcaaacactaaaaaactctacgaggaagaaaacatgctctacagatccttgtgcttcgacactgagaagctcgacatgctcaagaaaaaggccacagaagatggggttttggaaaagtgctccacttttgaagcactctcaggttttgtatggagggctcgaactgcagcattaggaatgcaacctgatcaacaaacgaagcttctgtttgcggttgatggaaggaaaagatctgtgccaccaataccaaaagggtactttgggaatgctattgtgttgacaaattcgttgtgtaatgctggggag

SEQ ID NO: 89319 - DNA, 267 bp, Glycine max
  Clone ID: PAT_MRT3847_51663C.1
gcgcaagctgatcattaatttaacttgtatgataactttaggatcatcagccattcaaccactgatcaacggccgccgattcttctggaatgataacactgaggatggaagtccatacacagatataagatgccggagaaattcaatattacacattgtttttttttattattgaattattcccctataggagtcagtgctgggatgctgcttatgggtgtggctgaactatgggaggctgatatattatcataagttgctttccct

SEQ ID NO: 89320 - DNA, 153 bp, Glycine max
  Clone ID: PAT_MRT3847_51664C.1
aattcggctcgagtattgccgccaacccaacaacactctttgatgatggcatctcattcaccgcggattttatcagtgaggggaagggccttggcttcttgttcctttcaaggagaaggggtttctattgttcaaggagcttccataggaatt

SEQ ID NO: 89321 - DNA, 323 bp, Glycine max
  Clone ID: PAT_MRT3847_51665C.1
agcgaacatgctgccgccgatatccccgtagccctgctcccactatatcactctgtgggcttttcattcatcttcttcttcttcttcttaggaaacaaattaagccaaagccaagccaagtgatcacaaggtattactattagtattatatactacttcttctgcctcaagctagggggaccaagaaaaataaaatactagtacaacttattaataccgaaaattcatctacatatataactaatattttttatgcataagtatattaggtgtaaaattaatatattccataataaatagattaggcatttccattacaaaaa

SEQ ID NO: 89322 - DNA, 342 bp, Glycine max
  Clone ID: PAT_MRT3847_51666C.1
atgctacggctgatgacttgcctactatttgtggccctctcctcctgctgtaatcgtgcctaataccacaccttcttacatgttgttaatggtgaggacgcacacccctacagctgtccctggcaagcttccctacactacgataagaatggagcactataccctacctttggcggtagtcttatggaccacgactgggtaataaacgatggccaccgcatgtcgagatattttacctacctgctattgttactctagtataaccctgctctggaagagagcttctaactggtgatccgcataaatgcagacgacctttttgtgcaccctctattgtatttc

SEQ ID NO: 89323 - DNA, 2116 bp, Glycine max
  Clone ID: PAT_MRT3847_51667C.1
cgccccgatactttctcctccctctgtccccttttttctttcccggtcctcaacctccccccaccctttccttcttcctccacccacctccacccccctccgcccgccgctcccctctccgtgcgccccttccctccgcgcgccgctcctcggagccttattgcagcaaatagggagaggaaatgggccttagaggaaataggaacaaatatgaaacacaactggctcaaagaaatttcaaaagcaatgatactcagaatcacatacaggaacaaaacaccatgaaaatttcatggaactttattcacgagcaagggagcaagaagaggagatcctctccctccgtgaacagattggcattgcctgtatgaaggaactgcagctgttgaatgagaaatgcaaactagagaggcaattctctgaactaagaatggcagttgatgagaagcaaaatgaagccatctcatccgcttctaatgatttggttcaaagaaaaggttatcttgaagaaaatttaaaacttgctcatgatttgaaagctgtagatgatgagagatacatcttcatgtcatctatgctggggttgctcgctgaatatggcctttggcctcgtgttatgaatgcctcttcaatatccagctgtgtaaagcatttacatgatcaattacaatggaggattcgaagttcacatgatagaatgggagagttaacttctgttctagaaagccgtgctgataatggtaatcacgttgttgaaagtccaggttctggaaatttgacaagtcacactcataatgatttcatgtttcagcataacttcccccagcaaaatcttattgggaatgaacaaagccatcaaccaatgagcaatgttgcaggatatatgcacccagctcttcattctgatgtaaactggggattaaaaacattcaactatcagcagacttctaacgctgatagggggatatcttctttcccacacgcatcaattgataaaattggagtgcaggacaaaaacatggaaagaaattttggcaatggcaacttttatcaacatccacctgatttggatgagactgcttcctctgtttctgaggacggccctggcattgagaattttcaagtttctggtgatgctattcctggagaaaagcttcttggatgtggatatccagtccgtggaacttctctttgtatgtttcagtgggttcggcatcttgaggatggcactagacaatacattgaaggagctacaaatccagagtatgttgttacagctgatgatgttgataaattgatagcagttgaatgtattccaatggatgataaaggccgtcagggggaactggtgaagctttttgctaatgatcagaacaaaataacgtgtgactcagaattggccctggtgtccggccctcttctgtcgcatcctgacgcctctcccagtcttctccgtctgagggattcttccgagaattgggaacaagcaactctattcttaagacgatcaggatatcaaattaagattaatggtactgaagctacagtagttgatgagaaattctcaaaggaattatcgattaaggttccatgtggtctctctgcgcaatttgtgttaacaagctcaaatgggtcttctcatcctctaagcacatatagcgtcagaatgcgagacacacttgtgttaaccatgcgactcttccagagtaaggcattggatgacaaaaggaaagggagagcatgacctcagattttgtatgaatggaagaaaataagttactgagcaaacatttagtctcatttataatttttttttatatagtaatatctggaatcccatgtctagtgtcctgttgtaaaagcaaaagtttgtagaggccaagaaagtgtaacatgggaagaaatcgaaaatagtgtgttaacattttttttttctaagttacaatgtaacgatgtatgcctgtgaatgtggggggaaagttgcattattagttaaatgagtgttatagattcagcgtataaacccacttttatttgttcaagatttatctgtaagtacagaaataaagattttgtagcttcaaaatttctttaaaatattaagtctcattttgtt

SEQ ID NO: 89324 - DNA, 257 bp, Glycine max
  unsure (1)..(257): unsure at all n locations
  Clone ID: PAT_MRT3847_51668C.1
gcttcttcactttctctcgtttcaatcgaaaaaaatcatgggcagaaaattcttcgtcggtggcaactggaaatgcaatgggaccactgaggaggtgaagaagattgtnactacnttaaatgaagctaaaagtccctggaggaagatgttgtagaagttggttgtgaagcccctccctntttggtgtgcttncctttntgtaaaaaanttgctgcgncctgattttcccngntctcggcccaaaattgtgggttcgc

SEQ ID NO: 89325 - DNA, 386 bp, Glycine max
  unsure (1)..(386): unsure at all n locations
  Clone ID: PAT_MRT3847_51669C.1
tttttatttttttttntttntttttttttttttttgttggttttttttaaattttttagtggtttaaaaaatttttttttttttttttttttttttctttttttttgggggggaccaccccccggggaccccgtgtccgggcccccggggggcgcacttaaaaaatttgagttccttggccccccaaacccccgggtttgtgtttttcccgaggaccaagaggcccggccccccgggcccccggggaatcccctccctccccacgggggaggaaaaaacaagttcccggggcaatttgtttgggaggcttacccaatggtccttccccaggttcacctccggaaaccttgtgaccacctttccttcctctaaaaaaaaagggttaa

SEQ ID NO: 89326 - DNA, 2060 bp, Glycine max
  Clone ID: PAT_MRT3847_5166C.1
aagaaaacagtgttaaaagcgaggcagacgaagagtgaaactgtggaagcagttgcagaccgagctagctagctagcaagcaagcacagagatggaggcaaagcgaggccatgccctcatgtgcttggcacgtgtttcactcttcctctgcgctctaaccctatccgctgctcacggaagcaccacggttcaagacatcgcgagaaagttgaaactcggggacaacgagcttctgcgcacggagaagaagttcaaggttttcatggagaattacgggaggagctactccacagaggaggagtatttgcgccgtttggggattttcgcccagaacatggtcagagcggcggagcatcaggcgctggaccccaccgccgtccacggcgtcacgcagttctccgatctcaccgaggacgagtttgagaagctctacactggcgtcaatggcggcttcccgtcatcgaataatgccgccggcggtattgcgccgccgttggaggtggacgggctgccggagaattttgattggagagagaaaggagctgtcaccgaagttaagttacagatacagggtagatgtggatcatgctgggctttcagcaccacaggatctatagaaggagccaattttcttgccaccggaaagctcgtcagtcttagtgaacaacagctccttgactgtgacaacaagtgtgacataacagaaaagacttcatgtgacaatgggtgtaatggaggtcttatgacaaatgcctacaattatttgctcgagtctggtgggttggaggaggagtcttcatatccctacactggggagagaggtgaatgcaagtttgatccagagaaaatagcagttaagatcacaaatttcaccaatatccctgctgatgagaaccaaattgccgcatatttagtaaaaaatggtccacttgctatgggcgtgaatgcaattttcatgcaaacatacattggtggtgtctcatgccctctcatatgtagcaagaaaaggctgaaccatggtgtgttacttgtgggatatggtgcaaaaggcttctcaattcttaggcttggcaacaaaccatactggatcatcaagaattcgtggggggagaaatggggagaagatggctattacaagctctgcagagggcatggcatgtgtggaataaacactatggtttctgctgcaatggtgcctcaaccacaaacaacacctacaaagaattatgcttcttattagctatgcacttaaggaaatctaaataaatatttttcattctaggtgatgtatcatgtatgtaccaaaatattttggtacgtaagtcttttaaaaagtttgcatctcctctttggttttccttagttctgaaagttatctcctaagaagacaatcatatgtactgtacgtagtgtgaagatatagtattgtatgctgcagaatatgattgtctaataaggtggactagctgtaataaaagatatttccaggttgaaaacagagcaaatcatgttaaagagctataacattttctgcaggttagaaaaaaaaaaaaaaaaaaaaaaaaaaaaaaaaaaaaaaaaaaaaaaaaaaaaaaaaaaaaaaaaaaaaaaaaaaaaaaaaaaaaaaaaaaaaaaaaaaaaaaaaaaaaaaaaaaaaaaaaaaaaaaaaaaaaaaaaaaagggggggcccctttaaaagaaccaaattttactccccggggctggcaaggtaaaattttttttttggggcccccaaattaaattcccgggcccgggttttaaaaacgggggaaggggaaaaccccgggggtccccaaattaaaccccttggaaaaaaacccccttttccccagtggggaaaaaaaaaaaaagcccccccccaatcccctttccaaaaatttgcccaccctaatgggaaaagggaccccccccttaaccggcctttaaaccccgggggggggggggttccccccaaggggacccgttacctttgccggccccttaagccccggtcttttggttttttccctttcttttttcccccctttcggggttttccc

SEQ ID NO: 89327 - DNA, 317 bp, Glycine max
  unsure (1)..(317): unsure at all n locations
  Clone ID: PAT_MRT3847_51670C.1
cacgaatatggagatgcctggagcgaagcgcaaaaaacacatnacacatgctgggatagcatgacctcattacagggggggggcatttctctgactccgcccatgcaaggaaacaaaaatggaatgctgtgggaagatcaggggaagtgagctcattaacgagaatgtgctgtaaacactggtgcaaacccttctggtgaaggtggaggacaagattaaagagacaatgatgcacttcataaagttgctgacattggtcacacatgcaaacttgaggagcaacccgcattggataaaaaggagtttgtgaccttaat

SEQ ID NO: 89328 - DNA, 2681 bp, Glycine max
  unsure (1)..(2681): unsure at all n locations
  Clone ID: PAT_MRT3847_51671C.1
ccgattcatgaataacaggaaatagagacaccttccaaaatggttatcaatcaaatctttcatctgctaaccctagagatcagctagtggaattgccttctaatgtacaagggttgccgacacttgaagcattaagcactgtcttgcatcgtgcagaacagttacttggactgttgctgaggccttggaacgaaaatttacgaagttcttctaggggtgaaacactatcaaaaccagaaaaaggacaagatattccggctggccgaacaatgttgacactgcgtatgggacagtcttctgcagaatctgttgttaacgctggaccagcagtttacatgatctccatcagggccaaatccaataatggtgcagccttttccacttcagacaagctccctctttggtggtccagttcccccctcaactcctgcaactttaggcaccattggaattggaaatgctcctaggaacgtaaacattcatatacatgctgggtacctctcttgcaccaattgtttcagccattggttctgagggaaaataatggcgaggggacaagaagtgaacaccataatgagcctggctctggtgattcaggttcaacacgggttattacctgttagaaatgtcatagcagcaactatcccatcacaccctcctggtgttggagtctctagtagcacacaaactgggtttggtatttctacctcacagccaccttctgattcagcttcattgtcatctgttttagctgaaatcaattctcgccttagaaacgttgttggtaatatgcaaggagataacacagttccatcgggtcaaatggaatcaaacagcagggacttgtcttctggatctgaatcaagacctcctacagtaaacaaacagcaggataacgtggacgtgaatggtttttgcggcatcagtgcttcctcagttggctgcacttctgaaagtgaagtacagaagctccaaatcgaggtagtgcaaacctcaagtaatgttttggttgacaaatttgtttcaagttcttccaaccaagatttacaaagttgttctagtggagaaacaatagtaaaaccagaaatagaacaagatgttctggctgtaagtgaaagacaaaatgtaactgaacctgccaaagctgctccactaggattgggtgtgggtggtttagagcgcaagaggcgaactagacttcaacctcctgtaagtaaaggtgctgatgatggatcatccagttcttctgtcaatcaaaatcagcaaaccagaacagatggtcaacatatattgcaaactcttgcaagtcatggatccggtttgaattcaagaaatgctaatgggccatcccagcggcccttgccctccagtgatcgtccaattgatgtggctggtttaatgtctcaggctttacatagtcctgccttgaatggtttgttggaaggagtttcacagcaaactggagttgactcacctgatggcctgaggaatatgttgcatcagttcacccagagcccgcagatgatgaacacggttaatcaaattgtccaacaggttggcagtcaggatgtggggaatatgtttgctggaacggaaagagggcagggtggtggtattgacatttcaaggatgtttcaacagatgatgcccattgtatctcgagcccttggtgggggaaatccttcctcactattctctgctgaagaagctgaaccccatgcaccctaccgagatggaacagttgacagagatgaatattctgataatcaaagtttacagctttaccttcaaccactggctgagaggattgagcacctgggtccttctactgatattttccgtgctgtagctgaaattgctgtccagctatctggcagtggaagcacttctaatgatcttctggatgagttgtgcagcaatgagagtcttgccagggaatatgtagatatgttgcgatttgatgtaagtaagctgctcgagggacattctgaaacggacaatgtctaattttagcttgtatgaatacatatgcttcattgcttctattgtgttgcaaatctcaaccttcctgaaagtccttctattgtgtcccaaatcttaaccttcccgaaagtccttctagagaacgagttttgcgtgtcgtgccctgaataattaatcattttgacggacttccagatcatgtgagaaaattagcatacaccacatgccagacggttgtttcaaatgtagcattgaggcgtttaatggccttccattgttatattttttatgccccctttctgattataccctcgtttgggcttatttcggacagtgtggaggcttctatcaaatagtcttgtacatctagcgcttccattattttattttcagtgctaaatgactgaaattgattgcattaatttttttttttgggtgggagggggtgggaggtgttgaattgctcattccttaggacaaggggattttcttgacccgacatcattatccatcaaataaattttgccctttctaatgcaaattgagaatctgtttgttttcccctgtaattctcccatttactaatatccatgttccccttaatgataaaaacatctttttattatctgcaactataaaatgttttttacaagtattaatacattattgttttttttaaaaaaaaaaaacccnncccc

SEQ ID NO: 89329 - DNA, 658 bp, Glycine max
  unsure (1)..(658): unsure at all n locations
  Clone ID: PAT_MRT3847_51672C.1
tgtgatggaacaattaccagagatgaatattctgataatcaaagtttacagcttgaccttcaaccactggctgagaggattgagcacctgggtccttctactgatattttccgtgctgtagctgaaaatgctgtccagctatctgagttcagatcgcgatctagaactagtctggatgagttgtgcagcaatgagagtcttgccagggaatatgtagatatgttgcgatgtgatgtaagtaagctgctcaaggaacattctgagacgaacaatgtctaattttagcttgtatgaatacatatgcttcattgcttctattgtctcgcaactcttgaccttcctgaaagtccttctagagaatgggttttggcgtgttgtgccctgaataattaattgatcattaattggtctggatcattttgacggacttccagatcatgtgagaaaattaacatacaccacatgccagacggttgtttcaaatgtagcatttaggcgtttaatggccttccattgttatatatttttatgtcctttctgattataccctcgtttgggcttaatttggacagtgaaggcttctatcaaaatagtcttgtacatctagcgtttccattatatgcaagtcaaccagtgtgtttgttttcacctgttccna

SEQ ID NO: 89330 - DNA, 140 bp, Glycine max
  Clone ID: PAT_MRT3847_51673C.1
gcagctcccacaagaaccagacagggacgagggggaagtagcaggtcagaggtaccgtgtgggctatgtccgcgaaggcaagacagtcgaaagcttgcattcaaccctcacgccgcgatcacgccaaacaagacaggcat

SEQ ID NO: 89331 - DNA, 516 bp, Glycine max
  Clone ID: PAT_MRT3847_51674C.1
acgagcttccctgaattgacaacaaaacatctactattgacgccattctgagatctaagaacaccaatgtctgtttctgaacgtgttgttcatttggctttcctcccaagtgctgggattggccatcttaacccatgtcttagaatagcagcactgttcctccgctatggttgcaaagtcactctcatcactcccaaacccacagtctctctcgctgaatcaaacctcatctctcgcttctgttcttccttccctcaccaagttacccgaacagacttaaatctcatccctttggatccaaccacagttaacaccagtgaccctttttggcttcagtttgaaaccattcgtcgttcggttcaccttctagctccaatcctatcttcactttcaacacctctctctgctttcatttacgatgttagcttaatttcacctctaattccagtcactgagaaactcacttgtccgtcttacatttacttcacctcatcagctagaatgctctcttttttc

SEQ ID NO: 89332 - DNA, 278 bp, Glycine max
  Clone ID: PAT_MRT3847_51675C.1
ataatgtaattatatcgaaagagtaaaaaaaaaaacatcttcttgatactattttttgaaacaaatgtgatcattaggaatgccggataaataaacaattgttttatctacggcactctttatgaaatccaagctatctttccgcaggcgtatgcccgtaatccaatcgctggatcgaattgactataaaaacatgggtttaatcagccgatttattattgaacatggaaaaatattatccaaacgcctaaattgattgatcttagagcacaacgatt

SEQ ID NO: 89333 - DNA, 455 bp, Glycine max
  Clone ID: PAT_MRT3847_51676C.1
ctgggggctggctaacaatgcttggtgtgtctccaatctccatttgctccgattcgaaacgcaaacgcgatgggaaggtttacgtttgatgcagtcgtctccttgttcgttacggtgcacccgcacgagacctctgctttgctccattccttcttctgcttcttcttcattttgagtgcgtatttcgtagttcttccgttgcgcgatgagggtgccatctcattggggttatcaaatctgccgggtctatttgtggggtccctggtgctcaccctcattgctgcacccttttcttctctcatattctctctacctaacctttccaaaggttctttagtgtatccctcatattgttctttattctatggcactcttcatcagctggatattcaaagtccaatatcacaggatccacacccttgaccttttcctcaaggaagaagggaaaatggtgc

SEQ ID NO: 89334 - DNA, 284 bp, Glycine max
  Clone ID: PAT_MRT3847_51677C.1
ttcatgtactgcgtttcggaatcagacacagatttatcgtactgagcaaagcgctcataagttcacaggatgaaaggctcctacgaagcatcttgcaaccaaggctgcacgtaagtctgcaccaactactggtgttgtgaataagccccatcgtattcgtcctggtaccgttgctcttcgtgagattaggaaataccataagagtaccgagcttttgatccgtaagctccccttccacaggctgattcgtgaaattgctcatgacttcaagactgatctgcatt

SEQ ID NO: 89335 - DNA, 446 bp, Glycine max
  Clone ID: PAT_MRT3847_51678C.1
ggtttttcaaaaatcttcgtttttctctcatcccttcagaaaaatcagatttttggttcacggtgaatttgaatgatttgtgaaaatgggcctaaatttagagttgaagagccattcagagaatgttaatgcccttgcattttccagacaaagggttcttgtgccagttaaagtcaacatgggtgacgatgcttttggcgtggaaacggtgccgatcaaacaaattccttcatctggtggagatgaggatgtggaagttgatatcattgggtgttcaaatttggggaaaccttttctgatggaagattcttgtgaggattcccccgagtgttccagctcttttggtgattcacgatctggtgctgagaatgcctcatcctttagcgatactgaagttgaatcacgaaagtgtgctgacgatccatcctcatcaaagtgtgatgact

SEQ ID NO: 89336 - DNA, 350 bp, Glycine max
  Clone ID: PAT_MRT3847_51679C.1
attttggcatggagtgagtgagcttagctattggagggtgcgagtagcccccctctagcttgtcaaggatgcttacttcctctatcttcccaaggaagttaccttccttgcttctcaaggaagcttctcatgtgctaggctataaatagaaacatgtataacatttgctataattttaaagaatgaaaaacttatgagatacaattcaaagtttaactgtttttcctaatctgcttcaatacttatgtcccttctctctcatttttttcctccattgaaacttccttttaaagctcttattcaagggactcttttgggggggaaacctctttttccatggcctattcttc

SEQ ID NO: 89337 - DNA, 336 bp, Glycine max
  Clone ID: PAT_MRT3847_5167C.1
ccggccgaccacgcgtcagccaacgcgtccgggtagacgcacggatgtatgatctaccgcaggagagcctccggcagctgttctgcacgctgccattgatggacagcgagatgtgccgcgtagtcttgaaagtcctcatgcaactgctgtcaggacatgcgttccacgaggtccacaccagcgcccatctatagatccagcgcctgcaccaccgcaatcgttatcacaccgcttggcaaatcgctctacacgtcttctactcatcgatccaattatggttcgacatcctcctcgacctcatccctgtccacgtccctatctccgtcgacgtcttcc

SEQ ID NO: 89338 - DNA, 298 bp, Glycine max
  Clone ID: PAT_MRT3847_51680C.1
tttttctaaaaaacataattatattattaactagaatatccaattatattaattaggatacacattaactgcaacaatatagtatcgttggatacacaactttgcttactccagatatttttaggaggggcggtggataaatatggagcagcagaagataaacttaagactcttaattcttaaggctggtgaccaagaagtgatggtctgtaaaacacatggctttgggcaatctcaatacggtcacgaggatcattcattgtctcatctcgcaatgcttgaagaattgcctctactg

SEQ ID NO: 89339 - DNA, 394 bp, Glycine max
  Clone ID: PAT_MRT3847_51681C.1
cggagttttggtatgcagagggaggaagccaggcagaagggaggagggacacaaattcacagcatagcaaaagatggtggcttccatcaccccaagtaccaaaaactggtctttctgatactgaaaggaaaaggttgcttcatcagggtagggtggtacggcaagtattcaaggctgccaaagctatcaatgaaagtgtgttgcttgaaatgcccgtgccatctattattaaagatgcacttgcaaaggtgataattttgtaatgttgaataacttcattcaattaaaactatgtacattttatgattttatcctgagcaacttcaatgtagttaaagcatttaattgttgacactgaatatgagcttgagctcttgaacaagaaaattgcatc

SEQ ID NO: 89340 - DNA, 860 bp, Glycine max
  Clone ID: PAT_MRT3847_51682C.1
tagccatgatcaaatttcaagtatgtttggattattgcattctgacttccatgaggagagggctgtggcagttcttgagtacatgtcctccatggtggccagtgtagacccgtatcatcattctgcagatggtcagaaaaggtgtttagagagttccttatatgatcaaaactttaccaagggaaaatttaatgtcaggttcaaacgcagaaatgggcgagttagagtaacgtgtgaagaatttaaagttgagcctggaggaatcagcttcttatctgtttcatcagtagatggaaccgtcattgcaggcatagtgccaaaggtgcagttcaatctccagctgtcagagaaggagcgaattgataggtcaaatgttgtgcttccttttgaacaccagggaaatggtaaaccaatacaaatttatgatggtagaagatcccttgaagagagcaacagtgaggcaaatcccatttcaagtggtaaaaaggaggattctgccatgggtgaaattatatattttcgtgattcagatgatgagatgccagattctgatgaggacccggatgatgatttagatatatgaatatactcttgttggtaacttttgtatccctaggtgacatgaaaggatagattaggtttatgactgaacaaaatgggaaaaaaataatctgatactgtttaattgcttagaagtgaaatgcagtgtgcatcacattccaaaatattgtacaacctactgaggaacctgacttagtttggacgattttgagaatgtttctgtctagcgctagtctctacaaaccttactcttgcttcagctggcaatagaacttttaaaataagtgtttttagtccct

SEQ ID NO: 89341 - DNA, 499 bp, Glycine max
  Clone ID: PAT_MRT3847_51683C.1
cggttttcgtgggaaaaattgtagaggttagggaagtaagaagagtgaagaacactcgtcattttcctttacatgattcgcatctgcactccgtttccattggtgtgattgtgaatgggggactccaaacgatggacggtgacctacacaaaacacatcaagcagaaacgcaaggtgtatcaggatggattcctagagctccacgtttccaccagcaaggttaagctgtatgatgagtgcgagaaattgttggagtgtcggctcttgaagaacgacgaaattgttacctctggtgaaacgttgattttcaatggttaccttgttgacattggcgatcccgagggaggcaacaagccctgaatctgatttgaatgctgattggaaactcaagaattattcgagattcaggactccttctgatggtgcgaaaaattccaaaatgaatgagaaggagatatgttgacaagtgccaagaccttttagtcattacaaaaagttt

SEQ ID NO: 89342 - DNA, 2253 bp, Glycine max
  Clone ID: PAT_MRT3847_51684C.1
tccggctccaattagcctcactctccttctgctgaaccactattacaccctgtaagctacaattagacaatacctactcaaaacattccctttcactacagaacaatgctatctcaggtgtatgcataatttgagtgttgaaaatggcttatggtaatgttgtaatgtcaatgttgatcaaggactcagagtaagagttactgtagccgcagtgagtcagtgatctatcgtactagactttgtgctcaaacattttctgtggggtagtgaagaggtaagaaattgaaggggatgttgatgatgaaaaaaagactaacatgctgcacaagggaaaggaaatttagcatcgatcatgatgagcaagagaagattatgacatataatggccttgagtgttgcattatgaacaaccactcttacaaagataacagatgaatttaaagaggagatgattgcaaaacagattcatttgatgatgacaactccagctcctcattcaaaaatgatgcttttgtacgattatcatacgactgattgacaatgaaaagggatgataaaggacttgaagaatgggaactctcgtaaagtcctcaacatttttgtgtcaaagagaagccttatgctattcaacattcagatatagacgccatgaaggataaattttcaaagcttttgctaggtgaagatgttacaggaggaaatacgggcctcagtacagctttggcactgtctagtgccatcacaaacctagcagtgacggtttttggtgagctgtggaaattggaaccactatctgaagaaaggaagagaaaatggcaaagagaaatggactggttattgtctcctaccaactatatggtcgagctagttcctgctaagcaaagcagttccaatggtggcatttttgagataatgaccccaaaagctcgtgcagacatccatatgaatcttcccgcacttcagaagttggactctatgcttattgaaacactagatttgatgatgaatacggagttttggtatgcagagggaggaagccaggcagaagggaggagggacacaaattcacagcatagcaaaagatggtggcttccatcaccccaagtaccaaaaactggtctttctgatactgaaaggaaaaggttgcttcatcagggtagggtggtacggcaagtattcaaggctgccaaagctatcaatgaaagtgtgttgcttgaaatgcccgtgccatctattattaaagatgcacttgcaaagtctggaaaggcaaaccttggacaggaattgcacaaggttttgatggctgaatcaagctctggagaagacatgcttaaatatctcaacttgaaatctgaacatcttgtccttgagactgttaatagactggaagctgctatattttcatggaaagagagaattacaggacaagttagtggcaaatcccctgttcgatcctcatggtcgccttttgtgaaggatcctatgtcagaggttgataaactggagttattattggaccgtgcagaaacactactacagctgattaaaatcagatatccaaaccttcctcaaacatttctggatgctaccaaagttcaatatggcaaggatattggacattccattttggaagcatattccagagttcttggaaatttagccttcagcatagtgtctagaataggagatgtattgcaggaggattctttaagcaatcctaattcacctgtgtcgataaattgctctcctgggataaatctctctcaaacttgggtggtcggttcacatatcaggcagtccttacttgataagatcaacaaggcagatggacaatattgtgattctagctgctatacttctgatttagaactttcttctatcgatacaaaatccagttctgtaatagttacaccaaacaggagtactgtctggtgcattagtagagaggcttgtaaaagtgtgtctcctcaaaattctccttagtttattagcttttgtttggccacttttgtaaatgttattgttattactacatggcatgcttagtaagaaaagaagcaaactgataggtttgccttccattatattttggttgcttttataactaactatacgcaaaaaaaaaaaaaaaaaaaaaaaaaaaaaagcggccgctctataggatcgctgtacgaaggtgataattttgtaatggtgaataacttcattcaattaaaactatgtacattttatgattttatcctgagcaacttc

SEQ ID NO: 89343 - DNA, 250 bp, Glycine max
  Clone ID: PAT_MRT3847_51685C.1
gcgaagagcgttcgagtagtgagcgaaagaggttttctttcttctttccggttgttgtcgcggcggaaccctagctactccggtggtgcgacaaagggtgtgtgagagagaaagggtgtgtgagagagaaagcgagagagaaagacagtgacgatgagtgggaagggcggtggcaaggcgctgtcggcgacgattccagcgtcgtcgcggaagatggttcagagcttgaaggagattgtctcaaatttcc

SEQ ID NO: 89344 - DNA, 526 bp, Glycine max
  unsure (1)..(526): unsure at all n locations
  Clone ID: PAT_MRT3847_51686C.1
agtggatctggacagaaaccccatgaaagcacttacaatctgcatgatcagcactaacagcttcataagctcacatctctacaaaaanctcatgtccaaaacccctcacaccatcctcgccctcgacatctacaacgacaagatcaaacacctgctcaaaccctccaattccccctagaccaaccacatcaccttccaccacctcaacatcaaacacaactctcacctcaaaagcctcatcaagataacagatctcactattaatctaactaccatttacactcccacaaattacaacacccgccctctcaacaccatttacancaatttcatcgacgcactccccgtaataaaatactatgccgaaaacaacaagcaccttatccatttctctacttacnaagtataccaaaaaacgattagancctgtctccctaaagatagtcctgttcgtaaagatccggcgtactatgtgcttaaagaagacgattctccttacagtttgagttctattaaaaaacagaag

SEQ ID NO: 89345 - DNA, 504 bp, Glycine max
  Clone ID: PAT_MRT3847_51687C.1
tacggctgcgagaagacgacagaaggggatagatcatttgttaaagttcatgcattgtatggatttggcatatgcagcggcagacttaattgtttctagagcgggcgcaatgacttgctatgaaatatcggcaactgggaaaccatctatcctgatgccctcgccaaatttctctgaggggaatcaattcagaaatgcttccttgatggcagacgtagctggtgtgactgttattactgaggatgagctagactcaagtactctagcccttgcaattgaaaagattgtaagtatgtagtcttcatcttcaaagtgtctgttaacaattttagttttggaaatcattccaaaatctttcgtgaatcatgccatatgctttgataaaaaaaaaaaaaaactaaatcaccaaattactgtctttgtcatgtcacttttgtcataaaatcttttaatggaaaatcagaaagataaagttgcattaagattactaatatagaagatctc

SEQ ID NO: 89346 - DNA, 313 bp, Glycine max
  Clone ID: PAT_MRT3847_51688C.1
ggtatcgttttaggctcttgtactactagtactgctgctgatgaacaggatgttgagcttgccacaatcaggctataataatgcagtgtcggacttggtatcataggggaggacccttttcgtagcttgaaatcctctccacatcttatttgcgtctccctggaggaatggccctggccattaactgtgatcttgatgactcatgaccatgttgcgttatttctgagcctgcgcagcacgatgcttgtctccggggagatcttacctagaagggcttcaagtcagtgctctggtgagacaccttacgagtacc

SEQ ID NO: 89347 - DNA, 244 bp, Glycine max
  Clone ID: PAT_MRT3847_51689C.1
ctcgaatggccgaggcttgacgctggaggtggcgtcattcctcgtggaggtcctgggggcaagaaggcgcgtgcaggactgcttgcgagtcctggcgtacgcgcgggagcagggcatccgtcctcgcatccagtcgtactcgagtgcaattggctgctgctacagggaggaggagtttggccacgctctgcgtatgttcgaagtcatgcgaaacgatggatatatcccgcagaccgtgacgtac

SEQ ID NO: 89348 - DNA, 200 bp, Glycine max
  Clone ID: PAT_MRT3847_5168C.1
gggggaaagaaagatagtaaagaagaggaccacctaggaattgggattcaaaccctactacctaggtatatttactaatgaatttcccaataagcaattatgagttttgtacacaactaaaacaagtagtatgttactggtaatggaagatgtgaagattcctcgacttatgttgaagtcaatatactttacctaaggca

SEQ ID NO: 89349 - DNA, 246 bp, Glycine max
  Clone ID: PAT_MRT3847_51690C.1
aagaaagcggccccattctgttgaaagcacatcccaatccttccgcgcagggcagtgtcagtgacttatctaaaatcaggtaactccaagagaacacagatcatagagagtgaatggtttcgcatgtggacatcttgctgtacggcgtgggaagtttcgtggtggcgtggatggcattgcaggtggcgtgtcaggagcagctggtctacgtccctgacattcctgatctcagcaagtcccacgcca

SEQ ID NO: 89350 - DNA, 237 bp, Glycine max
  Clone ID: PAT_MRT3847_51691C.1
tgtcctgtcggctcggagaaatggcccagcctatggctgggagtcctctgtggtgtgctgggctcttgtgggatggctgggtcggcgctggtttggcgtggcgcggggggggagcggcgtgttgctttggtgtgtgcggtttcctggggcgttcgggggttgctgcttctgggtggtgagttccgtttcgcctgcggtgtgtttccgcgtctgtgtgtgtgtggctgtttctggtcg

SEQ ID NO: 89351 - DNA, 290 bp, Glycine max
  unsure (1)..(290): unsure at all n locations
  Clone ID: PAT_MRT3847_51692C.1
gcttctngcaccaaaactgcatattttaaggggggctctctacctgttgattcttatccatactcattctacaaacacaaaactatcaaaagattctataaacacaagggaaaaaataaatcgttgcacaattaacaattcacttataaaaacctcacacttctcttcaaatattctacactaaaacctaccctgctttaccacgattcaaattaacatacttcttaatcacacacacagatattaatttatccccaaccatccatatttttatcactcccattcagatt

SEQ ID NO: 89352 - DNA, 571 bp, Glycine max
  Clone ID: PAT_MRT3847_51693C.1
taagtaaatcccataaaaaaattatcattttatttcagtgaccaactattaattgtggctcgaacatcaaaggttctagcttagttcagtgagtaagcatgcatcatgttgtagattctctcacaccgtttttacttttcacatataaacaaaattgtggctcgattacattggtaggaggagatatgtgaatcaaaataaaaataaattaggtattagtgcgaaagggtgaaaatgtttgtggttgcagttagagaaggtggggaaatggaagagaaatactcaaacctggaaatttcggaggagagcccaaattcaggggtgttctttcttatcttaaatcgcccgtcacgacctgagctctgcatgcactggatcacaaccagagaggtgcacgtgatcgtcttgtcgagcgccggggcccactgctgctccggcatcgacatctccctcctgggatcaaccgccgcgaattcggggccccccggcccgagttcccggcgatgcaagacgcggtaacggccctggaacggtgccgtaagccggtgactgcaagcatacagggggcgtg

SEQ ID NO: 89353 - DNA, 384 bp, Glycine max
  Clone ID: PAT_MRT3847_51694C.1
acctgtacgtggaatctaaatggccactcttagcctcggcatggccaggacatgtctgagtgctgccgctgattatcgcagacgaagcaactggaaatggaacatacgcataattgagtgtgtcgcatgagacccggaaggcatgcttggtccactccaaactagcaacctagccagcatcgagtttaagagtcgcattgagagagacgcacatgcacatgaagccttacaacgtcatagatctagaagagaaagaacgccatcaatccattgcacaatcatagtcatttacctatacgttgcaagacctcattggatacttccttggcactgaaacttacgagattgagactgagattgctagaatgataccaagattgaatg

SEQ ID NO: 89354 - DNA, 523 bp, Glycine max
  Clone ID: PAT_MRT3847_51695C.1
ccacgcgtccgaagagacctgctttacttgcccaatagcttattgatctggctcttcactgactgaaaactgtgtggaacatgctcatagccctggcttggtgcacattgaatacattggcatatcaagctgtactatggctcttactacatcactgtgtgagccagaagagttatatcacatgctaggatgacagaagtatgctagcaaatgtagattgattttgcttttaacagacatgtcaatggatcagaatctttgcaagggtgtctgcatgacagaaatatgtgcaagaatattggcagcgagaagtcattatgcaaagcattgctgtcgaagataataacgttgctgatggggtacatacactggatagcatctcaaaagatacctctataagaaaggacatgatatcactacttaaattgataattttcacatgctctaaggtaaactaaccatgttaaaccagatactcccagtcacataacaattgttcgcctgagaaggatgatagctctat

SEQ ID NO: 89355 - DNA, 526 bp, Glycine max
  unsure (1)..(526): unsure at all n locations
  Clone ID: PAT_MRT3847_51696C.1
gtccaaattttttttccccatgttccttctttaatattttcaggcatgggtctggttaagattgctagcctcaaattgaaagccttctttgtctaacagcaattaaggatagacaataaatccttttctgcagcaaaatgtagaatgcgaataaataattttttttttccttgttttagccatactagtaagcatgaaaagagggtcatgccctttgggctgagttttcagccctcaattagagtccaagctttggttttattgaacatgttttgtgggattttctctgcaaaggtagttgagatatctctgtagtaagtgttcactttgaaaacatatttattcgtttatgtgtctcttcttttgtccatttcatgtaatcgtannnnaaaaaaaaaaaaaaaaaaaaaaaaaaaaaaaaaaaaaaaaaaaaaaaaaaaaaaaaaaaaaaaaaaaaaaaaaaaaaaaaaaaaaaaaaaaaaaaaaaaaaaaaaaaaaaaaaaaaaaaaaaaaaaaaaaagggggg

SEQ ID NO: 89356 - DNA, 231 bp, Glycine max
  Clone ID: PAT_MRT3847_51697C.1
cccacgcgtccgcccacgcgtccggttcgatatgaactttcactaaaactcttcttgccttgtctaattaatgtcatgactttagattcttgtttatttggccgtttacgtttgtagtagttgatgtaactgaaaataacaaagtacactctgttctttgctgataatgtattaaagttcatatcgaacgttaatcccacgcgtccgcccacgcgtccgtctagatcgcga

SEQ ID NO: 89357 - DNA, 268 bp, Glycine max
  Clone ID: PAT_MRT3847_51698C.1
acccacgcgtccggtcccagttaaaaaagacgcttccaccctccaatatattactcaaatcaagcgaagaagagcactcgtcgcagaaaacctagtacttgacatcggtggccagttcctgtgggtcgagtgcgagagcagcgacgtctcctccacgtaccgcgccgcagcggtctggcgccgcgcagtgctctctcgggacatccgacagctggggaaactgcgtctccgcgcgaaaagccggcggcagggacaggcgtgcggcctc

SEQ ID NO: 89358 - DNA, 428 bp, Glycine max
  unsure (1)..(428): unsure at all n locations
  Clone ID: PAT_MRT3847_51699C.1
attgtgcaagagtgttatcaaaagccacaggtgaaatagttcaggcatatttttaattgacactgaagcagtttgaccttaatgatgcagatctgatgtagcaagctagcaggctaatatgcaacatgccaaagtgaacatacttttaagatttgttaaataagcgcaatttcctcatttaatcacagttcctgctaagcaatttaaagggattttgagtgtattaggcatagctgaagatattaaaaacataacaatgagtcatttgttgccatgtatgagaactgttaggtaaaagggataaggaagaacaaatggggttcgaagaattctttgctggggcaccatgaactgaggttttaattcttgtttggtggtattctcatttttnccaactacccctccaccccccctcttttctgtttttc

SEQ ID NO: 89359 - DNA, 131 bp, Glycine max
  Clone ID: PAT_MRT3847_5169C.1
gttctctagatgccccccccgctctcaagtctcaaccatgtcttccgggaccctagagaacgagaaacctcaagtggaagatgaacaggcccaagctgaagagaaccataccaagcaagagggtgattcgg

SEQ ID NO: 89360 - DNA, 1122 bp, Glycine max
  Clone ID: PAT_MRT3847_516C.1
aattcggctcgagctcgagccgattcggctcccacggctcgaattcggctgcaggccgcggtgaggcaagggaagcaaggacgatgagtatagtatgagtaatcagattcagagtgtatagtgattctgattctttcattttccatagattagcaagcaatcgagcgagggagggagagagagagagagagagagagaatggttcgggaagtatcagagagttgcattgatagcttattgacggagatggtggcgtgctattgcaaccgattctacgcaaacaagcctgaactcgccgcacgccggatcgaggccattggatatcaggtcggtcaccagctctctgaaaggtataccatggatcggcctcggttcacggatcatctggaggccatcaagttcatctgcaaggatttctggtctgagctctttaagaagcagattgacaacttgaagacaaaccataggggtacatttgtattgcaagataataaatttcgctggcttgcacggatgtcaattgatccatccactgataatgttagtccacttgaagatattacttcacctacagctgaaagcaagacagcacaagcaatgagcatgcatctttagtacccctgtgggatcattagaggagctctttccaacttgggaattccttgtgcagtttctgcggatatatcaaaccttcctgcatgttcatttgtggtccgtataaaagcttgaagggttcatagctgtattactgatgggaggggaagcattaacattgctttgatgtctgcaagctcttttgtcgtaaaatgctcgagtggggaatgtttctttacgagatttaaactatattaaatgttgttgactgggctgtgtaggaagggctcctgaggttgtattttgataaatgaggatttggttctttcagatgcagattctatggagggtacgataatatcgaattattgtactgtggaaagactcggagaattcctatcattgtaatgttgttgctcttgtatggaatgaatgttaaccttttaaaacttgtaccacttatttgatcgccaataagttaaagaaaaaaatttttacaagcctagcttttgtttaaaaattataaaa

SEQ ID NO: 89361 - DNA, 994 bp, Glycine max
  unsure (1)..(994): unsure at all n locations
  Clone ID: PAT_MRT3847_51700C.1
gaattcggctcgagctcgagccgtgattgagatcactcggatacatgcttagaccatggtgcataagttcttgttttgactacctttggttgcataattgatgaaaagggattgctacaatgattgttgtcacacaactactcatcagagtatttgtaggaactgttacaactaatttaaaataccattaaagcttaagatggtacaggattcattgagattcacatcagccctttcagtcgcacttgcagttgtttttctagtcattgccgggctcgaggcagttgtcaagatattcagcggaggcattgcgatgcccagactcttccctgtcactactgatgtggcatcattctttagactattcactgtagttcctgtgtttgtgactgcatatatctgccactacaatgttcacagcatagacaatgaacttgaggactcctcacagatgcgaggggtagtacaaaccgcccttgttctatgctcttcagtgtacgtaatgataagcttctttgggttcctcctatttggcgaaggaactcttgatgatgtgctggccaatttcgataccaatcttggaattcctttcggttctgtgctcaatgatgctgttcgtataagctacgccgcacacctgatgcttgtatttccagttgtcttctttccattgcgtctcaacatagatggcctcctcttctctaaatcaaggcctctggttctggataacttcagatttgcatcactcactattgcccttattggtgttatcttcctgggagcaaatttcatacctagcatttgggatgctttccagtttactggagcaactgccgcagtctgtataggattcatttttccagctgccatcactcttagggaccgctacaacattgcaactaaatcagacaagattttgtgtgtcattatgatagcccttcgcagtcttctcaaacgtntgnggctatatacagnggatgcatatgcccttgat

SEQ ID NO: 89362 - DNA, 2517 bp, Glycine max
  Clone ID: PAT_MRT3847_51701C.1
aaaaaatatatctaaaataataatcttagacaaagacaatagttgtgttgtgttcagttaagggtgaaccttagcaacagcatgctcatcactattctgtgtggaacctgttaaatgtgctatagctttatttcaacttctccatggcttcttttctttccttatctcttcccaagttaaacttaataaaggcctcttcagcagctaacaccactacaacaacaacaaccactcttcccacagctgagacactcaatgagaaatttggcagaaaaggcatcaagttcttggagtctgataacactcccatagttgacttaacagtgagaaatggcagctccttgaggctgaggatacctgatgctcatgtgacatcatacaaaccaaaagttaattggaaagatgatggatttcaggaggttctttacacaattcctgcaactgaaactggcccttacaaggccaaaggtggtgttggtttggtcatgaatgaagtgctgcaacctggagccaaagggttactaccttccactttagagtggactgtaaatgatgttgactctgattccatagatgctctccaggttgaattgagctgcactagtagattctttgacatcacttacatagtgaccctctatcctgtgagtatggccacagcagttgtagctaagaacataggccccaagcctgccactctaaccaatgctattctaagccattttagattcaagaacagacgtgggacagcaattaaaggcctcagaagctgctcatatattccacatgctcctctttcttctccctttcaaatcttgactccatcagaagctaccatatctgagcctcctagatggttgtcctttggtaatgagactgaagccaagcccggcacgtggggtcagcaggctttgtctattaccctccttgagaataagatgagtagagtttatgctgcacctccaaaagaaagattaaaggcattctataacacccctccttccaagtatgaaaccattgaccagggacgtgggctatgcttcagggtgataagaatgggttttgaggatatttatttatcaagccctggttccttgtcagagaaatatggaaaggactacttcatctgcactggccctgcttcaatactggtgcctgtgactgttaatcctggggaagaatggagaggtgcacaagttattgagcatgataatttgacatgattagcttgttcaagaattcattgagaagtaagaaatcgcgtctaagatgtgaaagctataatatgactattagctgctcagtaaagatgaaaaaccacgctaaacataaaaaatctttcccttctttctttctttcttccctcctgctttttctccattttgattttttttttagttttttttcttggagcaggatttgtattgttcttccctaaaactatgtatattttgttaatttgatttatgtccaatagtcaaatactatatcaataaaagaggttacataatgcttgcatatttttcatttcaaagaaatcctaaactacattttggtgccttaaggatgaaaaatacttctcatactgtattttacattttatgcttgatatgagataaaacctattatttgagtaagaagaacaagaatgaatttgctatctattccggatttttgtggctctaaattactacgcttccaacaaataataacgctggcaccacctccctaaggcatattagcttaaaaccgaggccagtgaaatccttattatgtcattttactttgctctactgttaaagaaattcagttttcacacatggagtgcactgataataacgctctctcaaacttgatgcttccgatgctgtgaagtgtgaaccattctgataaatcttggacattatgaacatgtttgatttttcggttagagaatttattccaagtagataattaattttagataatttttaatatgttttacttttgagaagagttcaaaattggttttgaaattgatttcaagttaaaataacttttatgtttgataaaaaaattatactgaatttcatttctaatttaatattgaatttaatgtttatgtgctgacagtgtaaaataattttataacattatttaattatagactatcatttgaattactttaagataattattttgataattaataaacttattatggtgaatagtgatcaaatgactatataaaactttttacatggtcagtatataactatttttctttttaatttctaataaaaacattttaacgtgaatcacgtctttaaaatttactttaaccaaaatcaactttactaatgctcggccaaacaaactaatgttaattatgtacaaagatcacagatattatgaaaattgttccattaatcctttaatttgttatttttgttactccaattaaaaagaatattttaagattaaatatttcaaatacccttctgtcgtcttctcgcagccgctagagccgaatcctag

SEQ ID NO: 89363 - DNA, 2358 bp, Glycine max
  Clone ID: PAT_MRT3847_51702C.1
aaatgggctttggtttggtttgtttggggtcctgtggctgcacatatccaaccttaaattcggtcctcgaatctttctggtcattggttgttttttattctttcaaatattcaaacacaacccaaaatctcttgggaattgcgagattcactgcttctcctagcagcagattttgggttcttctgacccaattattcattttccccaactgggtcttgttgaatttttgttggggttgtaaattccttgttgctgagtttgaaagttatttcctttttccccttctggattcaagtcccaagtatttgctttaattggggtattttttttttatcagaattgttgctttgaggttttccaaggcttgaaatctgaaaatgacgattggtagtctagcacctaaggcagagaagaagaaatcaaggaagaacaagactgttgttgttaatgagaatgcacccttgttgccaaaaagtcatgttcaggagagtgatgctggttttgatgatttcaatggagcttcattttctggggctgtttttaacttatccaccacaattattggtgctggtatcatggccttgcctgcaaccttgaaacagttggggatgatacctggtcttcttgccatcatcatcatggctttgttgacagagaagtcaattgagcttttgattcggtttacccgggctgggaagtctgcttcttatgctggtctcatgggggattcctttgggaattatggaaaagctctggtgcagatatgtgttataatcaataacatcggtgtgctgattgtttacatgattataattggtgatgtgctctctggaacatcttcaagtggagatcatcactatggtatccttgaaggatggtttggtgtgcaatggtggacaggccggacatttgttgtactttttactacacttgccatatttgtacctcttgcgagctttaagcgaattgattcattgagattcacgtccgccctttcagtcgcacttgcagttgtttttctagtcattgccgtgggaattgctgttgtcaagatatttagtggaggcattgtgatgcccagactcttccctgtcacgactgatgtggcatcattcttcagactattcactgtagttcctgtgtttgtgactgcgtatatctgccactacaatgttcacagcatagacaatgaacttgaggactcctcacagatgcaaggggttgtacaaaccgcccttgttctatgctcttcagtgtatgtaatgattcttgatgatgtgctggccaatttcgataccaatcctggaattgatgtactttctgatttcgatactgatcttcgaattcctttcggttctgtgctcaatgatgctgttcgtataagctatgctgcacacctgatgcttgtatttccagttgtcttctttccgttgcgtctcaacatagatggtctcctcttctcaaaatcaaggcctctggttctggataacgtcagatttgcatcactcactgttgcccttattggtgttatcttcctgggagcaaatttcatacctagcatttgggatgccttccagtttactggagcaactgccgcagtctgtataggattcatttttccagctgccatcactcttagggaccgctacaacattgctactaaatcagacaagattttgtctgtcattatgatagtccttgcagtcttctcaaacgttgtggctatatacagtgatgcatatgccttgatcaagcagaacaaaacttcacgcgaatgatggccatgattttagatgagaggaactgaattgacagggttattggtcaattagaaaatcggggttttctgagaggatctgatgggttgatttgaataaacagagaagctaccctgtgtacaaatgtgcttcagaagtgttgaggccagcaacatgcgttcagcctcctttgtaattttttgccattctgttgttatagttgaagtttttattgaatattactctctttccctgattttttcttccccaaatgtaataatagaaacctttgttggcatttgtatgtatttattgtattggaaaaggaatgaattacttaaagaatgatatatagttcaagaattggacgatagaaaattgtagctttcatctattctccctccccttctcttttttcttgttctatttgttaaagaaattgaattgcagaattcaataaataataataaaaaaaaatggcccaagattctgggaagagattcctttccatcttggacaacctgtatcattctcccgaacggccttgcgggtgcagcagattttcattgcaggtgccaggttatagcttgacacattccta

SEQ ID NO: 89364 - DNA, 427 bp, Glycine max
  Clone ID: PAT_MRT3847_51703C.1
gccctttgtcaagttttagtcttcatttaccatatttttcatttttggttttattttctgaaaagagatgtattatagtaaatatgagactagatatcatctaataaaaacttaggccttaatttgtcatgttataaaattaaaaagaccaatctcttttgttatgtcaattacaccaaatttgctaaaatgcatggtatggttagtgatatgatcaatggtggattacgctacggttagcatgattgcatgaatcaacggtggagattccccaaatgaaaaagctagatggaacagcgtgctaacgtgactccaatatagaagaagagagccacactttcttttccaccattgacattctctctctcactctttccttaacatttggcaacatttgtcaactctcttcttcctttctctaactttt

SEQ ID NO: 89365 - DNA, 211 bp, Glycine max
  Clone ID: PAT_MRT3847_51704C.1
gaaagacaccacctaacttccagtgggagcaaagagtcacaattccaggattaaacccagaagagactaaagggacaaaaagaaacggacgaggtctggtgcccaacctatcctttgaaagttcccaaacacgtctgtactcattatggcgagcaactccctgattcagaataatggacaaaaagccaccgaagaaactcgcgctctacaa

SEQ ID NO: 89366 - DNA, 340 bp, Glycine max
  Clone ID: PAT_MRT3847_51705C.1
tacagctcttctataccaagctcagagccctcctacgggggggcgacttggccacctgcgggactgcacactcctgatccaacgcaccacacatctcatccacgccaggtaaagccaaagagtgatctgaacgaagtagcccaaaaagcctactgtacaccgagcgaccaatggaagagcaagcaggtcgagttgggaaggacctactcgaccagggtggtgcacaaactgcggtaaagtttctagcagttcaacctggggaaaatcagactggtcaccaaggtaaccctctccactacacaggtaggtaccaaacattcaattctaactagcttcatgc

SEQ ID NO: 89367 - DNA, 340 bp, Glycine max
  Clone ID: PAT_MRT3847_51706C.1
caagttcggtacggatgagttttgctgccgcaaccatgtttgtgagggctggcttcactacaaagtacttgcgggtcttgacaccacaatcagggttgacccacaaaatgtttttctctatcactgcaagcatattattgattctgtcagcgatttcttcagatggtggtatacttggggaggggatgttatagacacaacggcctatttcagcctcatgcttgaacccattgaccgagaatgacaagagctgttgataagagcggagagggttattggtgataacatcaaacttccttgtatatatggcatgggatgaatctgtgaaggagccgtcaca

SEQ ID NO: 89368 - DNA, 384 bp, Glycine max
  unsure (1)..(384): unsure at all n locations
  Clone ID: PAT_MRT3847_51707C.1
aatacgaatgttttaataacaaagttttttttttttcctctctttacttacttataacttttttttttttttctttaacactataaccttttctttcccgcctttcattaacaccccaaccaaaaagagggatacataaatanacctgcaaaaaaatataaaaacacaaaaaaaccacccacatactccaaaatcacaaacagaaacaaagcccaacaaaccttacaagaccccaacccttctttttgcatcacaactcagagagtttcacgcccccccacaaatttcagacacaccgctttcagttgcaaacaacccttcttttcccccccacccaaagtcctacccacaaaataaaatgcaacacccccacaaatacttgtt

SEQ ID NO: 89369 - DNA, 215 bp, Glycine max
  unsure (1)..(215): unsure at all n locations
  Clone ID: PAT_MRT3847_51708C.1
ggacggcaataccattcattcatcaacagcgatatgccgncaatgaagtttgtggtgaaaaaagcatggagcaatggtggatgtggtccggtaggaacactagagatgggaagctgcccgggacccataaagacacccggtcttcttctatctactcgtaaagggctttcttactttatcttccctgaactaattaattttcttcctttccccga

SEQ ID NO: 89370 - DNA, 365 bp, Glycine max
  Clone ID: PAT_MRT3847_51709C.1
ctcgagccgaatcggttcgagattatgataatcctcgatcactttttgccgcaccttaaaacggcaaacaaatggaatccttacttgatttcaagaatctctcaatttcttcctacttctttgtgctccgcttcttaagggaaagaaaaacactctctgtgctggccacagactttgtgaatcattttcttctccactcttagtttatttgctgaacactctcctatttgatatacgactacatgtcagatttcaacttcatatgactctctctcacgtctctgtgtaaatttcaggtcaagcatgtgaaatcttggattaatgctccctctctcctatctgggataggacttcgtgcgtagaca

SEQ ID NO: 89371 - DNA, 302 bp, Glycine max
  Clone ID: PAT_MRT3847_5170C.1
acgaggtcacgtcgtttagagaaagcaggattctccatttcagttttacaccagaatggactctaacagactctgacctcaaaagtgtataactccataacacaaaaatagttaaggctgtgttcgtttttagtggtgaagagaaatatacagaaaaataatgtgaaatttactattttacattttatctgattcaaaactttggtctcaatttatttttcttttcaccctacccaacagaacctcactcattttccacactcgcagactcagtgattcatttgctccattttccgattttc

SEQ ID NO: 89372 - DNA, 351 bp, Glycine max
  Clone ID: PAT_MRT3847_51710C.1
tcgtcccacgcgtccggagattttttccttattttgctgtcttcgctccagtgaacgagaattaacaagtctgtcatttagtcatattatgtttttcgtcgtcatattttttctttattctaaaaatttacatttgaaaaacttactttgttttcttgtctttgaacaagaattaacaacttattcgtatggtcatactatcatcactgttcccgattttcattttactgagttgtttcatatgacgggaaatataatgagcactagttgttgtcagaactagcgcatgcgttggggagtggaggaacgaggggggagattgttttattccttgggacggggggggagact

SEQ ID NO: 89373 - DNA, 1354 bp, Glycine max
  Clone ID: PAT_MRT3847_51711C.1
ggcacgaggtaatgttaagagtgctctgccatctatctcctcgtccttcttctccctcctcatcttctctccccattcggcaaacatacagcatccaaaatcgaatctttgtttgaaacatggcttcctcctccttcctctgccccgcagcatttaccttctcacagaagccacttcaatccacttttcttcattcctcctctcttctcactctaagcattcttcctaagaaattgagaaaaccccaccaactgagaagcctcatagtggccaaatccaatggcagtgactctgctgatgttcctgaccgtttgatttcagcactttgctacttttaccctttctttgatggcatacagtatggaaaatatgtaatcacacagttctaccctgttcaagccattgttcaaccattggttcctgcaataagagtcttcaagagcttcccttttaatgggttccttgtgtttttgaccctttattttgttgtggtgagaaaccccaatttcagtaagtatgtgaggttcaacactatgcaagccgttgtccttgatgtgctcttgattttccctgacctccttgaaagagggtttaatcccaaagatgggttgggattggatttgattatgagtttggatagcactgtgttcttgttcctcttggtgtgcttgatttatggttcttcttcttgcttgctgggtcaaatccccagattacccattgttgccgaggcagctgataggcaagttctttgaatcaacaatccgttattggtaatttaattgtatagcaagcaacttcagcctaggtagcggaaaagttgcattttcacttccttaatagttactatcttagaaagtttctgcaaaacggattttacttgtttcttacattgctggattctagtatgtctttctaattcatgattgaattatcgtaagatgatccgaaacttccctttctccattgttgattgaattcaatggtagatctctctggatttactgaatggttatggatttgagttgtaatgtttcacacatagacatattaatttcttgtatgtttaacaatcctacaatcagttatcttctcttcttgggtccaagggttttagggtttaggatgagctattttaagtgttcagacttcagaggggggtttttctataatggttatgtggaacggggagaggaaacccagatagggttaatttgctaaagttattatctttttttataaatgtaaagtggtcatgatggagtatgagcctgagttgaatgtgcaagggggtactattcttttaatgtttatgaccggaattggttaatggatgacaagcttttttgggttt

SEQ ID NO: 89374 - DNA, 287 bp, Glycine max
  unsure (1)..(287): unsure at all n locations
  Clone ID: PAT_MRT3847_51712C.1
cgcatgcacgcgtacgtaagctcggaattcggctcgagggctctggggtggagccacagatccttgtacagtacttagtattacgaaaggatctatctcaggctcctttttcctggcccacgggcgcattggtagcgcaggcttgtcacgccgccacagcagccttgcaccttcatcgagaccatccgcacacagcagcttatctccgggagctggggcgcatgcncaaggtggttctcgaggctgccgatgagaccaccttgaaggagctggctgagaccctgcag

SEQ ID NO: 89375 - DNA, 1227 bp, Glycine max
  Clone ID: PAT_MRT3847_51713C.1
tcgtacgttagctattaatttcgatgcaaaaagacccgagtggaagaaaatgcggggtagagaccatttccttgtttcaaggaggattgcttgggatttcatgagacaatacgatgatgagtcctattggggtagtaagttcaggtttctacccgaatccatgaacatgtccatgttagcagttgaagcaagttcgtggaataatgactatgcaataccctacccaacttctttccacccatcagaggacactcatgttttccagtggcagagaaaaatcagacatcaaaagcggccatacttgttcactttcacgggagctccaaggcctgagcttgaaagttctatcaggggtaagattatagaccattgtcgagcttcgagtgtttgcaaattcgttgattgcagctatggtgttcagagatgtgacgaccccatcagtgttataaaagtgtttggaagttctgtgttctgtttgcagcctccgggtgactcatacaccagaaggtccatttttgattccatgttggctggttgtgttcccgttttctttcatccaggtactgcttattcgcagtacaagtggcatttaccgaagaataggactaagtactctgtgtatataccagtgaaggatgtaaaacaatggaatgtcaatgtggagcaggtgttgcggggaattccggagggtgaggtgtttgcaatgagagaggaggtcataaagctggttccacatattatctatgcagatcttaggtcaaagttagattgctttacagatgcgtttgatttagcagtaaaaggaatggttgaaaggatagagaaggtgagggaagaaatgaggagtgggagagatcctagcattggttttgcagatgaagaccattataagtatacattttcacaaaattaaagctaaaaggaagacatatcatgttatagtgcaatatcgttaccttcagagaatcccttgtgacacttttatttttatttttttggtgttcttgcttttctggtttacttttgattttggtttgttcttggcctacaaagaagtgaagaaaaatgtttgtaacttgtgaaaagaaagacagacaagcaacaaaagtagtatggtctgatgccatcaaaccaagcaaataacagtcctggggatggctagttaattttattattatcttaaaactgattgagttgctagaatttgtttggcgtgccgacaaaaaa

SEQ ID NO: 89376 - DNA, 483 bp, Glycine max
  Clone ID: PAT_MRT3847_51714C.1
ctctgagtatcgtatcgttttattattatttctagggctgtcttatcagtatgtattcaaaaccctagctaggttacgggtccgccctttctttctttccgatcccaccgtcaaacttgtcattctatatgctttgcagggtccattgaatatgtctccgtcgttggatcttcctcccaagggtggcttcagttttgatctatgccgaagaaacgcaatgcttcaaaacaagggcctcaaagccccaacctttctcaaaactggcaccactattgtcggtttagttttccaggatggtgtcattcttggtgctgatactagggcaactgaaggacctatagtggctgataaaaactgtgagaaaattcattatatggcacccaacatatattgctgtggagcaggcacaactgctgatacagacgctgttacagacatggttagctcaaagctgcaattacatcgctaccatactggtcgaga

SEQ ID NO: 89377 - DNA, 354 bp, Glycine max
  Clone ID: PAT_MRT3847_51715C.1
ggagaagcaaacaacgctggattatttggataagaaactcacgattgctaaattgatatggagaaagagccacatgcttctctagaggaaactacaactatatgcaactgcaaagtactaagacatcgactaaagttatattggctgtcaagaaggatgaactaccaaatcttgacagtacagaccaagtggggattgttgcagcatgctgaaaaaaatgttaaatcaagggtagcactgcataagcaaacatccagatggctcttattagtatttaaggcagcagccgtgccagggataacatcgactgcaatctagtatttcataccgctaagtttagctaaaatagatgca

SEQ ID NO: 89378 - DNA, 330 bp, Glycine max
  Clone ID: PAT_MRT3847_51716C.1
gttgaaaacatttgggatcttttttttccctttaaaaacggggttttttttcgggagatttttttttttccccgggtgtaagtttgtaggtggggggaatttatccaaatttttttggaaaccttcccccggggtttgaaatgaatttttgtaagaaaaacttatgaaccctttgaagatcaccatttccctttgggtgggggggggttccccgggataaaaccctttaaaaagaaatttgaggggtcccttcccttactttttttacccccctttgggccttgggttttttcactggaaacttgtttttaacccaatccaaataacccc

SEQ ID NO: 89379 - DNA, 345 bp, Glycine max
  Clone ID: PAT_MRT3847_51717C.1
caaaccccaaagtttacccttgtaataaaggaccttttttttaatttaaggggaaatgggccccccactttttaattaaccaaattttttaattggcatttattgtaaacaaggcaccttttttaattcaaaaaaaaaacttacccttggaaaatggggtaaacagggttttttaaaagggggaaaataaatttttttcctttctttatttttaagaattgtgaaagcccctaaattaaaaaaggcttttttttttgtaaaaacaaatctttttgagccagccccgaaatttgggttttttaaggttcttttaagaaaagtctttggggaccctttggaaaaatt

SEQ ID NO: 89380 - DNA, 1429 bp, Glycine max
  Clone ID: PAT_MRT3847_51718C.1
tctaagttacactttctttgcatacggtaacctcctttttctgtgaacgtaagcttcggctcgagctctgagtatcgtatcgttttattattatttctaattctctcttatcaatgtttattcaaaaccctatctaggtttttggagccccctttctttctttccgatcccaccgtcaaacttgtcattctatatgctttgcagtagcgcacgcagctgaactgcggctgcgagatgacgaaagaaggggtcatcgcatctgataatcatctctactgaccaaatctgaagaaaattgctttctctttggttcctagctcgcactctctctacgcacgcctcaacatcccttctctgctccattcattatgtctccgtcgttggatcttccccccaagggtggcttcagttttgatctatgccgaagaaacgcaatgcttcaaaacaagggcctcaaagccccaacctttctcaaaactggcaccactattgtcggtttagttttccaggatggtgtcattcttggggctgatactagggcaactgaaggacctatagtggctgataaaaactgtgagaaaattcattatatggcacccaacatatattgctgtggagcaggcacagctgctgatacagaggctgtaacagacatggttagctcacagctgcaactacatcgctaccatactggtcgggaatcaagagttgttacggcactgactcttcttaagaaacacctgttcaattatcaagggcatgtctcagctgctttagttcttggtggggttgatatcactggacctcatttgcatactatttatcctcatgggtcaactgacaccctcccatttgctacaatgggatcaggttcacttgctgcaatgtctgtatttgagtctaagtacaaggaaagtttgagtagggatgaaggcattaagctagttgttgaggcgatatgtgctggtatatttaatgacctaggaagtggaagtaatgttgatgtttgtgtgataaccaagggacataaggaatatctcaggaaccaccttctaccaaatcctcgtacctatgtcaatccaaaaggctttgatttccccaaaaagacagaggtcctcttaacaaagattacaccgttgaaggagaaggtggaagtgattgaaggagatgctatggaagagtaacaatcattccaaaaaaaattggtgtatgagtatgaaacttgattagtgcaatggctgtgatatttgattttgtactttcacaactttggcttttattaccaaaaattatgtgaattcaattagattgttgcaagttatttcctcaaatttcttcatttggttggattttggctagaaaatgcttaacaaaacattaaatatatacaatttgattgatgaaagatgttacttgttttgttttttat

SEQ ID NO: 89381 - DNA, 757 bp, Glycine max
  unsure (1)..(757): unsure at all n locations
  Clone ID: PAT_MRT3847_51719C.1
ggtccggaattcccgcgtcgacccacgcgtccggggcaacctcctttctctgtgactctgagtatcgtatcgttttattattatttctaattctctcttatcaggtccattgaatatgtctccgtcgttggatcttcctcccaagggtggcttcagttttgatctatgccgaagaaacgcaatgcttcaaaacaagggcctcaaagccccaacctttctcaaaactggcaccactattgtcggtttagttttccaggatggtgtcattcttggtgctgatactagggcaactgaaggacctatagtggctgataaaaactgtgagaaaattcattatatggcacccaacatatattgctgtggagcaggcacagctgctgatacagaggctgtaacagacatggttagctcacagctgcaattacatcgctaccatactggtcgagaatcaagagttgttacagcgctgacccttcttaagaaacaccttttcaagttgagtttcagaacttgcacatcaagtgaattttctctctgtatcaacctctgaatttgactcttttaaattattgtgcagttatcaagggcatgtctcagctgctttggtgcttggtggggttgatatcactggacctcatttgcatactatntatcctcatgggtcaactgacaccctnccatttgctacaatgggatcaggttcacttgctgccatgtctgtatttgagtccagtacaggnaaagtttgagtagggat

SEQ ID NO: 89382 - DNA, 374 bp, Glycine max
  Clone ID: PAT_MRT3847_5171C.1
atccacagcatacaccgtctagcactgcgacatcatcactggcaccgtagcagaccgaggcatggaacaaagatcgctgactatgcataagatgtgcgacctattgtatgatgactgccagaacctgctatagcacataggtaacccttgatctaaccagatacagaacatacgcaggggtctacgacgcgactcggtacacctcattgggaagaacaccatgagaaatcacaccaacatgatgcgctcttagcaaagccaagccagcgcgtatatacaccttatacagctccttgatggcgatgtgacatggatgttcaccaagagcgacctggaggaagtcattgaggagggcgtcaagcacaaggtcggag

SEQ ID NO: 89383 - DNA, 963 bp, Glycine max
  Clone ID: PAT_MRT3847_51720C.1
agctcgggagttcggcttcgagcgctgcgaagacgacagaaggggagggacccaaattttaagaacttggctttgcttccttcaaagtgaggtctctaagtttcactttctttgcatagggcaacctcctttctctgtgactctgagtatcgtatcgttttattattatttctaattctctcttatcaggtccattgaatatgtctccgtcgttggatcttcctcccaagggtggcttcagttttgatctatgccgaagaaacgcaatgcttcaaaacaagggcctcaaagccccaacctttctcaaaactggcaccactattgtcggtttagttttccaggatggtgtcattcttggtgctgatactagggcaactgaaggacctatagtggctgataaaaactgtgagaaaattcattatatggcacccaacatatattgctgtggagcaggcacagctgctgatacagaggctgtaacagacatggttagctcacagctgcaattacatcgctaccatactggtcgagaatcaagagttgttacagcgctgacccttcttaagaaacaccttttcaattatcaagggcatgtctcagctgctttggtgcttggtggggttgatatcactggacctcatttgcatactatttatcctcatgggtcaactgacaccctcccatttgctacaatgggatcaggttcacttgctgcaatgtctgtatttgagtctaagtacaaggaaagtttgagtgtaagtaagcatacaaggctcacagccttagaggagtgcatttgatacattgttgttaaatggaggtgccatggcgtgacgggttttttgccagctgcctaccataggcaatttgtgaagggaggcctgctatggcagcgccatagaccacaatggcatgtttatatggtggaatattggcctttcggcattgagaacactgatttga

SEQ ID NO: 89384 - DNA, 362 bp, Glycine max
  Clone ID: PAT_MRT3847_51721C.1
aataaaaggggaaaaaaaaatccctactgggttctggaagcacagaatttacccaaaacctggcctcacgaacaatcacagattgctcgatcaacatcggattgtgtaattggtcgaaagctgtacatattcatggcaccacatgaatagcacaatagatttgcaaaaatactcacccttcatgtgattgattattatttacgttggcattggacactttaagaggacgaagatcctgttgaagaagataatccattgtaaggccatgtggatcaaaatcttgcaccccgacttgcatttccccctacgccatctctttcctcatcattgccatgtccaatactggaatatccgcttcggca

SEQ ID NO: 89385 - DNA, 156 bp, Glycine max
  Clone ID: PAT_MRT3847_51722C.1
ctaaaggagtacgctgtcgctctattaaccagtcttctgctgacttaatcgagaagcacgctgtcgtctatacctacactgtgaggcgcattatagacaataaagtggatctggacaacactgttgtatactagagtcatacacagttgaatgatc

SEQ ID NO: 89386 - DNA, 385 bp, Glycine max
  Clone ID: PAT_MRT3847_51723C.1
cgcgaacaaaaactacagcgggcgcttagttttcggctgcggaatgacaacaggggggggggtggttttataaagggacaaaccacaatcgacgatctttcctccttatatggagggtgtgttttctaaaacgcaaccaaatataactttcgcgcaaacttcagatttgtataggtccctctctgacggtaagaaaatcaacgaccaacgcactatgggcaagagctattgttttgttactttcacaaatcctaggtctgcaatttgatgccattaacgacctgaatggcaaaatcattgacgggcgtgagattaaagttaatggggtgagggcctctgggggcatgtcaaattttgggagaaaacggtattatttataaaaata

SEQ ID NO: 89387 - DNA, 208 bp, Glycine max
  Clone ID: PAT_MRT3847_51724C.1
ccttcgcgggggaggaagggtggttttctaaactgttgattggatcacacttatacaaaatgcgccaattagtcacccgttgagagttgctgctcgtaagaaaggctgcctgatggttcagattgtgatgtctgggactgcagcactcaaaacgtgtgattgggcctcattggtacaagtgtgtttaacaaacagtcaccattcagtt

SEQ ID NO: 89388 - DNA, 409 bp, Glycine max
  Clone ID: PAT_MRT3847_51725C.1
gaaccataatagcttggatttcaaattaaaacctcattggttctggtcactttttttctttcgacacaaaaaaaaacagtcgactaaaacaaaaatccgatgtggattgggaggcactttatccatttccgggccctaaacaaactcgccacccacttattcataagccttaacaagggctgcctggtccttacgggctgcaaaaaaaaaacgggggcccataccttaaacaacgttccaaggggcaaaagcactcttggcggccataaaaaaaaacttgtgatcaatgcccccaaccactttacccacgctaaaagagcccgtaatcatacaaaataccctatgtgccttgagaggggccccaccataaacacccggggggggcgtgtaaaaaattccaaactggaaa

SEQ ID NO: 89389 - DNA, 462 bp, Glycine max
  Clone ID: PAT_MRT3847_51726C.1
aaaacccaaaaacccaagttaaaaaaaaaaaaacaacaaaaaaaaaggggcaaaaagaaccccaaaaaaacagggggggaaatgaagaaggaaaaatggccaaaaaaaagcaaaacatggcattacaaaaaaaaaggaacccccacccccccggaaaaaaaaaaacccggagggcccaccaagggaaagcagggccacccccaaagaaaaaacaccccctttttaaacggtaaaaaacccggggggggcagaaaaaacgggctggacaaaaccagggcaaaccctaaggaggcaaaagaaaggggatttcttaaaaaggattcaaggggaggcatccaaaccggtttaaaaaacaaggggggcccccaaaaactaaggccacccttaactttccaaaaaacctttttggaaatcccggaaaacccgggtcaaaattccaccccccaccccttcgcgaggggg

SEQ ID NO: 89390 - DNA, 485 bp, Glycine max
  unsure (1)..(485): unsure at all n locations
  Clone ID: PAT_MRT3847_51727C.1
ggatcataaattaaagatactagtttttattattattatttttaatgcaggaaaggctacttttttatggacggactgcagaaccatactttttttatgagcccattgatgtggcaccaactcagcttggcgtgagtggtaaaggctctcacctcttcttaattagaccatacacttgacaggggagactgcttacaaaagaatttaaagttaaaaaaaaaaagccagattgatatggcttgctcatggattcgaatttcatgaaatctgggatcaaacattcacacacaatcaatcctccactatttgattattggctttttttatttactaaaatggagtaatttgttttcaaaattactaaattaaaaataatcatttatccttttcttaatacactcctttttatatagttnttttttctttccatacatgtggtttaatagggagcaaaatacagtagactcgatggttgggtggtttgc

SEQ ID NO: 89391 - DNA, 250 bp, Glycine max
  Clone ID: PAT_MRT3847_51728C.1
tcactgctgtagtgcaagttctatccttaggagtatgaacattgccgcaagtcgtagattctgatatagtggtacatgaggcaagtcatgcagatggacatcttaatgttgtagtcgtttttccctcattggaggctgctatcaaacaatctagggccgtagagaagggtattctcattgctagagctaccactgatgacttgaaggaggaaggagtcactggatccggattggttataacggagctact

SEQ ID NO: 89392 - DNA, 465 bp, Glycine max
  Clone ID: PAT_MRT3847_51729C.1
ttggattatgctgccacattgatgaagagcatccaatggaggcaaaaaatggggtatgactacttttctttttcctttctaccattttcatgcagtttttaaggttttctggtatttgctgtctgatcgatgcaccaattttgcatagccttaaagtttttgttcatttctacatacctttcctctctatttcctatgggtagagtcaaacttttattaaccaagtgattgagcacaagtggttaatgtgttgaaattaaggttgaatcattcgggtattatccgagttcgatccttggcagaaacaattcttggtcggactttacttacctctggacgaactccggattagtcagaacctctttccctgaaaaaccggagggttaagataaaaaaaaagagtcaaatttttattgagaataaaattatgatgttcatattggaaaaaaaagtgatacatttttt

SEQ ID NO: 89393 - DNA, 354 bp, Glycine max
  unsure (1)..(354): unsure at all n locations
  Clone ID: PAT_MRT3847_51730C.1
ggggctccttcctgtgagttcctactatcttgccattccacttttttttggagcnccggatagcctggatcgctgggttgttaattttgttcctctggcttacgtaccaaccctgccatccttctccttctgtcataaagtctctcttcccagaacctcacaccgggcatcgtggaggaggctgaggaggctgagccagatgaagagtttaaagatgcgattgaagaggatgacgagggcgccccgcgcccagcagaggatgagctggccctgcacgacaacgcgttcctgagcaagaatgaggtgctccgcaacaaggtgtctcggctcacggagcggatacccaagcgctac

SEQ ID NO: 89394 - DNA, 403 bp, Glycine max
  Clone ID: PAT_MRT3847_51731C.1
gagtcctcgacgctgtatacggcaacgtaagcgggcgctaggaccaccacaccacgcctaccaaaaaggtggcgcatacgatgaagactactctgccatgcagagcagaccagatggaggccgaaaagagcgcaactgacgaagacactgcaccaactttgtgaggctgacctcgaagctgctgaggcttaccttcacgaatacgatagaaggttctaaattacagttactaaaaatgtaactgcaaaagacatgattacaggtacattagattatccaaacttttgaaaactatagtgacactggaacttattgctagttattcggactgtacaggataaactaattattatggttatgcttgcttctgttacaatattatcaaacttattgtgtattgggt

SEQ ID NO: 89395 - DNA, 1570 bp, Glycine max
  Clone ID: PAT_MRT3847_51732C.1
cttcccggcacatgaaatggccgccagccgcaaaatgacaacaagtcgcatagatgagtgatatcttccgctgaagataggaccaacaattcctttcttcgattgttcttttctttctttccaaattccgcataagattgcgtgccatagttatctccaacatcatcatcatcatggcattgggaagaggaatatatgttgctcacaacgtgtgtttcagatcagagcttcaacctatggcacccgactgcattggttcttccacttctcgccaaagggacctcgttttcgtcgtcaatcctctaggtgctaatgggaggacgggtaaggaatggaggaagttagttccgtatctacggtctcgtcttggtaaagagtgcaatatttgtgaatccataacgtcaggtccttgtcatgctattgacataacgagagaggctataagggagggggctgatgccgtcattgctgttggaggtgatggaactcttcatgaggttgttaatgggtttttctgggctggaaaacctgttgttagtcaagtgaaagagtctacgcattcaactgctcttggtctcatccccttgggaactggttctgattttgcaagaacatttgggtggaaaaatgatccccatgaggccattgaacgtgttgctagagggttgagatcaaggatagatgttggtgttatcacaggagagagttgtgatcatcattacttcataaatgtcgccgacattcatttgagtgcaaaggcgggtttttatgcttctagatacaagagatttggcaacctgtgctatgtcattggtgcattgcaagccttcattgggcatcaaaaccaggacatgagaatcaggttcaatgatggtccatgggagacatgtcctcaagtgacagccctttgcattggaaatgcaaaatactttggtggtggcatgaaaattacaccaaatgctgatcctttcagcagaaatttagaggttgtgactcttcagaacttcaagtggtatgattttatcttgaaattacataagctatatagtgggacacatctctcagttaaaaatgtatctgatagaagtgtactttctattgaggtggaggacatctcaggcaagggtggtatttatattcaatctgacggggagcatttggggttccttccaaaaaagattagtgttgtgcctgctgctattgagatgatattgtgatttaactggagaatgacagaatctgtgaaatagagatgatgctgttcatgcctgtaatttggcagatttagtagaagaaggacgagtttgttttaagtgtgtaggcatcagagtaggcttcttacatcttttgctgtggcctgagggagagtaattgcaattttgaatcagcaatgtgttgtcatataatttattttctaactgtaaaaacattttacatgtcatcaatattttacagttatagaatgtaaaataaaggtataaattagaaaatcaatcaagtttatcatgtcatcaatattttgtatacttttcatttgtatgacaatgtcaattactacctcttgtagtat

SEQ ID NO: 89396 - DNA, 329 bp, Glycine max
  Clone ID: PAT_MRT3847_51733C.1
cacaagaccaaactcacgctaagccttataagttttgattgatcttccaagtaccactacaaagaagggtttcatctcactttatagaggtgcatttaccatcccgcataattgctgattggacaagtgacgcatgagcaatccttgtgaatggtgcattctaatcacctctcgctaaagtatgctctatgatacatacacaatatagccttttttaagtcctaatttatctaacacaatgcccagtgtacaattacacagctgctgcactgcctctatactctattatccatcatcagtaatatactcctgtacttctgttgagcatt

SEQ ID NO: 89397 - DNA, 909 bp, Glycine max
  Clone ID: PAT_MRT3847_51734C.1
cgacccacgcgtccgcgcacactgcacatcacgagctctctctccctcttagcacaccatcacaagctctctctctctttccctctcagcagcgtcacgagctaccactccctcttcgtggcttttcttcctctcgctggttgaataagtgacattaacttcaatggagtcatctaatgaaaaaatgacggacaaaagaaaagttttaggaaaaaataatgaggaaacaagaagttattttacatggaatttggaaatggaacgtgtatgggctgatgtacttagagatcaaaggaatttgggcaacaaaggtgacggaggttggaaaaggtcagcattgaatgctgcagccgcggtgttatctacaagcttcaatgttaatgtcacatcagataatgtcaaaaaccgtatcaaattatggagatcatggtatggtattgtaagtgacatccttggccatagtggatttgattgggatggcactaagcacatgatcacagttgagaatgaaaatgcttggaatgaatattgcacgtcgcgaaaatcggctaaatcgtttcgattcaaggtgcttcaaaattgggatgatatagtgaatttgtgtgctaaagatagagccaccggtcatggagtgttatggatgctgatgaagagatgagtagagaaacaaatgaagtggaatctatggggttaggtgctactgacatagatttagaagaatcaagctctaatacaaaaggaaaaagaaaaggttcgacttcttctggcacacatcctcacaagagaaagatgggagaaaagttaattattcaggttcctcgactttttttttttaatttggaccttgtaattcttgtttaagatctttgtttggaacttgattaattaggaccttgtaatgcttgtgtt

SEQ ID NO: 89398 - DNA, 354 bp, Glycine max
  Clone ID: PAT_MRT3847_51735C.1
atcaaacatccgatgatagacggacgcatggttcctgacagcataaaatgtggtggagggccaagacaagggacagctgcagcggttctatgaacatactgccagttacgccaacattgcgagattctctgctggaggcctcttgctgtttcagtgtcatatgctcgctatcgatacagtgattgtcttgacatagaaatcagagtcacgatatgcgctgcaggagcatcaacttattcaagacacatctttgtcactggtgcctacactgatgctacgacctgtggacctcgatataataccgaagctcttcaactcatggagactgatgccattgattagactgctgcctat

SEQ ID NO: 89399 - DNA, 465 bp, Glycine max
  Clone ID: PAT_MRT3847_51736C.1
gggaaaaaattaaaccccatttttttaaattaaaaaaagaaaccccccccctacccccaaaagaacacttttacccaaagtgggggagggtgtaaagtcaacaaaggggcttttaaaaacccccttaaaaattaaaaataccaaatgggttttaataaccccccccaccccaaaggagggggtgggaaatttatgaccccaaaaggggggggggatccccctctttgagggaatttttcatatccccccccgttaaagcggcaccacgcccccctaaatttattataaaatggaatcccgggcgcaaaaccccatttttaaaccaagaaggggaccatacaaaaataactgcctgcctccccggggggggcgtgaaattccccccaataaagcccccattgccatgtcccgggaaattgccccttttttttttggggggccccccccctggtttggggggggggg

SEQ ID NO: 89400 - DNA, 113 bp, Glycine max
  Clone ID: PAT_MRT3847_51737C.1
gaaaagttaatgacgccttaaaccatagaataatggcgtcacctttccctgttgccttcaaacgaatctttgttatccccattgcattagttagttgcgaattaatgatgaaa

SEQ ID NO: 89401 - DNA, 230 bp, Glycine max
  Clone ID: PAT_MRT3847_51738C.1
ttgagaggagactctctggagagccagacagtatctaaatggcacgcatataggatcttaaatattgaaaaagaggccctcgacgcatcattagtgggcagaaaactgaaaatcccgctagcaccccttgggtaaaagggaagtgggggcacaaaaccaatagagtagatcatatatgctcgaaaagaggaggcgactgagctctgaattccgaataacctttgagattt

SEQ ID NO: 89402 - DNA, 170 bp, Glycine max
  Clone ID: PAT_MRT3847_51739C.1
atattgatatgtatataaggtatcgaccggcaagaaccgccatccgccattaacaacattgttgtgtcacccctttgttagatatcattctggtctcttccctaaaatttatatcctacgcgtgaattgcaacgttggttcctcacctttcccttcaaaagtggaacaaa

SEQ ID NO: 89403 - DNA, 377 bp, Glycine max
  unsure (1)..(377): unsure at all n locations
  Clone ID: PAT_MRT3847_51740C.1
acttatgacactacctattggtgccgcctggtttgccaaggcgttcttgacggccagttatgtttataatgtcttttagggaggggggactgccaaacatggacgccaagccttttctgttgttcatgagagacgatttgtttctttgatcgccagaacagggggggcctagtctcactcagggctgctatagaaaaagctgaatatgctggctgaaggaactatgtttgcgtgccaggttntcatcaattcacacgtaagttgtggaagttgaaacgaacttcttaagctaccctcatgatggagctcaggaaacctctgacgggagtcttgtatatctatattaaggatttttcttggaatttccctgtgtgcca

SEQ ID NO: 89404 - DNA, 282 bp, Glycine max
  Clone ID: PAT_MRT3847_51741C.1
cgcttaaaataggtttttattttttactgacaagggctaattacccacacaattacaagggcccaagcagaaacagcacagagatcgccacacggggaggcgggggtgtatgacaaaattaccaaaaaacagctacacgccagggaaacacagggccaattccgagctagtatcacacgagccctatgatagggaagctagaaattacgacttgaaatattggaagaagtgcttataaaagcagacacaagggtgggcccgcgaattacaggacccaacctg

SEQ ID NO: 89405 - DNA, 952 bp, Glycine max
  Clone ID: PAT_MRT3847_51742C.1
gtcaaaatgcagaatgttccactcccacacaatcactgaatcccaaacgacacctatgaatttattaaaatatatatttaattcacatcatttcccccaaaatccttataatatcttcccgcagtcattctcacatgcaagtccaatctatgaagcaattgtttacattttttccccaaacttatccgatacaatcgagcaaatgcaacaaacgaaaccagagattcataattgcacgttctcttttgttgtctccagctcatagaatattacattaactctgattcattcagaatttcagattcaccttttcttcttctcttttttttttcctctgaaagctttttgcagaaagttgtgatttttccttgaaagatggcatctttgagcatgacccagatcagaactgggaattgtgcatctgggtttggcttgaattgtgctgggaaggttaaggttggtcccagcagagttgggtttaaggtgtttgcttcagagactcaggctacagagcctgatcttagtgtcactgttaatgggttgcacatgcctaacccctttgttattgggtcaggtccaccagggaccaattacactgtcatgaagagggcatttgatgaaggttggggtgctgtgattgctaaaactgtatcacttgatgctgcaaaagttataaatgtaactcctcgatatgcccggctacgggcaggtgcagatagatctgcaaaaggagaaattattgggtgggagaacatagaacttatcagtgataggccacttgaaattatgttgaaagaattcaagcaattaaaagaagagtatccggacagaattctcattgcttcaatcatggaggagtacaataaggctgcttgggaggagcttattgatagagtcgagcaaactggagttgatgcatttgaaataaatttctcatgtcctcacggtatgc

SEQ ID NO: 89406 - DNA, 1961 bp, Glycine max
  Clone ID: PAT_MRT3847_51743C.1
aggaaaatagtggtgacttcattcttgggttaagtttgtgactttgtcaaaatgcagaatatccctctcaatcacagaatcccaaacgacacctattaattttataaaatatgtatttaattcacatcatttcccccaaaatccctataataatatcttttcacagtcatgctcagatgaaagtcctacctatgaagcaattgtttacattttccgtcaaccaaaatgctacaaacgaaaccagagattcgtaattgcacattctcttttgttgtctccagctcatagaatattataaactcagattcattcagaatttcagattcacctttttcttttcttctctaccttctttttcctctgacagctttttgcagaaagttgtgatttttccttgaaagatggcatctttgagcatgatccagatcagaactgggaattgtgcatctgggtttggtttgaattgtgctgggaaggttaaggttggtcccagcagagttgggtttaaggtgtttgcttcagagactcaggctacagagcctgatcttagtgtaactgttaatgggttgcgcatgcctaacccctttgttattgggtcaggtccaccagggaccaattacacagtcatgaagagggcctttgatgaaggttggggtgctgtgattgcaaaaactgtatcacttgatgcggcaaaagttataaatgtaactcctcgatatgcccggctacgggcaggtgcaaatggatctgcaaaaggagaaattattggatgggagaacatagaacttatcagtgataggccacttgaaactatgttgaaagaattcaagcaattaaaagaagagtatccagacagaattctcattgcttctatcatggaggagtacaataaggctgcatgggaggagcttatcgatagagtcgagcaaactggagttgatgcatttgaaataaatttctcatgtcctcacggtatgccagaacgcaaaatgggtgctgctgttgggcaagattgtgctcttctggaagaggtttgtggatggataaacgctaaagccacaattcctgtttgggctaagatgactcccaacataactgatatttcacagccagcaaggattgctctaagttcaggatgtgagggagtatctgccataaatacaatcatgagcgtcatgggaatcaacctcaatacattacgtcccgagccttgcgttgaggggtactcaactcctgggggttattctgcaagggcagtccatcccatagcacttgggaaggtgatgagcattgcaaagatgatgaagtcagagtttgatagtgagaactatacactttctgccattggtggtgttgagacaggcggtgatgctgctgagtttatccttctcggggcaaacactgttcaggtgtgcactggggttatgatgcatggctatggacttgtgaagaaactatgtcttgagcttcaagacttcatgaaaaagcacaatttcacatccatagaagatttcagaggggtttctcttgagtattttactactcacactgacttggtaagaaggcagaaggaagcagttcagaagaggaaagccataaagaaagggttgcaatctgacaaagactggacaggagatggttttgtgcaagaaactgaaagcatggtttcaaactgaaataaaatgtgcagttaaattatattagcgtgtttggaaatggaccatgggcatggtgtttcacatcttaattaatgttactagttctaccttttacatttccaaacacatttaagtaacctttcatatgcaattgcaaatgttgtccaaacgttaagtataactatagacattatgttttattatcaatgatggatattaatcttttccaaaacagtatgatgaattttatttcaagaaataatgaaagtaatttgcttctgggaaaaaaaaagttggaacccc

SEQ ID NO: 89407 - DNA, 350 bp, Glycine max
  Clone ID: PAT_MRT3847_51744C.1
ggcagcgccaaacatatactaaatagattagaaggggtgaagtttaattaaatacaaacattaaagcaactggcatgaagctaagctgtttatacaatggaccatcattttaaactacttaattggcccataaatgtaaaaaatcatatacaggggggtctaatattttaactttccctacggtcatccccccaatgaaccatactcattaaactaaacctccaagataaaatggttcaaagcagaacattttcaacctatcaaattatttcccttaaaaattaacgggcggacttaacttaaacttaaccagacatttttacttataaaaatgcttgcccaatagtcaa

SEQ ID NO: 89408 - DNA, 498 bp, Glycine max
  Clone ID: PAT_MRT3847_51745C.1
aaaatagaagccttattttgctctctgttctttctctcaacaatcgttccaacaaatcaagagagttgaattctgaagcttttgctacgtttctaccattcagaatatcatggatacaaagtttgcacgaaggactgagcgcattggtagaacaacatgctcttattggagagctggaagatgtaacagaaatccttgcagatttttgcacatagagacaccatctccacctgctgcttgtggttatggcaatactgcatataactaccgaaaaaagccccattcctcctttgagaataccctgaaatatggttcaaagaaagcatttgttagagattatggagatagaggagatgcaacaagggttgctaaggctttcaagaaatcatcaccaaggatatgtaaatactggatcaacaacaattgtgtacatggtgaacaattcctgtatctgcattcatggtttcgtggtgatgggttttccactgtaatgaaact

SEQ ID NO: 89409 - DNA, 242 bp, Glycine max
  Clone ID: PAT_MRT3847_51746C.1
ctactcctctggttatgggtggattttttttaaaaagaaaaaccaaccccattcttttacaaacatgaaccaaaacctccccctccctcaaaacagtccaatttatttttccttttctctcgcttcctataaaagaagctttatgcttaaacacctaccttctctcctttttttctattggctcaacgccccaaaacctacttctggaaattatatataaagccccggcgtcccaatctcca

SEQ ID NO: 89410 - DNA, 1210 bp, Glycine max
  unsure (1)..(1210): unsure at all n locations
  Clone ID: PAT_MRT3847_51747C.1
gtttgactagagccgagaaaatagaagccttattttgctctctgttctttctctcaacaatcgttccaacaaatcaagagagttgaattctgaagcttttgctacgtttctaccactcaggtttgtttctccgaacgcgaaaatctaatacttcttttagggtttgtgatggatgatctgcgagaatctatgttctatccgacttcatttatctcagtgaagttttctgcgcttccacgatgcaaatatagggtttcgcgtttagggttcctttcaatttatttattatcggggttttcataaggatcggcgatatcctaatttggggttttgggagagtctctattgacgttgctgatcagggttaaattattggtctttgatccaagtcttcaatggattttgatattgatgttgttgatcttcctcgatcaacatagttttgtttctgttcatcacttgctttacgattgttattttgggaatggaaaatttgggagccaaaaggttttgggttttggatgaagaattaagtctatggctgggatttaatcattgagttaatgactgaaagcatgagccatggagaattttattgataggatgcagtacctgatctgggatgtcattacaatgccatgtttgttttttagaatatcatggatacaaagtttgcacgaaggactgagcgcattggtagaacaacatgctcttattggagagctggaaaatgtaacacaattccctgcagatgtttgcacatagagacaccatctccacctgctgcttgtggttatgggaatactgcatatagctacggaaaaaagccccattcctaaagcgttgataccccataatggggatagaggagaggcgacaagggttgctaaggctttcaagaaatcatcaccaaggatatgtaaatactggatcaacaacaattgtgtacatggtgaacaatgcctgtatctgcattcatggttttgtggtgatgggttttccaccgtaaccaaacttcaagaacataagaaggttatcactggcatcgcacttcctgttggatccgacaaactttattctggcagcactgatgggacagttaggatatgggactgccatactggtcaatgtgctaaagtcatcaatcttggtgctgangttacctctttgatcaagtgangggtcatggatttttggtggtcctgcaaan

SEQ ID NO: 89411 - DNA, 1110 bp, Glycine max
  Clone ID: PAT_MRT3847_51748C.1
ccacgccgtccgaaaatagaagccttattttgctctgtgttctttctctcacaatcgttccaacaaatcaagctacgtttctaccactcaggtttgtttctccgaacgcgaaaatctaatacttcttttagggtttgtgatggatgatctacgagaatctatgttctatccgacttcatttaccgcagtgaagcttagggttcctttcaatttatttatttcggggttttcataaggatcggcaataccctaatttggggtttgggcagagtctctattgacgttgctgatcagggttaaattattggtctttgatccaagtcttcaatgggttttgatctggatgttgttgatcttcctcgatcaacatagttttgttgccgttcatcacttgctttacgattgttattttgggaatggaaaatttgggagccaaaaggttttgggttttggatgaagaattaagtctatggctgggatttaatcattgagttaatgactgaaagcatgagccatggagaattttattgataggatacagtacctgatctgggatgtcattacaatgccatgtttgtttcctagaatatcatggatacaaagtttgcacgaaggactgagcgcattggtagtacaacatgctcttattggagagctggacgcgcgtacagccacgcgtccggatttgtgcacatagagacaccatctccacctgctgcttgtggttatggcaatactgcatatagctacggaaaaaagccccattcctcctctgagaataccccgaaatatggttcaaagaaagcattgcttggagataatggagatagaggagatgcaacaaggggtgctaaggctttcaagaaatcatcaccaaggatatgtaaatactggatcaacaacaattgtgcacatggtgaacaatgcctgtatctgcattcatggcttcatggtgatgggtttttcacagtaacgaaacttcatgaacataagaagggtatcactggcatcgcactttctgttggatccgacaaactttattctggcagcactgatgggacaagtaagatatgggactgccatactggtcaatgtgctaaaagcatcaat

SEQ ID NO: 89412 - DNA, 657 bp, Glycine max
  Clone ID: PAT_MRT3847_51749C.1
cgattgcacaaacattatttcagttccttcagattgcaagcaattggtggatggcttgggctaaccctcaaacagaaggagacctgcccaaagtaactccctcagttcttcttcttgtttatatggcccttgcttttggcagctcatggtttatatttgtaagggctgttctggtggctacatttggtcttgcagctgcccagaagctatttttgaaaatgcttagaagtgttttccatgcaccaatgtctttctttgactctacaccagctggaaggattttgaatcgggtatcaattgatcaaagtgttgtggatcttgacattccttttagacttggtgggtttgcttcaacaacaatacagcttattggtattgttggtgtaatgacagaagttacgtggcaagttttgctcttagttgtcccaatggctgttgcttgtttgtggatgcagaaatactacatggcttcctcaagggaactggttcgaattgttagcatccagaagtctccaattatacatctttttggtgaatctattgctggagcatccaccatcaggggttttggacaagaaaaaaggttcatgaagcgaaacctctatcttcttgattgctttgcacgaccattcttctgcagtctttttgcaattgagt

SEQ ID NO: 89413 - DNA, 262 bp, Glycine max
  unsure (1)..(262): unsure at all n locations
  Clone ID: PAT_MRT3847_5174C.1
ggcctggttcccattgttgancctnanatncttgttganggnacttntggaattcacnagtntgccggcggtaacggagcgngttcttgcancanggtaaaaaggnttgganngntnacaagtncttcntgaggnaacctaatggangcaaanantgncaacccttggntccaattnngttaagntttccctaagttgttngcggagaacatgtaaagccttcanagaacgtggctnctggaatcctgtggcggtttcttgt

SEQ ID NO: 89414 - DNA, 217 bp, Glycine max
  Clone ID: PAT_MRT3847_51750C.1
cccccttccttagcctcggaattcgcttcgagggaaatgggttcaccctattccaaattcttccatttattacctattgggaggtgcttcttggaagaaaggctggtttatggtccagaatgggatggctggggatgccaccatccaaaagggggaatgggccctattggttccaggggtttttaccaaccaccaccgttccaaacctttttgttcc

SEQ ID NO: 89415 - DNA, 394 bp, Glycine max
  Clone ID: PAT_MRT3847_51751C.1
atgtgtgaatgttgaacgtgagaggtgccgtgcctggagagaagccacctcccagtaatgtattttcctccgcgctctacagacacaacttgcgtccagacgaacctgaacgcgcttgacaaggaagctgacctggcaacaaatgcactggctataccaatcctaagacaaaaaccggggcttttaatggaacggaagcgccatgaagggagtcgatcaacaataggaatcggacagggatgcgggactcaatgaggtttgtacgtgaagaccgcttgcgagcatatggaacatgatgcccctgacggaaatgaaaattctgggctcaagaagttgggagatgacatatgggggtggctcaacgagagatccgttggagcatactacatccctt

SEQ ID NO: 89416 - DNA, 364 bp, Glycine max
  Clone ID: PAT_MRT3847_51752C.1
cctaatcccttttttaaaaaaagacgccacaaaacacatacattgcatggggggggaaattacttatagcaatcgtgtactcacatctctaaaccaagggcaagaagcaatgaattcctcacattcaaatatctaatgcaccctcagaatggcttcattaattcataaggcacctccccaggaccgttccatttttatcaaaacaaaacttcatattgtaaacaaagagacccggattccaatagctgaagatgacacacaatttcatacagaaggcatgcaaaagttaatcctccccccacgagagattggggacatctgccaaaggaacccttagtggtggaaaagaaaaaaacatttgggc

SEQ ID NO: 89417 - DNA, 241 bp, Glycine max
  Clone ID: PAT_MRT3847_51753C.1
cttttcaggacgcgagcgtccactcatacactgattttatctatacataacaagatattggggattggctacactgcgattgtggtgctaaatgcatttttaatctcacgcatcgtcttcaaaacaccactgagaaaacatcttcatttatccctctatagtgtgaattatctgtttctcatccctcgtgagtttcaccttttgctccacatctatagtggatcttacttcaagcctctac

SEQ ID NO: 89418 - DNA, 331 bp, Glycine max
  Clone ID: PAT_MRT3847_51754C.1
aaaaaatggaggaagggggttggtaacatggcacatttgtgctttgcattggaagataataagagtattctcttatccctggtatttgtccttcatgtacagtgatgatattgctaaaagaactgataatgtggtcatttgctgtgttaatatgttgtgaaaatctaaaatgagataaaactttcatttcctagtatctatagtcattacggagtggggtcagaaaattttcctttctgtgaatttttactgcccaaattgctaatgcttccaatatttttttctggctttgttgatattacactctttatgctcaatagcagcatttcat

SEQ ID NO: 89419 - DNA, 231 bp, Glycine max
  Clone ID: PAT_MRT3847_51755C.1
acgggcgagaagaccacagaagggatctctactggaatttacttggcaatttaaaattcccacattgtatgagggttaaggaatattgggtcaaatccttcgtgaatttccgagtgttattattatactctattgagggatgagggatgctaaaccgctacaagcttgtgattattcacaattttaaatgcatcgatgtatatggtactatggctggcgagtatactccct

SEQ ID NO: 89420 - DNA, 422 bp, Glycine max
  unsure (1)..(422): unsure at all n locations
  Clone ID: PAT_MRT3847_51756C.1
ctcgagccgagttcggctcgagcggctcgagcagaaattctcagaacaggttttcaaagtggcctcctcagacctggtcaacatgggcatcagtgtggttagctacactctgaaggacattcacgatgaccaggactatttgcactctttggggaaggctcgaacagctcaagtccaaaaagatgcacggattggagaagcagaggccaagagagatgctgggatccgggaagctaaagccaagcaggaaaaggtgtctgctcagtacctgagtgagatcgagatggccaaggcacagagagattaccaactgaagaaggccgcctatgacatcgaggtcaacacccgccgagcacaggctgacctggcctatcagcttcaggtggcccagactaagcagcagattgaggagcancgggtgc

SEQ ID NO: 89421 - DNA, 519 bp, Glycine max
  Clone ID: PAT_MRT3847_51757C.1
gtaatttatagatatcttgaatttattttgtttcctcatccgatggcctcgagaacgttttctcgttttgcgagcaattttcgtcttttcggttcagttatggcgacaaatttgtcaggaaggagtcactgtttcgttgccaagaagtccttaagcacgtcccctttggtctatgctactgcagcagccgcttcgcagccgaccactccaaaggcgaccgttaagggaaagaaagggcgtgtcgttgctgtcattggtgctgttgtggacgtgcaattcgatgagggacttcctccaattttgaatgcgttggaagtgcagaaccgcgcttctcgcctcattctcgaagttgcacagcacttgggtgacaatgttgtgcgaacaatcgccatggatggtactgaaggtttgattcgtggtcaggaggttgttgacactggtgacccgatcaaaattcctgtcggacctgagactcttggtcggattatcaatgtcatcggcgagccaattgacgagcga

SEQ ID NO: 89422 - DNA, 332 bp, Glycine max
  unsure (1)..(332): unsure at all n locations
  Clone ID: PAT_MRT3847_51758C.1
cacgcgtacgtaagctcggaattcggctcgagactagttctagatcgcgagcngccgcccttttttttttttttnncaagttaattnangaaattcaattngttanntcaaattcccnaaccccctntnttttantttgttcactangtnttntangcaataaanttttntnnggnanaaatnttcnaagttggaaaaantagannctangntntgggnttttncaggaaggggttaaaaaagnttattttnttgatatttttagaattttnctntttngnnncaaacaagagggaataggaatnggcctctnggaaaagacaaaaaccccc

SEQ ID NO: 89423 - DNA, 514 bp, Glycine max
  Clone ID: PAT_MRT3847_51759C.1
gttttgtgaccataaactcgtttttttgaaaatacaagtttagtattggcctgagtaagaaaaattctttttaggggcgttcctattatgttatttacactattttgttcttaagactgttaaataaggaattctgcctacaaaaaaaggatgatttttatatttaattcaaacccttttgatatattcattgattctggaaattttgaaatcttccggatttcattgaaatatcatttgcgttactggatggacttgtcacaccaatgcacgatgttcaggttacaattgatcgggttaattcactttaagaatttagtttcaaaaacctatttgtgtttgaatgaaaaaaatacttttgctttaaatatgagaatgttaaaaaccgttttttctacaaggtatttccttatatgtaaaaaaatgcctttttatattggagaaggagaacgcattaataattctatcctaaaaatatgccgaatgcttctctttaaatgtagatatatattat

SEQ ID NO: 89424 - DNA, 269 bp, Glycine max
  Clone ID: PAT_MRT3847_5175C.1
gggtattttaaaccataacatgtttattgcggcggagcatcaggcgctggagctcaccgtcgggcacggggggcgcatttcttcgatttcaccgaagacgagtttgagaagctctacactgacgtcaatggcgggttccaatcatagaataatgcctccggcggtattgctcagccgtcggaggtggacggtatgccggagaattctgatttgagagagaaaggagctgtgatcgaagttaagttacaagctagaagaggatcatgctg

SEQ ID NO: 89425 - DNA, 477 bp, Glycine max
  Clone ID: PAT_MRT3847_51760C.1
cacaacttcttccatatacttccctctctctctcatcctattgttaccacttccactggttgtttgttctcagctcaaggaggattcttgcccaagtcctcgtttttttgatcggtgacagactatttcaaaatgggcagatgtttcactgtccatggggggcacctttgtaaccaaagaaggacaccttcacaggagtaaggttagaaactaaatattcgtggttgtccagttattttctaatttttctccttgattactgcagatttagttttctcttcagcaccaattctgcatttgagtcttcaagagagagagagtggggttttgttcacatttgaagatatgttagactcatattttaatttgtagtaatgtagttgaagtgtcaagttgttatttttccaacaggtttaattttggcttaagtgactgtatagagttgactaatgctactttttatcttataggcattcg

SEQ ID NO: 89426 - DNA, 420 bp, Glycine max
  Clone ID: PAT_MRT3847_51761C.1
ctctatcctccaaccttaattaaagaaaacaggttttgtttttgtcaacattttcattgaatttcaagaccttaatgtgttgtccccctcaccatcaccacccacatttatacaccacctaggtttgctctcttctcccttctccatactccttcatttctcattggtttaatggtctttgaatctgcttttaattctctcctcagccatcattgattcaaagctagttttttctctcaatttgataataacaaccatgtacttgtttcattaactttgttcacccatcttcaattgaataacaaccatagcctacctcaaatagatttcccaagaaagtgctatttattttctctctaatcccttacattgttgagttcttctattcatgtcttgtgttcatattcaagatctgaggga

SEQ ID NO: 89427 - DNA, 126 bp, Glycine max
  Clone ID: PAT_MRT3847_51762C.1
acgcccactcgtcctagcactatatatgcattatgtatctggtcgatttgcattatctggggggggatcatattcctagatatatagctaattatgatttcatgagttatatagggaacattggtt

SEQ ID NO: 89428 - DNA, 379 bp, Glycine max
  Clone ID: PAT_MRT3847_51763C.1
atccagagaatatgtaaaaatttggatgggtaagactaacttttaaatctacaagtgaattattaagctggtgtcttaagacacatgcaatatgattctatcggtgggtgaaattgcaggatatgggcagacaggtatagggttgagccaaaagccaggaattgtcgatctgtatggagtcttagcttgtgagaaagccaatttgccacagccgctgctaaaatcccaaaggtattgatttcattccttacctcttatctcctagaatttaagtttctttcggtgtagatattctttgctcttaattttctcggctaaatttaagcgaaaataatttcttttttgctgaaaaaggtaaccacaaccacttttaggatat

SEQ ID NO: 89429 - DNA, 1479 bp, Glycine max
  Clone ID: PAT_MRT3847_51764C.1
tcgttgattcaagaccccagcaacgcccaacccaccgagctcctccgcctcggcgccacctccggtcgaaccggccatttcgaccacatcctcggttcacccttcagaccgtcgaaccaacaacaacaacaacaacctttcttcatgtccgaacaacccaaccaaacctaccaccaccccgaccaaaacaaacccttccaacaagggttaatgcagcagttgtctgatcaccaccaccttaacaacaacaattcacccttcagccttccctttctctccaacaacacaagcaacgcttcgttctctgaacacttcaacaatgccaatggaggaggaggcaacaacaacaacaacaacaacaacgagggcactaactacttcgcaacttcaagtgcaccttctctcttcagcaacagtgtcaatgccagtgccttatctcacatgtccgcaactgcactgcttcagaaagcagcacaaatgggtgcaactacgagcaacggcggcaccgcttcgctgttgaaaagcttcggaagcgcgtcctccagcagcggcggcggcggctcgaaactggtgaatgctgcaaactacgtcagtggcatgttcggagggaataatcacgtgaacgaacagagtaacagtaacctccaagacctgatgaactcgttcgctgttggtggaaactcttccattttcgaagatgggtttgaagcatatgaacatagtaacaataacagtaatagggacccaaaagtgcacgcaatgagtggaagtagcagcagcattggagggtctgataggctcacccgcgattttctgggtgttggtcagatagtgaggggaatgagtgggagtggaggagttgcacagagagaacaacagcagcaacatggcttcaacttgagttctttggaagcagaaagatataataataatagcaataatgctgcgccgtcatcagggcaagcttttggaggtggtggagggaattttcagtgatgagaaaacttattctccatcatgccaacaaagtacaaagggatttcaacttgttccattgaaacttgactgtccagctcatctaattaaggcatttttaagtgcagcattagggaagcatatgtgaagtttctgcagtttactaatagcgcaagcaaattaggcttcaaaattagggttcttcaactccgttacaactttcagttttttctttccctacctttctataagtttattcggtttataaacaaactagcttcaagattttcatggtttaatttaatagattttgttattggacaatgcataacttatatttaaatttgtctgccatagatgactttgttcatatttactttggcattttgtgcataaatctttaagattttcatcggtgaatttaatagatttttatatcaatattggcctatgttattacttatgtttctaaagttaagtagatgattattgaattgtggaccc

SEQ ID NO: 89430 - DNA, 214 bp, Glycine max
  Clone ID: PAT_MRT3847_51765C.1
tttataatacacttaacggtgccaatttgagagacgacaaaaggcgaagacagaaacatattttttacggatttcaaagatggtttgaccaaatttcttatattaacacatattctttctcatgtctttcatcagtaacaacttaatttgctctttcattatgatcttcctactaaattctttggcgcttatgagccataacttaatatgaact

SEQ ID NO: 89431 - DNA, 340 bp, Glycine max
  unsure (1)..(340): unsure at all n locations
  Clone ID: PAT_MRT3847_51766C.1
cccncccncgggcaggaagggcagggaaaacggnaannnaagagagacccnnnnccacagncgcgccacaggccaaggggncaaccnaacaagaccaggaccagggaaaagangaggaccaaagcgggggaggggnnncnncacccggcacgggacaggggcggggaaacagangccacaggagaggagagngcaacnacgggagaagaaggggacccnaccagcgccgaaggagaggcggagcgcaggggagaggacaaagagngngagaggaggggggaaggaagaggggggacacagaggcagggggaaggcgggcaaaggcacaggcggagcaagg

SEQ ID NO: 89432 - DNA, 646 bp, Glycine max
  Clone ID: PAT_MRT3847_51767C.1
ctctaaccgagagtacatagttccttttgctgttaagccctcttcgtaagtataaaaccgctagtttatatatcttacttgaatggatacccaaaactcttacttgaatggatacccaaaattttctgtcactgtgcaagaaccatatttagtacttttttggaattcgggtgtgcgcccatgattctattcatggccttgcttgattggctcagaatcgaagaaaggctttaatgtttgaaatgctttgactcgtatgatgacaagctactgtggaaatatcagctattcacccacttcattactgcctgagtattgtttgcagccatttgaacacggatataatatgatatatcgagtgtcgaatcgtcggtagattgagatactattgtggaataagataagatcaactggattaattaaagctacacgtactgcggaaaaggctgagtgtctcttactatggctctaccattatgtgcatagataacccttacaagttgatagaaagagaaatactctgaaaacttttgtagaagccttacacaagatctttatctatgttttttttttccttcgtgaatgtaatttttggtacagtacaatgacttgttttgaatcattctgtgatttcactcaatgtatc

SEQ ID NO: 89433 - DNA, 247 bp, Glycine max
  Clone ID: PAT_MRT3847_51768C.1
aggtcttatcatttcgcgggaaaaaatttgttctaaagtgagagaaatttaacatggctccaatatactcaatttacgttccgaaagcataaaaagtgaagattcgggtgcataaatgaagcggtaaaaaaaaaggaagagactgagtgagcttacggatataaaatgataaaattttacggacgggataaataaaaaaaaaaatggggaaacaaaaggaggccttgttttatttatataaagggga

SEQ ID NO: 89434 - DNA, 589 bp, Glycine max
  Clone ID: PAT_MRT3847_51769C.1
ttttttttttttttttttttttttttttttttttcccggcaaaaccagttttttttaaaaaaataagggggatttcaaaacttgtcaaaggacaacctccaaacaaaatttaaaatccaaaatgctttccatttttcagcaaaacataactcaccggcaaaaaaaagggatacccaagtttcgggctaaaccagttaataaacatgtccggggtcatgctatacaaaaccaaattattttttttttaatcatcaaaataccattctgcaaaagggggcttaaatcttcggaaaaacagtgggcaaatccgttgggacatctgaacttgcctgaaaatattttgccaacattgtggaagaactgaaataaaacccctgaactggttctcctttagaacaaaaggcattaagttgctttctgacttgagtagccagggatttccccagttttactccccattgatcaaaaaaattgattccccaaatgaacccctctacagcaattctgggttcatagatggccaccacctgaaaaacttagagcaccaagaatttgggacgagtaaagtatttttcatagaccctcatgc

SEQ ID NO: 89435 - DNA, 751 bp, Glycine max
  Clone ID: PAT_MRT3847_5176C.1
tccccacgcgtccgcccacgcgtccgcggacgcaagacgacagaagggtacggctcgagaagacgacagaagggggagaaagtgatggattacgatttagcagcgttgaagcttttctgttcgcagctgaagcaggctcgagaagtagcaatgccttgtcaaactcaaagtcaaagtcaaagcagcttcactctcggcggcctccttttccagcgcccttggttgcagggcgttctcgtctccgcctccgacgccggctctctgcttctcgacgacggaaccgacctcgtcgagctctccctcaatagcgagtttcgccaccgtccatggaaactcgggatgtatgtaatggtggttggagggtatgctgcacgtccagggaagcttcccatgatcaaggttcacaagattgttgatctttcatcgtctcctaaccgagaggctatgtggtatcttgaagttatggaagcatacaaactgttctatcagcctcttgttgaagaatttacatgatgggagttcttgattaaacagagaatgggtattgaggttggcatctgacatatggattttcccttcttttgacaagtttaagttagcacacagaattttctaagattgagttggtattcacatatctatgagaaatctgttctttgttataaaaaaattctatgtgctaggacttagatgaattttgatgtatatcatttcgatggcaagaaatataacaaggctaaaatacttagcc

SEQ ID NO: 89436 - DNA, 338 bp, Glycine max
  Clone ID: PAT_MRT3847_51770C.1
gctaaaacacaagcagtttctctcaaactgagtcgtgtgaattaaccaagcacatgaagtgaataattttcaaagtacaaacatgaccatggaccggttatcacaaagcagttcggactcacccacacgaggagaccccaaagtgttatccatagagtgtctcaagggaagttccaaagcccacgagtggaccggagacatgcttcaaaccggagacatcgtcgaaaagcttcgaatcggaacttcttctaacgcgcttatcaagcttagatcgccttttaaaaacggcaagagtggcgttaatagaatcctgcaagacttctacaagaagaaagaca

SEQ ID NO: 89437 - DNA, 329 bp, Glycine max
  Clone ID: PAT_MRT3847_51771C.1
attaattgtttttttttcttgatgtgtattttttttttgcggggctttgtctattttgataacggttttttttcaagcttgttgttgtgccttccccaaggagggtgcaaaaagagaatttgtgctgtaaattttatacaaaagtgctgtagaaatacgaaaacatttaggtgcggccgaatgccaagatactatacccgaacccgcaatggggggcggaaaaccgcctttttaaaagggccttattcatttcattatggcccggccaggaaaaacccgccctggcggccaattttttattaataaaataaccccccccgtggtgcccc

SEQ ID NO: 89438 - DNA, 363 bp, Glycine max
  unsure (1)..(363): unsure at all n locations
  Clone ID: PAT_MRT3847_51772C.1
taataaccggcgnagtcgtcgtccgcccaagaggggacgcgtgggagggcccctctctcactcaaccctgtcaaaggtgtcaagcacatttttttgtttgtgtgtgtagcaaagggtggtggtgtggtgcttgttgtggttggtggtggagtgcgcatgataagcggcaaagtaaggttgttgcaatggggaaggttgtgttgttgtttctttgcatggtattggtggtggtgcctttggcttgtactgattcaattcagaagcttgaggttcagaagcacttgaagaacttgaataggcctcctgttaagtccatcaagagtcctgatggagatgttattgattgcattcatgttacacacc

SEQ ID NO: 89439 - DNA, 2045 bp, Glycine max
  Clone ID: PAT_MRT3847_51773C.1
gtaggattgtgaggaacaagaccacaaataaggaactcacaatagagtggaatttgcggggcccctctctcactcaaccctgtcaaaggtgtcaagcacattcttttgtttgtattttgtgagcaaagggtggtgtggtggtgcttcttgtggttggtgttggggtgcgcaggataatcggcaaagtaaggtgaaggttagggagagaaagaatcaaatcaaacaaacaaccccatttaaaaaaaaatatatatagaaagagaaaaaatatataaagaagattgttctttttattaacaacaacccaccatagttttaaggccatttaattggttcttattgtgtttgtgagtgtgctataaatccttcgtggtttttggtgaccctttgggttctatagtgagtccaaggtaacccactttggattggaaggttgtcgcaatggggaaggttgtgttgttgtttctttgcatggtgttggtggtggtgtctttggcttgtgctgattcaattgagaagcttgaggttcagaagcacttgaagaacttgaatagacctcctgttaggtccatcaagagtcctgatggagatgttattgactgtatccatgtctctcaccagccagcttttgatcaccctgacctcaaaaatcacaagattcagatgaaaccaaatttccatccagaaggtcacccttttggagaaagcaaagtctcttcaaattccaagccaattactcagccgtggcaccaaaatgggaggtgccctgatggaacaattccggtccgaaggacgaaaaaggatgacatgttaagggcaagctctgttcagcattttggaaagaagaaggataggagcttccctcagccaaaacctgcaaaacctctacctgacatcatcagtcagagtggccaccagcatgccatagcgtatgtggagggagataagtattatggagccaaggcaaccataaacgtctgggacccaaaaattcaacagcccaatgaatttagcctttctcaaatgtggattttgggtggctcttttggtcaagatctcaacagcattgaagcaggttggcaggtcagccctgatttgtatggagacaacaatactagactcttcacttattggacaagtgatgcatatcaagctactggttgttataatctcctttgctctggctttattcaaattaacagtgatatagccctgggagcaagcatctccccactttctaagtatagctcttcccaatatgatatcagcatcctggtctggaaggaccccaaagagggtaactggtggatgcagtttgggaatgaccatgttatgggatactggccggctcctctattctcgtacctctctgacagcgcgtcaatgattgagtgggggggagaggttgtgaactctgagtccgacggccaacacacctcgactcaaatggggagtggccatttccctgaggagggttttggcaaggctagttacttcaagaacattcagattgttgatggtgacaacaagcttagagctccaaaagaccttggcacttacactgagcaagatagctgctacaatgtccaaactggtagtgctggagattggggtagctacttctactatggtggtcctggtagaaacccaaattgcccttgatcattcatgttaatcaaacaaagctgaaaaaaaaaaacaaaaaaaaaaggtgttatttttatctagtgtagttattttagtaactttgtggtaccacttagctttgtggtgtataatgaagctcctagtctctttgaagtctccaaaaaattgttggagaaaaggggtggtgggtttctttcttagatttacaagaaacaagtttcttaattggttttccctgtttatattatatatatttgttgtttttgtttgctcctctctctggagctgtgaaggttgaggtgtgaatgtgaacagaatattctattatggaacaaggagactgtattttttatattttgctaccatgttttgattagtgaaaagctgtcttaataagg

SEQ ID NO: 89440 - DNA, 110 bp, Glycine max
  Clone ID: PAT_MRT3847_51774C.1
agacgaggcgagatgcatattcggttatagaactttccagaaattatgttcgcttgataaagagaaatatgcaagacttcacgcttgtggagaaattagttgaccccatg

SEQ ID NO: 89441 - DNA, 179 bp, Glycine max
  Clone ID: PAT_MRT3847_51775C.1
attgattctcaagttgcatattgcatgttctacattctttatttggaagcacagacgtgcttaatttattcctaaaccaaatgtacaagaaaaaagtatactctgtttcgcaatttgattattaacatatgtaagcagtcaagttgagagggatttatctttgttttgaaactttgacc

SEQ ID NO: 89442 - DNA, 176 bp, Glycine max
  Clone ID: PAT_MRT3847_51776C.1
atcgctcctgctatactatcgatgttcatcgtgtactataccctgatgtatacttgtctaggaattgccaagaatcagattaaacgcagaaggattctaatctggcattatatgaattgtctggaaatggccctcggatactatctgctgctatcacatatgcctgctctaccatc

SEQ ID NO: 89443 - DNA, 536 bp, Glycine max
  unsure (1)..(536): unsure at all n locations
  Clone ID: PAT_MRT3847_51777C.1
agaactagtctcgagtttttttttttttttttaggtttttcggttattgctaggatttgtttcataattggtttttgaaaggcgcgtgcttgattgattgggtttgcttgtttgattgattggttatgtttttttgtgcctgtggactgtgataatgtctgtgatgaatgctatttacttgtgttattggaaaatgcaaaaactgtaattggaatgaatggtttggtttctttttgtttttgaatctggggaatcttcggaatttagaaatacattacataatatgggactgtttgttgaattgtttttggcctttcaatttggttttgtgataccgatatttgcatgaatttgctttgctttggagaataagggtttgccttatttctatttttttttttttagttttttgaatgtaactatacaagattgctcagacacccggtggagggtgatggaagaaacagacgaatttanaattgatggagactgtataaagaattgaggaagatgttgaacaagatgaaaaatatctc

SEQ ID NO: 89444 - DNA, 409 bp, Glycine max
  Clone ID: PAT_MRT3847_51778C.1
ggctcgagcacagcaaaggttggttacggctggctgtgttgtagctgtgaagtgtgccatgagggagaggattaaccattctcgtggaatccgtcagtgttcatggggaaagtgggctgctgagatccgtgacccatgaaagggggttcgcgttaggcttggaactttcaactctgctgaagaagctgcaagagcttatgatgctgctgctgggaggttcctgggcaagagagccaatgtgaatctcactgatgagcctgttggcgctgctgtttatgtgtaacgcctcaaggagaatgcagaagctgagtcaatgaaagaaaatctgaataccgtgaagccgaatatgaaccagatgctcaattctggtcacaatctgcagggctactacagcccagtagatcatgtg

SEQ ID NO: 89445 - DNA, 256 bp, Glycine max
  unsure (1)..(256): unsure at all n locations
  Clone ID: PAT_MRT3847_51779C.1
catgatatggaatggaccaatgggagtgtttgagtttaacaagtttgctgttgatacagaagctgttgcaaaaaacctggctaatctcagtgaaaaaggggtgaccacaattatcggaagataagattctgttacanctatagagaaagtagaagttactaatatcataagccacatatctactaataataataccaatttaaagttattaaaaagcaaagagcttccaagagtccttactctgaataaagccatc

SEQ ID NO: 89446 - DNA, 1217 bp, Glycine max
  Clone ID: PAT_MRT3847_5177C.1
atcttaaatgtatctgcaacacatttaaggactacccatctaccgcggtaaagcttatagagaccctactttctgtagagccagcacttttcagagcagctgctgcagcccctctgaaaagtgagttctttacgtcagagcctctgccttgtgatccatcaagtttaccaaaatatgctcccagcaaggagattgatgctaaattacgggatgaagccagaaggcaaagagctgttggaggtagggaacaaaaagttgcctcaggagttggacaggaaaaagggcatagagcaaatgttgcaacaaaagacaatgctgacccaggcttattggtgcagcaaggacgttattccagctcaaggaaccaaagtgaattatccaaccctcatagaggaacggtgtctggaattctggttttccctcacaaacagtcagaaaaagaaatggataataatttctctgggcatatttataagaggccttcacattccggcccattggttcctggttctgtctgggcaaaaggcaggaaggaagttgatgatgtacctcctgtttcaaacagagtgaacctatcaaaactatctgggctagtggcatctaggactttgcctgaagatcaggaggttaaaccagttcactcgcaccacagaaaaccaattgaagtaagaaaatctgtggagtcaactaatggatcagagtcaagaagaaggcaggatcaaaaacggattgttgatctcaatcaaattgaaagtagaagggtcgcggctgaaaaatcaactccgggcgggcgcgagtccatgggaaacaagatatacctctcaggtccattaatggtttcgtcaagcaacatggatcagatgctcaaagatcatgacagaaagatccaagagttttcaagacgagcgagaatcgacaagtcaagagcaagaggtgagaaagttcgtgctctgcggaagtagtcgaattcgataaactatttctgatgttcagctgcttacatatttttatgacaccatttatttatctcaaacctaatgagagaaaggagcggggagaggaagatagtgtattcaatcttactgtagcatatataatgtaaattgcaggctttataagaagagattgatctttcttcaactcttcatgtttcacccttatataaaatataagcaattcaatttattatgttctttccacaaaaacccaagcgtacg

SEQ ID NO: 89447 - DNA, 411 bp, Glycine max
  unsure (1)..(411): unsure at all n locations
  Clone ID: PAT_MRT3847_51780C.1
tcnagatgaagaaatccatcctaaggtggcacaagatttggtcgaggaatggtttgattgcgttgatgaggaggattccattgtggaagcttctcaacgtgcagcactcattggtgtccagcggtgtggactatacggaaagaattcctcttgccacaattcagggttttccatatgcgctctccacccaaaaatggtgaaaaaggcaaaaggagatctgtttctgcggatggtgaagagatgacacccgattccgggaaccactgttgaagaggcttacaacaagctcaaagtggaaacttgataaaagcgctcctacattgggtggcactgaatgtcccaaggatgataaactcccttgtggaaaaaaacatgacaaacttaagatcggctgcttcactatcctcccta

SEQ ID NO: 89448 - DNA, 846 bp, Glycine max
  unsure (1)..(846): unsure at all n locations
  Clone ID: PAT_MRT3847_51781C.1
tcttgttggtttaaaggacgattaacacaataaactagcctaaccccttcttaaagcaaccctctttgttacttcctcttgttggtaaagggcgattaacacaataaacctttacagcaatatcacactttcttgtcatcgaggtggagaatggtatgtaaaaaaaaagattcagaagaggtttcgtaccctggtttcttgtcaagcaaaaggaagatcagacgcaaagaagatatttgaatgaaataaattgtttcataagcaatcaaagggaagataggccatctaaattcaccttgaacgaaatacaagatggaccagaaaatgagagtgatgactatggtctttgtttctccctgggatcattggaaaaaatttcatgtattaaaacaaataaattactgggatgagtgggtgaatctcaagattgctgaagatatacatgttgttgggttgctagagattttgcctatgaggaccttctctgtgatagtgcacatggatccagctgtggcaactagctggaaccagctaataggaaaaacactgaatgccaagtttggatgcccttggatgacaccaatgcagaattcttcatcatgtgacaatgatgacaataattatcagtatgtggagaatccaaacacanaaggtggcaacaacaacaacagaaataatgataagtacacactggtggccagcaagaagatggttgggagtgttcataagtgtgtggatgaagggaagaagtgttgaggaagcatagtgtctcaatgtgagagtgtgctcagtggcatgtggggtgatggngtatttggggaacaaaagaatagtggcagttagcat

SEQ ID NO: 89449 - DNA, 369 bp, Glycine max
  Clone ID: PAT_MRT3847_51782C.1
caaaagggacacgagaattacaagccatgatgatctgtttggttgacataaggtattaaaatgcaatattctgttaaaaatcaatataaagttctgttcatccattgaatttgtcttgaggttcatgtggttgttgggaggggaggatcatgtttcactagtatcaagctattggcctaaattattatgaaatgattcatgcacttttcacgaagtgatgatttgcattttgtaagtgcatgaaagtggatcaacatgcaagatagaaaaattgacatattacagatactgtgtataattatttctgtctgttacttttcatttgttcacaaaacattttccttataccattagtttccatgttatgtt

SEQ ID NO: 89450 - DNA, 555 bp, Glycine max
  Clone ID: PAT_MRT3847_51783C.1
ttggggggggggggggggggaaaactattcgcagacgtaccaatagagatggtgtgatgcgatacaaagaatgtaatagagggagggcgggaagaagatggggacaactactggaaaaactacggcctaataaaataggatggcacgagttggttaaggtgcttggtgagataaaccgcgcattgggggggttacaataaaaccataacaacacctgtggcactaccgaaccacgccgaattaacgcgtagccttatactaatagggtatggagtactaggcaggtgaaagagttgcattggcgctagcgcccccaatgggctaataattactataagtatgctaatacgcggcaagaacaataggccaggtgcagacgtgcggcgcgcgcacctgagtaacgatactattaaaccaataatgcgcacaaatggttgcggatcacgaactgctgggttaggcgtgattgctgtttattaacgtaagtgaggcgacagtttggccgttgtgctatagccacggttgggtggttacgcaaaaaacgtagagcggata

SEQ ID NO: 89451 - DNA, 340 bp, Glycine max
  Clone ID: PAT_MRT3847_51784C.1
cgggccgccttttttttttttttttggcaaattattgtcacattggtttaaattaaattttttgcattagggttttaatcaacccccttccaggccggaaattattattattattattattattagcctttaatggcacttaccaaacttaaggcttccgtttctttaaaaaaaaatggtttagggaaaccaagaccttccaaattattaattttttaaccacccgttaacccaattcaaattaaccaattaagggccgccaaatttttaacttaaccatgaatttgcttcccaatccttggggtttcccttgctaacttaacaaattttcccctttcca

SEQ ID NO: 89452 - DNA, 432 bp, Glycine max
  Clone ID: PAT_MRT3847_51786C.1
tttttttgatttctcatcgatttccccccacaaataaactcaagtgtcgatactctgggttaatgttgttttatttgaaagataaacacatttaaagagttaattattatgagagcttaggtaggaggttgaacaaatcaagttcaatggttatgttatgtgggttgacagatcctgatgtcaccgttgcttgtaggtgtctgcttgatgagagggtgcggggaccgatttctctcactctcacacgtagtcagttacttggactcttctatgtagttcggccctccatgtgttcgttatgtgcttttttaaatttaatttatttcttcaaataggtattcgagaacagaatagaagaagccattgtgaatagtacatgtgatcggttagaatggaggctatcctttaattgtttctttttttttttttttg

SEQ ID NO: 89453 - DNA, 461 bp, Glycine max
  Clone ID: PAT_MRT3847_51787C.1
gtcgtataaagcgactaacaatcatcattaattttcataaaatgcaagaaagctaatattcatcctaaaatataattattgtttggtcttgcacttaagggtgatttttatgattacaaaatgattataactgtagataaataatatattttctttggcttttgtcaatttatgtatgtttacacttgcataatatttttaacatatttttataattaaatttttttctactattgcaatatgacatcgtgtaacgtacaaaattaaacatattgaattacaatattaccataaacatcagatacacatgaactaaccttaatgaactacttttattttttatttacaaatccaattaaagaaaatagtttaacaattcatttataaattttcaaattgttctaaacttacaaaaaggaattaaattcatttatattttttctatacaaattaaaaaatta

SEQ ID NO: 89454 - DNA, 234 bp, Glycine max
  Clone ID: PAT_MRT3847_51788C.1
agagcatccaccattcttttccctacaaccccttctcagctgtgagcaggaattagtgggattttcagtccctcacaagcacttcttgtgaagccagtgaagaagcagatgatggggaagagcaagggaatgagaattgcatgccaagccaccagcattcctgctgatagaatccctgacatgggcaaaaaacagctcatgaatctacttcttcttagtgccatttcacttccc

SEQ ID NO: 89455 - DNA, 255 bp, Glycine max
  Clone ID: PAT_MRT3847_51789C.1
acacgcgtccggtggtgtcgctgttgacgattttggtctgtgaatcatagggacacgtttgggtgggattcccaaggagaagattcgttgctatgcgcttgctccagctaggtgtatgtccctcaatttggccgtcaagatgatttcttgccaagaactgctactccattggaagatatattcaaatcagtattctgggtgccattggggctttgtgcctctctctctgaggcccctcttcgccccccccacccc

SEQ ID NO: 89456 - DNA, 444 bp, Glycine max
  Clone ID: PAT_MRT3847_5178C.1
ggctcgagaacggatctggagcactgatctcaccctgctaatgaacatgtgccatgactgggctattataaggtgagaggctacactgatgctaggcttctcatgacggagctcgtgacctgaaggaaacagatcgaaactttacattactaaacggcaggtacagtgagaccatccaagacgctttgcaaagagaatgccctgaactaggctcatgctcctctattcacttggtgtatgccaaagatcatattgtgtatctgggaggatcacatatacgttttgatactggaacaactgacggtactatgatcactgcatttgtggcctgagctggggaaccagagcacgatgagcccattggtgcatttcctgaaaactattgtgccttgggaaatggcactcatggtgtcttaacgacggtcgtggctgccacagcctgta

SEQ ID NO: 89457 - DNA, 624 bp, Glycine max
  Clone ID: PAT_MRT3847_51790C.1
tacggctgcgagaagacgacagaaggggatgaggcagtgtctgaaatgtgaaacttgattaggcaaaatggtgagtgaaaatggtgaatagattcctcattctaaaattaacttcatcttttccattcaccaaatccattttctttctctgctgcaacatacatagcccaatgctctctttttctttaacccattcactttagggtttgtttggtaggatgaatggagaagaaaaaacaccggctttggctccaaagagattcatcaatcatcagatacatcaaatgctgtccttagtcttctgaaaacctacggatgctccgaaagccagttctctgtcttgccaagaggttactctcattgctcttaatcaaatctcactacattaaattctgtgagcgagtaaatggtgtctaattttcttctcattgcaaggctgtctgcatcatcatcattcacacgctactagagcacccatattccattggattctctggtgcgacacaaacactctgcttcactttttttcttcaattcattcacttcaggaacctcttttgattctgaatcagatggaaaccaccataaaagggggacctttactgggtcttacctcattaactc

SEQ ID NO: 89458 - DNA, 517 bp, Glycine max
  Clone ID: PAT_MRT3847_51791C.1
gggtactatatccccggtatccgtgctcacccacacatgactagcacccccttgcgatcctgctgtcccagcattggaggtagacgagagagaaaacatgcacatgaccatcttaggagctgacaaggtcacaacacggagggacattcatggatctcagttctagggacagcgtacaatgtatcaaattgggctatggagcactctgcaggtgatgatccaatcacaaaccttgcaggccagaatgtcactgatgtattgataacttaccattctggcactacttggacacaccttgtgaaagcctaccatgggtaccacctcagagacttgaaagtctctgaggtgaccatagactacaaaaaactggcgtctgagttctcaatactgtgccttatagacacccatgggcatgtccacttatgcaccctggcctctgttgttcataagaacctcattgcactatatgccgtgctgaggagcactatagcactgactcattcgagctcaggcatgc

SEQ ID NO: 89459 - DNA, 671 bp, Glycine max
  unsure (1)..(671): unsure at all n locations
  Clone ID: PAT_MRT3847_51792C.1
cacgcgtccggaacttgttggaacctaatgttctgtcgtgtgtcgtgtgctgtttgctttttgctctgattctgagtttgaagcagtgcttttggtatattgaacatgattagtagtaattaattattgtagttggggtgtcactcctgcattttttttaatcagagttgctttactaattactaccctgacaaatctaaagatttttgtcttccatgcaattgtaagtgatgttagttttttttaaagcttaattattaattttatcttcaaattattttaaataattaaatttgatttttaagtttttaaaaattttaatcagatattatttttaaaaaaaaatgaatcaatttaatttttaaattcttaaaaatttaggacctaattgatttatttttaaaaatttgtgaatcaaatttaacattttaaaattaaattaatttatttttaagaacttgttaaattaaatattgtaaaatcaaaattcaatcatttaaaataatgggtagcanattaataattaagtaattttttaaatttgtttttggtggttcttgcatccatgatttcttggaactcggaacataatggcatgtcgggatctgggttggttgctcttttttcttttttgctacaaaggaggccttaaggccgaaaactaaacccat

SEQ ID NO: 89460 - DNA, 566 bp, Glycine max
  unsure (1)..(566): unsure at all n locations
  Clone ID: PAT_MRT3847_51793C.1
aagctnggatcctctagagcggccgcttgttttttttttttttttaaaaattttttgggacataatgaatgatatatgcttcaaaaacttcaaaaagtgttaaatatgtttttagtcactatgcaagaatatatttacttttaatccctaaaaattcattgtggtaagaagggggtgcatgaccagtggtggttgaagagggaggaaagaaaggcaggtgtaagttgtaactagagaaaaaggtagattgtgatactgagggagaaagaaggcaatagaactctcacaatggagagaaaaggatccacctaaactttaaccaaagttttgaatttgaatttagtgtatgtcctggacgtcctggatgagagagttaagcccactatcttcagatttttttttttctagttcagatttttcaaaagctaaaacaaatacttttaacaaaaataaaggcaactttttcgatcagatcaagccaagatgggccaaaacaaattatttcagaccatttgtgtccgacccatcaaactatacccattttcacactgcacctccacattttg

SEQ ID NO: 89461 - DNA, 373 bp, Glycine max
  Clone ID: PAT_MRT3847_51794C.1
acacctcctctaagcttggttgttcaacagtgtctaacactgaacaagaagaaaatgcaactcctctctactcttacgggatagggcacactctcacatcctcgatgtgggaacctcgtgacacacgaagacatcagataagacgacgtcaacatcatgcatgagccgcatggaggaattcaccatttcgcagcgtccaatttgtgagagcacagagtcaaggtagggaagcctatcgcggaccctagtcgatggagctggtttccatgcgaccccaccaccttagggttcacggcagcacgataactattgtttgagtgatggaagcggtgctgattgacatgggaagctccacgaaatgcaagaagctatg

SEQ ID NO: 89462 - DNA, 306 bp, Glycine max
  Clone ID: PAT_MRT3847_51795C.1
gtccccttgaggtacgagagttgtagcagaggattggcggaggacgaagtctacgtcaacaatggttaacgaaacggtgcgttggtgtgctttgttgtaatcctctccgatcatcatcgagaatgcgcagtctggctgcaccttattacttgggtggtgcatctgtcgccgcagtaagccttcttttctcactctcatctcactctgtaaaagatgtctagcttgcatccactgcagagcatctcaattccgaccctgcatcggtatccacacatggaaagtgaatcaaattgtaaggtccaccct

SEQ ID NO: 89463 - DNA, 362 bp, Glycine max
  Clone ID: PAT_MRT3847_51796C.1
acgaacactcgtatcctgcgttataagatctacaactggctcagaaatgggccatctggggatacctgaaacctacgcttgttacacaactcacacgcaatggaataggccaactatagcaacccatcccatatcgatttcaattgctgaatggcaaatcatcacatgctcatcaagattatttacgaccagaatttacgcaagaattggactgaaaagtaggctacgtttcaatatttaatggccacttatgccatgatttatcaagctctttgcataactatctttatgaaaacatcttgcaacagcatgacttttggactgaatacagaaagcgccgtggaatacgcttaccttgacac

SEQ ID NO: 89464 - DNA, 294 bp, Glycine max
  unsure (1)..(294): unsure at all n locations
  Clone ID: PAT_MRT3847_51797C.1
ctttgtgacctttggtccaaaaatgattccaagaaacatctatttatagagttacacgctcttgcctcatattttgtttcatattatatattacagggggccggaaattnctaatatattactcatctaataactcaaataatacaataccttctccattcatacaatataagcctcctcatttacttttttcacactcaaaagtaaactgcagttaatttcattcatcgtatcacattattttttttacaaactaataaattctccttcttcatttttacacttattgttttt

SEQ ID NO: 89465 - DNA, 127 bp, Glycine max
  Clone ID: PAT_MRT3847_51798C.1
tgcaccccaagcacacctacgaattctcctaatgatatgcatcatatatcaatggagaacaccgagggatccagatctgagaggaacggcgtgctagcctctggagcgcaaggtggcattgattacc

SEQ ID NO: 89466 - DNA, 628 bp, Glycine max
  Clone ID: PAT_MRT3847_51799C.1
cctcatgagcggccgcccttttttttttttttttttttttaaaccctataatttatatcattcatatttttaatataaatcggttcatgcagtgattcacactagttgagctagtgactcgttaattcaatacatcgatgaccggtctagttctcataacatagggtgcaacttcctccacatttcaaaaaataaagatgcacaaacacggtgacagaaaaacaagaacagaaatgataaccggcaatttacataccaactcatacaatactcggcaatgctgctttcagtactagcgtgcattacggttaagcaatccttgaaaagataagtaaagatctttgttatctgacccaaatatctcatctgcttttcttaaagtttcctcccgtgtttgcttctgagcatttaattcctttatgttggcaagaaatgcactgaactgctcatatgaaaggcgactcctggcctgacgaaaaaactcctttccatcaatctttggagttcgaactggaagtgatcgtccccatggtggggagtttgctgctgatgactgctgactagatgaataccatgatgagagagatgttcgcccatcatatggaagttttgtaggagaggtgggacc

SEQ ID NO: 89467 - DNA, 339 bp, Glycine max
  Clone ID: PAT_MRT3847_5179C.1
gtgaaacagcaaactagcatcacacgtcgctcaaagccaatgcacctagcaaaaggctgtgcgtgggatacctggcctgctcgcacgacgacactagctactcgaccggctgaaactcactacactacgggcatggctcataacggcatggcagtgtggaaacaacgagctcgtaacaactgcagcaggccatccagcaagatgaagactgacacaatctggaacgcgatcgctatcaaggccaactcgagatcattggctgcaccatctaatgacacagacgctcgggctacgaatgaggtgccccataatgcacaaagtacattgacgacaatgtac

SEQ ID NO: 89468 - DNA, 347 bp, Glycine max
  Clone ID: PAT_MRT3847_517C.1
aaagcacccaatttagcccttttttaatgggaaaaacacattaaaccaaaagggccgagatttttacattttttgaggagaaagttttaactcccaaagggtgtttttttttatacagtaacaaaattttttttgattcccccgagaccctttttttaaatacaggggggttgaacccgttaaattactcaagcccaacccttttttttggggggtttttttcctttggtttaacaggggccacacgtgttggggtggtcccccctcccattttggatctaaaaggacccaaggtttggtgcaacttttttataccgttttcgattttaaaaatattagaaatgggg

SEQ ID NO: 89469 - DNA, 1118 bp, Glycine max
  Clone ID: PAT_MRT3847_51800C.1
gccatacaaaactacacagctgaagaggacactgccaagtactccaacaacaacaacttctacagcttcaagaaggatggctacaacaccaaccaaaatgagttgagtgaaacaacaagactcacaggcacttcttacaccaacaacaacaactacttctacagcggtaaggatgcttttgctaagcagaatgaattgagtgtttttttgtacactgaaggtggatacaacacggaaaatcagaacagcaacaacaactacttctacaacggcaaggatgcttttggtaagcagaacgaattgagtgacacaaagtacactgaagaaggatacaactccatggagaatcagaacaacaacaacaactactacaacggcaaggatgcttttggtaagcaaaatgaattgagtgacacaaagtacactgaagaaggatacaactccatggagaatcagaacaacaacaacaacaacaataaatattactacaacaacgaccaagccgccaatgagaaatacttctacaacaacaacaacaatgatgatgctgccaacaacaggtattacaaaaccaaatctgtcaacagcaattacaacggcgagaggcagggtttgagtgacacgaggtttatagagggtggaaaatacttctatgatgttaagtctgaaaagtacaaccatccaacacaatatggtggctcaaccagaggagttaactcagaaaattggtccagcaacagaggttactttggcaacaacaatgtgaactccatggaaggttaccagaaccaggaggagtttgaagatgaccaagaggacttcgacccttgagctgcaatcatgattttgtcaaagtgaagagttcattttgcttttgatttagagtattcacagtgggtgatcgatgttttattgtgcttttcattataaattacaaaacaatgttaaagggtgggtagtaggatattgaggggttttacttagtggtaatcttgttaagttaaatcttgcttttggaattgcacagtctatgtaatgatgtgaaaatatggcatgtagtatcaaggcatatgtggcttttgctatcaaacatgttctagttttgcgcttttttcact

SEQ ID NO: 89470 - DNA, 965 bp, Glycine max
  Clone ID: PAT_MRT3847_51801C.1
tcattggcagaccttactctgcgaaataactctagagcaggattggtcagatttgctcggcgatcttgaccaagtgttacagactgagatctcaaagatctcacagagtttggcacttgctgcaccaaaggagatgtgacatctgcattaccttcattggaactgcgatcccttgtgtgtattaggcgccctttgcagacaaactgtatatgacaagaagctggagcttgtttacacacagagatggctttcttggatttgaggtccatcattcttctattatagtacttatcagatgctgctcccataacaagcttttggatgccatgctgggagatgagttctaaaattcctttttcaatgctatccatttcaatatgcagtttctctgctctcacccccatccgttgacaaatacgaagatagtcatccagaatcctatgcatgccttgcctttcttcttcccagtatgcttgaacctgctcctcttttagtgcacttgcagggaatttacctcccagtagggggaccattgttgcacgaacatgcacataaagaatgcaaattctctttcctccggagttttgtattgcccatatcagatttaatctgctctccttcacctcttttgtcacagcaacatagattggctgatcaaccacacttggattaggctcttccaaaaattttccaccagcatcagaaagtgacctcactgaacccatcctttgtgttgttgcaggcataggactcaccacagccatcttaaaccgttgtctctatctccaactcacttcacaaattcacacacacacgagcgcgcgcgcgacacacaacacaaagaaagtgtgatgtgaaaaaaccaagccattagaatggtaaaaaggagaagggtttgacggtggtagcgtgtctcttgcttagatattatatgagcgcatgaaaagaacaaccttgtcttacct

SEQ ID NO: 89471 - DNA, 327 bp, Glycine max
  unsure (1)..(327): unsure at all n locations
  Clone ID: PAT_MRT3847_51802C.1
tgcccggttagcaagtgaaaacccacacagngcngcgacagaacgagaaaagatggaaggggnaaccaccacgggccccccaggagaggaaaaaggaaaaacagcccaagagggggaaaaaaaaaacggacacgaaaaacgaaacacccgacagcgggaagacgacaaggggcagccaaccaaggaaaagacggccggagagnngaacgcggaaacccaacgggaagcccgcgcacagaaaccngcaacagcaaggaaaacgagaggcggaaaacaaacagccgcaaaaaacaacagcgcaaggcaaaagccccaaggacgaagcca

SEQ ID NO: 89472 - DNA, 311 bp, Glycine max
  Clone ID: PAT_MRT3847_51803C.1
cgttccttttttttttgggttgttttttgtaggcattcttggtaaatgcttttgttgttgttctttttttaaaaaaccggggatttcacctctgacaatgaaaaagcccatgcccacgacagaccctgaaaaaaaggggtccgaccccaaagaagccacaatttgaacgggggtctgcggcgtaaaaccaaggggaaggggactgggcgaacgaaaaaaaggggcgctcgaacctggaaaccgaccaataagcggggggccccccgccagaaaaggacatgggccgaccggccggaggggggacggagggg

SEQ ID NO: 89473 - DNA, 801 bp, Glycine max
  Clone ID: PAT_MRT3847_51804C.1
cactgttttttagaagacgacagaaggggatcagtatacattgtctattccatcttccactctttcacactcacctatggctccaatctcaaaactcattcctttcctattcttaacaacccttttagtttccctccaagttaatgccagagacagccaattcttcagcaaagtcacccctctcaacaacaacatcaaagagactgagactcccaaaaatgaaggccaagtaaacaagccagaacaacaaccaacattcattcctgaaactgaaaacagttatggcctatatggtcatgagactggtctgcaccctcccaccactacaacaactaatgctgcaccctacaccaccacttacaagccatacaaaactaccacagctgaagaggacactgccaagtactccaacaacaacaacttctacagcttcaagaaggatggctacaacaccaaccaaaatgagttgagtgaaacaacaagactcacaggcacttcttacaccaacaacaacaactacttctacagcggtaaggatgcttttgctaagcagaatgaattgagtgatacaaagtacactgaaggtggatacaacacggaaaatcagaacagcaacaacaacaactacttctacaacggcaaggatgcttttggtaagcagaacgaattgagtgacacaaagtacacagaaggaggatacaacaacatggaaaatcagaacagcaacaacaactacttctacaacggcaaggatgctgttggtaagcaaaatgaattgagtgacacaaagtacactgaaga

SEQ ID NO: 89474 - DNA, 1533 bp, Glycine max
  Clone ID: PAT_MRT3847_51805C.1
acggctgcgagaagacgacagaagggggagtggaaaaattgagagtggagaaaagaaaaaaaagttcaagcccctctatataaagaaacttagacaatcaaagccactcatcggtatacattgtcctctccatcttcctctctatcacactcacctatggctcccatctcaaaactcattcctttcctattcttaacaacccttttagtgtctctccaagttaatgccagagacagccaattcttcagcaaagtcacccctctcaacaacaacattaaagagactgaggttcccaaaaatgaaggccaagtaaacaagccagaacaacaaccagttttcaccccagaaacagaaaacagctatggtctatatggtcatgagactggtctgcaccctcccaccactacaataactaatgctgctccctacaccaccgccaccacctacaagccatacaaaactaccacagctgaagaggacactgccaagtactccaacaacaacaacttctacaacttcaagaaggatgcctacaacaccaaccaaaatgaattgagtgaaacaacaagactcactggcacttcttacaccaataacaacaacgatggcaacaacaacaattacttctacaacggcaaggatgcttttggtaagcagaatgaattgagtgacacaaagtacactgaagtaggatacaacaacatggaaaatcagaacagcaacaacaactacttctacaacggcaaggatgcttttggtaagcagaatgaattgagtgacacaaagcacactgaagggggatacaacaacatggaaaatcagaacaacaacaacaacaactacttctacaacagcaaggatgctttcggtaagcaaaatgaattgagtgacacaaagtacactgaaggaggatacaactccatggagaatcagaacaacaacaaatattactacaacaacgacaatgctgccaatgggaagtacttctacaacaacaatgatgctgccaacaacaggtactacaaaaccaaagctgtcaacaacaattacaatgatgagaggcagggtttgagtgacacgaggtttatggagggtggaaaatacttctatgacgttaactctgagaagtacaaccatccaacacaatatggaggctcaaccagaggaatgaactcagagaactggtccaacaacaggggttactttggcaacaacaatgtgaactccatggaaggttaccagaatcaggaggagtttgaagatgaccaagaggacttcgagccttgagcttgaatcatcattataacagtgaagagttcattttgcttttgctttggagtgttcacagtgggtgatcgatgttttattgtgctttacattataagttacaaaaaatgttaaaaggtagtaggataatttattgaggggttttacttagtggtaatcttattaaatcttgcttttggaattgcacagtctatgtaatgatgtgaaaatatggcatgaagtatcaaagcatatgtggcttttgct

SEQ ID NO: 89475 - DNA, 292 bp, Glycine max
  Clone ID: PAT_MRT3847_51806C.1
cggaatagaacagcactaagaaatcgtatctatactgggcacaccaataaacaggggcgggaccctgccacaggggggcgcataaactctccatcgacccctaccaacaagaacaaacctccctaacttcatcacactgaccaaaccggatctgcctcaaaaccataaaaggcactaaagacgaaacgtctctacgacagactggaatgctacttcagacacttaaaccacacaccatacttgacgctcactcgctcccttcttaatctgaggaaaacgcacacccacaaaa

SEQ ID NO: 89476 - DNA, 459 bp, Glycine max
  Clone ID: PAT_MRT3847_51807C.1
ggggagggaaaccctattaggggggaacgaaaaattaaatgcgttggtgggagttaaggctcaccggaaaaaaaagggtttttccttggaaggaaaaaaaaattttccctccattccattatataaaaaaaaactattacgtacacagggggaaggggtaaaaaagctttttttttttgggctcaaaaaagggaaaattttcattttgaagaaaaaatttctagctggtgaaactcccccaaaaaaaagggatcaaaaaaaacagcttcactattcagggaacatgggacttcctggggctttcaacctaatcaaaatcaaggggtttttccctaaacactttttgaaaaaaaggcattcgagttttcttcatgcccttgaagcagctaagggtcccattaaaaaagctgacaacctgtcttggaaaggggcgacaaaatgaggactgttgttgcataa

SEQ ID NO: 89477 - DNA, 371 bp, Glycine max
  Clone ID: PAT_MRT3847_51808C.1
cccgcgtgcgacaaaaggtgggacgggtgcgcgaaaactccatttcggtgtcagagctattaggaagggggggtctggcacttgtttctagctcttttatatataactcagatgagaacactcaccttttcttatcgattgcgatggggggaatcatcgcgttattatttaaaaataatatagtacattgaacttccgcgcttgctttattgcttggaagagccaattataaacagttatcgaaaacagatttgtgggaattgtgacgcttctatttcaaatgcgtgaggtctagccgaaattaatctctcagcgagaatatcattcctttggctatgaacattaatttgccgctttatgaatgggcaaac

SEQ ID NO: 89478 - DNA, 255 bp, Glycine max
  Clone ID: PAT_MRT3847_51809C.1
ctaaaataatggggggttttttaaaaaaaactgtttgcaataagaaagcaaaactgcatataactcaaaaattgataagagtaaacattgtacaggttctaaattaaaggggacaatctaaggaaattttaaggcaaaagtttaaggaactataaaaaaggaaccttaaagagataaaaacacaactgttagcaatagcacctaaaaaaaaaaatccccataacgtacaaaaagaacaagagtgcttcggtcttg

SEQ ID NO: 89479 - DNA, 668 bp, Glycine max
  unsure (1)..(668): unsure at all n locations
  Clone ID: PAT_MRT3847_5180C.1
attctctctctctctctctctctctctctctactataacactttttttctactcgccgccgatcagccacatcactctccggcgacacccttctcctttttaatttgctctttccccaaaattgcagcatatgtttctttctttctttcttgtaaaaagaattgtgtggttgtgtggtgcggtttcgatttggataataagcgccgtctgcgcttctctggcggaagaagcgggtgaatgtgtctttctgttaatgcggccaagaattgaacttagttgacgcttcttgaagtgtcggcattggcgaatggtggtttcgtgagattgttttaagttcgatctggggtgaagcaaggatctcgtaggagaggagaagggatcaaaacgacggcgtttagggttttgacggttatgaagagagaacagtaaataaatgtgcagggcagagtgggaaggtttgatgggtctgaagaagtgggagagtaaggttcagaaagtgggaatgggtgtgttaggttcggggggttcaggttcaggttcgggttcgggttcgtcgcggtcgagaatgaagatgtggatgatacgggcaaccacatcggtgttattgtggacctgcatcgttcagttaacgggcgttggtgacatgtggngggccgagagttttgaaa

SEQ ID NO: 89480 - DNA, 564 bp, Glycine max
  Clone ID: PAT_MRT3847_51810C.1
cttaaaaatcttgcccatatcacattaaaagatgttccagacattgaattatttggagcatgaatattcaaacacacatgccagaatcaaaagtatcaatcatctggagtctggacacctagaattagaataaaattctaatgagtcaacagccaacagatatagtcaatgtgccgctaaccctcacaatttctgccctccatcacacaccagattttataggattttatcacatgaaaagccaggaatctccaaatttgacgacgtgttggtccagaaaaacacaatactgattgaccaaagttcattccttagccttgagtggacacttggctccacttcaatacctcgtgcacctctcctcctgtacaacacaagtgcaaatacagggggaaaatgattatgccatcctcaaagttttttactatgactaccattacgctacccattacgaagtgatcaaccaaagggccactgctatcaagaaataccttgattacatctttatatttctatttggcaggacaattaaaggatgagtctaccaaaattaagattttttac

SEQ ID NO: 89481 - DNA, 435 bp, Glycine max
  unsure (1)..(435): unsure at all n locations
  Clone ID: PAT_MRT3847_51811C.1
nctactcgtccggangannnnggggctncatggccacacctgtggctagtttttggggcaatgcagaagcttgagtttgaaaagtgtggtttgatcaattaattgcatagttagagatttttatcataattccacagcttctccttagttgaaaggatgccccttttgatgtggttaagagagatgtgaggaatgttcatcgctgccaacaatgtttaataagaataattaaaatttgaagaaaaattatttcatccagatggaatcatgatctgtttttgctaattttcagaaataataatagcagatggatcaagaatcactagtgctaagatgtttactaatatgatttctgttgtctgatcggctgttccttttaaattgagaatcatatcatattatcataatcataacatgagacattagccaatattt

SEQ ID NO: 89482 - DNA, 554 bp, Glycine max
  Clone ID: PAT_MRT3847_51812C.1
caaaaacaaatcttgatagcatagattatcatcggttgtaaatgtataaagatattacaacgggatattcgattggtgaagataaaaaacatattcacgcaatacagagatcgaaacaatcataggggaaagagaagagaagcacataatgccgcttaatagatgaagataagagtgaatattaatgcacaaatgtaaaataaaataattataataaggcagtggtagatatgattaatccattatacttgcataaaatataattagagatggaataaacaatgtgcgaaacaggatattctgacaagaaatagataaatgagagcaaatattaagaggcaaacctaaggaactgcctgttctttagaaatcacaaaaaaactcaatacaaataatgtgactttccttgagcctacaaaatttatttaattaatccactatttattaacatagatcgatatctaacttaaaaaaagataaaagaatacctctaacataaagcattttattgaacgtttttaaaaaataaacaaaatatgcccattttaaaataa

SEQ ID NO: 89483 - DNA, 443 bp, Glycine max
  Clone ID: PAT_MRT3847_51813C.1
cgacatcgtcggttgtgagtgcggacttaactgacaatcagcggggtggactatgtaggtacctagaattgtggcctagagctatcctctgacatacctgttgcagagatgggtcatattcatagcacgagcgcgagcttgatccaacctgtgaaagcgtccaataagggcacagcattagacctgttccataatactagctaaatagcatatgcgttgtggggatgcttgaccgctgatagggactggtgtgccacatactaaaaagttcgcattcactttaaagtatcgcggggaagaatcaacagatgatcaaactcttcctgtcatgatcaactgactttcttcgcgcagctttggtactaactactacgtctgctataacacatagacgcacgtattccgcatcgcatttgaggctggatgagaaaatgtgaactgta

SEQ ID NO: 89484 - DNA, 263 bp, Glycine max
  Clone ID: PAT_MRT3847_51814C.1
taggcaacttcttgctgctactgacttcggtgatggtggacatactgcagcatactatcgaaggatttattggaaaattaatttagcagagcctttactttgtacagctaatgagtctcatttaggtgatgaaattcagatgatgctctcactcttatctgcacctcagcttacctcggcactgggagcaagcaaggaactgggccaagcagttggaggccaatggtcgcaccctggaaatctgctacgctccatgttactga

SEQ ID NO: 89485 - DNA, 211 bp, Glycine max
  Clone ID: PAT_MRT3847_51815C.1
ggggctgtcattaactaagtagatctgccggctgtatgccaaaaaagagatgcgtatactaatggtggatgttgaatctgcgggtaataccaccattatgtacacgactaagctatgagagattgtcaccaccgttcccaccatcgggtttaatgtggaagctgtggaatataagaacatcaacttcactgtctgggatgtgggaagtcag

SEQ ID NO: 89486 - DNA, 380 bp, Glycine max
  Clone ID: PAT_MRT3847_51816C.1
cccacgcgtccgtaaaaaacagtgcaagtattcagagagattaaaaaagagacaagaatgtagctcgttcaaggaactcacaaactcaaccaggtttagtcgcgattactttttttcaaaaatgcacagtgctaattaaactaaatatttgagggttgcatctttgcattctgagatacattaatcacttcaaaaaggtctgaatgatgttgcaacaagcgactccagccaatcatcttatgtatgtgacccgacattccattcatacaagctgagactgtgcatggatcattccaagcttattgcttaaccttggagacgtttcatatgaccccataggtgaagagtggggctttatggtgctcttgccaacatatttg

SEQ ID NO: 89487 - DNA, 142 bp, Glycine max
  Clone ID: PAT_MRT3847_51817C.1
atcacacaacgaaaacaaaattgtttcttccattgctgactttaagttaaacaagtggaaagttatagcttagtacacaatattacccatgcacaaatttgtgttgatttcaacttattaagtctcactaaatgctaggaag

SEQ ID NO: 89488 - DNA, 605 bp, Glycine max
  Clone ID: PAT_MRT3847_51818C.1
cccacgcgtccgcccacgcgtccggaaattcataacatgtacgaaggagaggaatgtggggggctgaacagttaatagatctccttgtgaagcattggaggacgacactgagaataatggagatgtctagtaatatagatctgcttttgaagcattggagtgaggcactttggaaggctgctggcatctcggggggtgcagacctaatttccaatgagatgacggcacctctggaccctgcgatatacctcctcgtggaggattggaggaaggcacatcgtgcggttcgtgatatctcagagggtgtagtcttaaaatccatgtaatttagaaactttttctggtttcatttcttactgaactttgtctctagaagtcacgtttatgaaattcataacatgtatcaagtgttgaagaggagatcagaaaagattttgaggtccttgtaattcattggaaggaagcacttcatgaggctgctggcatctcgaggtttgtagtcctaaatccaacgtaattgaaacgctttgctctttctcattatttttaccaaacatcgttattacacatatattagtttgttactggttcatgggtttatttgt

SEQ ID NO: 89489 - DNA, 895 bp, Glycine max
  Clone ID: PAT_MRT3847_51819C.1
gtatatatgcgatgaacgctttgtatatggaacttatgccatttgatcttcttgtagttcagtggatctcatcaattgtatgactggagaaagagagctcatcaaagcatagtaagtgacagctacactttgtctgattgcttacaatgatatcttcacctgttgcaaaatcatttataactttgtcttgttatatgctgggtgattcactgaagagggggcataattaggcataattcataacactcttataataaaatattaagaatttagtcatatctttatcttggaaggttcaccatttgcctttgaaactttattacagtggacctggatcatcgaattattgagtgtatttaacatgcattggatttggtgtttggtcctttttttccttgagtttttcttttccttcaaagggaaagttggaccaaacaattttagaaaagcttttaaatttaaaagtagggttttctgaatgaagaaaactcaaaaacagagcttctatagaagctcattgatggagcttctacttttgtggaaacaagaagcctaaaaatgccgagtcaattgataccatatacggaaacatctagtctttgaacagtactgtattgaaagatacaagttctgtgaagggagggatgtttctcagtactgatgatcacatactgatacagttccctcaaagcataggcactttattcaaatagcaatttcattctgatgatgtttgttaattatgcatccaggtttgaaacaacacaaatgacctgtgaaaccaccctataaaaagatattagcaaatttctataatgttctccattaacatgctactattttcttataggatggttacataggttatgtgcattgttttaaacctgcaagggaa

SEQ ID NO: 89490 - DNA, 476 bp, Glycine max
  Clone ID: PAT_MRT3847_5181C.1
ggttttagattattcatgatgatagggcctataaccggagcttcgattatcctcaccaataatctatatacaaatgcagcccattgcggagctcgcacaatttcgccttggcattacgatggatgataattcatgctccttggctggcgtcattacacgctttttgcccctcttattaatagggctcgaaacactgaatatcctttttcttactgctttctaatgatttgtgatgtgagctctgaagaggtacactcctctgtggtgataggagcgtttttcgtttgttggcacctgacagcgacgcatgattggttttgagagtccacccctgtcattttgatctggattcttatatgcgctggatcttacaagctagttctgggaggtgaaaccaacaaactgtctgactgtccttccctccttaaaaatctgatacctaagctaatatgggaggccgattactagcttactta

SEQ ID NO: 89491 - DNA, 281 bp, Glycine max
  Clone ID: PAT_MRT3847_51820C.1
aatgttattactccaaactctcactaacatgaacgagaacgataatgacattgactttgaaaatgtcgctggtatcagcgttcacaactaggaatcataaactggtatatgggcaaagacaacaaaatctccaccattaagctatatcgctcaaacttatgctttagttaaactaaaaaaaaaacctaatgctcaagaaacccaaagctcctgcatgtgcttatgatcatcatagccgtatatttcccccatctcaagaatccgaagaccaggtatggcct

SEQ ID NO: 89492 - DNA, 541 bp, Glycine max
  Clone ID: PAT_MRT3847_51821C.1
agaagcataataaatttcgatcgaaatttattacaagagtcttattacaaagccatatcggggaagggaaaaaaaagggcagcaccattctgtctgtcttgcccttaattaaaccaagtgaacgagttaaacaacgaaaaccctgtaaacacttcaaccactttaaaaacttactaacttttgatacaggttcatgcctatcttaagttttaggattgacatctaggtgtagctaaggcatatattatgcctttaacactttggtcttatttatttcagctaacataactaaaaaattatgcataaaatgtcgatcctaattctttaacccacttgacaaaactattaaggttctccaaagattgacctccttcggctatggtgttcatgactttgtcctttaactccagagaccttgatttggtgttctgatgactaaggaggtgctacactttcctttttaactccatgcgtgacacaagtccatttttttctgaatcaaagcccaaccccaccctttaacttcatcaccaaaaattat

SEQ ID NO: 89493 - DNA, 817 bp, Glycine max
  Clone ID: PAT_MRT3847_51822C.1
ttataatagaggtggtggtggtgctgctgctgctttctctgtgtccctacaagatctcattgggattgagtcagtagtaggatctagccagggcatgatgaatgagtccactaagatagggactcatttttcaaacccttcctcgctggtcaccagtttaagcagctcaagggaaggtagccctgataaaacgggccccactttgctctttccaaagcctccaatggggtcaaagattgttactagccctactattgctaatggtgtcactgttggctcttggtttccctctcaaatgaggccagtctcaatgtctcacttgccattttttgctgcttggagtgatacctagaagcggatgaacgtcgctgcgcgtgtttggaaactcgttgagaaggaagaaatcacgtctggaatgtagaagctatatgactaactactagctagcttctcaggtgtaaaagttgtaactattagcttcttcgaaaatgtgtgaaagatcatatctgaaacgtgaaaccaaacatgcaacgaatgtcgtatgtcatctgtggtgtgttaaattttgcatgtgaaagagaggggcaaaaaagaaaaagcattggagggggagaaaaaaattaaaaggatggggtttgaagattcaggatatgttgttttgcaaaaagacattaatgcaggaattttggggattaattaggggcatgtggggccatttatctgtcatctttctgtatcctagtggaacaagaccttttgcaaccgtagccttttggatctatattgcgaatttgagaaggaaattgcgcacatggga

SEQ ID NO: 89494 - DNA, 508 bp, Glycine max
  Clone ID: PAT_MRT3847_51823C.1
gccaaattcatcaagtgatttgatgcgtcgacgagaacgagccaatgcattttgtgaggcaatccgtgctctggatgctacagatcttcctgcaaatagcgttcgggacttgttcctgcctgctatacagaatctcttgaaagacttggatgcattggatccagcacacaaagaagcccttgaaattattatgaaggaaagatcaggaggaacttttgagtcttttagtaaggtgatgggtgctcatattggccttccatcatcagtgaccagcttctttggtgagagtggattgcttggaaagaaagaaaccacagagccaccatcagaagcaacagtgtctcccaaagctgctgcaccatcaccagcagaagacacaagattcaagcgcatcatgctgggaaattttagcgagatgcttcgtggcaaggcaaaagccccagaggaaggtcagaaccaataagatgcatttctgcatggtaagattttgctcgttcagatacatctg

SEQ ID NO: 89495 - DNA, 380 bp, Glycine max
  Clone ID: PAT_MRT3847_51824C.1
ttctttcctttgttcttccggtttcgctttcctttcttgttcttgccactatcattagaatttcctccatatgtctaagcttctagggcttgatcaaaggatctcatgagtttctttcattgagcctgaattcttgtacctcaagtatcccttgcaactcttccaccttcatccctttgagatttgtgccttattttattgcaaccttctcttgatcttgtcaatgatcatcacatcatatactttcttctttaatttgggtttgcaatttcagtttctttaatttgtcagcacccccataagactcatcaagaatttccctttcctcctttatagtattagcatacattactttatcaaagttatctacatctacactt

SEQ ID NO: 89496 - DNA, 2157 bp, Glycine max
  Clone ID: PAT_MRT3847_51825C.1
catggtggctgagctgcttggtgtgacattgggtccaaaggggagaaatgttgtgctgccaaataagtatggaccacccaagatagtaaatgatggagaaactgttctcaaggagattgaattggaagatccgttggaaaatgttggagttaaattggtgagacaagctggtgctaaaacgaatgaccaagctggtgatggctcaactacatctgttgttcttgctcgtggcttaatcagagaggggacaaaggttattgcagctggaatgaatcctgttcaaattgctcgtgggattgagaagacagcagcggcacttgtttctgaactcagattgatgtcaagagaattggaaagtctggctgaatacaacaacattggctgcacttgtaggttgaggatcatgaacttgcagatgttgctgcagccagtgctgggaatgattattcagttggaaacatgatttctgaggctctgcataaagtaggtagaatgggagtagtgacaattgaaaccggaaggagtactgagaattgtctagagattgtggaagggatgcaattcgatcgtggatatctgtcaccatactttgtcaacaatagaagaaagatcacgcgtccgctccacaactgcaagttgcttttggtcgacaagaaaatcacaaaaacaaaggagttgatcaacatattgaacaattctgcgaaagaaaaatatccagttttgatagttgcagagggcattgagcaagaagctctagctccagtcattaaaaataaacttcggggtgctcttaaggtagctgccattaaggctcctgccttcggtgaacgcaagacccattacttggaagatattgccatcttgactggaggtactgtaatcagagaagatatgggtttcaacctagaaaaggctcacaagaatgatctgggttctgctactaaggttgtcataacaaagaattctaccttaatagttactgatgggagtactcgagaagctgttgagaagagggtttgccaacttaggaggcttgttgagaatacagtggaaaatttccaaaaaaagatattgaatgaaaggatagcaagattatctgggggcattgccattcttcaggtaggagcacaaacacaggtagaactgaaggataaacagttaagaatagaagatgctctaaatgcaacaaaggccgcaatcgaggaaggtgtagtagttggtggtgggctgttgcctttttagactatcccaaaaggtggatggcataaaaaaactcctggaaaatgaagaacaacagattggagctgaaatcttcaggagagcattgagctatcctacaagaatgatagcaaagaatgctggtgtaaatggcaatgtcatcatagataaggttttatcagacgataacctgaattttggttacaatgctgctagagactgttatgaggatctcatgaaggctgggatcatggatccaactaaggtagttaggtgttgtatagagcattcagcttctgtggccaaggcatttctaacatctagtgcggttgtggttgagcgcaaggaattaaagcccataccaataccacgaagaaagcccatgcccacctcaggtaatgaattagattcattaccaataccacgtagaaagcccatgcccatgcccatgcccatggctacaccagtgttcaattttggttactcaggtttaggaccaatgggcttttaaaaaggaaatttgtacagttcaattcagctttttgttcaagggttcagtgtgatcaatcaagaagcactagaaattcacatacgtatactttgtatagatggtggcattgatctatcctaggaaccacaaatgaagtgaatcaaaaattcaaaatgaaactgtatgtgactaagtgaagccgtgaaggacaaggggaagcactgaacatgtatgcagtggaaggaaattttttgtcacattcagacagtgactacagtgtcctattcattttatttttggtacagatggtggatattaaaaaaaaatcttttaattgttggagggaatgtaaaacttgtcatcctatgttaaagtgtattacatataaagcaatttaaaggaattatgaatcacatcagtttataaatctaatacattttggggtcttc

SEQ ID NO: 89497 - DNA, 263 bp, Glycine max
  Clone ID: PAT_MRT3847_51826C.1
cattcatagtgggatgggggctccaattccatcaccattctaaaaataccttatttatgacaaagctttacataaaaaaaaaaaacaagacctaaattcattaagagtaggaaaccctcttatttcacagcctaaaaaactacaaattcaaactcactctaaatacgaccttgattactttaaaaaggctgaacgagggtaatttctaaagcagaatcttcatctgactgtaaactcaatgcttgccatctatccaagacaaa

SEQ ID NO: 89498 - DNA, 547 bp, Glycine max
  unsure (1)..(547): unsure at all n locations
  Clone ID: PAT_MRT3847_51827C.1
aatacaattcctcattcttttaaaaatatattttctaggtaaggaaagcataattaatacacaacagtgacaagtgacagcattacatcaaaaaatttagggaattaatattttcccaactccagcggcacagcttgaacttggagtatagtgatattacaacaatttatagtataaatttaaacttcaaagatggttatttgatctacatgcttgagcttaatccttatgatatgatggtgattgattgttattattgataacaatgtatgcctaaattaaagcctctggaatgccgtgggataactcacagaaaaatatgttataaaacttaagagttccagccagagggccaattaaaactgagctttacagcaagcacaatccctggtttagctcaaattatttcagcttcacagcttcatcggtttgaccagatgagttaacaatacataggcnnaaatttaagttcaaatncaaatttcctcacagnttaacttaacaacccaggcaacggtggcagggcntatcaactnaaatttcctaa

SEQ ID NO: 89499 - DNA, 396 bp, Glycine max
  Clone ID: PAT_MRT3847_51828C.1
gttcgtccacgcgttcttttagacatcattttagacatgcataaaaagcctggcctttctgggtggtgtacgctcacatgcggacagagtaatcaacagcaaatggtcttaagcaatgcaagcatgtcgaaccgattgaaaaaaaggtatgaatggaaaacttataggttctgctctatcggactgaaggtcatcagtacctgtaccatgccgaaagaaaatgcacgctctgaaaactaatgtaaggcgcatgactattaagtgttaaggcgttgaatctcacccaggatggatcgagggctgaatgacttcaaacccgcaagagaagggcttatcagatctcaatacatacgttttttacaaccggtgtaacctgtttacattgcaaaagacgac

SEQ ID NO: 89500 - DNA, 360 bp, Glycine max
  unsure (1)..(360): unsure at all n locations
  Clone ID: PAT_MRT3847_51829C.1
gcgagggttccaacatttttttgctgacaaaggcctaccaccggtcgagaaatcaccactgtctgctttttggcagatgccatcaaccctttcagcggtggtgtcgttgtcgtttcccacgacttccgtctcctcgacaagattgccaaggacatcatggtctgcgagcacaagactgtccgcaggtgggacggttctatcggcgagtacaagaaccacctccgcaagaagatgtcgtcgaccggtgtcctttcttaagcgttgtttgattgtttcttgcaaattgcatgcgttttccgagctgcggaacgcgggttcgaagcaaaagtggccttagagcanggttcatgatacccctgc

SEQ ID NO: 89501 - DNA, 890 bp, Glycine max
  Clone ID: PAT_MRT3847_5182C.1
gcttaattcttaaccgtgggccgcggcggcttcggtccactcctcggcccgtccggaagtgaagcggaatacgaatgagcataaacatggtatcatcggttccttggacaaagtccttcttcccgttgtggttctggaacaaaacccgcgttctactcacacaccattaccgttaccatcaccgtcattcgccactctctgacacagacatgaccgaagaaggggttgttgtctcgttgcaggaatggcagggttggggcaccacctccccactccccaccatggtttcccaaatcgttgaggatttgaaggttctggaagaagatttggatgcccacatgaattttggaggcaatggtggaaaattacaggggaattttagagtacaagaagataagaagcaccgtgccacgtatcaggctttgggtgattcagaaaagaagctccagttttattcggctagacagattgcttgtcgcatactaggtagcaggggttacctttgtcaaaagtgttggcttcccatggaggattgtatgtgttcaaaagtcacatcctgttcgctctaccctggaatcagattttggctgtatatgcatccaaaggatttcttgagacagaacaacactggaaagattttgtggcaggtgtttggggttgatgcggcgactttgtgcctttttggtattcctgaacatgaggaaatcatgtggaattcccttaaaatggcaggaaaaagtaacgtgtggtgcctttatcccaacaagaatgcagttttaaagtcagttcaaaatgtgtttggtgaggaatcagttgcaagggatgaagttgcaccgtccaagttaaaagtagatacaacccagcattttattttgatttgatgggacatg

SEQ ID NO: 89502 - DNA, 231 bp, Glycine max
  Clone ID: PAT_MRT3847_51830C.1
ggggaaaaccttggggctttattcgaatctatacggaaattctattgggatttagatctaagacctgcgtacttctctttcaaactaagcgttgggttaacttgcgtaatactccatacattttgacctacacgcgtggagggacccccaaatagacaaaacgaaacctgtttgtttgccagcttttcctataaagagaccctttagaccctggcggaatcctggacatag

SEQ ID NO: 89503 - DNA, 814 bp, Glycine max
  Clone ID: PAT_MRT3847_51831C.1
cccacgcgtccgctcaatgtgaatttgggccgaacacccgtctctctccgggacagttcttctgtgcagagtacactactcttctccatcaacaaccaccaccagattctcgtttaggtcattcttctctctcccttcgcactcaacaatgtcattcttctctctttccataccctaaaaccgaaaagtgttccacttttctcctctcacacacattcccccaattccccctttcttccaccgttatgtcgggccggaaccgcggacaaccccttcctccgccgcacgcggcggggctgtcgccgccgctccacgatcagctatacggcgcgcgggcccaccaccaccatcatctagtgggccccgtccctccccatccccaccaccttctagaagacttccgcgactcgcagctagggctgggcccgccgcgaggtgggcccatcccgctgcatccggcggcgatcatcgaggagcgcctggccgcccagcaccaggacatccagggcctgctgggcgacaaccagcgcctggccgccacccacgtggccctcaagcaggagctcgaggccgcccggcacgagctccagcgcgtggcgcacttccgcgactcgctccgggccgacaccgaggcccgcatgcccgagctccacgacaaagcggaccatcgaggccgagctctgcggcgccgaggccgcccgcaccgagctcctccaggtccgagcagatgtcaaggagctcactgccgtccgccaggacctgtgcggacaggtgcacgccatgacgcaagacttggcccgcatgaccaccgatg

SEQ ID NO: 89504 - DNA, 362 bp, Glycine max
  Clone ID: PAT_MRT3847_51832C.1
tcggatattttgataaaccgcgatcataggtggtcgcaccttaaaaccggaaacaaaagcaatcgctacttgattccaagaatgtattattttattgctacttttttgtgtacgatgtcttaaggtaaagaaaataactctctgtgctggccacagacttcgcgaatgattttcttttacattcttggtttatttgctgaacactctcctattagatataggacttcgcgtcagatttaaactttttctgtgtctttaccaggactgtgattaattacaagttcaagctgatgaaatcttggagtactgctcccactcttctatgtggtataggacttcctgggaagacatttctatcaatc

SEQ ID NO: 89505 - DNA, 600 bp, Glycine max
  Clone ID: PAT_MRT3847_51833C.1
acccccccccccccccccccccccccccccccccccccctttttttttttttttagaaaaatcaaaatggattatattgcatgtatgaaaaagatatttaagttttctttttgctaaaaatttcatgtgtatatcaagggtctttgggccaagttaattgcgtgaaatccttaattttactactgaaattctgtcgaatctccagggaaatgtcactcttgttgggtagatttctcttgaggatggtgcacaactggagaaaaaatcggcccaagtttgtctgattgttgcgataatactgctccgtggccctgcaatgtcactattgcctgcccttggtctgctacgggatgactgctgctctgtgttgatggctgctgttgctgcataaggttttcagggtgttcttgctgcaaaggttgctgctgttgaaagtattgctgctgctgctgctgcaaaacctgttgttggagctgttgtggttgaagaggttccagcaggctatgttggagctgttgttgtgacagtccctgctggaacgattgctgctgtaattgaatataatgttgttgtagttgcagctgttgctgttgctctcgt

SEQ ID NO: 89506 - DNA, 2139 bp, Glycine max
  Clone ID: PAT_MRT3847_51834C.1
gcaagtcttccatccattgaatttcaacaacaacgtgcgaaaccaaggtttgttgtttgcgtgacgtcaatggccaacctttattcttgaaaaaaacactgtacatatcccatctaccacctatgacctacccttctctccacttgtgtccctctcttctctttccctctctaactaatcaactctacaaatttaattaaaattctgatccagaaagctactaatactaattatcattaattagtaaataaattattttgcatatttctttgaatgcgagcaatggatgtgtaatttgcttatctcagatggttacagatgaaggagtatatatttatataccctctctactttaccatttatttattgtaaatacacaactgaaagtattagagactgaaataacaaaaaagcaatggatctcagagagggtcaaactcaaccaattttggatcctaaccaaccctctcatgtatatcatctggctttggatattggaggatctcttgccaagttagtatacttatcaaaacacaatgttcatttggttaatgggaaggaggaaaaggcaatggatctcagagagggtcaaactcaaccaatcttggatcctaaccaaccatctcatgtgtatcatctggctttggatattggaggatctctcgccaagttagtatacttcacaaaagatgatgatcatttggttgatggcgaggaagggatatctcatagaaaggctttggagaaatccgacagcagtaagcaatatcctgttcttaatgggaagctcaattttaagaagtttgaaacaagcaggataaatgattgcatagagtttatcaagtccatgaaacttcatattggaggtagtcagccacaagaaaatcctggaagtcagccaatagctattaaggccacaggtggtggtgcatacaaatatccagaccttttcaaggaaagactaggaatcattcttgacaaggaagatgaaatggattgtcttgttgcaggagcaaattttcttcttgaggtggtccaccaggaagcatttacctacatgggtgatcaaaagcaatttgtacagattgacccgaatgatctgtatccctatcttcttgttaatattgggtctggtgttggcatgattaaggtggaaggagagggaaaatttgagcgagttagtggaacaagtataggcggaggcactttctggggtttaggaaagcttttaaccaagtgcaagagttttgatgagctgctggaattaagttatcgggggaacaatagagcggtagatatgcttgttggagatatttatggtggaatggactattctaagataggtctttcatccactgcaatagcctctagttttggaaaggcaatttctgataataaggagcgtgaagattacaaacctgaagatattgctcgatctcttctaagaatgatctcaaataatattggacagatctcttacttaaatgcccttcgctttgggatgaagaggattttttttggtggattttttattcggaggcacccttttactatggacacattatctgttgctgttaatttctggtctaaaggtgaggctaaggcaatgtttttgcggcatgaagggtttctaggaggtgtaggcgctttcatgagttctgacaaacatggcctcaaggaattattggcccatcaagtggtgcaaagaagtctcagcaagttatcctttgccgtggataaaatattgcatggttcaccagatggagactttaatggagatgaaagtatagagtgcagtgtatatgcagcttagatgaagcaattcttcgttgctttcatgacttgtagttgtaacttctatagtttgattctgtacaatggttggaagtaagagttataagtagtgataattggcttagacataaagcaaaagggaaaattagaactcaactgattgttattgtttcaccccaatgaattgtgttgtataacagctaatgatttgtatgaatacataaggcgcagccatgttactcatttagtgagataccttttttctgtttcatttgggttgttttgtataatgtcttgattctaagcatttactaatccaatgagtattgacaaaaaactcgagcc

SEQ ID NO: 89507 - DNA, 268 bp, Glycine max
  Clone ID: PAT_MRT3847_51835C.1
aggcgtgagaacacgtccgaaaggacaacgcataggcttggcgtaacacacacacacaaacatttgtggtttatgataccggggacgctctcactgtgtgaagatgcagatggcgagctaaaaccaaccacccaaactgctggtgtcctaccttgatcgcgccgactaattgcagaaagctgaaccactacctgattattactgtcaattatatgctacgcaaccgtggtcgaagatctcctctagcgaacgcgcgattaccactaat

SEQ ID NO: 89508 - DNA, 805 bp, Glycine max
  Clone ID: PAT_MRT3847_51836C.1
ctctctctctctattttctttctttctttgaactaatcaactctacaaattaaaattaaaattcttattgagaaggttactaattataattaattaaattcttattatctatttcaatgcccacaacagcaacggatgagtaatttgcttatctcaaatggatacagatgaacgagtttgaccactttacgtctttaccatttatgtattggaaataaatcgccatcttgaactattagagactgaaataacaaaaaagcaatggatctcagagagggtcaaactcaaccaattttggatcctaaccaaccctctcatgtatatcatctggctttggatattggaggatctcttgccaagttagtatacttcacaaaagatgatgatcatttggttgatggcgaggagggaatatctcatagaaaggctttggaaaaatccaatggcagtaagcaatatcctgttctaaatgggaggctcaattttaagaaatttgaaacaagcaagataaatgattgtatagagtttatcaagtccatgaaacttcacattggaggtagtcagccacaagaaaatcctggaagtcagtcaatagctattaaggccacaggtggtggggcgtacaaatatgcagaccttttcaaggaaagactgggaatcatttttgacaaggaagatgaaatggattgtcttgttgcaggagcaaattttcttcttgaggtggttcaccaggaagcatttacctatatgggtgatcaaaagcaatttgtgcagattgatcagaatgatctgtatccctatcttc

SEQ ID NO: 89509 - DNA, 556 bp, Glycine max
  Clone ID: PAT_MRT3847_51837C.1
agatcgcattatctttgtcaatgatacatattttccatgagccacaccacctccactacttaagttcagaaaaaaagaattggaggttttaagaggagatggaaccgggaagagaaaggactttgacagaatctatgattatgatgtctataatgattagggcaatacagatggtggagatcctcgcgcaatgcttggtgggtctagcatatatccctaccctcgcacggttaaaacaggaaaagaaaggaccaggacagataccaacagtgagaaaccgggcgaggttgatgtgcctgaagatgaaagtcctggtctgtagcaggcatcggatatccttacatacagaatcacatacttatctcacgatgtgatgcctttgggcagagctgcaatttaccacttaatggctacattgagtgagcgtgaaggctcttaagatgtgcgtggtcctgttgagggtggaattaagacgccaactgatattctgagcgatagtagcctgcttgcagcgctcactgacatatttcgggctgatggtgagaatgttcttgaa

SEQ ID NO: 89510 - DNA, 1132 bp, Glycine max
  Clone ID: PAT_MRT3847_51838C.1
cggacgcgtggggtgatggtcctcctatgataatatttttcttcttttttttgcaattattatttgcttctattaatctccccagtaattatttataccccttttttttcacgctgggtgtgtttgttaccgattgaaaactttgaagagtgatttcagaggaagagtctagaaggtcttgtgagcattcattcgttctacttcaacctaagcaacacaacagtgagagagagagagggagagagagatgggtagaggaaggtgcttcttggacattagcatagggcaagagctcgaagggagaatagtggtggagctttatgatgatgttgttcccaaaactgctgagaatttcagagctctatgcactggtgagaaaggcattggtccaaatactggggtgccccttcatttcaaggtcttgttttttttttttccctttctttctataccttttatctcttactttttgcacatacccattttttatatctattcaatatgatattttcgcctcttaaagattgtttctttggaccttgtttgtgaaatggatgccaatgtcatgaagctttgttgttactataccagcattacatggaatgattgatgttttttgctgcactggaaagctttaagaaggcactgaccttggagccaaatgatgctggaataaaaaaggaacttgctgctgctaggaagatgatagctgataggcgtgatcaagagaaaaaagcatatagcaagatgttccaataacactctggtgggtttatgtaaacaactagattgttgcagcatatgcatatggtaaaaggttcaggcttgaacttattgttgttactaaaagtattccaagtggggctcacatgaaataagtggataaggattggtattgttacattacatatgaaatttttagccaacaattttgtcaacctttttttttacagtgaaactctgatcattttcttgggcggtgacattgaaatgcaatttagatgatggaccaggcagtactgtatgtgattttgatatattgttacctgctgggaacttttacactcaaaaagtataatgtagcgcattttttggttagaacttacaaaccatacagctacttgctgttttc

SEQ ID NO: 89511 - DNA, 536 bp, Glycine max
  Clone ID: PAT_MRT3847_51839C.1
atcaaaatcacatatagcacttgcctggtccatcatcttaattgcatttcaatatcaccgcccaataaaatgatcatagagtttcactgtaaaagaaaaggttgacaaaattgttggcttaaaatttcatatgtaataatgtaacaataccaatccttatccacttatttcatgtgagccccactccgaatacttttagtaacaataggttcaaacctttaaccttttatcatatgtatatgctgcaacaatctggttgtttacataagccttttttagtccctcatgcctgatttttggtggtttggctgcacaatttgtggcggttactgaccataggagcgacagagtgttattggaacatcttgctatatgcctttttctctagatcacgcctatcagctatcttcttcctagcagcagcaagttccttttttattccagcatcatttggttccaaggtcagtgccttcttaaagctttcaactgcagcatcaatgtcatggagtgccatgtatgcctgtccttggcggaac

SEQ ID NO: 89512 - DNA, 985 bp, Glycine max
  Clone ID: PAT_MRT3847_5183C.1
gttacatgttgcacactttgtggtggagctcatgggtcaggcttgtgtattcccactgaagaaacatctcatcaagttaattacatgggaaaccagcctagacaaaattttaatgcaggtggattttctgaatttcagcatggccaaccttaccagtagcataatcaatggagaactcaccctgctagccaaacagcttgcagaaaaatcttctagtacttttggagctaacactgagcagaatgcaaaagaagaatgcaaggctgtgatgacccgaggaaggaaggtaaccatggaggaagagaacaagaaggagaaaatggtggaggatgacaaacaacagctgataattaaactagcacctaaaccagtgcaacccttttgtgaacttataaaggaagaagaagaagaggaggatgaacaaatgagagagacaccaataattttgaaaaaagagagaaaagaagagaagagaaaaaacaagagtgagtgtgctagagagaaaaagaaaaaagcatcttcaactgaagggagagaagtaccatatcctttggtaccttctaggaaagacaaagaaagacatctagctagatttatggatattttcaagaagctagaaattaccctgccctttggagaagctcaacagcagatgccgctctatgttaaatttatgaaagacatgttaactaggaagaacacgtacatccatagtaacgccatagttgtggagggaaactgcagctccgtaattcaacgtatccttccaccaaaacataaagattcaggcagtgtcactataccttgttctataggtgaagtttttgttggtaaagctcttgctgatttgggagctatctgtgatgcaatcctccctaggaagggaccagtcactagagccatgagcaagaggctccaagaggattgggctagagctgctgaagaagaccctagggttctcatgaacctcagggtagatttctga

SEQ ID NO: 89513 - DNA, 502 bp, Glycine max
  unsure (1)..(502): unsure at all n locations
  Clone ID: PAT_MRT3847_51840C.1
anatcncacgangcgtacggaagctcggaattcngntcgngcaaaggnangagactcnagtggnanttgcaantnccggtaatnnnntnaggangcantaggccggtngngcngtgagatcagtnntggaganncaggtgnnganngncagtcngcaaggggnanaatgtgncgnnnggcgngaggngncanganagngcgagnacactgnncgaggagantgngagtncgagcnncnaacncgngnanngacgnagcccacnangcnacngacnntggagagagangcgnnagaannnnnaggnggtgnggnggttgnntagngcggagttnccgangctgnagagcgncnnnggantanannnagntgtgnagcgaggnngtgtgtgnggngangcanggnnaagagngnngagcgngtngtgagcgngngnaggngtngnganngagantcganangngggcgaggaggcgagangtgngtgagtnngangagngnnnn

SEQ ID NO: 89514 - DNA, 532 bp, Glycine max
  Clone ID: PAT_MRT3847_51841C.1
acggctgcgagaagacgacagaagggattcctctcttccctatcttgattactttatcttgcatattttatttatcttgcacacttgaagtattctgttgatataagtttcatattcatcttcaatattcttaacatataaatttaaaaggggatttagaagtcaatcaaacgagaaatttttttaacttaattcatccccctcttaagttattgaggtcacttgtccaacacctagcacatcattaatcctcaatctttggattgaaaaagactaattgcaagtgatactctcaatgcattgatcaaacattggtgataagtcctgtcaaacaaaggttatctttagacactccattgctcacatgagaaacttatatgataattactccgatcaaataatgattgtctttgaacatttcattattcacatggaaaatcacactatttataattgtcacatgtttaccatcgcaagcatgtaattattctgccaaattgtgtcttcctttggaccgagtacaattcgcatg

SEQ ID NO: 89515 - DNA, 618 bp, Glycine max
  Clone ID: PAT_MRT3847_51842C.1
ccacgcgtccgggacctgtatggtctacctgtagagatggcttctggctcattactttgcagatctgccatttcacttactaaagaaggatctgtggaagtcaccagatactataactggccgatcttcacctgatgttaatgctgacgtggatatgttgcgggagaaggccgcacgccgctacgagatggccgtgtttatggtgaatgctacaaagactgtagaggatactgagttaccggagggggatagatatgttctgtctggagcttacagaacctatcttcgcgacgaggcactggatgtaaggtcatatgactcctgttgagaccaaccgatgatagcacagacactatgaccctgtgatccttatagatgcagcacagggccaccactgtagctgagccacactacgaacggtgacattatatctgaacctccttgagtgcaacctgatcctatctggcgaatattctgatagactagcgaatgaccgtagaaagaagggcggtcaccacttgtaccttggctaggccaccattgagactatatggatggcagaacaatgtagtgctttgacggcctacatctttggtcggaatatcgctattgctgact

SEQ ID NO: 89516 - DNA, 128 bp, Glycine max
  Clone ID: PAT_MRT3847_51843C.1
cttcatttacggctatgagcaacttctgtctaggactaagctctttctggtaaaataaagagttccctgaacaaaaggagttctgtgtgaccttataaatacggtgtatcttattcatatgtaatctg

SEQ ID NO: 89517 - DNA, 683 bp, Glycine max
  unsure (1)..(683): unsure at all n locations
  Clone ID: PAT_MRT3847_51844C.1
cccgggatcgacccacgcgtccgcgtctccccttccaggagaaggtcagcccccaacctccctccgtctaacaacttcacggcggcccaaccctcctccgccgaacccctccacggcggcccaacctcagtataaccccttttctcctattgtattttaaatatcagaattactttaagcctttgggtcctggaaactgcggcgccatcatcaaacgaacgacacagcgtttgccttgttcgttggcgcagcagggcaagcttaccctgcgcattgttatgctctcaaagtggatccctccaatttcgttgggagcaaaatctttactgagaaggaaatgcaacctaaacccaaacccgaacatcccgagagtgcaatggttctcagtttcatcgtcgaaagcagctccgatgatagagatggctgcaagagatggggaactgagggtcttccttgttgccggtgaggtttctggagattccatcgcttctcgcctcatggcttcgcttaagattctctctcctttacctattcgcttcgctggtgttggaggggttaagatgacangtgaagggatgcagtctttgnttcccattgaggatatttctgtaatgggactttgngagcntaatgccacattgtatagaatcagagtgaaactgaatgaaactgtcaaagctgct

SEQ ID NO: 89518 - DNA, 332 bp, Glycine max
  Clone ID: PAT_MRT3847_51845C.1
gacagtgcatcagtttgttgtgagcgataagctagtttatcttaaggagaatacgaacttgtttgtcttcgttgctgctgcactagtattggcaccatggccatgccatggcgcatgctatcacaggttccctccccgaaagacaactggctatggtgagcgttcttcggcagtaaaatgcccagcttttaggcttgctgtggcagcacacatcatccgaacccttaaaaccattcttgaagagtgcgttgaaccaacacaggactaccttaatggctaacaattgagatcagactctaaaacagcttacctacaagctttcttttacgcta

SEQ ID NO: 89519 - DNA, 264 bp, Glycine max
  Clone ID: PAT_MRT3847_51846C.1
ggaaggctagatatatagagaaaaaggacgtaattctattacgaaattattgtttatttaataaatttcctaatgtgaaaacaaatattatattttaaacatttttgaaaagtgaaacatctcaatatcaaaaaataaaagaaatcaatagagattccgatagtagtggtgagcgaaattggatgaagaaataaaaataaataaaaataaacagtgtggaataattgaccaaaggaggtgaaagtcctgttagactttatatgt

SEQ ID NO: 89520 - DNA, 266 bp, Glycine max
  Clone ID: PAT_MRT3847_51847C.1
tcgtatcccttgttcagagggacctccccttcggcgttttctgtattcctaaagctatctctccgcgtcagagaccatcatcggtcagcggtagtgggcgccttcaattggagaatcggactgagaacaagtggtacatgctctgcgatcaaatccagagcttgatatggggtgacactactcatgattgggaggattcaacccgaccacagttgcggttttgggaacaagctcggcttggcactgtgatttgttgtgacattact

SEQ ID NO: 89521 - DNA, 241 bp, Glycine max
  Clone ID: PAT_MRT3847_51848C.1
ttcgtttgtttaattcaataaaggaacaagcgcatgaccgcttgtgtgagaatgctatgcctatctggaaattttcacacctattttaatttgcgtaatgatcagtgaagactgcgtttttttaattcttaaaaaaattaaaatgggggtccgttgactcttgagcttgttgatcctggaaatttatatcggtccgtctcctgctggctttccttcttttcctttaatgaggattcatttc

SEQ ID NO: 89522 - DNA, 568 bp, Glycine max
  Clone ID: PAT_MRT3847_51849C.1
ttttttttttttttttttttcttaggttaaatacatattgttcattgtaggagtatcactatgttacaattttttttcttacgatacaaaacacacaacaaacgtaaagacaaacaaataaattaacgaatacaataaacaaatgcactagctgttgtatatatatgctccgatccctatatagttcttgcttccatatttcactaaaccttctaactccagtactggtccaacttatatacgtcaacctgtaagaagacaacaaatatgtggtgtgaaatcattttggccttctagcaaaaacctgttgggtagtgggtaacttagtcccagtttgaggtttggagttaggacccttggggggtggccttgttacaggggcaagattattctgaatgcttatcttttgggaattcattgtgcgatcttgttgattaactgcttcagattggtgctatggttttgtgtattttaatgttgatgaaatgtgtatatatagggaaaagcttgccttcatcattctttgggcatggaacttaccaagtgttcgcattgtaatatacgtaga

SEQ ID NO: 89523 - DNA, 648 bp, Glycine max
  Clone ID: PAT_MRT3847_5184C.1
attaaatgtatcattttataatattactaataataaaaagtaattaataaaaaaaataaaattgggttaattgaaaggcccaacccatcatggggtagcctagtttgggcggtacaaattttcacgtcaagcctaaccaaaatatggtgagttgaatcctacaccccatacctgtatcctacacctcccaactatttttgaaattactaaattacctttaataaataacactcctaaccctaatacctccctccttaatctaccctaacacttcctttcccacgacactgcatctccctccagtgattctcgcaacaagttgaaccatcctgcaacggtagcacctcccattcgcctgcaacctccttgtcgccattgaaggtaagtaactcctttcgtctcttttggcatggggtaggggttgggttctggtagagaacatctacaagtgcttgaaaatacgtgtttcggaacacttatttattttggaagtcatttaactatttttttgaaatgatcgtttccataaaagatgttttggaaaatgtttttctggaacgaccatttcaaaagcaaaaaaagttgttccagaaaaatctgttatggaaacatgtccacaacttgaatgggaagccggacgcgtgggtc

SEQ ID NO: 89524 - DNA, 562 bp, Glycine max
  Clone ID: PAT_MRT3847_51850C.1
gtaaagtggaggtcccaagcaacattgatatttaaataagctgcttctgcttctattctcaattctcatggccttcccggagaaggacgccggagctaattttgtcctccaatccaaaggtgaatggtggcacgcgggtttccatttaacgacggcgatcgtgggtcccaccatactgacgctaccgtatgcgttgagagggttggggtgggggttgggtctgttttgcctaacggcgatgggactggtcacgttctactcttactaccttatgtccaaggtgctttatcactgtgagaatgccggtcgccgccacatccgctttcgtgaactcgccgctcacgtcttcgggtcgggatggatgtactattttgtaatcttaatacaaacagcaatcaactatggggttggcgtaggagcaatcttacttgcgggccaatgccttcagatcctgtataccagtatttcaccacacggatccctgaaattgtacgagtttatagcaatggtgacagtgataatgataattctatctcagcttccctctttccattccctgaaa

SEQ ID NO: 89525 - DNA, 485 bp, Glycine max
  Clone ID: PAT_MRT3847_51851C.1
ggaaaaaccaggaggatcccaataccccttcaaaggaaatggagacaaccaaacctggttcgaaggggcatggccaacactttaaccattggctttaaaaggagttcaaccagcccaaatattaaagccccatttaccgggaaaccacctttaaaaaaattggggattaactataccccctcaaccttaacggccctccaaaaagaggggtctggtggggttttaaaaatccaagctttggaggccggttttcctttggctttgggaatttaaaaaacttttttcacaatttttggtttttaaacaaaaagggctggaataatcctcctctggagggcctttccaaataaacctcccccttaggcccggtggacagccctacggtttgggggaaccctggccctttggacctgggcaggcctaagggggggaatcccttgattcctctggccagggacggggcattggggcccggggcccctttt

SEQ ID NO: 89526 - DNA, 760 bp, Glycine max
  Clone ID: PAT_MRT3847_51852C.1
gctaccccaccgcgctcgcgtctcctctcgctccgctgcctaagggcccctcgccaccgccaccatggacgccatcaagaagaagatgcagatgctgaagctcgacaaagagaacgccttggatcgagctgagcaagcggaggctgacaagaaggcggcggaagaccggagcaagcagctggaagatgagctggtgtcactgcaaaagaaactcaagggcactgaagatgaactggacaaatactccgaggctctcaaagatgcccaggagaaactggagctggcggagaaaaaggccacagatgctgaagctgacgtagcttctctgaacagacgcatccagctggttgaggaggagttggatcgtgctcaggagcgtctggccacagctctgcagaagctggaggaggccgagaaggctgcagatgagagtgagagaggcatgaaagtcattgaaagccgagcccaaaaagatgaagaaaagatggagattcaggagatccagctgaaagaggccaagcacattgctgaagatgctgaccggaagtatgaagaggtggcccgtaagctggtcatcatcgagagcgacctggaacgtgcagaggagcgggctgagctctcagaaggccaagttcgacagctggaagaacagttaagaataatggatcagaccttgaaagcattaatggctgcagagggatagtactctcagaaggaagacaatatgaagaggagatcaagggtctctctgacagctgaa

SEQ ID NO: 89527 - DNA, 240 bp, Glycine max
  Clone ID: PAT_MRT3847_51853C.1
attcagaggcttttggtttacgagtttatgccgaatcatagcgtggacgatcagctccctgcaagagtgccatcgacgatcatccggtgcggaacgatgttatcgatgtcgcaggatgcggtgaggggtttggcgtaccttcatcatgaaatgcattttcacctaatatttcgggattttaggacctccgtcatcttgcgtggaccacaatgtgaatgcgcagctttgtgattttggacg

SEQ ID NO: 89528 - DNA, 687 bp, Glycine max
  Clone ID: PAT_MRT3847_51854C.1
tcggctcgagtctcgagccgttcggctcgagcttgttgaaaagttgctacctgcttaatcaaaattgtggagcgcagttgtgcagtcctcataaatgttggatgagctttgtaaccatggattgattccacaggttacacatcttttaagtttaaatggtcggacatcactatctccattaatttacaatggattgataggattacttcgtcaaactttcatctggatcacttgtagccttcatgacattatatgaactcaatataagcatcattttgagagatatattatctacatttgacctctcacatggagtatcaacttcacagcttgttggtggacactgtaatcgggtatatgaagcactcaaattgctaaatgagcttctccctgtccgagctaaagatgagaatgatcaactcatgctagacaaagaatcctttctagataatagcccagatcttctgcgaagacttggaatggatgtgtttcccatgttaatccaggtgttcaattctggtgcgagtttatatgtttgctatgggagtctatctgtaatgtacaagttggttagtttgagcaaatctgacatgcttgttgcattgcttaagaatgccaatatttcaagttttttggctggagtattcactcgtaaggatcaccacatgctaatgttatcattacaaa

SEQ ID NO: 89529 - DNA, 447 bp, Glycine max
  Clone ID: PAT_MRT3847_51855C.1
tttaccttttgtccgcccaacatcactgccggcgccaagagagctgctgctgattctcttgttgccaataaccgtcccaggatcaaatggtgaggattatggcattattatcggaggagaaagacattcaaaattgttggatggatcttccaagttcgtgctcacttatgaagacaaggaaggagattggatgcttgttggggatgttccctgggggatgttccttagctcggtgaggaggctaagaatcatgaggacatctgaggctaatggacttgcaccaagattggaagaaaacatcaaacagagatgcaagcccatatagatactgttttcatggctaaggacacgaagaacctgtcaaatagatgaagagaaaaaacagaacagaaaagttaaggaatattgcatgtatatgaagttttgagatttgaatgataaaatctc

SEQ ID NO: 89530 - DNA, 1617 bp, Glycine max
  Clone ID: PAT_MRT3847_51856C.1
acgcgagaagacgacagaagggggacgggagagaatctagaagaagaaggagaaagtataggaataataaaagtacaatcaatttaaagcaaaaacttcaattcaccaaccgctcaaaccagaccagtcttgtgggcccatcatctttaagatcctttcctttcccctttctctctgacaccttctctctctctctcgtttacttctacattccagcctaacctgagcgtttatcatactcttcttcttccctcaaaactattcaattcccttcaaattcttccaccaccccttttccttattcttcctcaattctcccaaaaatcatatttttaccgttctgattggtttttcagcttgtgggtcgatgtcaactgtgtcgaaagatgacaacttggtgctgtcttcggaggactcttcgtgcccagaagagtctgagcttgaattgggtcttggcttgagcctctcttctggcccttcatcaaagtctcatcaccaccatgttcatgctcctacaactctttatgctagaatttacactgctaaggattttccttcttccgcagcagcagcatcatcatcaccttcctcttcttcctcttcgtctcccaacatcactgccggcaccaagagagctgctgctgattctcttgttgccaataaccgtcccagtcaagtagttggatggcctccacttcgaacatatagagtgaatagcttcaatagccatgcaaaatcaactgaagtattcaactctgtggctgagaagagtaagataaataatactgtggtcaggaagactaatgacaatgacaatgataataacataaatgccaaagaaaaaagacacctcaggagttccctgttcgtcaaggtaaatatggacgggataccaattggaaggaaggttgatttgagtgcccatagttcctatgaaaccttagcacaaacattggaggatatgtttaatgaatcaactacagtcaccacttgcaaaggatcaaatggtgaggattatggcattattatcggaggagaaagacattcaaaattgttggatggatcttccaagtttgtgctcacttatgaagacaaggaaggagattggatgcttgttggggatgttccctgggggatgttccttagctcggtgaggaggctaagaatcatgaggacatctgaggctaatggacttgcaccaagattggaagaaaacatcaaacagagatgcaagcccatatagatactgttttcatggctaaggacacgaagaacctgtcaaatagatgaagagaaaaaacagaacagaaaagtaaaggaatattgcaagtatatgaagttttgagatttgaatgataaaatctcgcacttttgtttaattaattcagtttgtttgtttgtttaatttggtatatttgtcgctgcctctctattcatctcacttggagggtgcaggcatcatagattttcatgcaatactactaatcatacaagtcagcctgcttgttagtgttgtaaatgtgggatgtttgctaactatctcagctataaagtattgtttgaactttatttccctgctacagtaattcaaatttcctttgaatgaatacctatttt

SEQ ID NO: 89531 - DNA, 973 bp, Glycine max
  Clone ID: PAT_MRT3847_51857C.1
aattcggctcgagcaaaattattagatggatcttccaagtttgtgctcacttatgaagacaaggaaggagattggatgcttgttggggatgttccctgggggtaagtaattggtccacaaacatcaattttattttagcatcaaatatgcgatgttaaaactgatactgcagtacaaaaatgtgttgccaattaattgtcaaatagtacatgtaatgttttcatcaggcaataaagagattggtaaaaatatttggtgctatactctaaaagctacatgtcaaatattggtgctatactctatcctattaagagattgatagggtcatgtcttttttcttggacaaggaaaaagatttcatatttgtagtttcatttagcttgtctttttatgatttaacactggttatgaggatctctgttcctctgctttgatattcatctatcttgctctttcaaattgctatcaggatgttctttagctcagtgaggaggctaagaatcatgaggacatctgaggctaatggacttggtaagcaaatgctttatttttccaaacacaacttacccatgtttttcttttgctaatgcatacttgtttgcagcaccgagattggaagaaaacataaaaaagagatgcaagcccatatagattccgttttcatggctaaggacatgaaaaacctgtcaaatagatgaagaggaaaaaccgaaacagaaaagtataggaatactgcaaatgtatgaagttttgagatttgaatgataaaatctcacacttttgcttaattaattcagtttgtttgtttaatttggtatctttgttgcggcctctctattcatctcacttggagggtgcaggcatcatagattttcatgcaatacaactaatcatacaagtcagactgcttgttagtgttgtaaatgtggaatgtttgctaactatttcagctataaagttttgtttgaacttt

SEQ ID NO: 89532 - DNA, 362 bp, Glycine max
  unsure (1)..(362): unsure at all n locations
  Clone ID: PAT_MRT3847_51858C.1
ttcatatctatatctaaatcgtttcacctttaaaaaccaaactattcccatagctcttttttaatcttccaacaacctaaatccaaaaccctacctacaccacactcaatctaaattcttcattctcttctcatctattcttcataattctcatatctactctttcatttctcttctaacattcattctctctaattacacccaattcatcttaaacttcaactccatcatcttccaattccttcataatctcccttccaccaacaacaanttcacctacaatttctactcacacaccttcaattacctttactacaatttctacacatattttattatttcatattaatcaattttaatac

SEQ ID NO: 89533 - DNA, 550 bp, Glycine max
  Clone ID: PAT_MRT3847_51859C.1
cccacgcgtccgaagcttttaagaagagcatttgtctttctgagcatcagtacacggattgagatagaggccagaacaacaagggctagcatagggggaagccaaaacacaagctccgagatcataaaatacaagggaagacccgagacaccagaagtatacgtctaaaccgtataagattgcgcctgcaaaatctaacatgacaatgacgaactggaagagacagacttgttcaatatcatgaagcgtgctgaaaacaacaaaaaacatgcggctgactgcaacaaatcgagaagcgtgaaacccaaagaggacgaatgactcaatgacttgcccgaagaaatcagacactagtgagaccggctgaagcagtcgctgaaagagctaaaacgatgtaagggctagggtgaggacgtgacgaagcacattagccacattggagacatggagtaagtactgctgagaccgatgagagcacaatgcggacatggataactgcaggaaggcactaacatgggaagatcaaggactctatgagggctaggatgct

SEQ ID NO: 89534 - DNA, 903 bp, Glycine max
  Clone ID: PAT_MRT3847_5185C.1
aaaaaaagagagtaaacacagtttaacaagagactacataaatctttttttaatttctctagcagttgagtttaattccgatgaataagaaaaatataatcataatcatattatactatgtcttcattggtactgaactcttccgttgcggtactgaactcttccgttgctgtcgttgctgtccttggggaggcaactggcaggaagatctcttctccctgacactttcaacaccgcaatccaccattaatcgggaacccgacaagagcagagctccgccacgattacggaaagataagaggcgtgaaagagcaggtattgagatgcagatcagtgagaacaacaacttattcgagcaatctcgaggcaaagagaagataagcaatttaaaatgctcatggcccttgttatcagaaagttctgatggaggaagtgatagcacattttcacattcagatgattgttcaggcccctcatgaatttatcctgataatttcaattaatgaaatttggtttttaacttttatactcccgatgactgaaattatcactgaggaagaataaaaaacaacttaatgttgcttgtaatgtgaagtatttaactatgttgcatcaaaagaaaagaacatattttggcatttcatcatgtaagttgtggtggagctaaatgagaaaattttagctatgcttatgaaatagaaagttagtagagtagcaactgctgtaggcagaattggttcccacatatataattagaccaggatgaaaaactgattccccctccccttttgtgattgggtttccttgatagctttatctaatttttgggtttgttgagattgatctcttgtttgatatgtttggtgggcatttcatatgaagttgaagtgttgttaatggttt

SEQ ID NO: 89535 - DNA, 406 bp, Glycine max
  Clone ID: PAT_MRT3847_51860C.1
cagctgtgacaaatttttagatatggaaaaatattttgaggcttatgacgtgttttacaaatgatacaaacagtctgctgtgttatatatgttacgggggtatttaaatgagggaaggccggtcttgatccttagggttgaacagatatgcagatggttcagattttcctagctgggtacatcctacaactgctgatcaaaatgacgccttttccggtgtctggtgtctaagtcataatagtccgcctgtgtttcccatggaagtggagacagattgtgaaaatgtgcggattctctttgggaaggatctccccctggcgtcctatgtataggggtatcactatggccaactctcaaattgtgaacagatgcaatagacttttttgatgcatacatgagttggaat

SEQ ID NO: 89536 - DNA, 2155 bp, Glycine max
  Clone ID: PAT_MRT3847_51861C.1
gccagttcattagtcaggaagcgacttttatctctccggagcagtctgctctccccaactcattgcaacggttatcctcttgacattcgctgcagcactcttgacaccgactccagaattaaggatcctcgctttcgaatttcgattgaacatgttagtaagtccattgctcttggtagtaaaaacacaaatattgggactaataggtgttatacaaggttgcctggatcattgaccagtgccatggagcacagaatcctttttcacaggtcagggtccttttttcaaagttaggggccttttatgtaaagtagggttatccagtcctggagttgatcactcactggtggaattgatcactttggtgaaaagtgtcaggttagccctcaatctggcataacatccctctctcctatccatgtcagctctccgttgtccttgccccctcatgatcgtaaattctcgaggaggttggaatcttgtggaggaggtagggatgttgtttatgagataaagaattgcaatataacttcaaggagtatagaacaatcacttgacaattccaattcacgtctcatgttaaattattaggatgatgactccagatgtggttgaattcttatgcaaagatttctgtccatcttctctggatgatattgccgagatgagttggccactatgtcaagaatcagctcccacttctcactccatgagattcactagaagtttgagtgggctttcggtcaggaggtctttagttggttcatttgaggagtctcttttatctggccggttcttatctggaaacaatagcaagaaaatcgatggttttcttgctgtgctaagcattactggtgggaacttttctcctaaatctcagaagcttccattctctgttactagcgtggatggagattgctatctactgtattatgcatcaatagatcttgctggaaattcctcttcaaacaagttaagaggccaattgctgaaacgagggtttggaaaagatgattcccaaattgtaaaaagccgtctgcgtataccaatgaagggacggattcaactggtgctaagcaatccagaaaagactcctcttcacactttcttttgcaatgcaaatttgagtgacatgccgtttggtaccaaaacattcttgcgccagaaagtcactcttgaattgactggctctacttctcctcagttgaaacagagatcaacaggtttaaacagtggtgacaaagggattccatcaatgcaaaaaaatcatgacatctcatgtgatggagaagtaatgcatacagatgcaactaatgttgttaataaaacaaaatctacaaatcagggaaatggaaagggttctagcttgttgaatttaataaacaaagaggattcttcgaagcaatctttgaaaacaaaaatgctgggagtcccttcctcggtgaagcttgtgaatgaatgtattactgaaaaatgtgagaggaatgaaagaaaagagtgttgggataaaacatgtgatgaatcagggaaaccactaaattcgtgttcaaaggtgaaggacaattctagtagtggtggtcctcttcgttatgctctccacctacgctttatttgcccttttccaaagaagaccaacagatcaactcaaaaaagcaaaaataattctcttcaagaaaattctggattggacatggaaggggaacgaagattctacttatgtaatgatttgagggttgtgttccctcaacgtcattcagatgccgatgagggcaagttgaatgtggaataccatttccctgaagatccaagatactttgacatcaactgaaaattctagttttcctcctaaaaaaaaagcatgctgcttttgctgaccctcttgtacataatcacaagtttgtcttcacgagtcatgtcctctggaaaaatagcactaaccctttcctcatgtaaatacttaaacaatttcaataatttaatgggttactattttcactattttcaattgctgacttaacttagctattaccatgaaaagtggatgttgaaatgcctggtggaacttgattgtcccaccctagttattttccagacccaaagcagcattttaaggacgtgttaactataaaaattgagtctaaatgaaagaaaattg

SEQ ID NO: 89537 - DNA, 522 bp, Glycine max
  Clone ID: PAT_MRT3847_51862C.1
caaacaactaatttcatgccaaatttcaaaagaccaatatcatagagtgcgttttaaaatccaaattgaaaattgttttagctataaaataaaaattgaactttatacttacaaagtgggtcctgatccacacaaccttactgtatgcatagtggcagattttgacttgcgcaacacgtgcaaccaataataacttttcacgaacaggtcttgcccaccatagtgcgggagcgccagtgccattatacactggatttttacaaaatatcataagttgcacagctgcatttgactccaaaacagggtgtagggaaggtatgcgatactgaccccacactttacacatgtccaggctctggataccataaagtgttgaacagttcagatgcaaaatgggcattctacagttatctatatcaatgaacactgaaggcaaagaactggaactacctactattccttacgaggatatagaccctacaaactcatgtttggaaagaacattttacgttagaactatac

SEQ ID NO: 89538 - DNA, 518 bp, Glycine max
  Clone ID: PAT_MRT3847_51863C.1
cactgctggaattgatcactttagtgaattgagtcaggttaggcctcaaaatggcataacatccatatctcctaaaaatgtgagctctcctctgtccttgtcacctcttggtcgtaaattctcggaaagaataaaaactgctggaggatgtagggatgttgttgaagagataaagaattgcaatataacttcaaggagtatagaacaatcacttgacaattccaattcacgtctcatgttaaattataaggatgatgattccagagttgcacgcaaatcttttgatgatgttgaattcttatgcaaagatttctgtccatcttctctggatgacattgccgacatgagttggccactatgtcaagaatcagctcccacttctcactcgatgagattcactagaagtttgagtgggctttcggtcaggaggtctttagttggttcatttgaggagtctcttttatctggccggttcttatctggaaacaatagcaagaaaattgatggttttcttgctg

SEQ ID NO: 89539 - DNA, 278 bp, Glycine max
  Clone ID: PAT_MRT3847_51864C.1
gagtctctcaggtgcaagtaccaacgatggttgacggtcgtgaaggacaagcgcgtgagactttacagagaggggtacaaggactcggatacaaaatgcccaatgacaaccggtgcccgcacacatccctgatacgaatcggaggggtgcacacctgagcagatgtaagatggcttgctggcatgagaacgatccatgcgtacacggctgacgtgagaccggatggtagccattaccgctgcatatggtgcatggttactagacctgatctggacagt

SEQ ID NO: 89540 - DNA, 698 bp, Glycine max
  Clone ID: PAT_MRT3847_51865C.1
gaaaatagttaacccattaaattattgaaattgtttaagtatttacatcaggaaaagggttagtactatttttccagaggacatgagtcatgaagacaaacttgtgattatgtactagagggtcagcaaaagcagcatgttttttttgaggggttaaactagaattttcagttgatgtcaaagtatcttggatcttcagggaaatggtattccacgttcaactgccaaacaaaccacaatagacctttgtcagagactaggaggaccaagaaatgcgaacaaatagattccaaattgcacaatacacacaaaccaagacatcaatcttatctgcctgcaccttgccctcatcggcatcagaatgacgttgagggaacacaaccctcaaatcattacataagtagaatcttcgttccccttccatgtccaatctagatttttcttgaagtgaattatttttgcttttttgagctgatctgatggtctttttaggaatagggcaaataaagcgtaggtggagagcataacgaagaggacccccactactagaattgtccttcacctttgaacaggaattaagtggtttccctgaatcatgacatgttttatcccaacacttcctttctttcattcctttcacatttatcagtaatacactcataaataagcttcactgaggaaggggctcccagtgtttt

SEQ ID NO: 89541 - DNA, 253 bp, Glycine max
  Clone ID: PAT_MRT3847_51866C.1
tagccctgctctttttcttctctgttttctggggattctaccctctctacaatgctgttttcacatttccacaagagagaagaatgctgatcaaggaacgttcgtccggaatgtaccgtctttcttccactttctggccagaacagtaggagacttgccaatagagcttgcacttccaactgcatttgtcatcataatctattggatgggagggctcaagcctcatccagttaccttcctcctttccctcctt

SEQ ID NO: 89542 - DNA, 532 bp, Glycine max
  Clone ID: PAT_MRT3847_51867C.1
cttcgtccttttttttttttttttttttaactcatcaaaaactgttttattttgccggtgcatcatattctcatgttcatatcaatgaaactcgacggctctaataactcaagtttaaatactggatcataaaatatgacataagtatacacggaactagaaatgacaaatttgcataaatgaactagctgcagcttacgcacttttgtcatacaactttgcctaaggcggtgaagttcaccctgtttagcaggctcttaattggtcaaagtgcaggaggcccacttaacaatggtgctgcttgctaatcaggctcaagcttctccaagatgtcattggcgaataaatgagccgtacaagttatttccttagaaataactggctcttctgccactgcaagctgtgatagcaaagactgcatgtgcgccattatgggcccaccagaatctttggcttgattttcacactgagtatcgtgttcaagctcttcacgttcttctggaaaggcttgatgggcatcatacggaccgga

SEQ ID NO: 89543 - DNA, 324 bp, Glycine max
  Clone ID: PAT_MRT3847_51868C.1
attcggctcgtgcttgatcacagatccctaatgaacactccacattctgacatcttcactcctatatctcgccgagaaaacttatcagctaacagttagcaatggcgccacccgccacctccaccggcggtacgctggccggggctaacctaaccgaccccctttcttggccttaaaactttacgtcccactcctaattgcaggtctaattgtgaacgcaacggggaccctgatcctggtgtgcgttcgccggaaccggagctcgaaaaagcggaaaatgcgagtgaagcacagcttcggagcgaaccttttggtgtcaaagga

SEQ ID NO: 89544 - DNA, 831 bp, Glycine max
  Clone ID: PAT_MRT3847_51869C.1
cccacgcgtccaatttgaggaggttcggtagagtggcgtggcgttttactcacaacagcatcatcatcaaaataatcaaatcacctattccggcaacctcaacactacctacccctaaatcaaatgtccttttctatctcttcttcgattctcctcacaccccaaacatcttaaccttccagttcaacatcttaccccaaccatgcttgtgtttcgattgaagcctggcagttacaaggaaacagcgaccctcgcactttcccacttcaggcacttggtcttcaacttcacacgcgccggtgactctgggtgcccgccacgcgctggcttcggggttcggagaggctacaacgtcgtttcctcgttgggggacccacccgaagtctggtccggcggcgggattgtcgttcgccccgggaattcgaatttcgatgtcgccggcggcggcgccgccccgaattccggcgattcgaaagagggatgttggggtggctccaacttggggaacagtttccctacgccaaaggagatttgcaaggggctagacaaattcgttattggacaagagagggcaaagaaggtgctttctgtggcggtttataatcactacaagaggatatttaatgaaacctcttcgtccaagtggcctgcaggagattcagataataataatgtgaagactgatgctgttgatgatgatagagttgaacttgagaaaagcaatatccttctaatggggccaacaggatcagggaagacattacttgcccaaactttggctcggtttgtaaatgttcccttttgtattgcagatgcaacttcactcactca

SEQ ID NO: 89545 - DNA, 412 bp, Glycine max
  Clone ID: PAT_MRT3847_5186C.1
gggaaccccacaaaagaaaaggggacattaaaaaaaccaaagcaacaaaaggcaacaaaggcctgaaactcgcgggggttaacaaaaaggtaaacgggggttcccacaaacacgacacattaaaccccagataaataaaagcaattttgcccccggggataaaaaacccagtttggggaacaaccgttggaaaaagagggggggaacctcaaactttggccgaaaaacaagctgcctagaaaagaaaaccccaggggcccgaaaagaaccccccctttatgggaaccaaagtcccctggggaaccagcccgcacgagcaactttttctttggggccaccttggggaccctgggtccggggggaacctttttatcacacgtgttggcgacccccacagaaacaggttgaccca

SEQ ID NO: 89546 - DNA, 438 bp, Glycine max
  Clone ID: PAT_MRT3847_51870C.1
cccacgcgtccgcccacgcgtccgcccacgcgtccgctgatgccaaagtcctaaactaatggatccattatgcttcatttacgatccattgttacacattgcgtttcttccgcaggagaggccacggaatcacttggatatgcattcaaaattatgtaatcgaatgggaagatactatgttcccttcaattggacgaattcaatctcacatctgacactgaaacatttggtcttctgatttcttcaaaacagttataattacatctctggttagcgaactaagagtcgttgaacttcttgatggcctttgcgaaaagatgcaagattatacactcaagatagatacaaatacctatgaatggttcaaagtggatagctgggataacctcacaacaaataagcaagaagctcgggcatattcaaaagatatatcttctt

SEQ ID NO: 89547 - DNA, 522 bp, Glycine max
  unsure (1)..(522): unsure at all n locations
  Clone ID: PAT_MRT3847_51871C.1
actgtgcggcgctcgagacggacggtgcgtgntattgacagcacggaaatgggntttacggagggaaaaactacaacagatggaagtgctggtgggtagctctaacttggactcatttggcagcaaaggaatagggtcgttttttcgaatgaatcattcaatggaagcaagctgttggacgatgcagtgttcctagtctggacatggctctgagccctggagattgattttgtgttgctgtttgtcctctggtcttgcctctccccgtacgtttttgcctcttttccgcttcccgttcttgttctccccttttttttttctccccctctcgttctcttccccccccctctccccccccccctgtccttttcccctctcccccccctcccttccccccccccgcgccttctcccccccccctctccccccccccttcccccccttccctctctgtccccccgctttccccccccccctcccccttcccttcctctccccccgtgtgtcccccttccccccccc

SEQ ID NO: 89548 - DNA, 340 bp, Glycine max
  Clone ID: PAT_MRT3847_51872C.1
cccgggcagggaattaagatcatattaccataatcttacatctgatcatcattttaaatatatatttcttcggcatggcaataccaaaaaaatcaggtaaaaaaaggagaaattaaaaatcatcatcgcacgataatcatcatcagagacaaagggcggggcggggtaaatcatcatccggggcagcatcataaaacggtagcgcgttggtatcaaacggtaggggaggtcaaaacgacctcgaaaccatgttgtcgtctccgtcgccaacggcggagggggaaaaatcctttcaatgtggcggctttcaaggacaaaagggggcccgcccgggtatttc

SEQ ID NO: 89549 - DNA, 409 bp, Glycine max
  Clone ID: PAT_MRT3847_51873C.1
ttttcggttaggcaccatttgggctatatgtctatatcagcatataatactcaattatgtattgactttacattaggggaattctcataattggagagtggggaccattattagcatcaacatatcctgagattattattacagcaatagaaagtcttgcttttactaacagatctgagattacttgaattattgatagctaacagtagactggccacaaagagtgaccaagatttggttgacatataacaatagaaagaccaagagcaggagttatttgtgaagagttgcaaaattgtaagggtggcaacacaaggtcattctaacttatatttttttactatactagtcaattgtgtaactaaacatgtttcacttcacaatttttcactaatgaataaattaattt

SEQ ID NO: 89550 - DNA, 610 bp, Glycine max
  unsure (1)..(610): unsure at all n locations
  Clone ID: PAT_MRT3847_51874C.1
ggcaattacaaagaaatattaggacatagnnntttactagttttctctcnaaagtgcaannncttggtccaacaacaatgagtgtgaagaagagatataaggttaatctagtggtgaagggagacgggaaggggagagatgtggtgagttcaaatattcctattaacaaaagttaacaatactaataactaatatttgcagataaaaaaagcagaagagtgtgaagcgaaagtgataggggtatgatgactctacgaatacctcctattgtataaaagcacaaacatgcaataagtctggagaagaaaaagcttcttacatttggtgggatgggctcttgtgatgtgttttgatactcaagtgatggaggtatgataactctacgaatacctcctactttcatcgatctcactgccacatcaattccagcaataacctagacattgattctgatatgattcaactcttctgaatatgacatatatacataggnnntaatttaataacaattttcaaaaaagattnatatagatcgaagtcctacattttgacaatccatctacaaaaaacttnnnnnncagtttcacaaaannntaagntnnnaaataat

SEQ ID NO: 89551 - DNA, 844 bp, Glycine max
  Clone ID: PAT_MRT3847_51875C.1
cttaagagaaaaaaaaatgtcaagtatggggtattcaaggtctttcttggcttcttttcttcttgctgtgttgctcaatgtgactaatgggcagcctctagtccctgcaattttcacatttggggactcaattgtagatgttggcaataataaccaccaattgactattgttaaagcaaacttccctccttatggaagggactttgagaatcactttccaacaggaaggttctgcaatggaaagcttgcaacagacttcattgctgatatccttggatttacctcttatcaaccagcctacctcaacttaaagaccaaaggaaagaacctattgaatggtgccaactttgcctcagcttcttctggttactttgaattgacatccaaactatatagttcaattccattgagcaagcagcttgaatactacaaggagtgccagaccaaattggtggaagcagcagggcaatcaagtgcttcatcaattatatctgatgctatatatcttattagtgctgggaccagtgattttgttcagaactactacataaatcctctgcttaacaagctttatacaactgatcaattctcagacactctcttgcgatgctattccaatttcatccagagtttatatgcattgggagcaaggaggattggtgtgacatcattacctccaattggttgccttcctgcagtcatcactctcttcggtgctcatatcaacgaatgtgtgaccagttgtaacagcgatgcaattaacttcaatgaaaagctcgacaccacatctcagaacttaaaaaatatgctgccaggcctcaatgtggtcgggtgtgatatgtac

SEQ ID NO: 89552 - DNA, 219 bp, Glycine max
  Clone ID: PAT_MRT3847_51876C.1
caccaatttctcttatatatacaagagcttcctacattggggatgctggatgaagcatgcactagagtccatcatcgctttgattcacggatgctttgagtgtaaacacatttggatttgattgttcttccgacatttagcgaatgagctggttgagctggacttcaagtgggatatggtgcattacctcagaagataattgagtatctgtggagagca

SEQ ID NO: 89553 - DNA, 686 bp, Glycine max
  Clone ID: PAT_MRT3847_51877C.1
gatggtttcggtccggaattcccgggtacgacccacgcgtccgcatatgggtccttttgggtttatttctgtacctcttcattctttttttattttttattgaaaaatatcattatttttatttcctttatcccatggtcatacatgcatgaagatgattctagctggcattcgcaaactgatttgtgattttctggcaacatccttctcaaaagctttgaacacttgggtttttgattggagctaagaggagcatggaagataccaagggtgacaaaggagctgtcacagtaggaaccactggaacaatcagcttgttgatgacaagggaattggatcagatgtcttctgttccacaccaggaagtatcttcaacaagtaaacctcgaatttcagtttcgagtggtagtgctacgccaaaacgaccacaaccaagaaaatcatttgaagccagcagtagtagcagcagcagaagtagtagcatcttaaaccatataagtcctgggattggccccaaaacaaaacttaatggcaaacatacccatcaaatacccattcttggttaccagaaccttccactggagacaagtccagttacgaagaaaaaggataagaagaaaaaatctaaaattgttgaagtagtggacatcaaatgtggctcccttctgtcgtcttctcgcagccgt

SEQ ID NO: 89554 - DNA, 444 bp, Glycine max
  Clone ID: PAT_MRT3847_51878C.1
ccacgcgtccggtgacttttgtggttcttaggatctgcacaaagaagaggagtcacactgtgtaaaggtgagccatctgctgacttattctttgcttctgtatgagcgcaatactgctgctgtacactgctaatgaagactctacagatggaactgaggtgatcattgatggcgagcctttacacactaagccatttgcaataggaggaaaagacacttccaataccgttgattaaccctctaccagaattggatacaagtggtacacctataccaaatcctctgactatcccaagtctctcaaagcctataccaaagaggattacatatattaaagcctataccagactcctattccaattgcagtattgccaatcccagtgtttaagaaccccattccatatggtatggcaataccaaagccatctcccataggggaaaaac

SEQ ID NO: 89555 - DNA, 351 bp, Glycine max
  Clone ID: PAT_MRT3847_51879C.1
aaactgttgacaaatgatttagcatgggcataaattttatagcatacacgtagcacgttccgcaatgcacatcttattacataccgaagagctcttaatcaccaatgtaagaggtatacaaattgacacgtacgagcatgtgtaacgtacacttgggaccaacaccctttaaactgcccgacctgaataaaatatccgaaaaccatattaacgcagttcacaactacagcgacttttgtatggtttccaaaagaggtaggcctaataaaatgaatagaacctatatccgatattattgtcacaactttaattctttaagaaagtgatcgtcataatatgtgatatcatgta

SEQ ID NO: 89556 - DNA, 347 bp, Glycine max
  Clone ID: PAT_MRT3847_5187C.1
gacaataataagcccggtagaataaaagcaaatttagctatatgaggcgccatcttgtacaagaaatatcgtgaagactaaaattaccaactttctttaacttgcaatgttggcatatgaattatgaggtatgattgctagtatataccgaattctgaagctgggtaagtatcctaaggtgcaaaatcaggtaatcttagctctgagacaaagtatggagttccttgagaaatgcaacaacttcatctggtgaagcaagcgtataccgagcattggtctgtgttcgtccaacagcgcacgagaagtaattctccttcttgaggtcaagcacattccaagagatcttt

SEQ ID NO: 89557 - DNA, 762 bp, Glycine max
  unsure (1)..(762): unsure at all n locations
  Clone ID: PAT_MRT3847_51880C.1
ccgcgtccggggggggntggcgtcgccttnccctctttgctcttgccgggcagcttcttccttctcatcccattatcgcatacccttcttcaccatcatcccttctcattccaaaacccttctccacgccccacgcttctccttccaacccttcaacactctccaagacgccgcaaaactcgacgacccagatgcaaagtctccatctttatccaaaaaatccttctgggtcaatcccagaagccccagagccaaacagcttcagcagaattcccctcatgccaggtcatcatctctcaccaagctcgccaagtcactggactcgtgcaaccccaccgaggaacacgtctctgaaatcctcaacgttttggggaacaatgttgcagaacgcgacgctgtgtttattctcaatacgatggctaatcccaacactgcacttctcgcccttaagtacttccagcaaaagattagccccggtaagcacgttgttctttacaacgttaccctgaaggtgttgagggaggtaaaggattttgaaggttcagagaagctgtttgatgaaatgcttcaaagaggggtcgagccaaatctcattacgttttcaactataattagctctgcttccgtgtgttccttgccagataaggctatggagtggtttgagaaaatgccctccttcggggttgaacctgatgcgagtgtagcctcctttatgattcatgcttatgcgcatagtgggaatgctgacatggctttgaaact

SEQ ID NO: 89558 - DNA, 627 bp, Glycine max
  Clone ID: PAT_MRT3847_51881C.1
ccacgcgtccgcatgacttggttttgctattctgttcagcttggtgtgtgttttatgtgggtagttgcagtgctcagttgcaatcctctcagactcaagttcttctccaactgaaaaagcacttggagtacccaaaacagttggaaatatggagagatcgttggacagatctttgctctatttcttctcctgggcaagtgaatgtcacatgcaaggacaattttgtcactgagctcacaatcttgggtgatgataagccaacaacaaagggtagagattttgatgggtttgccattccaaatcaaacactatcagagagcttctccatggactctcttgtggccactctggcaaggttaaccagcctgagagtccttaaccttgtctctttgggcatgtggggaccactccctgatagaattcacagactctatgcacttgaacatttggacttgagttccaattatctttatggatcaatccctccaaagatttgcacaatggagaaccttcaaactcttagattggttgataacttcttcaatggtaccatcccaagcttggtcaattcatcaagccacctcacagttcttagtttgaagagtaacaggttgaagggtccatttc

SEQ ID NO: 89559 - DNA, 202 bp, Glycine max
  Clone ID: PAT_MRT3847_51882C.1
cgcatacatgctccgaaccagcctcactgcatatatttttgagaaaactctgtatacatatacgtggatggggacctctttacaggtgatgagcttatatcggactcaataagttacaatgaaactgacaatggaatgctgtgggacgtcgaggagtagtcagttgttaaggtagcagttaatgttgaaattgttgcaaatc

SEQ ID NO: 89560 - DNA, 1229 bp, Glycine max
  Clone ID: PAT_MRT3847_51883C.1
tttggtcacagcatactccactctctctacctcagagacttattaagatgaagcccaagacttgcgagctttgtcatcaactagcttctctctattgtccctccgattccgcatttctctgcttccactgcgacgccgccgtccacgccgccaacttcctcgtagctcgccacctccgccgcctcctctgctccaaatgcaaccgtttcgccgcaattcacatctccggtgctatatcccgccacctctcctccacctgcacctcttgctccctggagattccttccgccgactccgattctctcccttcctcttctacctgcgtctccagttccgagtcttgctctacgaatcagattaaggcggagaagaagaggaggaggaggaggaggagtttctcgagttcctccgtgaccgacgacgcatctccggcggcgaagaagcggcggagaaatggcggatcggtggcggaggtgtttgagaaatggagcagagagatagggttagggttaggggtgaacggaaatcgcgtggcgtcgaacgctctgagtgtgtgcctcggaaagtggaggtcgcttccgttcagggtggctgctgcgacgtcgttttggttggggctgagattttgtggggacagaggcctcgccacgtgtcagaatctggcgaggttggaggcaatatctggagtgccagcaaagctgattctgggcgcacatgccaacctcgcacgtgtcttcacgcaccgccgcgaattgcaggaaggatggggcgagtcctagctgatgatagctataccaatgcattgtaatgtatgtgtaatccaaatgtgtggatttcaaatttgagtttagtttcctttgcttttcttttcttttttgtatctacgaatggttgttgattaatgtgtagcaattggatcaacaaattcgaatataaatgaaaaactagccagccaagcaactcattctaaatgtgcttaatagacacgcgtgtcgtggtctctcaaaaaaaaaaaaaaactcgagttttttttttttttttttaaaataaaaataaaaaaaactatatcaattaaagcttattttcaatcttacactcattttcccccgaaattgaaaaaaagcaaaaactaatagctagtgaagccacattccacggaactattaattgatggaaatgagcttattcaatatgaattgaagacacagctgatgtgattccattggttc

SEQ ID NO: 89561 - DNA, 1032 bp, Glycine max
  Clone ID: PAT_MRT3847_51884C.1
gtcaagggaagaataacgcaatacaacacaacgcactcactctacctctgatcccagacagaagagggtggagtttttgtcatactccctcaatttttagcaagtcaaaacatcagaagaatcattttctttttttaatttttgaaattaacgttcaggcgaagatgaagggtaagacttgcgagctttgtgatcaacaagcttctctctattgtccctccgattccgcatttctctgctccgactgcgacgccgccgtgcacgccgccaactttctcgtagctcgtcacctccgtcgcctcctctgctccaaatgcaaccgtttcgccggatttcacatctcctccggcgctatatcccgccacctctcgtccacctgcagctcttgctccccggagaatccttccgctgactactccgattctctcccttcctcttctacctgcgtctccagttccgagtcttgctccacgaagcagattaaggcggagaagaagaggagttggtcgggttcctccgtgaccgacgacgcatctccggcggcgaagaagcggcagaggagtggaggatcggaggaggtgtttgagaaatggagcagagagatagggttagggttagggttaggggtaaacggaaatcgcgtggcgtcgaacgctctgagtgtgtgcctgggaaagtggaggtggcttccgttcagggtggctgctgcgacgtcgttttggttggggctgagattttgtggggacagagggctggcctcgtgtcagaatctggcgaggttggaggcaatatccggagtgccagttaagctgattctggccgcacatggcgacctggcacgtgtcttcacgcaccgccgcgaattgcaggaaggatggggcgagtcctagctagctccaatgtgtaatcgtctcattagccaaaccaaatgcctggatttcaaattttacttttgtttcctttgcttttcgcttctaccaatccttgttcattaatgtgtttaccaattggatcaacatattcgaataaaaa

SEQ ID NO: 89562 - DNA, 279 bp, Glycine max
  Clone ID: PAT_MRT3847_51885C.1
cgcgtacagttaactaggaatgcggcccgaccaacttgagataaatttctcctaccttcattactgatatctcaactcaaagtcatagcacccatggttgcttacctctcaaccctggttcttctattgagtgttattatcacggtagctggatactgatgcctctactttctcaaactcaacatcttcactcagaagaagacccttacaccgggcccatcgaaccttcctatcttcagaaaccttgtatctgtgagacccagacctacacacttactt

SEQ ID NO: 89563 - DNA, 340 bp, Glycine max
  Clone ID: PAT_MRT3847_51886C.1
gggcaaaaatggttaaaaaggcaaaaggagatttgtctgtggggatggtgaaaagatgacactgattccggaaaccagagtagaagaggtttacatcaagctaatagatgaacttgagaaaagggtttctacattggttggcattgaatgtcccaaggatgagaaacttcctcggcgcaaaatttttgacaaacctaatactcgctgattcactattatacttatggagcataatcttgtggtccgacaaaagtttataaatgttgtgaggctcattatgaagaaaagggacaaacttagtttgtaagatggaatcaacccatactacatggaatggact

SEQ ID NO: 89564 - DNA, 289 bp, Glycine max
  Clone ID: PAT_MRT3847_51887C.1
ggcgcggagttatgctcaaaacaatgggatgtatgagcttatgctagttgggatagtggttagaactatggatgctacatgaggtgggagatagaaacaatatttggatgtaacatgaagaggtgaaagtggaaaaaaatgcaatggtggaatttttttatcagttaccctagatgaaggggaaggatctgggttctaattaaagaatgaatagctgtttggaaggaatgatatgaagttcaatgtaaaaaaaaacaagtctgatggcgctgtgacagataaatacttg

SEQ ID NO: 89565 - DNA, 306 bp, Glycine max
  Clone ID: PAT_MRT3847_51888C.1
aaaacgtaaacaaaacctgtttttttaccaaccttttttgggttttgggaatcataaaaaaaggggaaaacattatttcaagcttaacacaaaattgcccaaaaatagggctttcaactccaaaaagtttccaaatttgggacataaaaaataaaccgttcgggaaaataacatattttatactttggcccatataccacaggttccgaaatgaactttaactcatcattttcattattatcagcaccagagttgatggttgccacccgtgcaaccaatttagccttcctctcctaataagtcagc

SEQ ID NO: 89566 - DNA, 1331 bp, Glycine max
  Clone ID: PAT_MRT3847_51889C.1
tttaaattcaaaccctacttatttgattattttcccaaccccacaaccaatctcctagccctaatttcactagttaatgaccccataaccatacatgccattgcaaggtgttgtttctttatgacaaacttttcagatattatttcaaagccatacaatgttagtaagagaatttatttatttaatctcggggaggttttagacatctattcttttgtcgttcacattaaccttgcttcaaataagacatctcaatctacagctgcagtatcataatcagaagtttccatttttacaacaactcaaggattaacacaattaataaccacatctttaaatttattactaataagtaataatacatgattcatgtataatttttttgagcagtagccactatatagatgcacatcgatccccgtgttaattttcctattcatgtcagaaccatattacaatttccataaagaaagtaagttcatcacgtggaaggagttattacagaattgcatggatagctactatttagttaaggagaagcattctttgcagaggaagcagagggtgtgccagggctgctaggtggagggaataatggaggaaaaggaatgggaagagctagtgatggtggagatggagttaaacctggcactgttgggaatggaaacagtggtggtgatgttgctgatgagggaggctggaatgggttaggaacaagtggtgatgggcctgatggctctaatgggttaggaattagaggaggttgctgaagagggttggggactgagggtgttggttgaaatgggttaggaggaaatatgaggttattagggtcaactagtttctgatctgaaggctgaacatttgggaactcattagtgattcctgcagggactagtggtgacaatattcctgaaaggggtggcaaaagagggagtggtggcaacaatggtgggaggtcgggtaatccaggaatgggaggaagaagaccacctggtgtttttggatcctgaagtggaggaggaaacgatggatctatttttggaggaaatatgtgtttcgcataatcaaggcccttgatgttttgaatgcttggtttttggttgcagagatttggctgtctaagaggcttgaatgagaaaaagccagctgagaatatgtgttgtccttgctttctggacttgaggcgcagtgaggaagaagtagctgctgaggccacagcacaataaggctcactgctatttattagtttcacagtgcatccttttattcttttcacatgtttgctcactgagaaaggcaactgcaccttgaacttcccatgctcatct

SEQ ID NO: 89567 - DNA, 531 bp, Glycine max
  Clone ID: PAT_MRT3847_5188C.1
ctttcttttttttttttttttttttttacttttttctttttttttttttttttttttttttttttttgaaaaaacaaaacttgggggggatttattttatcaaaccgggggcctggttcacccaaaatggcctaaatcggctcttcctgcaaaccccggggcccaacttttaagaaaagcccagcccttggacaaaaacaaaaaacatgttaataatccggatccacccaaggcccattttaagaacaacttggggcctttgtttttctcttacatcccaaaggggggggggctttgcccattggcggggcccctaggggaccccaatgcaatttccttggtggcccttttacctgatccccttccctggataacattcccccccatgggcatagcaaaggcccccccaattgttcccccctcaatttgagctgggtttggggctccttatctttttcgggcggtggtaccacattttttcccccccaatacatgggaccaaccggggccgagccattgttttcccccccc

SEQ ID NO: 89568 - DNA, 310 bp, Glycine max
  Clone ID: PAT_MRT3847_51890C.1
gggacctcttaggggttcagcaaacaccacatagaggggggtcttacactaacacacagcccatgacacaagttatgctcaacaactcatgagagctgaccactgcacgccggtcagacaaaaacttttctccatcgtcatcctaaatgaaatcacaggaatacattaaccgcatttgctaaaccaacaagaggacatggctcatcacaccactgaaccggaaatgaccaatctcaccatattggtactctcaacaacaatcgatcgtaaaagcacttccactaccactattgaatctatatactctacc

SEQ ID NO: 89569 - DNA, 711 bp, Glycine max
  unsure (1)..(711): unsure at all n locations
  Clone ID: PAT_MRT3847_51891C.1
ccacgcgtccgcggacgcgtgggcggacgcgtgggcggacgcgtgggttcccattcttttctctctgtaattctaaatcttcttgacagagatatgatccgaagaggaaagtaagcaagcaaaggtctctctctcgatgggttgcaatcaatcgaagatcgagaacgaggaagcggtggcgcgatgcaaggagcggaagcgcttcatgaaggactcagtagcctcccgcaacgccttcgccgccgcccactcggcctacgccacctgcctgaagaacaccggcgccgccctcggcgacttcgcccacggcgaagtccaaaaccctcaatttcactcaaacgacaacaacaccagcagctcctcctcctacgtgacggcggcacagcccttcgaaattcctctcccgccgccccctctccccgatttctcccccgccccacctctccagcgggccgccagcatgcccgagatcaagatcaacaatcccgactccaggcccaggcccgagcccgtcaccacaatcgtcgaagaggacgatgaggaagacaaggagttagaaaacgaagggtctttaaggatgagaagaagcaacagagttaatagtaatangaagggtgtcagaagaagaagtgcaagagcctcgtcctcctatgcctnctcctccttccaaacaacctgatcacgcgacacatcatcaccaccactccatgg

SEQ ID NO: 89570 - DNA, 457 bp, Glycine max
  Clone ID: PAT_MRT3847_51892C.1
acggatacatgtatcggtgtatgacacatctgacacacatctctaagtgtccagtttaaaaatcattttattcagttcagatccaggatggacacattctcttcaaaaaataagtgttgtatttgtacatatctagttttaccatgaaaagttcgtttaggagaaaattttaaaatgtaaatcttgaatatgaattatgaggctaatatatagtgagatcaaagtgacaatgtgaaaggcaagaagaagagttaatctttgattatatgaccatgtatggatgattgagattgttttacttaaaaacaatcttgaccacaaagagcatgttcatttcctacaatttttaggatttggcatatcccatgtcacgttgcatgtcagtatcagtgtttgtgcattttagcatgtaatggttttccttgctctaccttatccctttaaagttttgggattt

SEQ ID NO: 89571 - DNA, 278 bp, Glycine max
  Clone ID: PAT_MRT3847_51893C.1
tgaaacataattttccgtcccaagccctaaaaaatcctcaaaacaatgccagctgagggcaaaaatgagattttagatatcctctgttagcagcgctattgtgctgcaaaaccatgggtttttggctgcgaaaacagccatgacacctgcaaatgaaaatgcacttatttccatgttctgtggcggctgatggctgctccaccatgtactgctgccaattgatatccctgctaacaatttaagcttttgggagagttggctatcaatagtactcattt

SEQ ID NO: 89572 - DNA, 444 bp, Glycine max
  Clone ID: PAT_MRT3847_51894C.1
atcttctttttgccttataattttttttatatttttaacatacatgaaaattttatcacaatacatatgatcttaatttttttttataacaactaaacttgaatcattaaataatttataattatagttacaccctataccggtactataattacttatactactttcatacttttaattattcaaaactatgatatctttattaaacttactaaaaacttttaactccattaattacttgattaatatcatttcccccttctttttgtacttattataacattttaaacacatattcttatgttgccttatccactaattccaacaccttcttctgcacccactcctacaccacttgaaccaactcttgcaccaccttctgcacttacaccctcaccaactttggccctttctccattactagcaccaacccttggaccttca

SEQ ID NO: 89573 - DNA, 345 bp, Glycine max
  Clone ID: PAT_MRT3847_51895C.1
gcacgcgcacgaaagctggaaaccaaaaagcggccgccaaattcttttcgggagcagcaaaatatggacatattatacatgctgggcatagaaatcggaaggaataaccaaccccaatgaaatctaaaatctagattacagtattatggacacggaagaacactaaaaaacgctgaaccatctttaagtgatttaactcttcaactccaaacacagaacatgcacctacaggctcagaggctatcttcagccaagcattatcaaacacatccaaatatggcgccagaacattcctacatgtggcgagataggagtacaaccaaaaaatctactcgggacttaaaa

SEQ ID NO: 89574 - DNA, 1920 bp, Glycine max
  Clone ID: PAT_MRT3847_51896C.1
atttcatccaagccctcttgtctcaacaaattaataataattaatcacgcccttcgatcttcgagtcatctaataataaatcttttgtttcccatcaacactagttcctgcaaattaatgggtatccctcactttctttgtataccatttccagttcaaggacatgtgaaccgactcgtgggattttctctgcttttggttaaacatggttgcaaggtcacttttgtacacactgagttcagcctcaaacgaacaaagacttctggtgctgacaacctcgagcattcacaagtaaagttggtgactcttcctgatggtttggaggctgaagatgacagaagtgatgtgacaaaacttcttttgtctatcaaaagcaacatgcctgctttgcttccaaagctcatagaagatatcaatgccttggatgctgacaataagatcacctgtattattgttacatttaatatgggttggcctttggaagttggccacaaactgggaatcaaaggagctcttctctgtccagcatctgcaacttccttggcttctgctgcttgcatcccaaagctgattcatgatggcattattgattctcaaggacttcccaccaaaacacaagaaattcaactctctccaaacatgcctctgatagacacagaaaactttccatggcgtggctttaataagatcttctttgaccatcttgtgcaagagatgaaaactttggagttaggagagtggtggctttgcaacactacttatgatcttgagcctggagcattttccgtatcaccaaagttcctacccattggcccattgatggaaagtgacaacagcaaaagtgcattttgggaagaagatacaacttgcttagagtggttagatcaacaaccacctcaatctgtcatatatgtttcctttggcagtttggcagtaatggatccaaaccaatttaaagaattagctcttgcacttgatctccttgacaagcctttcatttgggttgtacgtccatgtaatgacaacaaggaaaatgttaatgcatacgcacatgatttccatggaagcaaaggtaaaatagttggttgggcaccccagaagaagatattgaaccaccctgcattggctagcttcattagtcactgtggttggaattctaccctagaaggtatatgtgccggtgtacctttcttgtgttggccatgcgccactgatcaatatcttgacaagtcatatatatgtgatgtgtggaagattgggcttggactagacaaggatgaaaatggaataatttctagggaagagataaggaagaaggtggatcaactgcttgttgatgaagacatcaaagctaggtcattgaaattgaaagacatgaccataaataacatactagaaggtggtcagtcatcaaagaatctcaacttctttatggattgggcgaagtaattatgcttaatttggttctatattgaaaagtcatgtgtaatttctacatgtaagaatttaatttctatgtagatcttaatgtaatctatttaaaaattaataagctttattatatgcaatgatttttagttttatgaaattataataggagtatgtgagtcattttgggttaggtttgataaaacttatgatccattctaattaaatttgaaagagttgttttgagtaaatttttaatatctaatccaaattaattggtttttttaaacagattgagttagatttactagttaaaatatttaataaaatttatatattattttttaaaatataatattttataagctaaatttttttatttaatgaaatatcaaatagaatacttataactgttattatgtagtcaaatggtgaaaaaagatgaaaaaatcacattgttatgatgtattatcatcatatatagactaccac

SEQ ID NO: 89575 - DNA, 543 bp, Glycine max
  Clone ID: PAT_MRT3847_51897C.1
ggctcgagtggaggcagaaatgttgacacaggtggaggtgctggaattggtggaggtggaagtgcaggggttggtgccgatggtggtggaagtgtaggtgcaggaggaggtggaggtgcaagggttggtgctagtgatggaggaagtgccagagttggtggaggtgtaagtgcaggaggaggtgcaggagttggttcaagtggtggaggagtgggtgcaggaggaggtgttggaattagtggataaggcaacataagaatatgtgtttaaaatgttataataagtgcaaaaagaagggggaaatgatattaatcaagtgattgatggagttgaaagtttttagtaagtttaataatgctatcataattttgtataattaaaagtatggaagtagtataagtaattatagtaccggtatagggtgtaacaataattatagattattttatgattcaagtttagttgttataaaagaaaattaagatcatatgtattgtgatagaaaattcatgtattgtatatttattaaaaatattattagac

SEQ ID NO: 89576 - DNA, 305 bp, Glycine max
  Clone ID: PAT_MRT3847_51898C.1
cgggacagcaaaaacaagtaatacagatgagtttgaacaacaccatggtggtgctaaaggtgtgtttgttgcgtcttttccttgcgggggttacatctgcacgcatggaactgagcttcttcagaagtgatcagtcatcacgttacgatgatcatgagtagttccacatcatgctgtgatctctgcatgtgcatgcgcgcaatgcctccccaatgcagctgtgaagatattacgctgaattcacgcgactcagaccgtaagagccgtatctgcacacgctcatcggcaggacactgtcgttgtct

SEQ ID NO: 89577 - DNA, 569 bp, Glycine max
  Clone ID: PAT_MRT3847_51899C.1
ctaacacgaccaaataaccctacgggttccagggccaataatataaaacttatccagggatttaattaaactggggctgaaataaaacaaaatcctgactccgttggctgaaagcatctacacaaaatgtttcaaaattggtacttaaaaagaggcccctcactttgtggggatttgctttgacttttttgccaagctgaaaaatcttattatccataacagttttaacagttttacacacactttcttttgggaacaaaccatttttttcccttttttaaacttccacaccaaccctaaattttccccccatggtttttgccttgataagaaaaccggaaccaagttggggaaacagcaccaactgacaccggttcaaaagggccttatttaaaaaagctccaccacagggagttatgaaccacccaaaaaaagggggggccaaaatcaactgttgttgcccccaccccccatacacaaccccttttttttaaaccctttttttgaaccctttggggagagcttttttaatggactcaaactcaatagggggctaaagggctgcaaaa

SEQ ID NO: 89578 - DNA, 128 bp, Glycine max
  Clone ID: PAT_MRT3847_5189C.1
aatagagaagctcatagtcctagggatgatataaaaaggaagcgttggcttataggtcataatctagatttgataaacggtaagttccccctcagccagagttaaagtacttcgaagagcgagaatgg

SEQ ID NO: 89579 - DNA, 758 bp, Glycine max
  Clone ID: PAT_MRT3847_518C.1
gtggagtgcaagaagcatttctcattgagcatggttctgaggtacattgcttttcagttttcacactccctcaccatcttaactgttaacaatattaagaattatttgctttctagattgcctttcttaaatcaaggagaggatttgtccgcatagcaatggagaagggaaaacccctggttccagttttctgctttggtcagatctccgataccctttaaacatccaatgcatgtggtagtgggtagaccaattgagctcgagaaaactcccgagccaactcctgaggaggttgccaaaatacatagccagtttgttgaagcacttcaagatctatttgaacgacacaaagctcgagctggatatccaaaccttgagttgagaattgtttgatatggtcataacttcgacccatattttcatggggttaattacacttatctcctctcaggtcaggctttatttgggagttttgaagatggagtggagtgattagttcatgataattggatttggaatggggagaggtaaaacaatgctgttgattgattgagaagggagtcatctctgttgttttagaagtcacgggtaattaatcatgtaaactgtgttagtttaacttcctattgagtctgcacgatttatatcagaaatagttataaatcttagattaatttaaaatgttactttatgacatagggtgtgtttgggacaactgtaaaagatagattatttcaataatcgattataatcaaaaa

SEQ ID NO: 89580 - DNA, 456 bp, Glycine max
  Clone ID: PAT_MRT3847_51900C.1
gatcgccgacggaccttgaacacaggaggtctcacgttgaaaacggaaacaaaagcgttcgttacttgacttcaagaatctctcaatgtactgctacttttttgagagcgattgcttaagggaaagaaaaccactctctgtgctgggcacagacttacaggatgattctctttgccacgcttgggtgataagctgaacactctcctattcgagataggacttcgagtgagacttaaacttatgctgtctctgtctcagctctgtgggtaattgcaaggtcaagctggtgaaatcttggattagtgctcccactctcctatctggcataggacttcgtgggtagacttttctattcattctcccttcattcactcttcttatttctaactgatccgcatcgtcgatcaaagtgggctttatttgaaaaacaccttggtctctgtcgcaaataattgg

SEQ ID NO: 89581 - DNA, 744 bp, Glycine max
  Clone ID: PAT_MRT3847_51901C.1
tacggctgcgagaagacgacagaaggggcccgtaggctacgcgttcatcagatgactacggagggacgtgatatggctgaggacgtcgctgacatgactgatgatgtccctgagcagcctacggaggcacctgagatgcgtgcggacgcacagggtgctgatagtggtgaggggtcagatggtgatgatgctgcagagggattccctggtggtccacgtgacccgtcagtgctcacatcatttgccgagcatgttgcacatgccgtgtggagtggacaggaacgtcctgatttgaagttagtgtcacatgggaggaagctgacactgattgggaggccagtgcctgagattgaaggcctggtggctgccacaggattaagtccactgatagattgttcagttattactggcgatcctggacttatatccgcatttgtggagaggtggcacagtgagactagcaccttccaccttccagtaggagagctgacgatcacattggatgatgtgtcgtccattctacatttgcccatcactggcgccttgcacagtttccacgctctttctacggaggaggccagattcttgctcacggagttgctggaagtgtctgcggaggaggccagagccgagacagcgctcacacgtggagcatatgtacgattaggatgggttcgtgacatttatgagaccagatgtcaggcccggcggtggattgtcgcagctcgcgcttatttgctgcac

SEQ ID NO: 89582 - DNA, 297 bp, Glycine max
  Clone ID: PAT_MRT3847_51902C.1
gggttggggtttttttttttttttggtttggttattttttttttaatttttaaaaatttaggggatagcatttaaatgggggaaattgttagcaattaaaaattccaaagaaaatagtacctgaaaagtgaattaactaaaattaatggccctaagattaatgttaaaatgccaggggggaaaaatggggggccaaattaatataaaaggcgtggagctcactggatgagtctaattgaaaatagcgggccagggaggttgattttttaattagtgagcccgcggggagaggatttt

SEQ ID NO: 89583 - DNA, 473 bp, Glycine max
  unsure (1)..(473): unsure at all n locations
  Clone ID: PAT_MRT3847_51903C.1
aatgaacatttaccggaatttattcattgaattgaaatgggtggttcagaaatcattggattattcttaaaaattggtgaatcttttttattttccctcaattcatttatttttttgaatttaaatttaataaataacaatttgaaaaattggtttattttccttaggcttaaaatacctttgaaaatacctttaaaaatactttccaaaatacctttgctaaacccttttgctttttctattaaaaaaggtaaaaaccatttcaatttttcacttaaaacctttaaaaccccaaaagggaaaaattgaaattggttccgttttttttttaagtctttaaaaatgggggcaaaaaatgaagaaaatcttttttttttggggagaacccaaaaagggccaggcgacttcccttccccaaactggtaaaaaacacaaggtcttttntttcattaaaacccttttcttttcattgg

SEQ ID NO: 89584 - DNA, 437 bp, Glycine max
  Clone ID: PAT_MRT3847_51904C.1
aatatggtggtctcgcgatctgtcttccaaaaagattcatacgttcggttaaaaactctattggtcgctaaacctcttttgactaacatattaaaacagttctttatgacaaccattcccactttgactgtcgtggcctactaatgcgaccatatatccctgatctgatgaggcaaatgcaaaactttcttgctgtatgagactgctccaacactcgcacccgatggataggatggccaaaccacccctcaaaaatagccaagtgaatctgcctgcatcgctgccgtgcctatataccaatgggatattgactccactttacggagcacaatacttcgctgctctttgaccgcacttaatcatcgactatctaagtggtgcacccttcttaaaaagccccaatatggccactgcactgagaggggtgaaaaacttat

SEQ ID NO: 89585 - DNA, 296 bp, Glycine max
  unsure (1)..(296): unsure at all n locations
  Clone ID: PAT_MRT3847_51905C.1
atcgaacacgcgcccgcgggccacaccaccggggccggaggagacaacaacaacaaccccacgccccaancnngaggagagagcggccgggcccgacggagaaggagccggcggaaacgaacgaagcggcgaaaaaggcggcggaagcggccaccaccggcgacggcaaacacgaggaaagccgacgcaccgacgcgcccgagcagcccaagaaagcccccgccaaccacaagaaccccgccaacacccaggcgggcaaacaccccaaagacccgacaaagcacccgaggcagaaa

SEQ ID NO: 89586 - DNA, 279 bp, Glycine max
  Clone ID: PAT_MRT3847_51906C.1
tctcctgtcttgataaataaaacaaaaaaaaaaaaaaaaaaaaaaaaaaaaaaaaaaaaaaaaaaaaaaaaaaaaaaaaaaaaaaaaaaaaaaaaaaaaaaaaaaaaaaaaaaaaaaaaagggggcggcccccaactattgacctcttcaacccggaatttatttccggcccggtccctgaaggcttccaacctttccttatagggagtcgttttaaacctgggcgtaacaagggccatagctgttccctgtgaaaaattgttttccgttaaaatttcc

SEQ ID NO: 89587 - DNA, 119 bp, Glycine max
  Clone ID: PAT_MRT3847_51907C.1
acgcccacacatatgctttaacatccattcggattttattcttccttagtcttattaacaatagtattatttataaaggttgttacactctatccgttatttacacacttcaatcctta

SEQ ID NO: 89588 - DNA, 514 bp, Glycine max
  Clone ID: PAT_MRT3847_51908C.1
catgccagaagactgagttggaaactggaaatttcaaaaccactgtttttcttctttaaaggccagtggagtaccaaaagaatttgtgtttcaattagtgtacgtattttattataaaaatatatttcatattattagatgtaaattatacccaacagctcatttgattaaacttgtttgctcaaacagttaatccggttgaacataaagactaaagaggatgtttaaccaatgttgtaccatctaattatcattgcccagaagaaaattcaagctattttgcgtattagtttaacgtttcacgctccagaaggtttaacaattattttgcctatatttccgtattatgtgatctgaatgctgcatcttggggtgtcttgaattgtagaaagatgacgtttctactatctagtgatgcgacttaagtggagtctcaactctcaactcaagcaagcaaattaccagtgtaaatcttaaaaatctacgtgtgcgttggacttatataaatgtaagt

SEQ ID NO: 89589 - DNA, 1401 bp, Glycine max
  Clone ID: PAT_MRT3847_51909C.1
cgccgcgtccgctggtatgtttgttttggacgctccactaccctccccttgtttgttatgttcaattataccccttattcacatgtctatctacttccctcaccatggccctgtccatgtcctcctaaaaaacctctatccatgtctatgatgtctctaacaaccgtggctgcattcaagtccctcacaatggcggaatcgtgccttctatccctcccttccctcttctacgccaaaaacaataccctttctctctcaattcccaccaagcccctcaacctccatcttccatgctccaactcttcgctctttcccctcaccaccaaaacaacgcgccactcttctctcctcacattcgtggctcagacatcggattgggccaaagaagaagaggaagaagaaacctcgtgggagaaccaaggcgacaccgcgtggggaactgaagaaggtggccatgaagaagggggtttcgctgaaaaagctgaggaagataaggatcttcgttgggaacttgcctttcgacatcgacagcgagaatttggcgtcgcttcttcgggcaggctggcaccggttgaggttgctagcaggttatttataatagggccactgaccgggagtcgtgggtttgggatttgttaccatgagtacacttgaagagcttaagaaggctgtcgagatgttcagtggttacgaactaaatggaagagtgttgactgttaataaggctgctccaaaaggagcacagcctgaacgcccaccacgcccaccacgttcctttagttctggtttaagagtctatgttggcaacttgccatgggaagttgacgatgctcggctggagcaaattttcagtgaacatggtaaggttgaggatgctcgggtggtctatgacagagagactggtcgatcacgtggttttggctttgtcacaatgtctagtgagactgatatgaatgatgcaattgctgcccttgatggtcagagtttggacgggagggctatcagagtgaatgttgcacaggataggcctagccgcagctctttttgagtggtaacttgagtgatcttccatgtccggctgattgagtttccttttaatggctaagtatacagtggcgttttttttttatcttctttggcagctggttccagattagatttgcatgttgtaatgttattaattttgtgtccagatgaaaatgattaaagttacaattccttttatagggattttaaagaaactctattgatttttttaactaattaattttgtgtccagatgaaaatgatttaagttactattccttttctagggattttgaagaaagtcttgatttttttaaccattttgtttgccaatgtggcacggaagtatagagtttgtctcgttgcgtgcgaata

SEQ ID NO: 89590 - DNA, 515 bp, Glycine max
  Clone ID: PAT_MRT3847_5190C.1
tggcttggaacctttgggctgatttatgtgcttgcatggtcgtgagaagatatatagtaggtggccgccccgatgaacaaaaggaattgaagcgaagggaaggggaagagagagcaacggcaggaaagggaaaaagaagaagagagaaaaatcatagggtcgtctacggcggtcatatcggttctttcttcttattcgacgtcctcaaatacgatgtcccgtttcttaaatcctgctaaactactctccctatataaaatttaatcggggtgaccgggcccctaaacgataagaaaaatgccggcgggtacgtttaaaacaagatcgttccaaaggatataggcgacgccgaaatcgcagacgctaaataggggactctcaacggataaccgaaggtattctaatcctcggacaggagcgaagaaaagtgcaccgaaagcggcggcgccgataagaaaaagaaaaaaagaaagaagaaggaggccaaagaatctacgcccgaaacggaaacggac

SEQ ID NO: 89591 - DNA, 325 bp, Glycine max
  Clone ID: PAT_MRT3847_51910C.1
ccagggcaaaacaatttacattaaggtgtttttggttccacactttatgtctgtttataaaatggacgaaaaaaacacgtctcatgttccttcaaccattacatcttcaatacatcctactgccagaacattatattggtccgctggcgacaacaggtcttttagcgatgcttgatgaaacccattgccttggccttgctacggaaggactgcctgcaggacataaggccataccttccgatcaatccatgtgggttcccacacactcggcatgtgcgagatccaggaccgccggtttttgggtgagaataccaaacgctggagt

SEQ ID NO: 89592 - DNA, 143 bp, Glycine max
  Clone ID: PAT_MRT3847_51911C.1
tacggttgcgagaagacgacagaagggggttctttaccattcaacaaagcctatcttatctttttcaccaaacatggcaccgttcgtgctcaaagttggaggttccctctactttacctgttcatgattcctccaaaaacaac

SEQ ID NO: 89593 - DNA, 140 bp, Glycine max
  Clone ID: PAT_MRT3847_51912C.1
gatagtaagtagcaaggagactagatccggattcggatatcattgcttaaactgcatcattcaccattactgcctatatctttggttgaactaaattcaatttaaaggcctctggagctaaccttagacccatgaatttc

SEQ ID NO: 89594 - DNA, 645 bp, Glycine max
  unsure (1)..(645): unsure at all n locations
  Clone ID: PAT_MRT3847_51913C.1
cacagcattcatcaaggctaggtttttgtctgtgacaataacaacaggaaggcgatcgtttcttaaaaaaagacctcgaaattgttctaatgcccatacaagattgttcacgcgctcaccctccagatttgcaaacccaacagtgaaagtcatcccaattggtgtcacccccacaaagtcaagcaatgggagcctatacctatttattttgtaggtactgtctataaaaaaaacaaaatgacatgcattacataacttaactgcatctgggtgacaccaaaacaaatcacgcaccacatattgatccttcaatctatgtcaatgaatgtattgatcacattcaaggagcctaattaggtgttgcatttcaatgtcatctcctttgattgaagaacgatatgcacttcttgcatcgtaaatttgtttgattgtggcacaattgttgacgttgtgttcatttaacgttaacaggatgttttttggtttcacattcgactttgtcatatcagcaatgatattcttctcttcatctgacaatctcccggtatatggatgtccaactaaggtcttcgccaattcatggttgtgaatcccacatatnagcttcaccgtccaaccttcacctccatgcactgattttccaca

SEQ ID NO: 89595 - DNA, 281 bp, Glycine max
  Clone ID: PAT_MRT3847_51914C.1
tcgatttttacggttatttggacagaaccttttgagggttatagatgagaattcggatatggtgaggaacaaagctggaatggtaacgaacataaacgtggataaatatttgggtaacgactgtcatggacagattggggtttgctaacgtgactgggattactaagactgcaactcattacaccatttgccaacatggacatggacaaaacaacctcacgaagttgagagaagagggtgcacatggatagttggataagcaataggagcttaggaagaag

SEQ ID NO: 89596 - DNA, 244 bp, Glycine max
  unsure (1)..(244): unsure at all n locations
  Clone ID: PAT_MRT3847_51915C.1
taccaccgaagagcttgantcaaatcaagggttttctngtctcagnacttgcatcacatgggcaattgtctggggctctagttatttatgacaaaatcaaacaatctggacacaagctggaggcaaaaganattacgagtctcattgtaaggttttgaaaatatcagtattntctatagttnnnaacttacaatcattcataatcaagccattggncaaccataggnagcacactcattccgag

SEQ ID NO: 89597 - DNA, 365 bp, Glycine max
  Clone ID: PAT_MRT3847_51916C.1
agacatgcaacgaaataaatggggcggtcgtgttaaagaaaccaaattaactgcccgtcgtttcaaaacgataggactggaaaaaccccgccgaaacccaactaaagccccttgtttaacaaccccctttcgggaaaagccgtagtatcaaaaaggtcaacaccgttggcccttaccaacttttgcccagccggaatggtaaaaggaacgccccctgcaacggcccattaaacacggtgggcgtgctgaatacccaaagggagaccccttgaattgccagattaatagcgccgggtgggttggttaccttcagtgggatcctcgacacttgcgagggctttaccgcccaagctttaaattggggg

SEQ ID NO: 89598 - DNA, 558 bp, Glycine max
  Clone ID: PAT_MRT3847_51917C.1
aattcggctcgagcgaggatgtttattgcaacgtttaccagcgacataaaatggcgtgactgcccaaaattttcaatgggaacagtgtgactaacactatatggtgacaagatttccctcatgccacttctgttgattttgcatcacttttcccaaaaattggcaatgctgacattcatcaaggctcaaactgtggggacaagttcaaattttgggaggacagatggatgggcggggaggtttcgttgattgcaagataccctaggttgtatgttatatcttcacaacaaaaccatatcatacaacacatgggggtcttccgagataaagggtgggaatgggattttagatggaggagaccattattcgataatgaaatagacatggcggtatcatttctaagggaggtcgaaggccacagaattcagcctcagcatggtgaccagtgggtgtggaaggcggatccaagtgggcagtacacggccaaatctgcttatggagtcctatggggggagatgttcgaggagcaccatgatggatttttcgaggagttgtgga

SEQ ID NO: 89599 - DNA, 629 bp, Glycine max
  Clone ID: PAT_MRT3847_51918C.1
cggacgcgtggggttttttatctccaaaaaccttcatctcagaaccctagccgtgtaacccccttcatccctagccgcgtaacccccttcatctcagaaaaaggtcttcatctccgccgtcgtggcctcagtcgtggcaaaactatgttgtgggtcatatgcgtccaatcagaggttccatttctcttccttctttcgcaccgaagttccaatcgtcgttgttagggtttttcctcgtcgttggagagagatgtgttcgattcgtgatgacaaccctatccctggccgcgccctttgcctttgcccatatgtcttctacttccttgatcatcgtagaagagaagaaatgtttctctatgcgtttggtggaagcagaaagaattttcaagtcattttaatattttgaggtgcaggctaggtgtcgttgggacttcaatggcagtgaccgaagctcagaatcctcttcttgtagaaaacacatgtggttccttgttaaaaaagcttcagacaccagttatgtgtgtcctcttgtgtatgcaatcatgggaagctcaagagatatttccatagtacctgtagttgttgtgtccctcttgcttgggactgtgctaaccgatgagatcagtgac

SEQ ID NO: 89600 - DNA, 508 bp, Glycine max
  Clone ID: PAT_MRT3847_51919C.1
ccacgcgtccgcactctcgctctttctccccattccctttcgctctccaactccgaaccaaacactaaccaacactcctatttcttcttcttctctcccttttcgcattcggctgtaaggccttggcggttattgttcaaacgtcgacgtttcggttctcatcattatcaatcactgcctcacctctagggttagttcgttccccttttttccgtgttcgtgtttttgctctcgcaatcaagcgtcgacgtttgtcctctgtaaccctagttccggaggagctttttttctctcacacccttcaattaatcacgtgcggtttattttctctcgggttttgtggttttccattacctgttctctccgtgttctacactgagtgcatcgttgccctttttagggctttattttggttttttttttttttcaattttggttccatggatgggtttgcaatgcgttgagttctgccattgctgccatatttatgctctgattcttccaattg

SEQ ID NO: 89601 - DNA, 256 bp, Glycine max
  Clone ID: PAT_MRT3847_5191C.1
acaaaccatctaaaaaagccttggaccatggtaaagatccttttacaaccaaaacaatgtgggcctgcattttggaggccttcgcaaaaaaaaatcgacacccgtcttgtgggaaaccctggaaaaaattttttaaaaaggcaaaggaaaggctcaaggggaaccctgcattatctggccgggaacaaggggggagtccaatatctcgaaaatgggtggctacagggaaccaaaaatattgccgttgctatgctaa

SEQ ID NO: 89602 - DNA, 274 bp, Glycine max
  unsure (1)..(274): unsure at all n locations
  Clone ID: PAT_MRT3847_51920C.1
cttggttangaaacctctcaaagtttgccaccaagagagcatcatcatctcaaagacccaaaaacactgacccattttgtcttttaccctccttcacttttctctcccacttcagcagcaccaacaccattgaggagaaaccttgtgtggagcctgttgagtacaattattcgggcttggagccaacaaggccccatgagaagccacgtgtggtggtgctgggttctggttgggccgggtgcaggctcatgaagggcttggaccctcgtgtgta

SEQ ID NO: 89603 - DNA, 130 bp, Glycine max
  Clone ID: PAT_MRT3847_51921C.1
taactggggtcttattcccctcggtgctggatacttatttggtggcaatcgcgttccttccttcaaccactcatataacattgactatatgtgtcgtgctcatcagttagaaatgcaacgatataactgg

SEQ ID NO: 89604 - DNA, 312 bp, Glycine max
  Clone ID: PAT_MRT3847_51922C.1
actttccacttgtacgcccacgcgaccgaccacgcagggggaactttagagagacacacgcttctcacccccaaattccgcagcaacctaaatttacctccctcgccataaacatgcatgacgaagatttccaaccctccagaatgcttcctacagaacgagggatgtccattggacaccaccttcccgaaaagcataaataattctccacgtcaccaacctcccctggcccaatcagctacacccacaaatccaccttaattcaccgtacccctaatcctgttcccccaaggatcccgaaaaccaactcac

SEQ ID NO: 89605 - DNA, 312 bp, Glycine max
  Clone ID: PAT_MRT3847_51923C.1
cactaactcgggtttggggcagtggcgtacattggaccacgatatacacgatgtgcacatatgggcttaatactggcatgaccagtgctcggaccatggacaccacccctcatcccatgtcacaccgacccagttctggatatggcggcacatgtgataacaccatggcattctgactgtcgcatgcacagctcctgactgtctcatgggacctgatactgggagcaatgttagtggacacagctgtgtaccggatcacacttataccatagtcttccaatgagtacctacgtgagaggtgcggctagaaag

SEQ ID NO: 89606 - DNA, 634 bp, Glycine max
  Clone ID: PAT_MRT3847_51924C.1
gtcctgaactccgatccaattgaataccgatccaaaacaattttcacgagaaaactagatgaatattccctctaacaacttccttaatagattttctattgtctcatactttatgtaaactcatccttcatcctctattttgattcttatgaataaaaaagaatattaaactctcccaatcttattaatgatctttgaaaaacttcaattagatatagctagccagactcttcggtcttccccagaaaatttatgtttcataatgcagtttcctatatatagcatcgaagcctcatttctgtaattccttttgagtgcttttggacgctgggaatgacttcaaaactcaaccatagagatgatggctctaatggggatagtgcatcaaagccaatccactttttgaggatcatgcaccctgacaatcttctgcaaggaaagctaaggcttccagcagagtttgtaaacaaatatggaaaacacttatccaacacaatgtttcttaagcttccaaacggtgcagaatggagagtaaatttggagaaacgtgatggtagagtttggtttcaagaaggttggaaaaagtttgtggagcatcactcccttgcacatgggcacctattggttttcaaat

SEQ ID NO: 89607 - DNA, 401 bp, Glycine max
  Clone ID: PAT_MRT3847_51925C.1
ggttcgagtgatcccgatcccgtgactagatcagtggcctttttcaaacccaaactatccatccggcttgcaagaccatctaggtcatcaaggactttttccatgctggaattaacttccttgttaatggaactaaaagaggaagatttgaagaatttgggtaccttgcaagaacaggtttgagattcagattgaggctgaacttgaggtctggaatgctgtatttcctccaagacatctttaacgccaagcatggcaactaggagctcaataagccagtttctcacctggccttttaccaaactgtttttgttcaccatcatctatcacagcttggatggagaggagcttgttctcttagtccctccgcaggtttctggtcaatctttggtccacgaaag

SEQ ID NO: 89608 - DNA, 260 bp, Glycine max
  Clone ID: PAT_MRT3847_51926C.1
aattcggctcgagcaagttgcaaccacttttgggattttcacagctaacatgatgttcaggcctgctcaaacgatcatgcggggggggtctaacattttcctagccttacatgacaattcacattttctgatgaccgtggtatgcatatctcttcctaacactcacactcgcttaattcaaccaggtgtgtcctcaaaagcaagaaccctgcttattaaaaaatgagcaaaccaaggaagttgacccataattccaagat

SEQ ID NO: 89609 - DNA, 382 bp, Glycine max
  unsure (1)..(382): unsure at all n locations
  Clone ID: PAT_MRT3847_51927C.1
ggatcaaaaaggctgactccattgcaaagcgaaatcctgctgtaaaaatacatacatnnaggacagggcatcgtccacctccaccggataggacgacggctgatccatatactatacacagttttcgatccaaccgaacgctaacatcggtggatccatcatcatcacagctcacaacaacatgtacttaattaacaacaacggttggacgcttgttggttgcttaatcctgctaattaacacgctactagcaaaaacacaagaagatgatgatgaacaggagcagaagctcggtatcatcatccatccatccttccttctaaagtttatacagcaccggcatcgtcgtcgtctccctccctcctgagtctttctgcctatc

SEQ ID NO: 89610 - DNA, 524 bp, Glycine max
  Clone ID: PAT_MRT3847_51928C.1
ccacgcgtccgcatgtacctctgataacttttattcatcgtcatctttcctttccaacactcatggcgtaacagataattcagtgccaagttctccatacattgatcctgataatcatagcaacattgagtcagcccgcattgataaggagcacaagaagaatttgtcctataggtatctgatgcattccacttccccacatgtaggaaaaaataatgtgttgaaagatgtaatgatatggggtggagggattggatgtcttgtagggattgtgaatgaaaggtttgttcagcctagaatttattctttagtgccaaagttactagaatccactgcaatgttagatgttcataacatagctttaggaggaaaacatgctgccttagctacaaaacaaggggaagtgttttgctggggtcacggtaagtggggaagactggggcaaaaaattgatatgggcattagctgccggaaaatagggggttgtgttaatgaggtgcgtgggggggggggggggggggggg

SEQ ID NO: 89611 - DNA, 219 bp, Glycine max
  Clone ID: PAT_MRT3847_51929C.1
cgtacgtgaactctgagttctgctctcgttgcaacctgtcataaggtaccgactataaccgtgactagtcggatctatctgagctcagaagacaatcccatctctacaagctctactacgactagaatgcttctgccaggaatcaatagagaacagaacctacacccgtcgagttatcggaggtccttgacattagatcaactctagaatgctatgacc

SEQ ID NO: 89612 - DNA, 131 bp, Glycine max
  Clone ID: PAT_MRT3847_5192C.1
ggggaaagaaactgctttactacaaaatggggattcaatcttttgtgatgagagatgttatggaagggaaactttttcatttttcacgagcaatttctgagggatgtatgccgaaactttcctttttttta

SEQ ID NO: 89613 - DNA, 301 bp, Glycine max
  unsure (1)..(301): unsure at all n locations
  Clone ID: PAT_MRT3847_51930C.1
gtcgcangcacncgtacgtaagctcggaattcggctcgagggcaagatggtgttggagagcactatggtttgtgtggacaacagtgagtacatgcggaatggagacttccttcccacccggctgcaggcccagcaggatgctgtcaacattgtatgtcactcaaagacccgaagcaaccctgagaataacgtgggcttgatcacgctggccaatgactgtgaggtgctgaccacactcacccctgacactggccgaatcctctccaagctccacactgtccagcccaaaggnaatntcact

SEQ ID NO: 89614 - DNA, 529 bp, Glycine max
  unsure (1)..(529): unsure at all n locations
  Clone ID: PAT_MRT3847_51931C.1
tnnnntnnnnnnnnnnnnnnnnnnnnnnnggcgggtgttgtttaggtaagttaaatgctggaaagggggtgaataagcatgacacggtactataacaattataatgcattaaaattaagtaagtactactgtaaactactctttgaatagctaatgtcgggacaataaaactgctgcattaaaatcaataatttgactgatgactaaattaaaattaaaaaaaaagagcaaactaaggaagaaaaacataaaataaaaaattaaacggaaactaagcaagcataaacgacaaaaaagataatttaacctaaaaattcaatacaagaatatcaatttccataaaatatactataaaatactcggataattaatgtcgtacatgcatagatgtcatttatatcaacttcttaattaacgcataataactactctatataattactttatgtgtttacatatcattaatattatgataatttagtcagaaaaaaaaattattatgacaattaaaaaaaacaaaattaaaaca

SEQ ID NO: 89615 - DNA, 247 bp, Glycine max
  unsure (1)..(247): unsure at all n locations
  Clone ID: PAT_MRT3847_51932C.1
acgcccacgcgttcacccacgcgtacgccaatttcttaagacctcgaaacgcanatgggacttgggtaaactcacatggactaccatgacccacccatccccccattctacgacatcgccaaactccgcaagtggtcctttttccgagccctcatcggcaagaacaacgacaccatcctcttactctacactaccatccttacctgaagttgctacaaccaccatacagccaccgacgcctatccct

SEQ ID NO: 89616 - DNA, 1101 bp, Glycine max
  Clone ID: PAT_MRT3847_51933C.1
tcaatgtactttcacttgcccaagttggatgaagacacatcatgtgagttcaaagaccttccagaacctattcaaatgccaggttgtgtaccaatacacggccttgatctccaccaccaaattcaagatcgatcaagtcaaggttatgaacttttccttcaacgtgttaaacgtttttgcacagttgatgggattttcatcaatagctttattgaaatggaaaaagagcccataagagcattggctaaagagtggaatggctaccctcctgtttaccctattgggccgataattcaaacaggcattgagtccgatgggcccattgaattagactgcataaagtggttggacaaacaacaacctaagtctgttctatatgtttcttttggaagtggtggcacattatcacaagttcaaattattgaactagctatgggcctagaatcgagtaatcatacatttttgtgggtggtaagagcacctagtagttcagctagtagtgcttatctcagtggtcaaaatgagaatccattggaatttttaccatatggattcttggagagaaccaaggggcaaggcttggtgattctatcatgggcaccccagattgaaattctcagccatagttcaattggtgggttcatgagtcattgtggttggaattcaacccttgaaagtgtgttgcaaggtgtgccattgatagcatggcctctctttgcagagcaaagaatgaacgctgttatgctaagtgatgacctcaaagtggcactaaggctaaaagggaatggcaatggagtggtggaaaaggaagaagttgctgaagtgataaagagtctaatggaaattgaaagtggaaaaatgagaaaaataatgaagaggttgaaagaagctgctattaatgcaataaaagaagatggtagttctacaaagaccatgcatcaatcaacaattaaatggatgcaattagtaggaatataaaaggatgtagataggcctcttttgcatgtcaaggtcgtgcctaggtatttggggggctaatgtgacaccatttactccaaatacattattaaataaatattgcaaagagcataaataaagttt

SEQ ID NO: 89617 - DNA, 281 bp, Glycine max
  Clone ID: PAT_MRT3847_51934C.1
ctcgagccgattcagtctatagctctagccaatcctgctcgagattggactcaaacaatacataaccctagcgatacatgcttgaacgacctgccatataccatcgagttcgcatattgatgcgatgatgagctgccatgtgcgatagggcttgcactctgtatcaatgttccacaatgagcattcgaagccacagacactatctttcattgtgtgacgatcgagcattatcaccatagagactattgatgtcattgttcacagcattgccatcaacaatt

SEQ ID NO: 89618 - DNA, 313 bp, Glycine max
  Clone ID: PAT_MRT3847_51935C.1
gtttgaaatgcgacaagtaatttcataactatacattttatcactggtttcactggttggtccttcgccattgttggatctttcaataaaggtatcacgaaagtgtgggctccttttacttaagctccatctactggttcatattatctaatggatccacttgaacaatgttattgttgcaaatgccccaaacttacccgttaccaaagagacacacgtgacatgtattccttaaaaattcttggaacacaaagggcaatgacaggaacatgtcaacttcattggaagaattagatatgatatccgattatta

SEQ ID NO: 89619 - DNA, 605 bp, Glycine max
  Clone ID: PAT_MRT3847_51936C.1
gtgtttttgttaatccaccaaagctaatgaaagtagacttggattataaaaatgcatgcttttcattgttaatcacgagtttcactgatacattttaaactcgcctgtgcattaatcactagtaaggcacacatttgacatttcctagctgcaggggtaccctgcactaacaaccacatcaatcaacaaacatattccctactctcaacccaaaatgtagtatatctcataatactatatccaaacaaccctcaaacactcatatttgcagaagaatcaggtcaaatattgaatgagttggcgaacattcattgggaaaatgtcgttattttctccatccaagaggcgcttagctatgataacatttgcagcatcagtaggatgccaagggtcccaaaacacatacttggatctgtcccagcaaatgatcgaagtaggaccacagggaatcaaacctccaaatcgcccagccatggaacaacaagaggaatatgggttctcaaaaccatatgcttcgtaattggtgagtatgtctcctaaaatgttgtagacatctgcataaacaaacattgcacccttcagatttgaattgagctctgcaatga

SEQ ID NO: 89620 - DNA, 429 bp, Glycine max
  Clone ID: PAT_MRT3847_51937C.1
gcggtacccccggggtgccgccccccagaattcccggcgcgccccacgcgcgggtaatacagctacgcgctacaagacaatgaagcggttgttactaatgacccgtgggcatgttcatcctaccttggaccttgggctttgtagcatagaattgagattgagcatatagggaagtttcacataaagaccctctgtcccaattcagtttgcctcctgggttacgggtttacgccaccgacgacgagctcctcagttcagtatctatgccccacgggcgctggccaccagctgtatattccaaacattgatgaaattgagttctacacagtaaacccatgcgttcttacaagtccggcgattttcagtgagaaagagtgggactgtttcagccctagagacaggcaataccctaacggggaccgacccaac

SEQ ID NO: 89621 - DNA, 395 bp, Glycine max
  Clone ID: PAT_MRT3847_51938C.1
gaatgaaaatgacacatctataatacactcctgcacacagttaaataaataaaagctttgaaacccaacgggacaacaaaaaccattgaaaaaacttgtggattgcactaaatctgaaggactacctgtaccttgcgttctcatctctaggggggggctaatatacactacttgttgaaggactataaattgacgctaccatgcatgtgtatgcgattttcgccatataccaacacctacatcagaacaacccatgagacggttcctttgactcatgcttgaacactagggtcacaaacatcaactagccgctcattcatgtgcaattgatcataaggagcagtctgactaatcccatgaggccgcgctattgaaactgtataatctcccattgg

SEQ ID NO: 89622 - DNA, 298 bp, Glycine max
  Clone ID: PAT_MRT3847_51939C.1
aagaaacatgagatgctactggctgaattttgttacttcttagatctgattctagtgctggcatatgcaaatctatgcctccacactaagataactgacctggataggattcaccaagtcaacatgctttatgggcctgaactgaatgccattcaggcatttggcgttcccgcaacttcttcaatccaaatatgatggaaggtggaactgtttaccctcactcagattagaaaattcttcatcatgggtgatcaatactatattcatccttggctagcctatggcatgcctatttcaa

SEQ ID NO: 89623 - DNA, 105 bp, Glycine max
  unsure (1)..(105): unsure at all n locations
  Clone ID: PAT_MRT3847_5193C.1
ttttcaacttcagccacggtagctgcaaagacttcatcangtggtttgtttagctggcttactgaaaagcattctantactcttcctcctctagacatacccctt

SEQ ID NO: 89624 - DNA, 376 bp, Glycine max
  Clone ID: PAT_MRT3847_51940C.1
aatgaaagcgctatgttgccttttatgtgcatctttcaggtttaatttatgcatgagagccttgtggatgaggtacatgataatgcagtgggtcggtgaactcaactctacaactactatatacttacaaataggcttataaatcccggtgggaaatttattgctcactaatctgctcttctctcattattcaccctcagatgcatacgctcatgactattccaaagagttaccggatggcattgatgtacaggaactcccaaatcagtcttcgcacggcgctatctaaaagatctgatgcggagggacaaactcattaagtctatggaggaacatatttaccccatggttgatgcactttattaacattgctcaa

SEQ ID NO: 89625 - DNA, 695 bp, Glycine max
  unsure (1)..(695): unsure at all n locations
  Clone ID: PAT_MRT3847_51941C.1
cccgcgtccggcaaatgcagtattggtgctttgtagactgatggttagaacagggatcatattggataatggcgattccattttcatctcaaatttttccagttagtctgtcttcttattggaaatgactatcctgttacctgactgacttgttggaagggcataatttgattatttgtatgggattctggctgaatttgttctaaacttgtactataggtttaagcatatctagcattgcgggacaatttgttgtcaagtacccaaaatatttcctatattatgtttctcatgctttctttttcttttcatctaattcttaaatgctatagaatgataagcctaagctttttaagaattgcagtgtttgacctataacattttctaatcagcatggctactctaatctcaagttttcatatcatgttgttcctgtgaccttaaattgttatgatttttattgcctctattgagaaattagacttgaatacttgtgaaatattgctgaatcttgcaggtggtcgaaatagggaaaggaagcaaggtgaaatatgaacttgacaaaagaactggacttattatggtaatcatggttgcctagctntttcttcccttgntacacttgttgacaggatattgctgaacatgcatctatgtgcaggttgatcgtatactttactcatcaggtgtttatc

SEQ ID NO: 89626 - DNA, 572 bp, Glycine max
  Clone ID: PAT_MRT3847_51942C.1
gaggggactgacaagatgcatgatacaagaactctaatcctaaatctaaggagagaaaaaatttcacaagataatcagcaaataaaatttgtaatgaattttgagtaattcttagtttagaaaaaagtgaaggacacttgagtctagaattacttatattaatttgattctgtcgagaagcttgagcgagtcgagttgaggattgagtaacggagatgtagcagagtcacccggctattcaacaggactttccgttttattcatttcacttttgaatcttcgaatcacatccgatgggtagcagagggcacactctcttggaggttggacccgacgacggggttgccgtcatcaccatcgtcaaccctcccgttaattcactctcatttgacgtattgcgcagtttaaaggagagttttgatcaggcgatacagagagatgatgtcaaggcaattgttgttacaggtgcaaagggaaaattttctggaggtttggatatttctgcatttggtggtattcaagaggcaaaagagcgtccaaaacctggttgggtatcagtagaaatcatcact

SEQ ID NO: 89627 - DNA, 185 bp, Glycine max
  Clone ID: PAT_MRT3847_51943C.1
cgctatgaaacgttccgagggctctaccgattccggtcacaagcgggggaccgggcttaccaggtggcaccacaaccggagccgcctattatcaggcggagacttgttggatttactgcctatttgcagactctagggagctgactcgtgcctgtcgggggcaatgagctcctacgtttgaattc

SEQ ID NO: 89628 - DNA, 755 bp, Glycine max
  Clone ID: PAT_MRT3847_51944C.1
gggtgattggaatattatcagttaactaagcatcagagggtgcaatccagtgtcttccattgacaaaactcttgacaaggaatggatgtgcagattcgaaatctagctcttgggccaatgggactccacgtatagccgctgctcctggtccctagcatttgtacactccaaagaacacagtcttgttattgttggaagtgttccaatcaatatcatcccaaccaccatgtgcaactatgccgtcaaagtaagtgtaggcatagacaatcctggagtactggcccattgcacggcccacgtaaattgggcctgttcctgtcaccttgcaccgtacgaatgagaagcccgtcttctcgtatgggaattgcctgtcttgggctgctattgacccaaacctcgtcgcaattgagtgtagcctgcaatccttgtacatggacctgccattgccaaagatgaaatctatggagccctcgatgtaacattctttgaaataatggcggccagcgtcgtcgcaaagagtgtcttgtgcaccgtagaatccacagccggagaaataggaaaagaatccggatatgcgaaacgccgccgcttgccacccctccattcccggcatgggtgccggtgctgtgttcttgaagctgatattcctggcagagaaataattggcaaaaacagtaacagaagcagttctgtaagtacgcagttgttggccgttgggaccagggtcactagccctatcatgccattctatcacc

SEQ ID NO: 89629 - DNA, 1837 bp, Glycine max
  Clone ID: PAT_MRT3847_51945C.1
gtattcaagtcgatgtagtagtggaataatcaaaggataaggtcagaattgctccttcaattccttttaatttgatggtttaagctcatatgacttttcaatttctttcattagaattaattggtgaaagaaaagtaaaaaaaaatgaaaaaataatgaagtgttgaatcatgtgatttgtatcaatgatatgaaattgtacctattcattcatgtattgtaagattcaaagtcatttgagatttgttttatgatacaaaccaatgtagccgaatcataggattcaaatcatgaataagattttaataattgtgtgtcagcatgttaggcctgaaatgctttttaactaaatagactattaaaatagtcttagccaaaaagatttgtttgataagtaagcttaattggcttaggcatgatgtggtttagagtataggtctccgatgagtgactttatttccactcctatcgagatgagttgtttttttatctttggtttcttttgttgatggtataaaatgcagtaggaaaaacagaccgtgtgtttcaatttgccctttttttttaaatggattttctatatccttatgaaagaacatgctggcacttggccagaaagccttttataacaaatactaataattttacctgaacttatgtcctcaagtagttatgcagtttgtttcttaatgtttagcagtgcaggagcagtacccaacagctacccaatccattgcttaacaggtaacagtaacactcagaacgcaacaaagagagagtgagagagaatcacaaaccctcattccatttcctcccttttctctcttgcagtcacgcaagcagcaaggatcgcaattgcattttgtgggaatcggcggcgagaaaatgcagggttggttctcggggcagagtagcgaggaggaggcgaagccggcgtcgtcgttgctcgccgattggaactcctacgcatccgcccaaacctctgaagattcatccactttccccttcgatatcgaatccgccgttaggtctgccaacgacaccgtttccggcactttcagcgtggtttctaaaggtgtgagagatctacctggcaacttccagtctgccactagtaatgtgccttctggcaaagcgcttgtgtattttggtttgtttctggcaagtggagtcttctttgttttcatagcatttacattatttctgcccgtcatggtagttatgccccaaaagtttgccctatgctttacacttgggtgtggatttattattggatcattctttgctctcaagggtccaaagagtcagcttgctcacatgttgtcaaaggagaggctccctttcacattggcttttttaggcagtatgattggtaccatatatgtatcaatggtgcttcacagctacattctctctgtggtattctctgtagtgcaggttctctcacttggctactattctatatcgtactttcctggtggatctgctggaatgaaatttctgacttctgcttttacctcttcaataatgaaatgttttgggcggtgacctattttttgttgatagttgagttgagttcagacctgtgtccatatagtagttgacttgtaaatttgtctcctaagatctatcagctgaagcttcaaagtgacctaagaatattactgcgttgaagcatctctaacagtttcttagggttcaccgtttgttgttacttgccacatctaaatgaaaaaaattgttttgcctcgtgtttgtaaaagcaaattaacattatctgattgaagttgattgttgctacctttgtgttgcaatttgaaatatatttttgtttgag

SEQ ID NO: 89630 - DNA, 772 bp, Glycine max
  Clone ID: PAT_MRT3847_51946C.1
ggtttaatataattgaaggagttgctcgtggcttactctatcttcatagagattctagattaaaaatcatacatagagatttgaaggcaagcaatatcttgctagatgcagagatgaatccaaaaatatcagactttggtttggctagaatatataaaggcgaggatgaagttaataccaaaagagttgttggcacatatggctacatgtccccggaatatgcaatggaaggactgttttctgagaaatcagatatctatagctttggtgttttgttattggagattattagtggaaaaagaaacactagttttcgtaatgatgaccagtctctcagccttataggatatgcgtggaatctatggaacgaagacaatattagttttttggttgatccagagatatcagcttcaggatccgagaatcatatttttaggtgcattcacatagcatttctatgcgtgcaagaagttgcaaaaacaagaccaactatgactactgtgctttcgatgcttaatagtgagatttcccacctccctcctcctaggcaagtcggatttgttcagaagcaaagttcatcaagtttagagtcttcttctcaagaaaatcagtttaactccaacaaccatgtaactcttaccgagatgcaaggcagataaccatatgaatcatcttaactgtaaaaatagctgcctattttatatgctgaagatattaaatagatgattattcaataatgtttatagactagaagtcttgttttatggattaa

SEQ ID NO: 89631 - DNA, 690 bp, Glycine max
  Clone ID: PAT_MRT3847_51947C.1
gtgattaattcatatacattgcacgagcagtactcaactatggaatccattgcttaacaggtaacagtaagactcagcacgcaacagttaaatctaatccagggagagcgaatcacaaaccctcgttccatttccccttctcgaaggtttgtgactttcttcaagcaaagatcgcaattgcatttgtgggaatcggcgagaaaaatgcagggttggttctcggggcagagcagcgaggaggaggcgaagccggcgtcgtcgttgctcgccgattggaactcctacgcatccgcccaatcctctgaggactcctccgctttccccttcgatatcgaatccgccgttaggtctgccaacgacaccgtttccggcactttcagcgtggtttctaaaggtgtgagagatctacctggcaatttccagtctgccactagcaatgtgccttctggcaaagcgcttgtgtattttggtttgtttcttgctagtggagtcttctttgttttcatagcatttacattatttctgcccatcatggtggttatgccccaaaagtttgctctttgctttacacttgggtgtggatttattattggatcattctttgctctcaagggtccaaagaatcagcttgctcacatgttgtcaatggagaggctccctttcacattggcttttttagcagtatgattg

SEQ ID NO: 89632 - DNA, 225 bp, Glycine max
  Clone ID: PAT_MRT3847_51948C.1
aaaaccatggggacaggggccacaaaccatgacgaccaattcctttcataaaagtaaccaaacctacaaaaaatctacttactgatccccaaccccacaactaacggtttaatctacctcacaaaccaaacagtataaacacccataaaacatcctcacctcaattaatgttgaaaagaggcccgtgtgattaaattaaatacacggatgaactatttgctccta

SEQ ID NO: 89633 - DNA, 365 bp, Glycine max
  unsure (1)..(365): unsure at all n locations
  Clone ID: PAT_MRT3847_51949C.1
atcacacgcccgcggtaaaaatcccagccgggaaagcacaggcagcggcaaaggagcaacaagaaacaaaaacggacgccgccgcacgaaaaaaagagaancacgccaccgcaggggagcaccaggaagcaaaagcaagacagcacgccgacanaaacacgccaaaancaacgccagaagacgaaaacaggaacccacgaaccgaagcaacacaagacaccggagggaacagcacaggacacaccccgacagcgncacagagagaacgccaacaaccaanacgagaaaancagcgggccacccccgaagcagcancagcagacgccgccgagcaaacagcnaggcccgcgagcaaagnccccccc

SEQ ID NO: 89634 - DNA, 837 bp, Glycine max
  Clone ID: PAT_MRT3847_5194C.1
gaattggttggaaaacggttatcatccagggagagatgagcttacaataactagtgagaggtttcggctgcgagaagacgacagaaaggactgcttaaggacccttctctctctcattgaggaggcagggaaagctaataaactagtggatgatgctcgatcttcatacgtaaaagagaggcttcataccaatccagctttcatggagaggctgcatgcgaagtcaatgaggttgcgagaatctaatcaggttcctgcttgaggttttcagatctgatgtatgaattttttgacattcacctgccataattctttattgctccctggttttttgtatgagtcttatcatgggttccggttgcagaaacaacctccctgcttagagcgtaaggcctcttacatctgatccttcctagaccccgcaacagcaggggagactcatgcaccgggctgacctcttagtcatatctttcgtatttagtgcttgaataatggataattttttttacctcttgacagatattgtatgctagttgactcaaatgttacatttttgaggagtaacattgatcatagaaaaggccgaatgacctcacactgaagcaagggatttttataaccgcagtttacaatgaccaattctagcgtgatgctacacaaaacaaagagaacagccaccacaagcaacatcgagcacagttatggctgattggcctccccctgttccctgcggtttttataaccgcagtttacaatgaccaagtcgagcgggcttttccacaaaatagagagaatagccacctcactctgtaacaagcacaattatgagtaataagc

SEQ ID NO: 89635 - DNA, 390 bp, Glycine max
  Clone ID: PAT_MRT3847_51950C.1
ttcaacgggagcctctcgctacccatagatgatgacggatccagctagcggtcgccgctcgcgctggtctgcctggtcgagcggatagtgtggcctaggggctacgcaagatgggaccatgactgcaatgatcttgtcggacaatgtcattcctcgcgccgatgtcattaaacgcgcagtgcgcatcggcgcagaaatccgaaatgtcaaactgtcaggcgatttaccggagcagacgattgcctcgatcaatgggctgcttttggagcacaaggtcatcttctttcgcggccagctccacctcgatgatgcggagcaggagagctttgccattcgtttcggagagttgacacaaataaagtaaataataaaagaaaggaaataaaatgg

SEQ ID NO: 89636 - DNA, 436 bp, Glycine max
  Clone ID: PAT_MRT3847_51951C.1
tgccttgacctttgagtttcgtgctctattgatgactgcaaaccgccttgaatctctttgggaaaatatcgagaggtgcttaagaactggtgaccttatggttggcccaaatgcttctgacgtcaccccctgggccttgtccttgtgtctagcttctactgaatgatagtttttgacagtcgtaccctatgatatgtattatgctgccctctttcatgctgtatctttatactcaactgatattcttccattcttggacatgatcgaatggatgagcctggaccctagaaattttagatacaataactaaaatgagctctaccttaattgctacaatgaatctgggacgatacgccttttgtaatgttcctatactaggataacatcaaaagcaactgcatctcggcaaagcgtatatcatgctgctttcgctctc

SEQ ID NO: 89637 - DNA, 404 bp, Glycine max
  Clone ID: PAT_MRT3847_51952C.1
cacaactggagattggatcttcactttacaaaattctccaatcagagacttgttcagagttgctgcttggaagaaaggctgttcaatggtcaagattgtgatgtctgcgaatgcagcagtcaaaaggagtgattgggcctcattggtacaagtgtttttaacaaacagcctcagtacagaacatcttgatgcatgtcagtggacaaaatcataaccacattcctgtgaattcatctttccaaagtaggactctggtcctgatactcttcttgataactggatctctctctgcccaaagtcaacttaaccacttccgactttacttactgacgatccccaacagtctacagtatttgatattctattgggaatctctcaagattttgaaattgctggtaatactc

SEQ ID NO: 89638 - DNA, 387 bp, Glycine max
  Clone ID: PAT_MRT3847_51953C.1
attatctatcacaataagtcattattattatttgaaatcatgcttattcagattgttgccagattgagacatagaataggtcctcaatacaacgaggttcaggctcagatggaaacaaattgtgttagatcgtctctcggtgatgttgaaactcctataggggccatgttggatctgagaatttctcaatctaaaattgcactctccaaggacacagttggaggaaccatcctgcgtagtgatctattggcaaattttttgacagaaggcgattttagagcatgtgttgatttgcagcgcactcatcgtgtaagtggaatgatttatatggcggccacatgtggtattccttggaattcaggtctctcattggcctgtgctatgaat

SEQ ID NO: 89639 - DNA, 306 bp, Glycine max
  unsure (1)..(306): unsure at all n locations
  Clone ID: PAT_MRT3847_51954C.1
tttataattttttnnangaattcttaatccccaaacttttttttttttcctcgtgagttttataaaaactctttccccccaaaaaccttggaatcttttatttttaacctagttcggcctttccccttccttcaattttttcctttttccctaaaaccaaccaattccaacctttttttaccaaaccaaaaaactaaaattttcaatttttttgtttttggcaaaaaaaccattccctttttccttttaaaattgtacaacctaaaccaaacctattgctcttacctacccattcttttaatttaa

SEQ ID NO: 89640 - DNA, 217 bp, Glycine max
  unsure (1)..(217): unsure at all n locations
  Clone ID: PAT_MRT3847_51955C.1
cgaagctcggaaacggccgagtccgaccagcngattacaccccgaccatgagggcctacaaaggggggcgtatgacgacaccgcccgcggcccacagccggaaaccggcccccggaagcaacagaaacaccacgcgatcacaagccgaccgaaggacggaaaggaagcgaagggcgggaccgtgaaaccggacgggggccacacagccgaggatgcg

SEQ ID NO: 89641 - DNA, 491 bp, Glycine max
  Clone ID: PAT_MRT3847_51956C.1
gaggaggggaggaggaagcatcagcaaccaggcgtggacgccccccacataccgcttcagtgcagtgtggtgttgcggtcgtgccacaaaagacgatgaacatcatgagtggttgttcagaatcttcaaccaaaccaaacaccatcatcaacaattcacccaaatccaagcctcctttcaagccagcaaaggatgataccaagcccgttcttcaagatcctatactgagatccgacccaattgagacagaggaagctgtgctgcgattgccaccattcaaaatccccacttcaacttcaacacctgaaatggcatgaatgtatttaatttcactcttttttttctcttcttttttacgttttttcgtcttcaacaatgggtttatgaggtttggtgtggctgtggtttgttatgcgcctaatgccagcgttttgtcgttggtttcgttctgaaggctctatggtgttgtcaaataattatttattttaaaa

SEQ ID NO: 89642 - DNA, 451 bp, Glycine max
  Clone ID: PAT_MRT3847_51957C.1
catccaggtatgtcacgtgtgattcttgtttgattgagattacatgtaggattttttttttaatttttaaaaagcaaaaatgatatcgtttgcgtaatctttttgttttcaccttcaccaccatgaccctaaacatggttgtcctaatggccatggttgccaccaacatcctctccctctaccacctctactctaccctccaattgcccaaaccacccccacgagtccccgaccaactcctccactaactccacaccatatgcgtcaccatcaaccacctcacacacctccaaaacaccagcaacccaaccaaaaaatccaccatccctacagatttgattgcttgaacaaacaaaacccaaccaaaaatgatgtcgtttggatttaggtacatcaccatctccttcacatccattgttcccttcattgtcaccaagttcttggctccatc

SEQ ID NO: 89643 - DNA, 154 bp, Glycine max
  Clone ID: PAT_MRT3847_51958C.1
ctcaaattctcaatttaattctctaacactctacgtctccacctggatcctatttacatgcgatgggggggatcctatctcagcactaatccctcgttcagacgtcaaccctcgcatcatgctattagaatcatttgcagtaaccattggtgcc

SEQ ID NO: 89644 - DNA, 403 bp, Glycine max
  Clone ID: PAT_MRT3847_51959C.1
acttgcaataactataggtaaccgcgggtaaaatttgtagctcaactaattaacataaatacttacggctttaatgcataaccgagggcttaacaagaaccgcctccataacatatttcattactgcaatttttgacgtacgccctatactggggcccctaccatgttaaggcatccatccgtatgtttaaggggtaaaaacgtgtatagcatctacagttgaaaccatagagctcaccccacatacattgcaatctatgcaaatctttgaatatcctttttttacccagctttccccccaagaattttttatgagccagttagggctttccttaaaacgaatcggagcattagcaccagatccatagcccacccaaagaaccccatgagccaaatggttggc

SEQ ID NO: 89645 - DNA, 124 bp, Glycine max
  Clone ID: PAT_MRT3847_5195C.1
tcctgtgatgtcgcatacagcgttacttgttttagtactttttcatttagaggtagtgcttatttttgttcatttggcaaagaagtagataacactgtgttgcatgatgatcttgataaagtat

SEQ ID NO: 89646 - DNA, 173 bp, Glycine max
  unsure (1)..(173): unsure at all n locations
  Clone ID: PAT_MRT3847_51960C.1
cttatccattgtaatccttctggtaagagatgaagaataggtcaaacattataaaaagcaaagatgtaaaataaaactcaaganaaattgggtaatcctcaagtagatatttggtcttataaaacttcgtatcccattacccgaaggctcttcgctatgcgggggaggatgtt

SEQ ID NO: 89647 - DNA, 1042 bp, Glycine max
  Clone ID: PAT_MRT3847_51961C.1
ccgcataataataaatttccgggttcatgcttgaaataaaaataggaaataaagacaggggaatccccaaatgaagccctcaaaccagcaaaggccaaaaaagaaaaaagaaaaacccttaataaaacaaaacaaaatgaaagaaatcaattgctatagttgatgacatagcaggcaacaagatgaaaataatgctatctcaagcatagtcttgcttacgcagcacaccagcttttgctgctcaacaaggtttgtttttacgccagcttccattatgccgaaatccatttgactttctaagctcataaattgattctattttctcctcaatgggttctattttctcttgtaaattccgttttctttttcttccatgctttgtggtactcgaaattttcacctctttgctagacactacattcataacgttgtcaccactggtagcatcctcttctaatatttcctcaatttcttcttcatcaaagtcttccttatacagtttctgtggcctccctcttcttttttgcttaggaaccttttcttcttcttcacttatggcatcctcctcattgctaatagttaactttttaccttttcctctacttctacccataatctcaaaattctataaaatatttttttttcgtagaaattgaagataatcttaatagatttataataattcgttcaacgtccaattgagctaaacttgctagacaatccgagaaaatatgatcatacaaactagtatatcacaagaataaggataacactattggcatatctgacacaaagctcaaccgatgtggaacctgttaaagcccatcgatggttccacaggagcgcaacagtactgtggctggcttcttacagcaagaggccaaaccaaacagagagagaaagatattgttttgactggatctctattctctccccccttctgtgagcgcaacagtactgtggctggcttcttacagcaagagcccaaaccccccagagagagaccgataccgttttgactggatatctattctctccccta

SEQ ID NO: 89648 - DNA, 255 bp, Glycine max
  Clone ID: PAT_MRT3847_51962C.1
tcttgaatcttcgttatccttctttttgtctccttgaactcgagtattcactatagcagatgaggtggttctggtaggattccgggcaagtccatttggggattagggtcaggtttcaccttgtggaaaggggagtcaattatgattccaagcaggaggctttgaggaccaagagcctttgctcctcagaatgaacccggttcacaagaaaatcccggttctcatccacaatggcagacccatttgtgaatctct

SEQ ID NO: 89649 - DNA, 488 bp, Glycine max
  Clone ID: PAT_MRT3847_51963C.1
gtttatataccaattattctaccactacaacacaaaatatatcacttgctcttgttaaaattttagcttaattgtactttttggtattttattaattgttgttatcttgccaatttaatccctctttttattgttttacaaaaaatgatctcttattatttttattgtgaatttttgtccatctattaacttgaaatataatatttcacgtaaatgttgtgatattacagtgtagaatatcatgttattatagatttacttacatggttgggcaatagagtgttatggcagcttttttgttaaattgtgaatgttatgttaatggaaaaacaaaagttgtactatgtgaatattggggtgattaaattgatggaaaaataaataggagaactaagtgaaacgaaaataatagggtgactaatagaataattaatcataatattatttgtaagattaaattatgttaacacctctaattaagattttgt

SEQ ID NO: 89650 - DNA, 505 bp, Glycine max
  Clone ID: PAT_MRT3847_51964C.1
gacctactgtgattgaaaactcaagtagatctaattccgaaattatataatctgatagccgaagatctttattggagaggtttatgaccccgagatctacaaaattctaaccacacatgtgaccaacaaacttgggtggaaacaaacttttattaacccagatgtcttacgccctttgatataccttttaacctatggattcattccttagggagcttggttacattaaaatatcccaagctgacgggcctcctaaatccctagcatatagtggtgtcagaatattaactgaatttcttgtgacccaatcgtgatgaaaaccacatctctgaatcttacgcggcgggcgatgatcatgctcaaacccttatttgtgttgcctgggcacatcagtctctctgttcacactataacctgggggcgatcttaccctgtgtgctgtatgaagcatcttcacattaccatcaagggtatctgccccggatgctccgttcacagaattcga

SEQ ID NO: 89651 - DNA, 399 bp, Glycine max
  unsure (1)..(399): unsure at all n locations
  Clone ID: PAT_MRT3847_51965C.1
attcagctcgagatttaccaaacaagagatggaaaaccgaaaaaaccggcctgacacgtggcacatttaaaatagtattacgttttcaacacacacgaacacacaaaaaagcaccccgattgccacatacacctgatgaaacctacactnnncccgcagcttcgacgacaagcacccctagctagcaacacaactccacggagactcccaatgtgaccaacccaaaatccaatactaagccacccaccaaagaaaaaaagcatacaaggacacagaaacagctacccgtaaaggcaaaaacatcccaacacaccacaacccacacatagctaaagacccaagaacacgacacaaacacacacaaaatctcaaacactgccacaaaaaacagagccaaca

SEQ ID NO: 89652 - DNA, 420 bp, Glycine max
  Clone ID: PAT_MRT3847_51966C.1
tcttccacgcgtccgatttaatccaaatccgtgccctgatgcatggagtttggaattttacaagcgtaccggatctcactgtgctatcatgtgtgccactggatggactgtcacccccctgcatgatgtccaggttacaattgattgggtgatttactctcacgaatgtgtccccaggacctatagagtcttaaaatcacaaaatcctttggaggcaaataggtggatggggaaactgactgtcccccagggcactatccaaagtgataaaagaatgcctacttccataagaagaggagctggttcacagaatgctgtactaatgaatatgccaacagctgctctctgaatgaggagatactttgagggagatcacggctatgaagacaataagatgacttatgcctacatcaaatgaac

SEQ ID NO: 89653 - DNA, 398 bp, Glycine max
  Clone ID: PAT_MRT3847_51967C.1
tttttcagacaactaatcacattttcattaacaaatagaagtagaagaactactattggtaaatttatcaattttccagacagagaaccaagagtgaactcatgaggattgaattccttattctgtctctggctgttccatatgtatatatatgaattgcaattattcttagcctaggtacaagaatggtggcacttatggtcctatacttgtgtgaagaatattcatcaagtgataatgaacaaatgtgtctaacttgtggatggcatggacttgttctccaagaatgacctaaaaagaatgaatgcctggcggggcctatgaagaggaacctcatgtccagctcctcttactgtaaccaatgttaaccctttataaacttgactccacccaccaac

SEQ ID NO: 89654 - DNA, 839 bp, Glycine max
  Clone ID: PAT_MRT3847_51968C.1
cgcgactctcgatactaaccaccaggacaaccaacccgccaaaatggtcaacctccgcactcagaagcgcctcgcggcctccgtggtcggttgcggaaagcgcaagatctggctcgaccccaacgagaccagcgaaatcgccaacgccaactcccgtcagaccgtccgcaagctcgtccaggatggcctcatcatccgcaagcccgtcaccatgcactcgcgtgcccgcgcccgggagctgaccgccgctcgacgaattggtcgccaccgtggtttcggtaagaggaagggtaccaaggacgctcgtatgccaagccaaatcgtctggatgcgccgtctccgtgtcctccgccgtctcctcgtcaagtaccgtgccgccggaaagatcgacaagcacctttaccacgagctgtaccacctgtccaagggtaacaccttcaagcacaagcgtgctctcgttgaacacatccacaaggccaaggctgggaaggcgcgcgagaggcacatcaaggagtagatggacgccaagcgtgcgaagtccaagtcggcgcgcgaaagaaggcaggagcgtgtgcagcagaagcgcgctgcgatgctggccgacgagtaagcgacggacgacatgataaatacctggcgtgggtctttttaaggttgaagaagggcgtcaaatctcctttctctctgggcatcatatgcggtcatgttcatgtacgtctgggtcatctctccgaacgactcttctcgctcgagcatgtgcaactgaaaaaggctgccttctctgcattagatgctatgaatgtccatatgcataggataatgagcatccagtacagtag

SEQ ID NO: 89655 - DNA, 355 bp, Glycine max
  Clone ID: PAT_MRT3847_51969C.1
cttcaggctgacctcttacttcaatctacaaaccccagtctagcaaccctttctgctgctggaggataaaattcattttattgttgggtactgcaaaagtagggaacatgctattttttcgggttggtgattcacccacaattcctcctcctcttccttgtcctctaaattttcctaattttaacattttctggttctactactaccagggggttggctacacctcaacaggtggtggagatctttgaggagaaaccagaaaaggagcctgaaattacccccagagtattcttggatattgatattgataaacaccgtttaggttggcaaggagtatttttaaaaattttactca

SEQ ID NO: 89656 - DNA, 205 bp, Glycine max
  Clone ID: PAT_MRT3847_5196C.1
ctatgaagacacttatcttgctgcaactggtggatctggcatctttgaagagacttataatcaagtcaagctgcatcaaattagattcccctttaaattattctacacattgtatcttaaaaacatcaaacacttacctcataatcttctttgcaagcctattaagcccagcccatctattaaacctatcccatctaccaaaacc

SEQ ID NO: 89657 - DNA, 230 bp, Glycine max
  unsure (1)..(230): unsure at all n locations
  Clone ID: PAT_MRT3847_51970C.1
gctcgagccgaatcggctcgagatttaaaaaagctcttggtcattcttttgctagctccaataatgggttctagcagattgtcattcattgtaggactggtnnctttaacattttcattcatcatgatcattgactcaagggttgcagaagcacctaccctgccaaaatcagccttattgccttccaaagtttatatacctactgttcctctttctactctaccattact

SEQ ID NO: 89658 - DNA, 766 bp, Glycine max
  unsure (1)..(766): unsure at all n locations
  Clone ID: PAT_MRT3847_51971C.1
attgtttggaaaacatgatgaaaattgagagcaactgttaggcccaataatcagtcaatggaacaatcgggttgattttagggtagatggttatcctcgacaagaaggtccactgagctttaactccgattatatggtgtggtagaggcgaaaaacgaagatgtttgttgaccctaagaatgcaaagacagctacattggctgaagttgtagaggcattgcagtacatggtgtctccacaagggagaaatacatggacagtggatgatctagtgccgtatgtagagaaattaaccattttatctgaagagcaagagagaatcattgaacctgtgtcacatggtccaacaagaaaacatgaatttccagcacaagagtttaatattctccaatcaagtgttgaaactcaaggcatagccagacgaagggagactgttgaagcggaaccatatttgtacccacgtatggtagagcgtggtcatggaatgtattatagaccacaagcatttactcagtatccgacacaaatgtatcattatcgatccgaaggtcatcaaagtgatacttctgcaaacgaacattcattanggtggtgttacgaaaacatatcccaaattttcatggcctactatgaccccttcacaacaacatgatgctccaattcttgaggctgaccaagttgaagaggggagatatcatggtaaaagaaattctgataaacaagcacgaagatgggaacactcatgcggcacatcctcacatcatca

SEQ ID NO: 89659 - DNA, 376 bp, Glycine max
  Clone ID: PAT_MRT3847_51972C.1
catccccatttttcttttgtcttaccattggttcccatttcccagttcatgattttaactggcttatgaaatgttttaatacaagtttgtacttttaagagtaggagcactcaccttttgtgaaaatggtttgcttacagctgatgcaatgaacaaaactgatgaggaaaccatctaaaagttgatttacccattgtttttgcacaaatcttggtatcgttgaaacattactatgctattcaaatatctggttttatacaaaaaagcggtacttgaaaaaattgccatatttttgttttgaatacatgggacatacaagctaattgaggactctttgctgccggaatggtctaagattgctattggtccctttgtc

SEQ ID NO: 89660 - DNA, 552 bp, Glycine max
  Clone ID: PAT_MRT3847_51973C.1
ggctcccaacaacaaaaacacgactcactcagctcaggggtgtcctgcacacggccgactatcctatgggaaggggcagttaactcgctcgagtcaccatcatcaccgagatgggcgggggtgccggggggcccgtgggacttgtgtagggtacagtggagctcttgggtgtgagggggctgacctatggcaaattacagatgattgacaaactacactgtgtaagtgctgctattctgcagccttttattgcgtgctggaagctgcttacgtagcagaaaatattcctgtggggaaatattcagcaccctagcttcaagttaaatgctaactctcgtaatgctaagaaaaccgtaagttcttaggctattgcctatgcaacttgttaagcacctcttatatatatatataaaatgtgtgaacaatatatatatattgattaaaaaaatagtgtaattatatacaactttgatcctataaaacttctgacacagcattcaatagaatttcacactatttatgcactttactattattgatgtggtaaataaa

SEQ ID NO: 89661 - DNA, 208 bp, Glycine max
  Clone ID: PAT_MRT3847_51974C.1
aatacccacactgtcgttgaggtgattcccgtaatccatcaggtggtgcattatccgattatcagctcatgcggccacgtgcacggtacaagaaacttgcttaagaatggacctttgccttgaaaagcctttaaaattttttttggaaggttcaaacttgcttgctttgaaaagttaaaaacaaatcttggtcaagactttgatggtt

SEQ ID NO: 89662 - DNA, 310 bp, Glycine max
  unsure (1)..(310): unsure at all n locations
  Clone ID: PAT_MRT3847_51975C.1
aagacatcaaacccaggcaatagatatatttagtttaagttgtgtcctttttttctacattactggaagaagacatccatttaaagaacatattaaacggaatatcaatattttaaaaaatcaaatagatcttttcttattagagttcattcctaaagccaaagatcttattanttatttattaaaccctaaccctgatctaaagccanaaacgactaaagtattataccatccttttttctaaagttccaagataagactttcctttttacataacaccagtaacgaaataaaactaaagaatagagaa

SEQ ID NO: 89663 - DNA, 352 bp, Glycine max
  Clone ID: PAT_MRT3847_51976C.1
gggcaaacaacacaacggggggacaattttgaaccaaaggaccttttgttttgcaaaattgggggaacttaaaaaacagaggggaacaataaccgccaagccatccttccgacagaacctttgggggttttagcacaatactaaaaaaagctcccatgaaagcaaccccccacagcttgttttgacacaaaccctggtgcatttgttgccaggacatacaaaactccccactcaaatttactgggggcccaaccaaaaaaggaataagcaaccttatttccttcaaggatgtgccccagctccttcaatggcaattgattaggcacctgccgtgcgtgctgactaaaaagga

SEQ ID NO: 89664 - DNA, 307 bp, Glycine max
  unsure (1)..(307): unsure at all n locations
  Clone ID: PAT_MRT3847_51977C.1
antcgcangcacgcntacgtaagctcggaattcggctcgagnnttntcatcatggacncanaaactcaannaaagtatgnnagtaatgngaatcgncatgtttgggtncaacatnccttctnttgctaatantggtcagcgtagttntngttcanaccttccgcgnagtcatgcatncgcnggcagccaggtcacanncaagccattcgaacngtttccnncgtggctttgaacntggtcnttncncnncnggtatancattcnttccnanntttgngtattcctccganancnacctcttnatata

SEQ ID NO: 89665 - DNA, 226 bp, Glycine max
  Clone ID: PAT_MRT3847_51978C.1
aagcttattttggttgtttacatgtagtttacggaggaaaattgcagagatagtgcaacattagtggaaaatttgggggtatagctggatgaaagagcgaagtcaaagtaactggttgcatataatgatatattaacaggagttttggggattgcatactcactaaagagagaggcttctgtagtcatatagggccttcataaaatgtgtgttacacctgttattg

SEQ ID NO: 89666 - DNA, 229 bp, Glycine max
  Clone ID: PAT_MRT3847_51979C.1
actggcagctcgtgctgcgcactgcaagagcaaagggcgctttgctcagaggcagatgcagggacaatttgtcgctagctggtgcaccaaaaactgttaaatggatccatccactacagcgtcaagaagatgcatgcggacgctattttataaaaaataactctactatatactatatataataatactgccgctgcatcaatgacctatgccatatagtctattatta

SEQ ID NO: 89667 - DNA, 948 bp, Glycine max
  Clone ID: PAT_MRT3847_5197C.1
ctctttttttttttttttacttttgaatgatttttaaattcactaaataccgataaataactacaaatactcgttatttgtgtcgatatccaccaattcactgatataaagacaaatatgagtgaagtgctgtgtataccaaaaaattaaacaagtcaaaataaaatacaacatgtggattaagatcgaagtgcaatttccttgttttccatccgttttgatgcatctatataaaaactcataaatgcagcataaaacaccagtacttcatcaaaaggaattagggaggaaaatgctcaacatccatggaaggaaaattagattgcgttgatcgcattcctctaagtatactctttgctgtttctctctccgggccagtataatccagaagacgtgtacagtaaacttcagcatcttcaaattttttttgtgctctgtaatattttgcaagatagagtaaagcctcaaccattttaggtccttccctttcttcagattccatcctctctaagtcctttttgtagtaaaatgcagcctcttcagggcgccctagctccgagtgaagttttgccaagttgtgcagagcaattgcttccctgtcattacagtttgctgcccttctgtaacactttattgcttcatcaagcatgcgaagttgatcagtttcataacactgagccattgcaatccacaaacgagaatcatttggctgcaagaatacagattttttgaagtaatgaagcgcatagaaaggcatgcccatcatctcataagcctgtcctagtccataccaagcacgataatcacgtgggtctatatctactgcccgacgataggcatccacagcagcaggagtgtttttcatctctacaaactcatgccccataagtgtccaagccgataaaaagtttttgttcaatttaagggctctcctaaaatacacaactg

SEQ ID NO: 89668 - DNA, 788 bp, Glycine max
  unsure (1)..(788): unsure at all n locations
  Clone ID: PAT_MRT3847_51980C.1
ggctcgagcagaagtgtatgagctcaagacattttctgaattgcatgtagctgaagaacaactaactggtgccaccactagagaagcatgtgttaggataactaataactggcacattggcacacatggggatatagcatccagaagggcacttctccaagaggcaaatcgttctaagagaggtgatgatgaaaaagaaactctttcaccatcaccatttccctctacactatcaccagttcttgagcctttctcatcatccgagagtccctcagattcaccaatatcatctccagaaatttcccattcaccatctccatctctctccactttctttttcattctctcaccctcaccttcacctgaggtagcaccaactccagacttatcacctccagcaaatccaccaatggttgtgttcacaccaccacagtccaattggggttcaatgccttctcctgcttcatcttcaaaccaagggaatgcatacagttcaaatacaaagcaacatactgtgattatttggtctacagttgggggcttctccttcttgattttggtttctgccattgtttttgcttgcttcagaagtaataaggttgtaactgtaaaaccttgggccacagggttgagtggccagctgcagaaagcatttgtatcaggtgttccgagtctgaagcgaacagaacttgaagtcgcttgcgaagatttcagcaatattattggctcactacctgaggggactatttataaggggactctctncagtggagttgagattgctgtag

SEQ ID NO: 89669 - DNA, 282 bp, Glycine max
  unsure (1)..(282): unsure at all n locations
  Clone ID: PAT_MRT3847_51982C.1
ggacaagncnggaatcncccnggaccagnaacgtctcattttcgccggaaagcaacttgagganggccgtacccttgctgactacaacattcagaaggagagtactcttcacctcgtcctccgtctccgtggtggnatgcagatnntccgttaagacactcacnggcaagaccataaccctanaggttnaaaactcccgaagccatcganaacntgcaggccnggattcaggncaggnagggtttcccccngaaccaanaacgtnnttattttcggngngaa

SEQ ID NO: 89670 - DNA, 490 bp, Glycine max
  Clone ID: PAT_MRT3847_51983C.1
cggacgcgtgggcggacgcgtggggcgaagccgaggccgccaatcaagaggctgctggcggcgaagccgaggccgccaagcaagaggctgctggcggcgaagccgaggccgccaatcaagaggccgctgacaccgatgccaggaagcaagagctcttcgaagcaatagaagccgatctcaatgagctgaaagctttgcatgcaggcgaacaagccgctggagccgagcaagccgctggagccgaagaagccgctggagccgaagaagccgctggatccgaagaagccgctggatccgaagaagccgctgcagccgaacgagaacatggagccgaacgagaacgggaaggcaaacaagaacgtggaggcaaacgagaacgtgaaggcaaacgagaacgtgaaggcaaacgagaacgtgaagccgaacaagcccgtggagccgaatgagccgacgaactgcccggtgagccgatgagccgaaggagccgtga

SEQ ID NO: 89671 - DNA, 256 bp, Glycine max
  unsure (1)..(256): unsure at all n locations
  Clone ID: PAT_MRT3847_51984C.1
tgttgtttgggctatgctattaacccatgatcgccatggccatggccaagtctacacctttcgctttcactcctcttcatctccgttctcgattacaacaacaacaacatccccacaacgccaatttcccacaattcagatatcccgctccctcactccacaatccctttttcctcctcaacgtttcctctnctctcagttccgtcccttctttgccttccctcgacaacgcgcctcccccgctataacagctctc

SEQ ID NO: 89672 - DNA, 379 bp, Glycine max
  Clone ID: PAT_MRT3847_51985C.1
ggctcgagttcactttcaaggccaatcctatttacctttcatttttcccttctcacaaattcacatttttccccctaccctttaagtataacaccaaacacgcacgcacacgcgcatattcatacataccctttgcacattcttcttcttcttcttgttctctttctctctctgaagcaagtgcagagcaattaataactcaggttttgggtcactccgtgaccgggatgatcgtaaggttatggtcttttgagggatgggttggtgcttttgggtccccaaaaacgctaacgaagacatgaagctcaaactttcgttcggttaaaaatctgagaagctggggattctctccaacatccttaagggggacaacaacaac

SEQ ID NO: 89673 - DNA, 353 bp, Glycine max
  Clone ID: PAT_MRT3847_51986C.1
cagaaaaaaccatacaaatagttcttttacttgagtaatttgtatcgttttttttgtcataacatgaccggtaagcatgctctgatatcatttcttccaacggttccgcgacttgaatgtctccaacttctgaagagtgaaagacccttctgcctcaatcaattgtttagcttccttggcaataggatcatatcttggcatattaacaactccaactttgcctcttcaatcaaactctgcattacattgcattatatatatgtaacactaactgtccataaaatttggagatgcaattttggagacttttacctcatcaaaatttgggaactcaatctaagcaagatgagaac

SEQ ID NO: 89674 - DNA, 232 bp, Glycine max
  Clone ID: PAT_MRT3847_51987C.1
tgacgtagcaacaacacaaccttctggttctgtcggcattaaattatctcacggtaacgctactacaataccacaaagggattcagttccgatgacaattccgaacttgttaggttcacaacaaagtatcgtttggtacagtcgttagtgacgaaaaaattctgcctctgcaccaacaggtaatagtgactattttcaactgaaggttccagtatccatttggactaaaatc

SEQ ID NO: 89675 - DNA, 433 bp, Glycine max
  Clone ID: PAT_MRT3847_51988C.1
attgttgcagaattggtgtactaaacatattctcatgtcattagtccttatatttatttagtgttaatttatgtgttattgcttcttttcattttttattgcttgtgtttatggattgatcacccatatatacatgttttatagtttaaaatggcattgtgaaatactttttaattaattaagaagtggtttatcttgacttgttaaggaattaggaattaagttaatcaacttaagctctttcatgtgagaaatcatgattagatacaaagatcatgaccagatgggtcagccatgagtagactcagcaagtttctgattttggaagattggttgttatcatgaccaaaaatagttcacaatgggatttgaagtgagggttatcatattatcattgtgcaattatgttgcgagacaaggagacttattgagt

SEQ ID NO: 89676 - DNA, 682 bp, Glycine max
  Clone ID: PAT_MRT3847_51989C.1
tatgcctgttgttgatggcacaaatggcttggcaaatggtattactgctgatgctgcacaaccaagaggcttcatttccttggaaagaagagttggaagttctggttcgtggtggagtaccaatggcattgaggggagagctttggcaagcttttgttggtgtaaaagcaaggcgggtggagaagtattatcaggatctgctatcctcagaaagtgattctgaagttaaaactgatcagcaaagcatggagtcaactgacagtaatgggaaaacaggtgcagattttggacatatgccagaaaaatggaaaggagtcaaaggacagattgagaaggatctgcctcgaacatttcctggtcatcctgctttggacgaggatggtagaaatgctttgagacgattacttactgcatatgctcgacataacccctcagttggttactgccaaggtccttgcttctttaaagagttacatgttctatttttcccaactttttttataaaagctgttttttccattatttttcagtcaatctaatgaggtgtttatatgaaaatgaaacatctatacatctgactagacttaaaggacttggttcatactgaacttgttagttaagtgagatgccacagtgcaacgaatcatcaatcatactgaacttatttgttgctgagcaaaaa

SEQ ID NO: 89677 - DNA, 322 bp, Glycine max
  unsure (1)..(322): unsure at all n locations
  Clone ID: PAT_MRT3847_5198C.1
acgacggaaggggggggcgtntgtnngagcaatcattttacgagcaaaacagacataatctctntcgtnagatccctgtgggagtcgggtgagcatgcctggggtcctcncaattttgtgcttgggggggcattcttcattttcatcctgggtaccagagttctgggggaaangggtaanagacttttctgggggcgagcaatatccgctcttgggtgagtgatgcgatcaactcttattgtgtttctgaggagagccgagaaaagtggggtgaatattgtgagagatataaaaggaggagtgagcccaanctctatcaatc

SEQ ID NO: 89678 - DNA, 633 bp, Glycine max
  Clone ID: PAT_MRT3847_51990C.1
aggacttatagtgtgagataaaaaccaatgccaactcaatgctccaaagacgggccctccccactatgggggcgagaataaatcacccaacacgaggccaaggaccaactacttaccagctcacaatcatgaagagccaagggcactgatgaacaagacccacttgcaaaaagtgcgacacagaaaactaaggagccgctaaaacaatgaatgaagggggccatgggactactcccgcacatacaccaacgagaaataactgaccaccagggactacccccacatccacacccaaaaacgacaatcaaaaaacacctcacaaatccaccacaacaaccgcacaatacaatgcgcaacagcactgagctaagtgctcgcaagaactccaccacacgcacccaaaccgaaccacaaccacccctattcacaacaaccccccaaccccccccgaaaaacccaacccaccgccaccccccccctacaaccccacccccccccccaacgccaccccccacccacctaccctaaccacccccgctcacaccacccccccccccccccccccacccccccccccccccaccaccccacccccccccccccccccaccccccacccaccccctcaacaccc

SEQ ID NO: 89679 - DNA, 661 bp, Glycine max
  Clone ID: PAT_MRT3847_51991C.1
ccacgcgtccgcgacagcaccgtgtttggaagaagaagaagcacaccgacacagtgcacatgaagaggcactggcgtaacaggagccacgacgacgatggcctcccagattcggattccgacacgcgctccagccggagattccctctcacgcgcctcatggcactctttttcttctccatcttcctcttctccctcaccttccttctcccacaccctcccatccaatcagcttccacagcaaagactctgctccaactcaaacaaactcaacaaggtgacgtttctgattctgttgagttgcaaaaagataaactacttggtggccttttagcagatggatttgatgaacaatcttgtctcagcaggtatcattcggccacatatagcaaaggactatcgggaaatccttcatcttacctcatttctagattgagaaaatatgaagctctccacaaaaaatgtggaccttacactgaatcctataacaaaacggtgaaagatctcaggtcaggacatgtaagtgagtccccagaatgtaaatatgtggtatggatttcatatagtgggttagggaataggatattgaccttagcttctgtgtttctatacgctctcctcacggattcgtgttctattgggttgatccctggagttgacat

SEQ ID NO: 89680 - DNA, 367 bp, Glycine max
  Clone ID: PAT_MRT3847_51992C.1
cccacgcgtccgaagacgcctgagcggctgccagaagacgacagatgggggagcaagactgaatatcgaacagaatggctcccaagggttgtaatctttttggctgtgacatgcttctgagcactggcactgagtccttgtcttgcggaagatactggacttgctatgaacttctacagggaatcatgcactcacgctgactgacatcatcatagaacaagtcaagcttctctacaagcgccacagaaacactgctgtctactgtctcatagacatctcccatgactgtgctgcccatagttgcgatgcttgactgttgctggactccagctgatggagcttggctgttaaggaaacagatagaagc

SEQ ID NO: 89681 - DNA, 434 bp, Glycine max
  Clone ID: PAT_MRT3847_51993C.1
ggtgaattctaaaaataattttttacaaaataaggggttgttatcccgagctaatacaaggggcaaaccattttttgattccccctttgcccccaacatggtttttcctatttaacccctttattaaagacctttcatttttggattaggaaattttttggtaacctatctagagggggctcaccataccattccttgaaaattttttgggggctagaggaccccaattaaaaaaattccccttgacaaagttacaatggtttcgaatttcttcttgggaccccggtagcccttcaaagggggctcatttttatcattggccccttaaaatgttcataaaaaaaagttttgttaccacccaaacttttggcaatgggcttgggttttgcaccccttggtaaaaataaaacttggtcccttccgaagcagccctt

SEQ ID NO: 89682 - DNA, 1053 bp, Glycine max
  Clone ID: PAT_MRT3847_51994C.1
ccacgcgtccgtgaagccaagaggtttagcgtgagaagtgttgtggttttaattttagtgaaaaaactcaaaaccgtcgtcttagccgcatgtcgaactccggcgacgcaaatgtaaccacagaagagcaagaagcagaggctgagcagcaatcggaagaatgggagacgatggcacgagcgtggctctgctccttcccggagcccaaggaggtgagcatggccgaagtcgaagcctggatcgactccaacctcgcctccctccccgaaggcctccgatccatgccccgccccgatctctgccacagactcatctcctttcagaattgcatgagactccccaatcaggaaagggaagtgaatcagctcgatcttccgcacgcacgatttcagcgaaccgatcagtggattccggtttattcgtggttggagactctggacaaggaagatgtggttaaatccaaggagatttctgactggttaactgataaccctaaggtccaagaacagttgtgctcgcggcactcgcgatatcatttgatgcactacatcaagaaatgccatctcaagatactaaaaagaagggaaaagaaaaagggtgtagaacagcctgataaagactcatcattgaaggttcagaaggatgtggcaatgaagcacccagccccacctccatgtagttctgtaagtaatctgcccaaagatagcgatttgttcttggccaaaagaaatgaagcctatcgtaaatatgagattctactggagttggagaagctacttaccccagtattcaagaagcaacctagcgtaaatcagtgagtgttggaaacatcaattgttgtgtcttcagataatgactgggaactccctgatgtggctccaggggtaccctattgctaatttgtttacaagtgtttaccttggaaggtaactattctcttcacagggaatgatagatcattagtgtttatctatgtagaaagtagtgtagtagaaatcgtctgaccattgaccattccatcagcttctgtaaatgatgaatttaagctagtct

SEQ ID NO: 89683 - DNA, 535 bp, Glycine max
  Clone ID: PAT_MRT3847_51995C.1
aacagtgaaaaaaacttccttattaatgaaatgcaaatggacgactttcctactaagccgcataggaagtgggctaaacccttatgggtgattgagactgtgaaaatccgagactcttaccattctagcaatgaaacagcactcatccaacacttcctaaaccaagggggtgaccttcgcacaaaaacccaaatatgaaggctacgcgctgcatgaaaacggaggccactacaaattgtatccgttgccacagacaccttaggactttgtctagatattctacagcctagggaacgagtttccttgaacccgcgaagttgatcacatgggctaacaaaaatgacaaaaagcatcacacttctttttgacgaggggctttgggaccttgggtcaccgaggcgtctgttattcttaacactctcgatgacttcaacaaccccggacggacgcatgctcctgacaaccaaaagatctaggggaggccactcaaacaaagactgagcccccatggggttggttggtaccctcttaacca

SEQ ID NO: 89684 - DNA, 378 bp, Glycine max
  Clone ID: PAT_MRT3847_51996C.1
gacccacgttaatgttctaccaaaaaacgaaacacgattacggggagttttttaagaagaccaccggtttgtcacgcagcgagaactaggacatggtgtaacaggcattgagcaagtgattcaatcgaatatccctattccgattcaccacatgcctctccgatctaattcctatcccatcagcatcgtttcctgaatggagtgaaatgccttttgcactgtgttagacacttgggggctgaatatgcataggttgtatcgaatagctaactcttgcaggcttggtgatggttgaagtggaaccaaagctatgaatcaattgaaaacctaacaagtggttcggattattgttatcgatgagtcgagaaactatgggga

SEQ ID NO: 89685 - DNA, 128 bp, Glycine max
  Clone ID: PAT_MRT3847_51997C.1
tggtcgagcttgtgaagcatcataaacacagtcttatcgcactccggagcgctcataatcatgatggtgtcacacatgataactgtgactacaccaacagcaccagatgctcagaatgaccaaatagt

SEQ ID NO: 89686 - DNA, 359 bp, Glycine max
  Clone ID: PAT_MRT3847_51998C.1
cggtcttgaattcccgggtcgaccgcacgcataccgtgcgaattacgaatgtctgatgtctatttgttgattgtgttctataatttgagtgggcacggtgtaactcagatgcattgatacaagaacattctgtattttgttgactatgatataaaatttttagtacatgtaatatcaattaaaattattctcaacaagatcactgtccagcctgaaggttacggatttgcgtaatttgtatctcatgctccagcatatataattttgcagacatacaatggaactcagatgcctgtaacataacaaactattagattgaattgggccttctttggaattggagaaatgcgccctgatac

SEQ ID NO: 89687 - DNA, 429 bp, Glycine max
  Clone ID: PAT_MRT3847_51999C.1
ctgacgcgtgggcggacgcgtgggtggtcttagaggagaaaattgaatacaatgatcttgtaaagtcagttcccgatgggaactcttcaaataatgatgaacacaccaatatccagacagttcagccagataaacaaaaggatgtgccccccaaaaatggtaaatgcaaaataaaagtacataattctgtttgaaatatagattttcttcttaatattaaggacggtcaatcttgactcttgagcatatactgttttgactttgttatagactagatgaactggcagaagttcaattctatttcttctacttcatttctattgctgcagtgttcccctgttttccttttttctatatattttcttttgggatgtttttttttctggtttttttttcctgcattcattggtttaatacacaaagaaattg

SEQ ID NO: 89688 - DNA, 493 bp, Glycine max
  Clone ID: PAT_MRT3847_5199C.1
ggttggtacaagaagtggaaagtttcacccaacgaaaaattgctactgcacaggaacttgaggcactgaagggtgaggagccatgcagagagcccccatttcagtatgtaagtcatgtccgcacatatccaacattcatgtttggtggatccgtaggctcccgtgttgctaccgtggcattcattcggaaatgaaaatgtctgtcatttgctgttatgatttaggtctctggtccaatgggtttgaagttgtgtgtgcgtataggtaaatgcatgttcccaactgttgtgtcgaaccgtaaatatttttttgcgatggtttatgtgaagtgttccattaacattttcctttctttcgggtgaacagttgttctcattcggaacttataatttatagatagtaaggtaaaaacacatttagttcagcgtagcaaaaggcttgtgtgaatggtcgatgaaactatatgggaattttatgtttaccatgtttgacc

SEQ ID NO: 89689 - DNA, 651 bp, Glycine max
  Clone ID: PAT_MRT3847_519C.1
ttcgcataacaagaaaaaggattctaaagagaaattgatcaacaaaatttcaaattaaagtttatcctaacccaaagaaatttagaaactcagttaataataacaaaacaaaacgaagaaatagatagagcaaaacctatggatcttcaagagttgtgcttgagttcttcaagattctatagccacaaatgaaaccccatgtgatagcagtctgttggaattgttgtataaatctaactcattcaatgcttttctttatttctctcatatgaccttccttacttgttgcattgcttttggatatacaattcaacaatttacatacccgtttttcaatgtgtaaactaattgggtaccactggtgccaaattattaattgaaatccacattttggctgtccaaaaaaatgaagtagttacaaaactttaaattgcattcttctccttcatctttcttcactttcaactgtattcaagttctttaatttcagattccagtacaattagttctgtttctttttactcttgaattctttatatttctgcattttttcaagtaactttatatttatgaatttccttttaatgtttaaactttcgttcattttgatgtagctatgatatctttttaagtcattttatgctgactgca

SEQ ID NO: 89690 - DNA, 1311 bp, Glycine max
  Clone ID: PAT_MRT3847_52000C.1
cagggcccttggatgtccgtgacggggcggtggtgcatcggcagagagctctcctggtgcggagcccccccatggtccaagcttgcctccaccaccccctttacctcctaatgtggttcctcaatctgtaggagctggtaggcgtgatgaagatgttgatagaaggtatggagctacaaggcactctcagagactttctccaaggcatgaagaaaaagaacggagacggtctgaagagactgtggtttctcaggatgatgccaaacgccgaaaagaagacgattttcgagatcgaaaacgtgaggaaattaaggtggaagagagggagcgggaaagagagaaagcaaacattctgaaggaagagttggatttaaatgccgcatccaagagacgtaaacccaagagggagcatttaccaactggtgaacctggtgagtactcacctgtggcccatccaccttcttccgctggtattggcatgtcactagcatatgatggaagggatagaggagacagaaagggacccatcatgcagcatccaagttacgtagatgaatcaagtctcaggatccacggtaaagaggtggccagcaagttgaatcgccgtgattcagatcccttgtatgaccgtgaatgggaggatgagaagagacaaagagctgatcagaagcgaaggcaccgaaagtaacaaaccaaaaggggatttcaccagtaaacttttttgaaggttgttcattttatgcacgtgctataatgccaactttttgcgtgagttgaggtggtgggttcacaacacttttaaccgtcagccccctcatttttctggcaacttgtgccaaatttcatcagttcaaattattagtcttctttctaaagtcaacataaagaagttatgaattgttttatacacttgtatatagtgttgtatattcgggatagctggctatcaaatatactctgaaaatgctattatttcgtttgaaccttcatttacatcaatagcaatacctaggaaacataaattttgtagattcgtgcaaatgttttggtggtctttcatggagaagttggcggcacccgtgattgcatccttgccattagggatgaatcctgtccattctcaattgttgaacgaagtatatgccgtccggctcctgaatgttattctatggatattgggtgttatacttgcggattggatcaagcgcgtgtactggttggttatgaaaaccaagctccggaattttaacctctgaaattttgtgaacacattcaattcgtaatgctaatatatgttatctatatttatgc

SEQ ID NO: 89691 - DNA, 272 bp, Glycine max
  Clone ID: PAT_MRT3847_52001C.1
tttgctttctaggtttttttttttttttcttgctctttctctgtgtcgatggcgggaaaaggaggaaaggggtttttggccgaaaaaaccagggaagcgaaaaaggacaaagacaaggttaagaaaaggcctgtctctggttaatcccgtgctgggatccattttcctgggggtcgaatccataggcatttaaaccaaagggtgcaaccaaatggacttttgggggcgactgctgctgtgaacttggccccaattctggaatatctgactgc

SEQ ID NO: 89692 - DNA, 203 bp, Glycine max
  unsure (1)..(203): unsure at all n locations
  Clone ID: PAT_MRT3847_52002C.1
gaacggaaggangaaaangtataacaataaaaaaacaataaactaggtacgcaaaagaaaaggcggcataaggtctaacagcaccagaaaaagacatgaccaaaagtttaatcctcgtcttcctcatcatcatctccacctgcggccttcttaacagcagccccttgggtttttctcttcactcttccaaggcgaccaccacc

SEQ ID NO: 89693 - DNA, 723 bp, Glycine max
  Clone ID: PAT_MRT3847_52003C.1
attggtggtgatataagcaatagcatatcaagaatgaaacagtcagccgtaaagcatttgctttacaagataagctttggtccatttatgctgctggtaatacagtgcccatccgttcttaagggcaacagatatatccccaattgctctcctgtcagacaatgtacttggtggcatacaacaggatactggtggaactggaacagtggaagcattgcaagagctttttagtggtgacggacagtccaaaaagggccggagaggactaaatgagatgcctcttcctccaagcatttaccaaagattgacatcaagttctactctaatgaatttggcgcaggctttagcttaccataaaatgtgttacgaagatatgccgctgcaggagctgcaagcgacccaggagcagcggactattcaaaatctatctgacacccttcgaaccattcttcggttgtaggtcaatggcatggttgtgtaactagtacccaatgttttgctggttgctttaactatttttcctagttttgttaagtaaaccctagaagatttagagttttgtaagctgccacatatttgtatgtaaatagaatatgcatgactttcgactattgctgcatttgcgcacacgttgtagtcactagtggatttgttgttaaaaaagaagcctaaaactttaagaagtatagaaaacctggaaaccttattgatagacactaaaaa

SEQ ID NO: 89694 - DNA, 406 bp, Glycine max
  Clone ID: PAT_MRT3847_52004C.1
ttcatttcctcccgtgccgccagggtttccatggggagggaggtacaggctgttcatgagatatatgaggccccgtagagagatgggtcggagggaaactgatcctacgaccttaagatctgactctagatcggaaaaagttgcctctacagaaggacaatttgttagtggaaagaccttcagaatgacagaacatggggtggtcacattcttcagaagattttgctgagatggaagatcaagaatgaccctaacagattgatgccagattgagacaaagaatagatcctcaatacaatgaggttcaggctcagatggaaacaaatttgtttaaacttgctcttgctgatgttgaaactcctcaaggttccatgttggatcttataattcctgaatctaaaattgc

SEQ ID NO: 89695 - DNA, 1737 bp, Glycine max
  Clone ID: PAT_MRT3847_52005C.1
gtgtccacccatgatgcagatgccgcagtttcggtatctgctctgaccagtggcacaagaggcagattgactgactctgggattgagagtcagaaagttggtattatgaacactgcctcttttagaggatatagtgctactaccaataccattcaatcgtctttaccttatgttagtaattcagctgagcagagcctcaaaaccaaaggtactcatcgagcacaagctggaattggtggtgatataagcaatagcatattcaagaatgaaacagtcagccataaagcatttctatatttccatgattttgttgccaagtgcctaacaaaagaaccacgtctccgccctactgcttctgagatgttgaagcacaaattctttgaaaagtggaaaagtggatctgctgcaatgttgccaaaactagaaaaggcgaggcaaatcagggcttcaatggctttgcaggcacaagctcttccagctgcatcagaagatcaggagttagattcaaaactaaatgatgaatatggaggtactgttccatccagacctcataacatcggtgttgagggggctgctgatctctcttcacatggcactacaaggaagctacataaagtggaagatgtagacacgagtgaaggcaactttggcactgttataatccatggagatgaattacataagaccacacaagatgcagattctgcagcttctgtatctgctctgaccagtggctcaggagacagattggctgactctgggattgagagtcagaaagttggtattatgaacactgcctcttttagaggatatagtgctactaccaatactgttcaatcgtctttaccttatgttagtaattcaactgagcagagcctcaaaactagaggtactcatcgagcacaagctggaattggtggtgatataagcaatagcatattcaagaatgaaacagtcagccgtaaagcatttgctttacaagataagctttggtccatttatgctgctggtaatacagtgcccatcccgttcttaagggcaacagatatatcaccaattgctctcctgtcagacaatgtacttggtggcatacaacaggatactggtggaactggaacagtggaagcattgcaagagctttttagtggtgacggacagtccaaaaagggccggagaggactaaatgagatgcctcttcctccaagcatttaccaaagattgacatcaagttctactctaatgaatttggcgcaggctttagcttaccataaaatgtgttacgaagatatgccgctgcaggagctgcaagcgacccaggagcagcggactattcaaaatctatctgacacccttcgaaccattcttcggttgtaggtaggtatcttattgtgactattttaaatcccctacctttaatggctgcaaagatcacaaaacccattttcttttctcgtgtcattggtttatatattcatacaggtcaatggcatggttgtgtaactagtacccaatgttttgctggttgctttaactatttttcctagttttgttaagtaaaccctagaagatttagagttttgtaagctgccacatatttgtatgtaaatagaatatgcatgactttcgactattgctgcatttgcgcacacgttgtagtcactagtggatttgttgttaaaaaagaagcctaaaactttaagaagtatagaaaacctagaaaccttattgatagacact

SEQ ID NO: 89696 - DNA, 299 bp, Glycine max
  Clone ID: PAT_MRT3847_52006C.1
atttgctttagcactgagcttaaccgagcttcacaggagatgggtcggtaaaaattggtgaaggtggccggttcggttagaactgggggaaagggcaccgtgagaagaaagaagaaggctgttcacaagacaacaaccacagatgacaaaaggcttcagagcaccctgaagagaataggggtgaatgccatcccggcttttgaggaggtcaatatctttaaggatgacgtatttatccagtttctaaatcccaaagtttcagcattcattgttgctaatacttgggttgtcagaggttt

SEQ ID NO: 89697 - DNA, 357 bp, Glycine max
  unsure (1)..(357): unsure at all n locations
  Clone ID: PAT_MRT3847_52007C.1
aagtaaatattcctaaaaatncnncaagaataaaatagctgtgtttatttgttacctatttaacaggagaccttctggttcaatctgcttttcttaataattatttcaataacatagaataaatacattattaacttagttgaaaacaataaccttcttttcagtagattttggattgttccaaaaatcatcttctaatccctgtatctgtggaatgccttgatttctagacctccatcaatatgaagagttatcatggtcttgtaactgacattttttttctcatcattcaatttaaagtggaaacagcctaacaaaactgctgagaatatcttcatctgtctataagcatctcgt

SEQ ID NO: 89698 - DNA, 578 bp, Glycine max
  Clone ID: PAT_MRT3847_52008C.1
tgtcttgtttattttttgagaacacgaacaatgcttactatataagggtggactgtccatactacaagaaatctaaatctctagctactactgctcccaagaggggaccctaagaatactctcgtatgctgattaaacaaacggggaggatgaccctgtggaccacctgcttcagctagacgggggttttggacactgtttcaacagatactaattatcgcgttaatgatattactcgtggaccataattctcaaataagacattgaaaccacagggtgacctatctctctggagtaccatataccttgctatgttcaaagcagaggctaaaaccttaagttacaagctaccaattgtcaaggccccatacaaagaactattgttatgacgatgcccccgagaccaactgtagctacttgaagaatgaacattggggatattttcatttccaacgaatgtcacacctggggtcgaaagaaaagaatctgtctgctcgggaagattaaatcaacccacgctgcagagattcgcacaaaagaaaattgccttctcagagctctatcaaataaaatcaccc

SEQ ID NO: 89699 - DNA, 302 bp, Glycine max
  Clone ID: PAT_MRT3847_52009C.1
aaagggggggggtttaacccaaataaaatctgtacaaatccaaaattaaaaaagcgaccaaagggccaaaggtttctcttccaaaaagggggagaatatgaaaaacacgacattccaaagaaaaacaaccttttttcaatggtaagcactatgattttctcccccggcccataagaaaaaattaaaacagcacttttatgggaaaaacatggaaaccgaggaacaaggacggtcccaaaaaagggggggccctaaatccatcggtgtaaaagcaaatgcctctctctgaaaaagcatttttt

SEQ ID NO: 89700 - DNA, 585 bp, Glycine max
  Clone ID: PAT_MRT3847_5200C.1
ttgtggttctaggacggccccatgtgattcctgtgggcgttctgtgatgttgaaggacatggatattcaccagattgctgttcatcaaaggtggctaattctgatatttttcctcataacagtaacttgtgaaggattgcatctagggtaacaaatagaaaattaaaagaaactagaggaaattgaaagagacaggaagacaggttgatgatggtggagctgaaacatctctatgttctactgtggacaaccggctgtggatctattacactgttgttgatcttgtcattcattatgtatgaaattatgattataaaaatgtttggtttgcagtgttttttacattacgttcttttgggcagataggaagaataaaaattacaattttataaatatttaggtaaagaaaccacttgcaagtaggtttgttgtgctaataataaccaagtaatgattgacgagcgtaagctgttgtccttaaaagcttgcaccaacggccagtttcgctgtgcatttctacttagtgattgacgagtgtacgtaggaattacatgtagttaagaggttgtttggccgaatcaggtt

SEQ ID NO: 89701 - DNA, 626 bp, Glycine max
  Clone ID: PAT_MRT3847_52010C.1
acggcaccacgagtttgaacttatgggcttataatataaatcacccacgtctcgggccactagatatagcgactttaacttcttttttttaaagaagtaaaatatgaatctaggatttctttttccgaggctagatacattcatttttttctctcttatatgattaaatttcttaccaactgcactctttctatgaaaatgggttacttgaaaaatctagttcaattgaaggacttaacagttaccagattagttttatttaagtttttagagattggtgccagatcttaaacttcattagagacacttgggaatttaattggacgtcttttgcgttgcaattatccatgtttcatatttgagaacattttttctttggatcctatctaatcttatccgattcacatgcgaacttgatcaattcataaatgttctgaacatgaccctagtgttgagcgccctccctattgaaatgaagactcagctgcacgggaatttttttgaattaatatctatgtacctgacggtctaaaatattttcattcaattataaattaaatgacagtatcctacttgggggaaggggataactctttttctcattttttatatcaaaacttcaaaaa

SEQ ID NO: 89702 - DNA, 199 bp, Glycine max
  Clone ID: PAT_MRT3847_52011C.1
gccacgcgttcgataggacccagttttacatttgaaactgtcactgagatccaatggctcgccaggctgggtgcctgaatgctgatgtctacgtctattgctaaagccggtaagtctggtgtatctactaggtacacctaccatgcttggtgtctgatcgatcgatactctcaaatatgactctagctctccattatct

SEQ ID NO: 89703 - DNA, 510 bp, Glycine max
  Clone ID: PAT_MRT3847_52012C.1
aaacctatcacaaaaaacagaaaagagagcccaacaggcccgaaacaacagaaaaaaagaaaaccaaacaaaaaaaaaaacaaaaacaaaagaaaaaaaaaaaaaacaaaaaaaaaaaaaaaaaaaaaaaccaaacaaaaaggacacaaaaaaaaaagaaaaaaaaaacccccaaaaaaaaagaaacaacacaaggcccaaacccccgaaaaaagagaacccccgaaaaagaaaaaccagggacaccctttggggatagaggagcgaacagtactttggccaccaaaaaaaccaaaaaaccgcaaacccctgcaaaaagcctgggtgaaaagccccccaagttgaaaccctgaaacaaaaggaaaccacgccaaaaaagcaaccggggggaaaagaagcaagcccaaaaaaactttaaatccgggggaaaaagcccgaacaaacccccaaaaccaagttttttaaaagagaggcttgcaagcttgggcaatcagcaaaaacccccaaccc

SEQ ID NO: 89704 - DNA, 520 bp, Glycine max
  Clone ID: PAT_MRT3847_52013C.1
tccaggataggtttcccgtcatcactgtatgacgctcgctccgttgctttggggggtgggtgtgggggtgggcggggtgggcgggggtggaggggcgggggagggcgggcgggagaaatttacaaggaccagccactaatgccaagcgggcggttaaaccccctgcgtatataggtttcgaaaaattgaaattgggggatacatcgatttagggcgttaaaaagtaaggatagcttaaggggtgcaaaccaaaaatatatccgtacccatatggactaggaggcttttggagtataaggaagtttgatgtttgaataatttgagtggcgaagaaaaaataaaggggaagaataaaattttaggtggccttatttagtagcaggggtataattattattattattattatggtacgtatgtgtattatcaagttgggggcttaatgccagagtggcccctgaagacggatatgtggaatcccaagcctatatacagggggagttgtaaacacgttaatacc

SEQ ID NO: 89705 - DNA, 148 bp, Glycine max
  unsure (1)..(148): unsure at all n locations
  Clone ID: PAT_MRT3847_52014C.1
cnttcttcnggntgacttacctgatatggatgttattngactctctggcnatttctgttcggacaaganagccgnngcagtgaattggnttgnngggcgtggcangtctgtggtgtgtgaggccataattacggaggatgttgtgncc

SEQ ID NO: 89706 - DNA, 417 bp, Glycine max
  unsure (1)..(417): unsure at all n locations
  Clone ID: PAT_MRT3847_52015C.1
gagagaactagtctccagtttttttttttttttttttttttttttaaagtaaatatcatttattcaaacctaaagaaacacaatttcacatcatcacaaacttattttaccgtgccaataaaataaacttttatccctaaactccagcaccagcagcagcttgctcacttgaatacaccgctcctcccatttctcatgttaccccctggtttgcccccttctgtggagcccagtgttgttcttccccttggttttccctccgtgtttcccccgtgggctttcccctcgttttatccttctctttttcttcctcgcgcccccttcccgctttttctccttatatggctttttcccttcccttcctgttggtnctccctcctctttcccccttttggcgcttttttcactttgtttttt

SEQ ID NO: 89707 - DNA, 220 bp, Glycine max
  Clone ID: PAT_MRT3847_52016C.1
tacggctgcgagaagacgacagaagggcacagagttcagcctacaaaggttgaacaacaacactggtgctgctggccttgacaacctcaggagatcagggataaaagtcgtggcactccctgatggcttaggcccagaagatgatagaagtgaccagaagaaagttgttctctcaatcaaaaccaacatggcctctatggttcccaagctcgtacaagat

SEQ ID NO: 89708 - DNA, 160 bp, Glycine max
  Clone ID: PAT_MRT3847_52017C.1
gtacatagatagtaaaaccaaaagaactggcaaacatggtaaaggacaacctcaacgaaaccagaaccataaagaggtacgagggaaaaagacccacaacgccaaagaaagagatctacactgacacgaatcccatcctggggaaaaaggattgaggcaa

SEQ ID NO: 89709 - DNA, 382 bp, Glycine max
  unsure (1)..(382): unsure at all n locations
  Clone ID: PAT_MRT3847_52018C.1
gagcctggagagcggacgcccgccacccttttttttgaacatcataatcctatacatgaanacaatacccacaccccagccgaagcgcgatcaagagggagaagaaccatcaaacaatcgccacagaaacaatcggaaaacgagggaaaggagaagaagaaaacaatgaacaacccgggccagccagccgcaccaaccgacgaggcaccaaccatagggccaatcaaaaggcaaaaggagagagagaccaaagcctacgaagaaaagcagaaccgcgcctctacaaccaaagggagaaaacatgcggcgaacgcacatggcttccacagaacggaggtgaccgcaagcaaggaagaaaccacgtatgggtccaagatggaag

SEQ ID NO: 89710 - DNA, 299 bp, Glycine max
  Clone ID: PAT_MRT3847_52019C.1
gtaagagcatgttttttttttttttgaaagatttctaattaatgtttacttagatgttttatttgggagcctggacaaaatatatctaaggggattaagttttttattaacccccttaattgttttttccgggaattggcatactgatactagtatgccacaaaaaaatttttatgggttaacagatttaatctttaacttaaccacgaaagatatttttatttcgggtaattgttgttcgaacacaaatgcaacccttggttataaatctttaaaaggcttttgttccatgcttttcc

SEQ ID NO: 89711 - DNA, 456 bp, Glycine max
  Clone ID: PAT_MRT3847_5201C.1
taacaggctggtgatcttaaattcaaagttaagaccacagttacaaacaagcaacatcccaacctaacaactaacatcagttaaacttacacacctttcaaagggtaaaagatgcaattcagatagacatctaagagggttttaaattccaagggcaaaagataaaattcagataatctttcaaaaaagcacctgccttcatccctcacactattgtggtgggtcaacttctacatattcaataacagcaggttactactaccgtgcatcatggcatgaggatcattcgaagttaagagatttttaaacagcttgattatcataaaaagagtatatatgcatgttaccctctaaaaaatatgatttacttgtaattttatctctcaattgattatgtatacaattcaagagtttaataagttggtagtgaaaactataatgtcaaccactcacaaa

SEQ ID NO: 89712 - DNA, 323 bp, Glycine max
  unsure (1)..(323): unsure at all n locations
  Clone ID: PAT_MRT3847_52020C.1
tcggggaattccaattccacattttcaagaaataaggaggcaaaaatgtgcatatatgaattggaattatttgttntcttattaggcctatcctgaagccaaaggaaatgaaatcggaattcctcgggaattcccatttcacattttcaagaaattagggagccaaaatggtcatatatgaattggaattatttggtttcttattaagcctatcctgaaaccaaaggaaatgagataccgaatttcttggggaaatccaaattccacattttaaagatatagggacgcaaatgtgcacatatgaaaatggaatatatgggttc

SEQ ID NO: 89713 - DNA, 157 bp, Glycine max
  Clone ID: PAT_MRT3847_52021C.1
agggagaaaggatatcccttaatgcagataagaagtggctggtatcgaaataggaacagtgaagacactccagaagataatgtgttgaagatttaaatgtagctaaatagaattggttggccaacattttttgtaaagtgcagtttaagcacgggta

SEQ ID NO: 89714 - DNA, 332 bp, Glycine max
  Clone ID: PAT_MRT3847_52022C.1
cgaagactactggcggggcagcagtttgtagggccaaactcaccttttttgcacccgggcagagtgagagagaaaaaaatgggggggaggttcaaaagattcgccgtgtcaccatcggtggagctggcggctgacgctagaagaacgccgtcaccgataacgacggggggtaaggtgcagaaccagttggagcagaacatggctttgctggactccatgcacgtgggggaacactgtgcagttggcttacacgctccaaaacaggtgagcgtggcatcccaccgtattaaacgcaatcagaagatacctattgcaccatgttcgaacacgag

SEQ ID NO: 89715 - DNA, 265 bp, Glycine max
  unsure (1)..(265): unsure at all n locations
  Clone ID: PAT_MRT3847_52023C.1
cctntgtctttcttccacaaaattgaggatatncgcaagtganatgaaggccaggcaacatctcnttccttcnctngatantttctgatggcnatccgttgaaanccaaggttccgngngntccaatngtgactagaagagccaggtntttgcngntcactggaaaancatatntntccccgtnaacaaggntcaatagantacagtggtcaagccntngactggaacntggacatctgaactatggatgctccacncacagnga

SEQ ID NO: 89716 - DNA, 766 bp, Glycine max
  unsure (1)..(766): unsure at all n locations
  Clone ID: PAT_MRT3847_52024C.1
tttcatttttatcttatcaatgttaattttatattatttcctttcatttcctttttctttttaactcttttttccatccatttcacaccgtatgcatagagtgagagaaacattgttatttcttagactatcacgatattggtgtgaaatatcaatcaactttattaaattatcataaaatttgataatctttaatggagtctttgtctcaatcatattaattaattaaattattaattaattattaaatatctttttgaaatactttatcataattaaaattatttctctttatgtgataatttttttccaaagaaaaaaaaaacaaaatgataaatgaatgataaaatgacaaaggtcattgcgaaaagtcaaattcccacattcacaataaacaatccaactaaactctaagagacaacaaaataatatttttagggctattaattatgttatttttatttttttaattcacttttagtctttaaataagtttttgtgtttttttttatataatttttatattaataattttagttcttcctatcaaataacaacattaattgataacatatgtaaaattagacattngacttaaaggggctaccgcccccctcccccaacaaaactctttgaatagttacaagtaaaaaataaatcgctcttgagtataattacaaataaagtccatgcggatatgatactcgaacttccgttntaaatttactatntggaaacgaatgatgncattgtcatccatcaacat

SEQ ID NO: 89717 - DNA, 321 bp, Glycine max
  Clone ID: PAT_MRT3847_52025C.1
cgccgtgatacctgggggggcttttttgataatggccggcgttaataaactcgaggggaggccaatactaccaaactcaatggggggaagattgggtctgaaccagagaagggagtcctcggtgcccatcctgccagattggagaggataccatgaaaaaccaggcctcaacatctcacacagcccctggtgggtgacaggggacctctggggtgcaaaaccccataagcaatatgccttggagcctttttgggctcctttttacggttggagctcttcatgccattgaaaatcaaaccattccccaaacgagccttattc

SEQ ID NO: 89718 - DNA, 2358 bp, Glycine max
  Clone ID: PAT_MRT3847_52026C.1
ttcgagcgaatcggctcgagggcaagcaacagaggctctttgatttcagtccgtacacattattattcacagccacatttgaaccacgtctctcttctcttaagtcttatctataaaataagaaagaaaggaagctcaacctctcacaaactcacaccacatccatctttgccttctgcatgttggttctctgtaaacagatactgcaaaagaagaataatattgaatatttggttgggttgaatccctgggttgaagcgttgcagacatcacggctattctaagagtgtctcgctctctcattcatgtcccaactgtacgacggaggacaggttgcgtaactgccaccaacccttcgccgcacggtgggcgtggtgctttgccttctgaaggtggtagcccttcagacttgctcttcttagctggtggtggttctgctgtcttctagcttcttcttaactcttttttctttttactacttttaagctaccttgttttcaaaataacaaaaacaaacactttcttacttcataagatcaccttttcttcatcttctacttctccttcactaaaatgatgctcaaaatcaagagggttcccactgtcgtttccaacttccaaaaagacgacgctgcagactctcctcgtcccgtcggaggttgtggtcggaattgcctcaaagcttgttgcattccagatgcaaagctgcctttgtatggtttcaagaaggctaatattgggaaggatttggccctgcatgcatgcgccggggagcctcccctcgcattcctcgactctcttcttcttggagagtgggaagatcgcatgcagagaggactttttcgctatgatgttaccgcctgtgaaaccaaggtgattcctggtgaatatggtttcgttgcccagcttaacgagggtcgtcacctcaagaagaggccaactgagttccgagttgataaggtccttcaaccctttgatgaaaacaaattcaactttaccaaagtcgggcaagaagaggtcctcttccaatttgaagctagcgaggatggacaagtccagttctttccaaatgctccagttgatgttgacaattctcccagctttgttgccatcaatgtcagtcctattgagtatgggcatgttttgctgattccgcgcatatttgagtgtttgcctcaaaggattgaccgtgagagcttcctccttgcacttcagatggcagtggaagccgataatccttattttcgattgggttacaacagcttgggtgcttttgcaactatcaaccatcttcacttccaggcttattatttggctctgcccttcccaattgagaaggcccccactaagagaattgcaagtgtaaatggtggggtgaagatatctgaactgttgaagtatccggttagaggctttgtctttgagggcggcgaaatgctggaagatctatcaaacgttgtttcagatgcatgtatatgtcttcagaacaacaacatacctttcaatgttcttatctctgactgtggaaagcaagtgtatctgttaccacagtgttatgcagagaaacaagctcttggagaagtgaatgctgagcttcttgacacccaagtgaatcctgctgtgtgggaaattagtggacacatggttttaaagaggaggaaggattatgatgaggcgtctgaaggcaatgcttggaggcttcttgctgaggtgtccctttctcaagagaggtttcaagaagtcaatgatcttgtttttgaagccattggctgtggtgaattggaggatgtcaatgttcaaagtgtcaaaaaagaagttgatgcagtcagcacaagcgaacaccctactgtggtggtggtggctggttcacaagaatgtgtggttctacagtaacaaggctcttgtattttgaacaaattcagaaaatctgcagtgttttaagaataattgctgaaatgtgtcaccgtttaagtcatactattgccttgtgcttgagccttatggtcgtgtgtgttgaatgtatatgcttttatctgcctttatgacactttcatgtgaaagtacgatataataactgctcagctgagtagtgttgttggtattttggggtctgatgtatcataatgcttgacttgactgtctatcgtggctttcatgctgcgagaaataataaattcaggtaactgtttgtccttgtagttgtagttcttaaggatgaaagttttcacttgctgtatttctggcttcactttgtaataaatgttatgtttgtatattagtaaacgttaagggttaagaatttggtgcgaatctttattttattattattcatgttttttcaatgcctcttggttgtgc

SEQ ID NO: 89719 - DNA, 2337 bp, Glycine max
  Clone ID: PAT_MRT3847_52027C.1
acggctgcgagaagacgacagaagggggaacaaaaaaatgaaggcacctctctctttcaattattgtctcttctcttgtactctgtttattcacagccacatttgaagcacgtctctcttctcttctcttctcttatctataaaagaagaaacaaaggcacctcatccaccaaaacagagctagtttagttatctactcttttctgcatgtttgttctctcaacgactcctccgcgaaagagtattattcaatattttggttgggttgaatcccggggttgaagcgttgcagacatcacggctattctaagagtgtctcgctccctcattcatgtccgatctgtacgacggaggacgggtagttgcgtaactgccgttaacccttcgccgcacggtgggcgtggtgctttgccttctgaaggtggtagcccttcagacttgctcttcctcgctggtggtggtttcttctagtttcttcactcttttcattacttttagcctgcatagttttaaataagaaaaaaaaaacagcgactttgtgactagttaagatcaccgtttcttcttcttcttcttcttcttcttcttctactactactactactacttttcctccacaaaatgatgctcagaatcaagagggttcccactgtcgtttccaactaccaaaaagacgacgctgcagactctcctcgtcccgtcggaggttgtggtcggaattgcctcaaagcttgttgccttccagatgcaaagctgcctttgtatgctttcaagaaggctaatggaaaggatttggccctgcatgcatgcgccggggagcctcccctcacattcctcgactcacttcttcttggagagtgggaagatcgcatgcagagaggactttttcgctatgatgttaccgcctgtgaaaccaaggtgattcctggtgaatatggtttcgttgcccagcttaatgagggtcgtcacctcaagaagagaccaactgagttccgagttgacaaggtccttcaaccctttgatgaaaacaaattcaactttaccaaagttgggcaagaagaggtcctcttccaatttgaagctagcgaggatggacaagtccagttctttccaaatgctccagttgatgttgacaattctcccagctttgttgccatcaatgtcagtcctattgagtatgggcatgttttgctgattccgcgcattttcgagtgtttgcctcaaaggattgaccgtgagagcttcctccttgcacttcacatggcagtggaagctgataatccatattttcgattgggttacaacagtttgggtgcttttgcaaccattaaccatcttcacttccaggcttattatttggctctgcccttcccaattgagaaggcccccactaagaaaattgcaagtttaaatggtggggtgaagatatctgaactgttgaagtatccagttagaggtctcgtctttgagggtggcgatacgctggaagatttatcaaatgttgtttcagatgcctgtatatgtcttcagaacaacaacatacctttcaatgttcttatctctgactgtggaaagcaagtctatctgttaccacagtgttatgcagagaaacaagctcttggagaagtggatgctgagcttcttgacacccaagtgaatcctgctgtgtgggaaattagtgggcacatggttctaaagaggaagaaggattatgatgaggcatctgaaggcaatgcttggaggcttcttgcagaggtgtccctctctcaagagaggtttcaagaagtcaatgatcttatttttgaagccattggctgtggtgaattggaggatgtcaacgttgaaagtgtcaaagaagttgatgcagtcagcacaagcgaacaccctactgtggtggtagctggttcacaagaatgtgtgattctacactaacaaggctctaaaattatgaacaaattcagcaaatccgtagtgctttaagaataattgctgaattgtgtcaccgtttaagtcacatagtattgtgctgtgcttgagccttaaggtcctgtgttgtatgtatttgcttttatctgcctttatgacgcgttcatgtgaaagtacgatgtaataactgctcacctgagtactgttgttggtgttttggggtatgatgtatcataatgcttgacttgactctgagaaataataaattcagttatctgtttgttcttgtagtagttcttaaggatgaaatcttcacttgctgtatttctggtttccctttgtaataaatgtttgtatattaataaatgttttatgttatgggttataagaatttggcgagaatctttattg

SEQ ID NO: 89720 - DNA, 270 bp, Glycine max
  Clone ID: PAT_MRT3847_52028C.1
tacggctgcgagaagacgacagaagggggagcgagtgagtaaatgaacctatgcaatacttcttgcgtagtcttgatgactgtgtgtgactacagttgcacgtgaaatagacttaaaagaacagacactgatgatgacagcagttctcgaagcatgagagcttgtggcacctgctgcagatgcagcgagacctatgcatccttgatgtaagcactaccaacacccacaaataactagttctacgtatggaagatctttaagaggtgctct

SEQ ID NO: 89721 - DNA, 354 bp, Glycine max
  Clone ID: PAT_MRT3847_52029C.1
tcccgaccagctcagcacactacggccgccctttattgatgtatcgctttgaaacatcttgatatttttttatggcttgttgaatcttcggtatataatcattatattttgtgatactgttccattgcatagacaagcaactcaaaacaaagtggaaccccgtggagagaaagtccgcctgctcaacaaatcctgcaagccaagacagatcacagccaccagaacaagggaactctgaaactctgcgcccagaggaaaagccagaaaacaccacacacagagaatcaatttaaaaaggcccccgcgaagaaaagagaggctgctctatcccaatgggctatgacagaacttggt

SEQ ID NO: 89722 - DNA, 355 bp, Glycine max
  Clone ID: PAT_MRT3847_5202C.1
cgtacgcaaaccctcgaggcccgatcacagaggctccattgcccatcgctctctctatgggtgcacgcgcggtaataggagattcacgcgccaccatggcctatgcatcgagcctccctatatgctgccaatcaagcgcttccagcgacggcacctcgcaatcccagtctacgatcgcgacgccagcgttccagaccttcatctgacgcatcttctagtcgatccgccacgccttcacgcagcgccgcacgttgacagagctcatcgaccggagctccatgtaccgacacgacaccctagtcgaagcatactctcagatccgtaagaacttcgactacttacgcgtcaattacct

SEQ ID NO: 89723 - DNA, 202 bp, Glycine max
  Clone ID: PAT_MRT3847_52030C.1
gagaatcagatgaaccgggatcacaggttgccggagggggaaactgttaacaaaagcgggcgctactagattacaagaatctctcaattgctgcctactattttgcgtacgagtggcttaggggaagaaaatcactctctgcgctggacacagacttcgtgaatcattccctcatccactcttaggggatgagctggacact

SEQ ID NO: 89724 - DNA, 295 bp, Glycine max
  Clone ID: PAT_MRT3847_52031C.1
gtgaggcataactactagccaaattggggggagtattgaacattattgggatttacttactactatacatgtatgaccaacacattcttaacatatgtaagtggccaagctgcatatgggcatacgctgtgatacatatactgactagaaattgacagactaaacataagtattaatgattgcatacacatgagaaacacgcgttcagttatgagaagatcgacttacacggacgacttgattatcatccacacagactccaattagaggggagactcactctgcattgcaaggc

SEQ ID NO: 89725 - DNA, 181 bp, Glycine max
  Clone ID: PAT_MRT3847_52032C.1
acgcgatcgggctcatacatgaagacctccgacaccgggcatcttggagtcagctgcttttacggctatggtacccacacactgtcagttggtctgaattctcgttctgagttagagcgtttcgatgagtattcatgatatgagacgaggagcatggtaccgtattccatgacaccaagaa

SEQ ID NO: 89726 - DNA, 359 bp, Glycine max
  Clone ID: PAT_MRT3847_52033C.1
gcaagatcgtcaagtccaccaccgagaagcccgctctcaagggcgaccaggtcctcctcaaggtcactgcttccggtctctgcggcactgacctccactacaaccatgccgacatgggtatcggccacgagggtgtcggtatcgtcgaggagctcggccccaactgcaccatcctcaagaagggtgaccgcgtcggctggggttacgagcacgactcttgcggcagctgccaggagtgcctccgcggcaacgagaccttctgcgccaagcgtgtcatgtacggcttcgccgacctcgaccagggcagcatggctgagggcgccgtctggcgcgagtctttcctcttcaagatccccgac

SEQ ID NO: 89727 - DNA, 246 bp, Glycine max
  Clone ID: PAT_MRT3847_52034C.1
gggtagacttgtaactgcaatacactttgaacatattaattactttcaggggtgtttatgaagaagttattaaatggtcctggactaccacttttctttgatatcgattaatctttatgtaacatgtatttaagattttaatttaagagaaaaagaattaataaaacttaattaaacatcttcaataatatatatatatatagactaagttgaacaattcggagcataactcaaactcattttcta

SEQ ID NO: 89728 - DNA, 531 bp, Glycine max
  Clone ID: PAT_MRT3847_52035C.1
atgccccaaagagcccaataagaaacatttcaaaatttaatggaacccccttgggttttaggcaataacttatgaaactaaactagggaaaaactttgaaccaaaaatttttcataaattttacataaggactacattcaaggactaccccaagggatgtaagctttaactaaccccccttacaaatggaaccctaacacataaatgccgagggggggaagcaacaacaaattacaggggtccttggaaccaaaaccaaaaattttattttttcaataatagggggggatgccttgggacattccaccaagagggctcgccatcggaaattgcggctgggggggatggccccatgaaagggggaagccattctgggagccatcaggggaccccccaccagtactgggagggaccctccccccataatcaccaaaaaccggcccgcccatctgggaattaccatattcatgggcatacccgccaacacccggaaccggaatttgattttttacgggggcccctgagctggtg

SEQ ID NO: 89729 - DNA, 303 bp, Glycine max
  Clone ID: PAT_MRT3847_52036C.1
ttttatggcggccgggccgtcctttttttttggactggtttatattacatcactaattgcaagttcgaaaaaccaagatacaggatacctgttgagttatgaaaatcgaaataaacatgctaattcacattaggtgatgagaaaacccccatagaggactatattcaatgggtaaaaagaagtatactctccttatctttcttgtgtctctgcctgtggtctgaatcacacgaacgccgctggcaatgtttctctcgcttctcttgctacctatcctcacgagaaggatgctgtatacacttt

SEQ ID NO: 89730 - DNA, 749 bp, Glycine max
  Clone ID: PAT_MRT3847_52037C.1
tctggccccacattagtctagttaaattaaattactttgtaaatatgtaataagaatttaatttgtttacattatgaatgaaataacactctttatctaacgaatctaacacggtatatataaatcatcaaattctttcaaaatgataagtctaacaccttaataaattaaagaatatatatagtgaatagtgtgaaactatttcttcattcttacaaatagaatacatcaaatttcaactctgtaaaccaagcaccctgaaaagggtaaaaggccaccaccgccaagaagcacatgcaaacatatcactgatcacgtaacgatgcagatgcaaattaatatatatatcaactacaagcgtgacggataatggttgacagggaaataggaaacaacgattggagctccttttgattttggtttgctctttggtttctctgaagaaggagatttcaattgagatgatcctttggcatagtcagagacttgacttgatgaagatggaacaaagcaattgaagatggatgacatcaaatccataattggtatgtgttttggtaccttccctcggttttcttggtgggtttcagctaaaatatgttttggtggaggctagctatcaattgtagttcctctttctaaggaagcaaagtagtgaaatttgaaattgaagagggaattctgtttatgaatgagtaaactaagctgaaatgatattagtggtcttgacgcgtgggcggacgcgtggg

SEQ ID NO: 89731 - DNA, 357 bp, Glycine max
  Clone ID: PAT_MRT3847_52038C.1
cgataaactccttaagcagatggaggctgcacaggcccaaaaaccattctattatagagaacaccttcatacaggcaaatcaatgaaagtacaagtcaccaagcgtccataggcacaacctgatcgagggtatacatggctaacggatattaatgacacctatcaagaaggatatagatgtgaagagatatgcatcaagaaagaagcgtttgagggagaagagaatgacttgagcaaaatctctaggaacaagaactgattttagcatttgaaagctgcgaaagaacattccagtactactacgttgctgagccaagaagcatgagcaatacactgacgcacgagtgcagaatcttg

SEQ ID NO: 89732 - DNA, 561 bp, Glycine max
  unsure (1)..(561): unsure at all n locations
  Clone ID: PAT_MRT3847_52039C.1
gctctcttcttttctcatcatcctcttcttcatgggaacaaattacttttagctctgcagtcacaacgcataacttcatcaaagcccaacaacacatgcgcgttcacatacccatctattcggtgttgctcaagtttgaaccagaaaaacagcatcaacctcaaaacttgcaagaactgcaaaacccaattcgacccttcactcaatcaccctcatgcttgtcgatttcacacttcccattttggaggagaaactaagagaaagtttgagagtgtgtatgaagggggcacaatgaatactcctgactctggcaaagtttttcagtattggcattgctgtggttctgaagatccattcgatcctggttgcactgcttctcctcattcttcatatgatgattgatgcagatgccattcatcatcatccatgaatctaattcacctcttccatttagttttcttttagctatagtttctaaactcttgtataaaattttagaatccttaaataatttctgaaaatttaaaaatcgtccacattcctcatacaaaanaaaaaaaa

SEQ ID NO: 89733 - DNA, 1310 bp, Glycine max
  Clone ID: PAT_MRT3847_5203C.1
tctatctcttgaaaccacgcgtccgctcaacacaacacaatacaacagtcttattagcagagcacaagaggaggagagagaaaaccaaaaaagcaagagagagaaagagaaatcaggcgtttccgcccacagttgtcctgccgtctttcttggctgtgcgcccccttcaatccctctcttgcgcgatcctcctgggctcgctccttggcctgtgttttccctgcttcccgccagccgctgtattgccggcatgcggttcctggtttcgttgtcgcctcggctgttggcctctatggtgtggggcagaattcggcttctgcatcttcagataagaagggggaacattctctattttttacgggcttattgtggtttgtaaagactgttactaggtggagattccttaatttacactaaggggcaagagaaaagtgagtctaaagatgggctatatatgtgatttatgtggagaccagagatccatggtgtactgccgctctgatgctgcatgcttatgtttgtcttgtgatcggaatgttcattctgctaatgccctctctaggaaaatggtgtttggattgcctttctatagatgcttggcactttctgctgcataattcttttccaagaatttaaaaagccttctaagttctttgaccttaaccatacttccatgtctgtgatgtggtcatgtaaactccccctctgctaaatagtctcctactctaatgcctgagatggcatgataattggcttacttttaacagttccagataaactacgaaggttgtaaattgtaatatttggctttgacatgtatagcacacagtctacatatataattttacccaactcttttatgtaatcagacaaaaattgtaaattcaatctctcatgtatagaataggatactatgcatgttgatggtagtctatatatatattggacatggaccgatacaagtttgtattctggaccagccagctagacctgccaatgaatgtctttcaaagttatactgtcctgctacaaaattccccgcattatgtgaaaatgataatctgtatgatgatttcaacatggatgaagtggatctaaatcttgtgaactatgaagaactttttggtatggccctcagtcattctgaagagctatttgaaaatggtggaattgatagcttgtttgggacaaaagacatgtctgctggagatttcagttgtgaggatgctattgctgctgaggctgtttgcattggaatgtgattcctgggctacactgctgtaatatgaatgcattgcgttattcatata

SEQ ID NO: 89734 - DNA, 295 bp, Glycine max
  Clone ID: PAT_MRT3847_52040C.1
acgcttgcgtacacgcgtaacgaaacacttacggtttgatcatacaaaacgacccaaaggatttctcgggtctagcttacaaactaattcttagacttccagcaattcatatcactttcatcttcatcctttttttattatgatcaaataccaactaataccaaaacttatccttcacaaattaacagccttaaacttcaagtctcaactgcccctattaacaactataataattcgcgacccacgtgtccccatttgaatggataataaccagctccatggtaatacaaaaatt

SEQ ID NO: 89735 - DNA, 473 bp, Glycine max
  Clone ID: PAT_MRT3847_52041C.1
aaaaacaatggcgacattttactttttttccccatctctctctctcaacactgtcttctacacaaagcgctgcggtatctcaaacctccctcctctctcttcctattcccaaaaccctcctctctctcttcacactccgcctcaccttctccatccttaccgaattccaaaacggcccctattccgtcccctcacactacgactttgacctcttaaccatctactcctgtaactacggcttcctagccgctctcttctcttccaactacaactcttacgtccccatctgcgaacttactttctccactatctccttctaaaccaccctaggcattcgctgaacctgtttaataccatgatgtgttccaaataaattgctggtttattcttctaaattttctcattaatcttaagaaaataatggtttttgattgatatattacattgatcccaaacattattggagtaattta

SEQ ID NO: 89736 - DNA, 458 bp, Glycine max
  Clone ID: PAT_MRT3847_52042C.1
tgaagtgttaacagtacttgaagaaagcgctgtggtcatgcaagacattttgccttctgatgcatctcaagatgctcctatggagattgccccccaacatactgcaactttgactgttgtggtggctgatgatgcttttgatcaagatgttgctggctcgcttcctatgtcacctgtcaatgatactccagagaacataaaggaatttgttgagtgcaacactgatgatgatcaaggcatcagtaagggtgacgataaccaagatatgaacgatgaaactgaagatttgaatctggctgatggcaacatggatgatgaagactgccagcatcctcttaatgttgatgaaagtgactcgatgacaggttctgaagaagattctatccaggagcagaagagtactgatattccggttcaattgatcagttgaagggagatgtgcacgaaagtaaaatgat

SEQ ID NO: 89737 - DNA, 490 bp, Glycine max
  Clone ID: PAT_MRT3847_52043C.1
ttattctgcacacaatgatacaagcgaaattgattgccataacagaaatatatatgatacagatttggcttttgaatttcctctgaatactagcagcattgatttattattaactatggccactctttacaacttaccacagataccttaaggaccacgaccaaccatgatgctgcacgaactacattaatttctcaccaagataaaaaaaaatatcaaataaaataaaaataatataccccaattgttgtactctcttggaagccatggtctccaaatagctagcaacacatttggcagaggttgtaacttctaaggttaaggtaaggtccttaattaatttctatgaagctataccataccatatgataccatggtatggcataatattacattaaattgttgcatcatatatggtaggccaaattaattaaattggaacagctcaggagggatagacaaggaaggaaagtatgagttgggtggtaac

SEQ ID NO: 89738 - DNA, 1306 bp, Glycine max
  Clone ID: PAT_MRT3847_52044C.1
ggctcgagctcgagccgctcgagccgctcgagccgattcggctcgagctcaagcctttctctctttctaacaagttacaaataaaagttcccctttttctccggatcaatgaacgatcatctggtgctgttcgtggaccggctggtgcgacccgtgccgattccggtgccgctggcccaacaaccccccgagcccgtgacgcccgtcaatgaggccgcggtggcgggtccctccgggtcgtctccgtctgcggaggacgacggagacgacgacggggaggacgcgccgctgctgcagctggcggagtgtcgcatttgccaagaggaggacagcgtcagcgatttggagaccccctgctcctgcagtggtagtcttaagtatgctcatagaaagtgcgttcagcgttggtgcaatgagaaaggagacataatttgtgagatatgtcataagtcctatgaacctggttatactgccccgccacctcgtcctcagcctgaagaaactaccattgatataggtggaggctggacaatctctggcatgccattggacttgcgtgatacccgactcttagcaattgcagaggctgaacgtcaattcttggaagctgaatacgatgagtatgctgcttccaacgccagtggagctgcattttgccgctcagctgctttaattttaatggcccttttactcttgcggcatgcactttctgtctcagatggtgataattctgatgatgatccatccaattttttctcccttttcttgcttcgtgccgctggatttctattaccttgctacatcatggcttgggcaatcagtattctgcagcgtcggcgacaaagacaagaggctgcagcactagcagcaacccaagttgctttcgttctacaatctgggcagcgtagaggtttacagtttgcaatagcaccaggatcacccactgtaccccaggaacaagtctaataatttgtatgcttttttatttttattttttatgtatgaatgaatattaagaaggctttgttgaaatgccgtgcatttttactctttactttcgcagctgtaacgttatgtacatgtacatactagggggtggtaaaacgatatagtaagtgaatccattggtatccattcaattcacatctatctatgaatgtaactgaatccatccacactatatagtaaaatgctttatatgatgtttgtcgttgtgatatgcattaagtactctgctcccggttgctaacaaaaccccaatgcaaaaataagtgataaaataatggttttgctttattgccttctc

SEQ ID NO: 89739 - DNA, 260 bp, Glycine max
  Clone ID: PAT_MRT3847_52045C.1
ctcctcttttttttttttttttttgtttattgttggtttttttttttttttaacaccttaatttaaagccaattccaaaactggagggattcaggagcccatcaggcagtgaatacaccctcccatacacaaatggaacggggactcactagaaagaggtacaaccgtacccccaaattcaacgagacaaagaaatcactggacatgaccccccgttcaattattgacttaacaaccgcaaatgtatcggcacgtaccac

SEQ ID NO: 89740 - DNA, 443 bp, Glycine max
  Clone ID: PAT_MRT3847_52046C.1
gcgtctactcccttacgtcaaaggcaacgtcggcttcgtcttcaccaacgacgacctcaagaccatccgtgacatgatcgtctccaaccgagtcgccgctcccgctcgtgctggtgccatcgccttgaacgatgtgtccgtccctgctggtaacactggtatggagcccggaaagacctctttcttccaggctttgggtatccccaccaagattgcccgtggtaccattgaaatcaccgctgaggtcaagctgatcaaggccggagacaaggtcggaccgtccgaggcaacgctgctgaacgttcttaacatctcgccgttcacttacgggatgaacgtcgctcaagtcttccaagacggcaacatcttcgagtcctccgtcctggacgtcaccaacgaggatctgctcgcgcgcttcatgagcagcggctcgacgatcacct

SEQ ID NO: 89741 - DNA, 247 bp, Glycine max
  Clone ID: PAT_MRT3847_52047C.1
tggcgtcaaactccgcgaggccgtgtggagcaaggccggtgcacacatcttctcagacggacgccttgactacttgcgcaacccacacctgatccatgctcacagcatccttgctatctgcgctgtacaagatgcgctcatcgagatagatgatggatacagagatggtggaggaccactaggagaaggactcgcaccaatctaccctgacggtgcttatgacactcatgctctggctgatggaccc

SEQ ID NO: 89742 - DNA, 241 bp, Glycine max
  Clone ID: PAT_MRT3847_52048C.1
tagttcacattatatctatagagaatcatgacaacaagcgggggggttatcacacctctgactgcaacactcaactcctctactctcccgagtctaagattcgccgagttgactcatccgattccagtattaactcgtccaagtctcaactctaatctgtcctagactcctctcatgcacacttacaatactacattgctatcatgcttgaccacacccactatttgccctagcgtaactt

SEQ ID NO: 89743 - DNA, 488 bp, Glycine max
  Clone ID: PAT_MRT3847_52049C.1
ctgcttggggggggggggggggggggggggggttaagaaagggagggggcgaggagaagaccaataggaacaatagtgagataacttaatagcaaagaaaatggggattaagagggtgaccaaagaaatagagaccaagcccacaaaaggcaggaactggcaggatataatggccgccagggagggctttgaagtgctaggaaaagcttgggctaggggcgctgtatattgggtgaaaggaaatggtactgcaacctaagccaatttcttgatcagaggtagctgcactttataggccagaaagagtgtgcgataggccagaagctaatagctaagggggtagcaagatgatgctcagggttgctgccccttaagtatttgtggttaatgcacaaggaagcactaatgggctactgtaagcaacacctggacccgtgtgagttcttgcgttactagcaaggacgtttagaacactttagctgcgagcg

SEQ ID NO: 89744 - DNA, 387 bp, Glycine max
  Clone ID: PAT_MRT3847_5204C.1
ccatagaaacctataatcgtacttcttgggagatgtctggtatatagttgtttaagagtatagagtagttagaaaagttatgagaagtagttaggatgcttagtgtgaaaccttaagagaatgtaaagtcgttagtagggcgttgctttgctgaacataaaggggttcaagagtgaatgttcttgtgaaaggtagatcacctaaagaattagtgatgatagttgtatgattagtgaggtagatattagttctctctaccttaattcgagcaaagtctgagggtgcttcgaggaatactttaatacctatcgtgacctctgcgtgtacttggtcatgtcttaacatgatggatgcccctgtgtgttcggtggatgcatggacaggatc

SEQ ID NO: 89745 - DNA, 388 bp, Glycine max
  Clone ID: PAT_MRT3847_52050C.1
ggctcgaggacaaaaaaagtggatgtatataaagcctatcacatgactggtggtgagggcctaactcgcttatgtctataactctctactacagaccatggaccttgcataagctacactcattatcacccacacagaggacgaccgctgccctggcacccctacaaagggcgtaggcgtcgatagctagggctgatcctttgtaccacacaccgaactacatgtcaactgtatttttctggccattcacggtagtggacctatgaatacgcgacgactcacaatgatagggagtgctgcgatgagcttgcaacatatgacgtcaattaccatggcgaggccattgcagctatacaacaattggtatggcaagacatgaaaaacgggt

SEQ ID NO: 89746 - DNA, 2329 bp, Glycine max
  Clone ID: PAT_MRT3847_52051C.1
cccacgcgtccgctctcaggctcaacgtctccactttctgagaagagggccaaattagagttagattattagggtttaaccgttcctccccttccttttcaccataatcaacatcaacctcttccaaatcccaatggatccgaccaagaagcgcaagctcgacgagaacggcttcatcaacaacgactcttccgagcccctcaagctctccccctccgaagcccgcaagctcatcgagcgcttcaccactgaccagctcctcgacatcctccaggacacggtggcgcgccaccccgacgtcctcgctgccgtgcgcgctgtctcagaccccgacgtctcccagcgcaagctcttcatccgcggcctcggctgggacaccaccaccgacggcctccgctcgctcttctccacctacggcgacctcgaggaggccgtcgtcatactcgacaaggccaccggcaagtctaagggctacggcttcgtcaccttccgccacgttgacggcgcgctcctcgccctccgcgagcccagcaagcgcatcgacggccgcgtgaccgtcacgcagctcgccgccgccggaaactctgcgttgaacgccaacgccgtcgacgtggctctccgtaagatctacgtcgccaacgtgccgccagacctccccgcggacaagcttctcgcacacttctccgtctacggtgaaatcgaagaaggaccgttagggtttgataaacagactggaaaatcgaaagggtttgctttgtttgtttacaagtctccagagggggcaaaggctgcgttgatagatccaatgaagactgtggaagggaggcagttgagttgtaagttggcgattactgatgggaagcaagggaagcggtccgggccggactcgggccaggcccatcatgggaatgttcagcacgggcatggggatggtgtgggagcaggaatggggatacctccgaattcggggtcggggtcggggcccgggcagtatggtgggcccgggcattacgggcctacggttgggatgggctcttatggtggttttggtgggcagccaccgatgggcaataataaccatcctctgaattcgtcgaatccggtaccaggttctatggcaggtgctggtggctatggtggtgggatgggtgggccatatggtggatacggtggtgggccgggatcaacgggctttgctggtgctggtgggatgggagcaggaggtggaggtgttgggggcggcgggcttggtggtgctggcggtggttctatgtatagattgccaggctcgggtggaatgcctgctggtggtggaggttatccggatagtggacactatggtttatcagcttcatctgggtaccagaatcagcaccaccctccttctggggcttcacctgtgcctagggttccgcccatgtatcccaacgtgcccccttactactgaagagggtttagtttgttttgctggttgatgacgaaggcctttgcatcatcttcagtgttttggcataagattgttgattgctaatgtggagactggatgagaaacatactgtgtctaacactctttacttgagcccagcattatgtttataatgataaagaaagcttgagagattgatgaacatcttcgcttccttctgcttattgtacacaaatccttttagtgtttagggtttgaaaataaatgcattcttaaatttaacgagatgatgaaattgaaagggcaacctggtgcttttaaactcttgccttgacatgatccaagtgttgcacccattatggatcaaatataggcagccttaacttgcatttgcaagagactgattctagagtcaaacttgtgacccttgatttcatactgaaacaaggctctcctaaatctgagattatatttactcaattttatagtagtttgatcttggatatggattatttatgtattcttttttgttttctcttgattgccccacaatttgtatctggatttcttttttccttttgcttccatcgcttattgggcgcagatgctttgtgtgcctctggtgattgcgtgaattgcagactatgtgctctggtgtagtgtatttgttagactgtacttttacagcctcttgacttcatctgccccctttttaagcattgattcatatggatgttgctagttaaaaccgttgagatagactagttttgtacttttagctggttcttttgggctgatacagcctcctgttttaaattaaatagtcctggattttggtgaattttattagctgttgtatttagtcccattttcctatgcttagtgttcccaaaaatttgttcc

SEQ ID NO: 89747 - DNA, 605 bp, Glycine max
  unsure (1)..(605): unsure at all n locations
  Clone ID: PAT_MRT3847_52052C.1
atcaanccttgccttaaaacaaagtgctttcaagacatgcaaggctctggtaatcgattatcaggcagtgtaatcgattactagaagacagggttgagaaatagctgttgaaaatggttttgaatttgaattttcaacatgtaattgattaccatatgtctataatcgattactagcaatgaaactcctaaaattcaaattcaaaattcatgacccttcaaattataactgtgtaatcgattacacaggcattgtaatcgattaccaatggagagttttcagaaaatctgccaacaatcacatcttttcattggatttgtgaatggtcatcaaaggcctataaataggtgacttgggaatgaattttcatgagagtgttttgctggtccaaaatgtcttatcctctcaaaagaaaaatgagagagattccaagaagaacttcatggtcaaatgctctctcaaatgaaactcttgggcaaacacttgcaaatccattaagagttcatccatggacttcaattgtaatatccttctcttcaagaagagaattgttctttctttcttctcattcaatgagattgattaagggaccgagggtcttttaa

SEQ ID NO: 89748 - DNA, 836 bp, Glycine max
  Clone ID: PAT_MRT3847_52053C.1
accagtcgggactcccattccgactcttatccgccgatctctcagggcttgcatcttctcaggtaagctgtgaagatgtacacatcaaggaagaaaatccacaaggataaggatgctgaaccaactgaatttgaagagtcagttggacaggcattgtttgatctggaaaataccaatcaggagcttaaaagtgatctgaaggatttatacataaactcagccctgcaagttgatgtttctggaaaccgcaaggctgttgttattcatgtcccttacagattaaggaaaggtttccgtaagattcatgttaggcttgtcagggagcttgagaagaagtttagtggcaaggatgtaatcttggttgccacccggaggattttgaggccaccgaagaagggttctgctgctcagcgtcctcgcagccgcactcttactgctgttcatgaagcaatgctggaggatgttgtattgcctgctgagattgttgggaagcgtgtgaggtaccaaattgatggatccaagattatgaaggtagagctattatcaccatttaactcttgttacttgtgttatatggttgagcatttgtctatggaatttcttgacctttacctttgtattagtttttttatgcctacataatttgtatgtaattggttgggcaggtttacttggacccaaaggagcgaaacaacactgagtacaagttggagacttttgctgcagtatacaggaagttatctggaaaagatgttgtgtttgagtatcctgtctcagagtcttagtttcacttttgttagctttgagaatttgttcggagaattgcatatggagta

SEQ ID NO: 89749 - DNA, 571 bp, Glycine max
  Clone ID: PAT_MRT3847_52054C.1
tgcaagaaatggtaatctaattaaacatgttggcatgtaatcttggttgccacccgaaggattttgaggccaccaaagaagggttctgctgctcagcgtcctcgtagtcgcactcttactgctgttcatgaagcaatgctggaggatgttgtattgcctgctgagattgttgggaagcgtgtgaggttccgaattgatggatccaagattatgaaggtagagctattatcgccacttaactcttgttagtcttgctatatggttgagcatttgtctatggaatttgttgtcatttaactttgtattaatttttaatttatgcctactgaattgggcaggtttacttggacccaaaggagcgaaacaacactgagtacaagttggagacttttgctgcagtgtacaggaagctatctggaaaagatgttgtgttcgagtatcctgtctcagaggcttagtttcacttttgttagctttttgaatttgttcggagaattgcatatggagtatgctggttaaaattttggtgacaaattgactttcaatctggaattcgttttctgattttttg

SEQ ID NO: 89750 - DNA, 909 bp, Glycine max
  Clone ID: PAT_MRT3847_52055C.1
ccacgcgtccgtacggctgcgagaagacgacagaaggggactgcgaaccagtagggactcccattccgactcttagccgccgatctctcagggcttgcatcttctcaggtaagctgtgaagatgtacacatcaaggaagaaaatccacaaggataaggatgctgaaccaactgaatttgaagagtcagttggacaggcattgtttgatctggaaaataccaatcaggagcttaaaagtgatctgaaggatttatacataaactcagccgtgcaagttgatgtttctggaaaccgcaaggctgttgttattcatgtcccttacagattaaggaaaggtttccgtaagattcatgttaggcttgtcagggagcttgagaagaagtttagtggcaaggatgtaatcttggttgccacccggaggattttgaggccaccgaagaagggttctgctgctcagcgtcctcgcagccgcactcttactgctgttcatgaagcaatgctggaggatgttgtattgcctgctgagattgttgggaagcgtgtgaggtaccaaattgatggatccaagattatgaaggtttacttggacccaaaggagcgaaacaacactgagtacaagttggagacttttgctgcagtgtacaggaagttatctggaaaagatgttgtgtttgagtatcctgtctcagagtcttagtttcacttttgttagctttgagaatttgttcggagaattgcatatggagtatgctggttaaaattttggtgacaaattgactttcaatctggaattcgttttctgatttttggaagtactatttctggttttttcaatgtagtatttgagctttatttattataaaattaagtttcttttaaaaaaaaaaaaaaaaaaaaaaaaaaaaaaaa

SEQ ID NO: 89751 - DNA, 904 bp, Glycine max
  Clone ID: PAT_MRT3847_52056C.1
cccacgcgtccgtacggctgcgagaagacgacagaaggggatttcactgcgaaaccagcaggggctccaattcctactcttagccgcagatctctcagggcttgcatcttctcaggtaagttgtgaagatgtacacatcaaggaagaaaatccacaaggataaggatgctgaaccaactgagtttgaagagtcagttggacaggcattgtttgatctggaaaataccaaccaggagcttaaaagtgatctgaaggatttatacataaactcagctgtgcaagttgatgtttctgggaaccgcaaggctgttgttattcatgtcccttacagattaaggaaaggtttccgtaagattcatgtcaggcttgtcagggagcttgagaaaaagtttagtggcaaggatgtaatcttggttgccacccgaaggattttgaggccaccaaagaagggttctgctgctcagcgtcctcgtagtcgcactcttactgctgttcatgaagcaatgctggaggatgttgtattgcctgctgagattgttgggaagcgtgtgaggttccgaattgatggatccaagattatgaaggtttacttggacccaaaggagcgaaacaacactgagtacaagttggagacttttgctgcagtgtacaggaagctatctggaaaagatgttgtgttcgagtatcctgtctcagaggcttagtttcacttttgttagctttttgaatttgttcggagaattgcatatggagtatgctggttaaaattttggtgacaaattgactttcaatctggaattcgttttctgatttttggaagtactatttagtatgagctttatttattataaaattaagtttcttttattcgcaaaaaaaaaaaaaaaaaaaaaaaaaaaaaaac

SEQ ID NO: 89752 - DNA, 388 bp, Glycine max
  Clone ID: PAT_MRT3847_52057C.1
agcgttgagccttctccttttgtgtgagttggtttattagtctttaattcttcaatgtgcactgtttgtggtttccaattctcattgaatgtagaatgttttggaatattgaaacccctcttgcctatttagtggttttaatctttttttattttgttctatgttgaaacattggagttgggctggaacagcattgaattttagtttctgcagcagttgacttgttttattgttctgattcagcgttgactctggtttttggtgaattgactgttgaggttttgtagatcatatggatttgatcatttgaatttggttttcatgtttttttaatgaaaaaataataataattaagaaagcttttattttataatttaaaaaaaaaaaa

SEQ ID NO: 89753 - DNA, 400 bp, Glycine max
  Clone ID: PAT_MRT3847_52058C.1
ggctcgaggacaaaagcaggaaaccgaatagtctcctaaatatcatctggatttatgatggtcgtgtctatgtctggtttggaagaccaatatgatctttaccattctaagtcatagttgtggtattattacggtgggtatctaaattaatagagctctgccccagactacgaatgggagaagggagtagctttcactttataagctccaggtcaacgcagagtatattctgactaatgtgatacgattagcaactcatgtccatgaaccattcattataattattcacaatccagtgacgccactctaatgctatgtataactacatgagccttgccaccataatcactctcaccttatgcactgagctagtttgtacaatatctgatgattgcaaact

SEQ ID NO: 89754 - DNA, 371 bp, Glycine max
  Clone ID: PAT_MRT3847_52059C.1
gggcatcataaattcttccggaataagaaaacaaaagtgaccagggaaaacccgaactgacaggtgcccactgcatgaaaacacacatcatattactatgtggtgacatacatgcagttgaaagagtggatatttcaaaggaatcgggcccttcatccgtacataattcttatgccgcaaatggaaccatcccttgttaaatggaactgcttattcacaaattgaatcctacaaaggtggttgccctatctattaggcaaactatcaatgcaaagacccttcttcccaattctagcagagacccaattgcatatcaaaggcgggacaagataagcatatgcaagtcccaccatgtaacacaatgttaccct

SEQ ID NO: 89755 - DNA, 400 bp, Glycine max
  Clone ID: PAT_MRT3847_5205C.1
tcgttcacgcgtacgaccacgcgtgctgactggtgttgctggggtcttccgtgctttcaacatataatgagccggtatcattgggtggcatggtctgtacttagcattgtctgattccgcaataccagttgaccgcaccggctcactgaatgatagcttcattgccaaacactccgtggattggttataaaccaagggtgcatgtcttgtctcatacccaatggacactctcatgttcacgaaagatgatgacctctgcagatgctggcatggacaaaagtaacgggcgcccgtcatgacaaatgctgcagaatgagggggccaatctcttatgttagggcgccgttgcttacattctacgagccgggtatggcggtacccatcttgctgaccacgacac

SEQ ID NO: 89756 - DNA, 211 bp, Glycine max
  unsure (1)..(211): unsure at all n locations
  Clone ID: PAT_MRT3847_52060C.1
ggggggggggggggggggngnnggcgggggcggcccaccaccggggaaataccaatggggggggctgcacgatatcgattcaccctttgctcccacacactccgattctcctagtaaacaacaagtgcnnnaaagttgatataaagatgggaagcaacagaagtnaaaaataaaaattnatgttattgnnntgnaaaagagtataagatag

SEQ ID NO: 89757 - DNA, 430 bp, Glycine max
  Clone ID: PAT_MRT3847_52061C.1
acgaggcgggtttcaaatggcggctgccataggtttaacggtggtggcagaatggcggttatggcagaagaaaggtttttttttaaaattttttttcccaaaatgacagattgggctgtcttgggctgacccgacccaaccctaaacccggtttttggaatcaaaatgggatgagcagcacgcagcacgcaccagcgcgagctccacgcgaactcccgaactcccgaagtcgacgacggcaccacgaactagcacgagcaccatgcgaactcccgaaatctcgaactcccgaagactttcacaagcaacaaatttatgtgtatgtgtgatgtgtgtgctgttcctagtcgattttgaacagcccacgaattgttccagatctgtatttttcttgcaattgctactcttttctgaattcaatgtacagagt

SEQ ID NO: 89758 - DNA, 224 bp, Glycine max
  Clone ID: PAT_MRT3847_52062C.1
gggggggggccaaaagtaacacccaagtttgtgcataaaagggtagggatatgacaagaccttatatacggcaacaaacgaaagagataagaacgggactagcaaaaagagatagcgcaagggtagcagcagtggtagaggcatgtcgcgcatatgctgcagaatgcacgactgccataagtgtaagacggggaatcagaggaggtaacgatgatgcccgcagc

SEQ ID NO: 89759 - DNA, 325 bp, Glycine max
  Clone ID: PAT_MRT3847_52063C.1
atttcgtgaggcactctgacacacgcgcgtcagagccttcttcttgcttcgcaggacaatcactctattgcgattcaagtggattacccattagatcaagcacgtgagacagcggtggagagcttctctcagatactaagattgttacgactggtgaatcgaagtcggctcaagcacatccagactgtgatcaaggcggaccttctctggtcgaccactatgactctgagggaaagcggtagtaccagagacgacagaggttctcgtgatagagactcttcgttacaaccttgtcaatggcaatatgctcacgaggatattgacc

SEQ ID NO: 89760 - DNA, 1403 bp, Glycine max
  Clone ID: PAT_MRT3847_52064C.1
cgaaagattgaaaacaggcttaacaattaatttggatgggttgaaagaccaagacaaaacattgaaaagaatcagagcaaaagaaaagggattctctacgtatcagtgcagcgatggcgttatccctactaatccactgttctcccaccgttaaccctctccgacgatccccaaaacccaccctccgccgcgtcaaccaccgcgtctgcgtggccagcgccgccactcccctcctccaagttaatgacttgagggccaagattgtcgaatccaacgtcgacattctccacggcgtcaacctcaccgtcaaccaaggagaggtccacgccatcatgggaaaaaacggttccggcaaaagcacttttgccaaggttcttgtggggcacccagattatgaagtaaccggaggcagtgttgttttcaaaggtgagaatttgcttgagatggaacctgaagaaaggtctcttgcgggtctcttcatgagttttcaatcccctgttgaaatccccggtgtttccaatgatctatttctcgccatggcctacaatgctcgaatgaaaaaacttggtcgagaagaggttggaccaatcgagtttttaccttacctgatggagaagcttcagcttgttaacatgaaggctgactttctcaataggaatgtgaaccaagggttcagtggcggtgaacgcatgcgcaatgaaatcttgcagctgttgatgttgtgggcagacttggcaattttggatgaaattgattctgctcagaatattcatgctttatgatatctcattatagacggattctggatcttttgaatcctacacatgtccatgttatggacaaagtgtaaattgcatggacaggcgatttattagtagtagtatctattgagtcagatagataaaaattgctatgtcaggcgacatatcgatggtagaagctattgaggctgatggatatgaaacagtcgctgctttaacataataaagctagtatcgatggcagtattgcatgggctggcattcagtagttgcatctaatggaacttacttccgcaaggatgagtttgggaaatttgattgtttcactgctggatgtagttgaataatatctttgtgtgaactggatataatttcattttgattattcaacctgccttagaagttagaacaaagcatgtttctaggcaacaaaattttgtaattttctatggctagaatagcagatgctgaccgtaaggatgtagatgtggtgttgattacaattagtgaagtcgttcttgtatccatctatctaatgttttagcatttttcctgcagtgttaagaatagggaagcatttaacaaccaaatattcttttatttgcctaatgctttataaattcatattgaaaggcctgttcc

SEQ ID NO: 89761 - DNA, 153 bp, Glycine max
  Clone ID: PAT_MRT3847_52065C.1
actctttgtgattctgattcaatccattactataccttccccgaaatgcttctacaaattggttttaatgaacgtgttcctataacacaagaattttttattgaaactgttgctgtcaaacacaatgatcatataccctctgttctctttcct

SEQ ID NO: 89762 - DNA, 268 bp, Glycine max
  Clone ID: PAT_MRT3847_52066C.1
gggggaaaaaaattccaggggtggaaaggcctttggataaccaaaataacatttttgttgatctcaccaaacacctttccaaattttgatcattttattgaatacacgcaccgcttttttaaattgtttattgattgaaaaataaacttacatggaaaataaaatctaacgatttgccccatacattacaatttctttgggtaaaaccgttttataaaaaaagacttaaacctcccctttaaatttactctcccaaagacactgaact

SEQ ID NO: 89763 - DNA, 551 bp, Glycine max
  Clone ID: PAT_MRT3847_52067C.1
catgacttcaacttcaacaaccacctctttctctctcacttcttctcttgctcttatcaaaacaaaccactatgaataatactaacgataataatagttacaacaatacactctagcttctagcctgctacctttccttatcaccagcaccaatggcttcagacgccaaactctcctcttctgagtccctcaacggtttgaaattcggccaaaaaatctattttgaggatgttggtcttgctactccagccacctctcttacttcttcttcttcttcttcttctgctgctactgttacttcttcttcttcttcaaggaaaggaagaggtgggtctgttcaaccagctcaacctcccaggtgtcaagttgaagggtgcaaagtagatctgagtgatgcaaaagcttactattctagacacaaggtctgtggcatgcactctaaatccccttcagtcattgttgctggtcttcaacaaaggttttgtcaacagtgtagcaggtttcatcagcttcctgagtttgatcaaggaaaaagaagttgccgtaggcgg

SEQ ID NO: 89764 - DNA, 234 bp, Glycine max
  unsure (1)..(234): unsure at all n locations
  Clone ID: PAT_MRT3847_52068C.1
aagaanggacggcggctcgagatgatcctctacaactccctcatccttttttttcttttcctcatgatcctctccatcggcacctacaacttccggcggctcttcctctctatcctcatcctcctcactctctatttagtctcccacgattacattaacttcctctgtcacctcaccttcgtcatctccattctcaaacccatctactatctcctctacattaataattcctac

SEQ ID NO: 89765 - DNA, 560 bp, Glycine max
  Clone ID: PAT_MRT3847_52069C.1
cactcgagccgaatcggctcgagctaacggtgtctttcgcgccctcgtaccgcatccgccatccacgccaatgccggatatcaccgtcgatttccgcgctccacctccctctccggtggcttccggccggagttccaccgtcaccaacgacgacgttttgacggagtttttagaggcctcgctccgcgtccccgatcttgtattgcccgacaagatcttccccaaacagaaccacctcgaagcacctcccgaggttgatttcgtctccctctgctttcactgcgacgacgctctccgcgacatcgtttccgactcgctggccagaatcggatgcttccagcttctcaaccacggaattccattacagctcatgaccgcggtcgcggaggccgccgccggaatctttcaagtgccaccagcgaatagagtgtcggccacaaggtcgccggagaagccctgggggttcgaggagtatcacgctggagaggaagaaagcgatgggagtgaagaattcgtgtggtgcaacgaccacgagttgaagtcaaaaatggatggaattt

SEQ ID NO: 89766 - DNA, 1181 bp, Glycine max
  Clone ID: PAT_MRT3847_5206C.1
gaaaacccacgtttttgttttctgtgtgtattttttttatatacaatttctgtattaattcaaagttaatgtttttctgagcatgggactttttatgggggatcaaggcaaagaaaaaattcggcttctgcatcttcagatagggagggggaacttctctatttttcacggcatattgtggtttgtaaagactgttactaggtggagattccttagtttacactaaggggcaagagaaaagtgagtctaaagatgggctatatatgtgatttctgtggagaccagagatccatggtgtactgccgctctgatgctgcatgcttatgtttgtcttgtgatcggaatgttcattctgctaatgccctttctaagcgtcattcacgcacccttttatgtgagagatgcaattcacaacctgcctttgtaaggtgtgttgaagagaaaatttcactttgtcagaattgtgattggttgggtcatggcacctctacatcttcttcaacacaggctcgagaagcaatcaattgctactctggctgcccttcagcggcagaactgtcttcgatatggtcatttgtgttagaaatcgctgccataagtgagtctacatgtgagcaagaactaggcttaatgagtattaatgagaacaagtgtgttggtgttcctccggaagaccagaatgtgtctggttcagatgaagttaccgatctacctgctttgaacaagtctttggttggtgcatctttgatgcctgaatcaagctccgaaccttgtattctggaccagccagctggacctaccaatgaatgtctgccaaagttatactgtcctgctacaaaatgccctgccttatctgaagatgataatctgtatgatgatttcaacatggatgaagtggatctagatcttgagaactatgaagaactttttggtatggccctcagtcattctgaggagctttttgaaaatggtggaattgatagcttgtttgggacaaaaggcatgtctgctggagattccaattgtcaggaagctattgctgctgaggtgctaaactctagctatcttttgtctgtgataatcatggctttttttactaatggagcatcacatgttatgttctgtatacttcatagatgatgttcttgtgtattcacaaatgtgcatttgttttctccttg

SEQ ID NO: 89767 - DNA, 189 bp, Glycine max
  Clone ID: PAT_MRT3847_52070C.1
tgattcatgcattgtactttgaagccgactccaaaatatggtggatggtgaactatactggacgcaattactgttctaataataacgatcatttgtgcaacaatgttattgatcaagaatcaaatcaagtattgggcatttcacaaattcactgtattctgcattgtatctatgtgaaaacctatatat

SEQ ID NO: 89768 - DNA, 310 bp, Glycine max
  Clone ID: PAT_MRT3847_52071C.1
aaactggagcgactctgcatcggttttttgtgtttaatagtgaattttgctatttacaatttaaaatactataaatacccggggtttgtcctttcttttgtgatttattgacttgttgctgttgtaaaaagaacgattgatgaactgtggatatggtgatctggtcgtgataagaaaatttctgctgcttctttgctgatgatgatcagaaaaaattttttttctacctaaattcttattcaaatttattggaagcttgacttaatcccatgtaaaatgtccaagagttcacttaaaatatttgatttta

SEQ ID NO: 89769 - DNA, 148 bp, Glycine max
  Clone ID: PAT_MRT3847_52072C.1
caccgctccccattcactccattcacgtttcaatgagtttgtgttgctctctccgttctatactaaagaaatctcaaaaccccattttcagaaatcatgcagaagcatacacataagcacttcttctcatcatccttttcttatcaga

SEQ ID NO: 89770 - DNA, 263 bp, Glycine max
  Clone ID: PAT_MRT3847_52073C.1
cttttcccaatactcattatcatcaccatatctgggtgtcaatgctacaaaaatttcaaattattttgagagaaaacacgtcagcttagaaaccaaatccaatattagacaaacctgttgtatgccacaaatcacaatccaatccctaattttgtatcttgcaaagcccccaacccccacacacacaaaaaaaggggaaagtcacttaaattaaaaccctgagaatgtgaaaattttgaaactcgcatcaaccgactctgacc

SEQ ID NO: 89771 - DNA, 219 bp, Glycine max
  Clone ID: PAT_MRT3847_52074C.1
cctacgcgtccggggactggcggggttattcggacgacggctatgctgaaactggagaatcgttttgcttgcgcgaaccttatgtgctgaccacgaaaggttctgttcgactccaatgaagcattcgtcatctacatggctctaactcgacactatatcacagccaccaggcaacatgacgatattacatatgatgataaatcacacatagacaaacgt

SEQ ID NO: 89772 - DNA, 480 bp, Glycine max
  Clone ID: PAT_MRT3847_52075C.1
aacaaattacatccgtttcttccaagatttttataataattaattaattacttcaaagccatgcttaagatatttataattaactgataggatatttataaaaaaaaattgatcgtacaattttttacactattttgattattatgaatattaaattgaataaatattcattttcgttttcaaatttattagacgtcgtctccggagaaaaaataaaaaatttatatctaaatttgtaaaaaatatgacaaatgagttgaacgagatcgctagaaacgttgccgccagacgctaagagagattaagcgtggtgtcaagagcgaggaagttgcgggtggccctaaccaacgacggtggctctggtttcgatggttttgcggcgatacaacaatgagaaaaggaatggtcgtctttgccagtcgtcccgacgcgtatgttgcaaatggaggtgatggcttggtggtaccaagatgattgttg

SEQ ID NO: 89773 - DNA, 109 bp, Glycine max
  Clone ID: PAT_MRT3847_52076C.1
ctcacttattattacatcaaggataaggctaattcatcattgtttggtgctcagaaaaagtaagaagacatttgtcgattgttatccctttctttaagtcctccctgtt

SEQ ID NO: 89774 - DNA, 1885 bp, Glycine max
  unsure (1)..(1885): unsure at all n locations
  Clone ID: PAT_MRT3847_52077C.1
ggaaatctaacatccccgttcgatctgacggagctcgacctctctctcgcgcggacgcgttgctgtagctcgctcactctcagactctcgcgcaacccccctctcgtggacgcgttgttgcagatcctcgttcgttctcgctctctcgcgtgagtttttgaatttgttggtctatgtgcaggaccagccccgaactcctgctcaatccccatcgatttatccctggaagaaagtaaacaaaatcctgtagaatagctctttgtggcttttaaattgaatcgaggatgggagacgaagcaagtgaagagcatcaaaggtcgctagcagctcctttcatatttttcgtggttctcgcatttcagtttgcttctcattggattgatcactttaagaagagtggatctgaaagagaaaaagaaactaagatgcgtggagaaataaaagagcttttgaaggaggctagctcactgtcacatccatcaacactttgcacaagccagcgaaacctcaagagactggcagctgcaaaggagagggaactggcaaagtgtcaaaatttacatcacaaggatgatgctttgtattcaaaagttctgctcatctcaaaggttttaacatatttaattctgcttatctggttttggagtgttcctgtctctagcatatctcaacaacttgtgcaaccatttgggagattattatcttggaggactggaggggttcaaaatagcaatattatggttgggataataccttggctgatagtgtctaccagggttagcagatttatttgtagactcacctatggcaaatagattgtcatgatattcaattcttcatctagaatgacataaaattgctagctgcttgggttggtatcctgcatttaaagtggaagggacatatgaagcatcttgaaattcgttctttcgctccatgtctggttgataagtttttagagtttcattttattttagtacagacgtgtaagatccattctgcatatgcaagcaaaatttcatgcttgtaatatgatagcattaagtctcttacaacctccaccctcagtttgggtctttattaagttgcgttggacccgattgaaagtgaggcaggttccttatcttgttggctttgactcaaaagctgtgtgtggcatcagaaaatgaacagtttatcaatggcacttctccacccaaatcttcttcccactttcaattccaacactcttacctttccttccatcaaactcaaaccctcactctcgcacgtgccttctccaacccccacacgcttcagtctctctgtttccgcggcggaaaccaccgcttttgccgcccctcccactccccaacctgagaagcttggagttgtagttaagccaacggagaagccgagacttgtgttgaagttcatatggatggagaagaacattggaattgcgcttgaccagatggtaccgggccatggcaccattcctctgagcccatattacttttggccccgaaaagatgcctgggaagagctcaaggagttgcttgagaacaagccttggatctctcagaagcagatgattattcttctcaatcaggccactgatatcatcaatttgtggcaacagagtggtggcaacttatcctgaactcattcatgtgccaacatatttcaatgatgtttttccttttcatgttatgtttttctcttgtactgcattttcggctgtgctcttcctctttctatgtatgcctggcatgtgcttgattattattactatcaactaatccataaattctttctcgtgattcaaaaaaaaaaaaatttttctctgtcatattttatatcactgactaatgtttgattgctttctcgtgattcanaaaaaaaa

SEQ ID NO: 89775 - DNA, 605 bp, Glycine max
  Clone ID: PAT_MRT3847_52078C.1
tcatatagatgcaaagatacaacaaaatcacattcgtgctcattcacttctagttcagagcgctgaagaaacttttcaaagccgttagtcacattctcaatcatcataactagcattttttttttttctgttcctttaaatacaagcaaattagtgcttacagcacaagctaactaaatttttcagtaaaacttgtacatatattggtaaatctctttttggagggggggctctcctaatccatttgcaagtccctgataaaactacgcattacaaagtacaaactgaagctactgcatcttaacaaacgaacttctagtaatacatttattccacagcattatggcagttcatggaatggaatcctaacttcgtgaaggaaaatctttgctctattggcagaaatctcatcgaggagattgcaggatcgagcttaattttcacctgggccacatctaatgcaaccaaagaggacagcatggactatggcggctgcattgatggaaacaagaaatgagcttaagcagctgcttttacaggatttgtctcctctaaagtaaaatgtgtacttttaaaaaataaagtacaaagttataacttacatc

SEQ ID NO: 89776 - DNA, 387 bp, Glycine max
  unsure (1)..(387): unsure at all n locations
  Clone ID: PAT_MRT3847_52079C.1
aggataaatagaaatgaccaaatttgctaaaagcacatgactgggcactgagctttcatgtcttgtttgattggcctcccctaacataccaaacaaagcctaaaggggctcattccatagaagaaagctattattttgtctagccatcactggactggcaaggttcgaaacaaaaggcggtggagacaacaaaactacactgtcttggatgggagcgtgagcccatacagatcttacaagtggagtggcttgaattcaacctaatatcttcacaattgcattggggaggcactggncgtcgtgccatgctcagatcacagcatgggtttgaatactcattatcatcataactagaggactgttcactttagaagaagctcaattcca

SEQ ID NO: 89777 - DNA, 843 bp, Glycine max
  Clone ID: PAT_MRT3847_5207C.1
caccatttgcattattcttctcttcttttcttttatatctgatctacatttatctatattctcttctcttctcgtccgaccttctcaacagtcttattagcagagagcacaagagaggacagggaaaacagaaaaaaaaagtaagagagagaaagagaaatctgggtgatttctgttgttctcttgaaagagttcagctgcttctactatttctacttctagggctttctttgttttgctttgcttaaaagttttgcataaaaataaataaatatttttctttttcttcttcttctgaaaaagcaaatcccttttgcttaccgatcttgttctcattgtcttccttgccgtgagaattcggcttctgcatcttcagataagaagggggaacttctctattttttgcggcatatcgtggtttgtaaagactgtttctaggtggagattcattaattgacactaaggtgcaagagaaaagtgagtctaaagatgggttatatatgtgatttttgtggagaccagagatccatggtgtactgccgctctgacgctgcatgcttatgtttgtcttgtgatcggaatgttcattctgctaatgccctttctaagcgtcattcacgcacccttttatgcgagagatgcaattcacaacctgcctttgtaaggtgtgttgaagagaagatttcactttgtcagaattgcgactggttgggtcatggcacctctacatcttcttcacacataagagacaagcaatcaattgctactctggctgcccttcagcggcagaactgtcttcgatatggtcattttgtgttagaaatcgctgccataagtgagtct

SEQ ID NO: 89778 - DNA, 222 bp, Glycine max
  Clone ID: PAT_MRT3847_52080C.1
cctttgtccactcttcttctcttgcggctagggctttagcgccatggctgctaaattttctgtacaactgctccgctcacgttcatcctcggaatctgggcagtatctatttcgacactggctaatccactatcagtggtcacctcacttacaagctttgaggctgcgacaagcgtgggacatcgaggtatgagttgggcgctcccgagatccacaagaagt

SEQ ID NO: 89779 - DNA, 723 bp, Glycine max
  Clone ID: PAT_MRT3847_52081C.1
taccaacacacacttttttatttagtggaaaatttcattgaaacacctcacaaacatgccttttgaatcatcagccaagtctagtcaatctccccctgctgaaggcgacaagcacaagcatttggacagggaaattagggagatggtatctgccatcactcaccgtgtaactgattttcacaaagctggctccacccaccatttggagaaagagcatgaagatgacacgaggatcattaccctcacaggaaccaatgatggagcaacactgcgaagcgaattggatgaaaaatcgggcaaaacttctcatggtgagtctgaagaattgagcacctttgttaacagcaactttcaggccatcaacaactccatcatgtttggtggaagttaccaagccaatgaccctggggtgcatttggatatctctgatttcactgatgaccaacctcctcagagccaaaaacacaaggttgagaagctagggaagaagggaaagaaagagaaagaaggttccctaagtgatcatcaatttggcttttaatagaaaatggtacctgcataaaagagtgccgcggaataaacatcttgtgtcaatattaaactactggtccatgtatgtttgaataaccttgtttttctgatatgtttttgaattatatattttgtgtgttttttgtttgtgggttgtgaatcaatcatattggagtatagttatcgttataa

SEQ ID NO: 89780 - DNA, 421 bp, Glycine max
  Clone ID: PAT_MRT3847_52082C.1
ccaaaaaaaggttaaagcctaaaaatttgggggggggggggacccccccaaaaaaatgccccttttaaaaaaacggggggggcccccacaaaaaccggggggggaaacccccaaaaaacaaaaccccttcccggggggggacatttaaaccccgaaaaatccccgggggaaaagggcccattttgaaaaaaaaccttggtttttttaaccccgggtaaaatttagggggcccgttttggggaaaaaattccttggcccccaaacctttaaattttgtcccaaaaaaatttcccgggggctaaagggggggggtcccccccccccaaggaggttttttttttcccccccaaaccctggggggaaattggggggaaccccaccctccggaaaaacggaaaaaaattggttttggggggctttg

SEQ ID NO: 89781 - DNA, 1105 bp, Glycine max
  unsure (1)..(1105): unsure at all n locations
  Clone ID: PAT_MRT3847_52083C.1
nnnnnnnnnnnnggnnnnnngnaacgcgtccgattttattgcaagcatttttttattgataagaaaaaaaattagggataaaatttctgcaaaaataaaagttaggtgtaaaatttctctcttcatgtgcccaaactcatccaactattggaagaataaagaactgaagcaagcttagatttctcagtctattagcccaactgaacacaattaaggcttaatttgattttgtcggagtgcagtttattaaattgacctgttagttcaattaaggggacctagataaagttggcttcctacagcaaaaatggcacattctaacaacagttgttcattatctgaaaccgaatatgagatggtgaaacacatcatcgacattccagacctagaggagctaaggttgtcggagtgcagcatctacaaggttccttacaatctccgaaaagtgaacgaggaagcctacacccctcagtggatctcaataggcccaattcacctcgacaagcaagaactcaatccaatgcaagagcacaagaaaaggtatttccactgtttctgggagcgtgtctccaacgaacaagccatgaggaacttcaaacaccacctcgaaacgaaagaagaccacattcgacattgctacgccgacaaattccccgacatacccaaagagaagttcgtggacatgttgctgttggatgctgtgttcatcatggagctcttgctgagaaactgtgagtggaaatcaaacagtttcaagcatgagcatgagtacaagcataccaaatcgtttcgagtgcgacacagcgacgatctcatcttgacacagtcatggctcagcaggaacatcactagggacatgatccttatagagaatcaaatacccttttttgtgctgcagaaactctatgatgaatgttgntccctggtgacaacaagaaggaggaacacactgcagggtttggttgatcttgctattgagtactttgctttctatgacacccaaatgtcttcttctgatgaaaccaaacgtgttcttgacaagaaccagtcgaggaanactacttcagtggcgctattcgaagtccaagaacctttacataagtcc

SEQ ID NO: 89782 - DNA, 552 bp, Glycine max
  Clone ID: PAT_MRT3847_52084C.1
ttgctcacactagccaatacataccaagcacatgcatggagaaaggtggcacctattgaagagaaacctgaaactccaatcagtttctgcaacgaacaggaacttgaattaagttgggttgctgcaacatgacacatgctaacaacacttctggtgcttcactatctgaaaccgaatatgagatggtgaaacacatcatcgacattccagaccttgaggagctaaggttgtcggagtgcagcatctacaaggttccttacaatctccgaaaggtgaacgaggaagcctacacccctcagtggatctcaataggcccaattcacctcaacaaacaagaactcaagccaatgcaagagcacaagaaaaggtacttccactgcttctgggagcgtgtctcaaacgaacaagccatgaagagcttcaaacgccacctcgaaatgaaagaagaccatattcgacgatgctacgcggacaaattctcctatataccgaaggagaagttcgtggacatgatgttggtggatgctgtgttcatcatggagctcttgctga

SEQ ID NO: 89783 - DNA, 342 bp, Glycine max
  Clone ID: PAT_MRT3847_52085C.1
gttcaggctcatatggaaacacatgtgactaaatcgcctctcgatgatgtcgaaactcctaatggttccatgtggcatctgcaaatctctcaatctaaaattgcgcttaccaagaacacagttggaggaaccattctgcgtcgtgatctattggcaaattttttgacacgagggcaattttagagcaagtgttgatctgcagcgcactcatcggattaaaccaatgattaaactggtggccacaattaggattcctgagaatacaagtatatcattggcctgtgctatgaatagttcttttatggagcacgccaattctgatatcaacaccatatgctctca

SEQ ID NO: 89784 - DNA, 280 bp, Glycine max
  Clone ID: PAT_MRT3847_52086C.1
tggctcgagcgaaccacgttttatgtttttgctgagaaccggataaagtcctggttctaagctgactatggcatgttcagattctgcattgtttacacagaactcgggtggagaaaagggtcagaacagaataaacctattgaaaattggctagcagacggttgacagacaaaaacagccatggatgctatttcttgcacatagggtacttggttattcttttgcagggttctatgctgcactagggtcattggtagaaccaatgagcagggaggagctg

SEQ ID NO: 89785 - DNA, 462 bp, Glycine max
  Clone ID: PAT_MRT3847_52087C.1
cagaaaccatgcagctgagcagaagtcatctgagacgattaaacaggagaatgcccgtttctgtcaaccaacttccaaagatgtgaaatattttcaggatcgatcctcatttccacattatcatcatgatctacccccaaagcagtgacagactcttgattatcctcatcatcttcctgttcttctccattcatctgatagtccaggtcatccaaatcatctgaagaattggtctcatcccaggaactacgggcagaaccatccaagttagaatcctcatttgaatcttcttcaaaggcagcggccacaagttgcggagcagcactaaggtttttgcttaatttcagagaagatgaagactgtacatttagaagctcacattttatctgcttctgaattttaccaaaagtaatagtttgtccagtgtataactctacgaacctaactgcatcttcttcacgc

SEQ ID NO: 89786 - DNA, 204 bp, Glycine max
  Clone ID: PAT_MRT3847_52088C.1
agcaaagtctggcttgccacgcgtccttattcttactctcgctaccgctgtgatttgttctgtgctacactgccaacaacaacagcacatacaaacaagccatgaaacctttcgtggctgcagctgtgtagctgatgccgatggtggtggaggtggctgctgatgccaagtgcgtggcgtataagagcagtctatcagagatgt

SEQ ID NO: 89787 - DNA, 315 bp, Glycine max
  Clone ID: PAT_MRT3847_52089C.1
gactgcggttgcattgagttgcgctgcgactgcctcctgttgttcgtatttatttcatttacaccggcgtagtctccggcgtagagagcgatgtcttacgtcgaaacagatatggcgtcactctcgtgggcggcgcaggaccctatatttcctgcttcttaaaggcctgacagccttcctgagagaggtctacgcctttttcctctacttcctgctattcggactcacccgccgccggcggctattctccgcgggggggccgtcctttccggatattcgttttagggggcatttctttgcgcgcgaggaggggga

SEQ ID NO: 89788 - DNA, 251 bp, Glycine max
  Clone ID: PAT_MRT3847_5208C.1
cacagacatccacagcaatacgctgacccaggaacccaggttccaccagtatacccacggtgcgaagcacaccgacgaatgacccgaccctgttcatgctgctagtgtcacctatgtagccaccagaactgctgctggtggttacagtgctgacattaatccgcaccatgataccaccaatgcctacggcgcagacactggtagaccgcattctagtggtggctacgatggtgacactaataaacatcatg

SEQ ID NO: 89789 - DNA, 817 bp, Glycine max
  Clone ID: PAT_MRT3847_52090C.1
gtaagctcggaattcggctcgagagacgacagaagggggaggaagagaatcgcaagcgtgaaggtgaaaaggttctatttgcagttgaaaacacacagaatattggttccgcactgaaaaatttgcatcttaattgtaaagctaccgagttacttaagttagaggaagagaaaacaaaactgcaagcagagatgaagatctctctagaaaaactcggggttataagaaaggaactggggaatctaaacaagaaggaggcaaatgtagagagccagatacaagctgttcaactggaaataaagcaacgtttgaggaacacagaggagaaggagcttgcacttcaacgtgtgatgaaagaaaaagggatgctcttggagtttagagataatggtatgttggaaatagagcatatgatcattgaactccagcaatatgtgtttgactatgatctaaaggaggctgaaataaacattcttggagaagaattgcaaatagatttgataagagccgaagagttacaaacagccaggatcattgctgccaacaacaagaacaatgtcctttcttctatttcttattcgggcatgtttgggaagctgaaggaggagatgcaaaatctgcgggcaacaattttcgatacaaaattgttgctggaaggcatttcccatgctacctaaattgtcgctttctgtaattaattctccatttgtgtattgtagcatgttttgtttaatttccattttggttctgcttgagaaccagattgaaatttttgttctaacacttattttggagaatgaatatatattgtctttcc

SEQ ID NO: 89790 - DNA, 169 bp, Glycine max
  Clone ID: PAT_MRT3847_52091C.1
cttctttctgcttcgtcgttcactttagaatccataaacagtctaaaaaagaataataataaacagtgaagttaccaagattctgttgagaagaagagcaatgccgtccatcgattccgattcgccgatgatgatcttacattgcgacgctggttacatactcgaagac

SEQ ID NO: 89791 - DNA, 411 bp, Glycine max
  Clone ID: PAT_MRT3847_52092C.1
cttcctttttttttttttttttttttcattttttggggccaaaattctgataaaatttccattggattaaaacggtatccttgggtaaccaaaaaataaattgtgagtaaaaggggacaaggaaacaaaaaaacagtttaagttttgctgagatgaccttagacctttgaatgaagtagttgtagtcatggaacacgcaaattatttttccacaccttgcaagacatccattgatggggggggtttacttgacaccaattttaagcttgaggctttataaacttgagtggcttcgcaccttcccaggggaaggcagggtgcttccttccagagggtccattagcagctgctttgagggacctattggcccccctcttaagggccaagttaatggtgaacattccaggtttg

SEQ ID NO: 89792 - DNA, 410 bp, Glycine max
  Clone ID: PAT_MRT3847_52093C.1
aaaaaaattaaactacccttttttacattggattggaattttaaaaaaaccccttaatttccgaacggggggggacccaacattttccatttttaaggaacaaacccaaagcaaagcctccaaaattttactttttcaacccttcccaaggggggcataaaaaaaaaatttttttttttttacaccccctcaaaaaagggttttttaaacggcccacgaagggggggcctgaaaaactcaccctaatgggtttgatcattatatcaacggggcaaataaaaacctccggagcttttcccctttgaaaacgggaattgcccgtgtttttttcttttttccccccgcctttaaaacaaacccccacgccttgtttttgggggaccggggaatcccccaaaaaggggttcccc

SEQ ID NO: 89793 - DNA, 364 bp, Glycine max
  Clone ID: PAT_MRT3847_52094C.1
ggctcgagctcattccacttttttctattttcattgcatgggatctaccctctctcgcattaaacaatatctcatccttcagatttatgcctgtcgttgacacaatctcaattcaggggcaattcaatctcacactactctgccattaccggcattttcaagtcggacaaatcaacgctagtgctcgagaggagaagatggaattgttaaccatctcaaaatttaatagaagcattgggggagaacaaaaaggatgaaatcatacacaaagcctgaggatctctttggctcaacgttggagagggatgcctcaaagagagagaaagaagggttctttggcgtatctcaatgtgcatgatcttac

SEQ ID NO: 89794 - DNA, 419 bp, Glycine max
  Clone ID: PAT_MRT3847_52095C.1
atttttcctacacacacttcaatacatacttaaggtcatcattaagggctacattaactgccacgtgagctgccaacaggactgccaacacgaataccttggcccctaagtttggtgacaaggtcaatggctagctacatggtgatcacaatattgaccatgcctcccattctaccgcgctttccaaggtgctgtcacagttagggccattgaccagcaaatctaacacacaatgtgaaagacaatgagcacgtctcaaaacacatcatggttccaacactggatgccacgcacatggccatgggcgagttcaaaggagactcaagagagggctcctgagaagcatgctggatagcatataaggtcactcctgcggtgacagcagcagcagcaggagcgacagcgagagttgccacaag

SEQ ID NO: 89795 - DNA, 272 bp, Glycine max
  unsure (1)..(272): unsure at all n locations
  Clone ID: PAT_MRT3847_52096C.1
attattgtgttagtcagaccgnggngagagcacctatcagaaaggagtgaaagatataggtacaactgaactgtttaatgaggaggatagagttatataatgtgggaaggctaggttattaaaaatttgaaagtgtacgtgctctgattgttttgtatgtgttgttgataagacacatgatgactagataacaaaaagcacaaaggctgaagaaagggtggtagaagcaatggttctggagaacgcatgttctattgaagaaaaaattaaat

SEQ ID NO: 89796 - DNA, 441 bp, Glycine max
  Clone ID: PAT_MRT3847_52097C.1
ggctctaggaaattttatgtagtgcaattgggttttttaatagtcctgaatatttggtggggtattgggcttctttgaacaagttgaagtttgatttggggaatttaaggtttggggagaggtttatgtttttggatttgtcttgtaagtgcgtgtttgggaaggttcctaacagtgttgatgggcttgagaagttgaatgtttcctataaccatgtttgtggtcagtcttccaagaataagttttcggcatgtgcttttgttggaaatgattgtctctgtggttttcctttgctcaccctgcaacatagcatttgtgtatttagctttgttgctgatgatttcaagtgtttaatttccctttactgctgagttttgcaactaattatgtcttttaataagttaattgttattttaactttaatatttactatatatatta

SEQ ID NO: 89797 - DNA, 291 bp, Glycine max
  Clone ID: PAT_MRT3847_52098C.1
gagcatggataccgtacacgccagtacattcagtgcggcatcaacacctcagcatcacatgcttggtccagtgagtctgagactcgaggcatgtcatacattcgatctgaacacatctgactgagtgatacaagcacgggaactcaatctgtgctctaggaataggcactgcaagtactgtggctcagcactcgcagttgcatgctacagctccaaacgccagctacattagcggagcacgtcattgctttgcttgacaagtcatatcgtcatgagcactagataaacatg

SEQ ID NO: 89798 - DNA, 599 bp, Glycine max
  Clone ID: PAT_MRT3847_52099C.1
ggatacattaaccatgcccccacctcttatgggttagcgttttgaacctacttaagttaggattaggcgtcgattacttatttaaaacaaacaataaaatactgtgaatttcaaaggatactaggctgtcttgcagcgacgttctccgctggcccagcgtcgggaaggggtgactaatgtgccatcattttcttctattttctaaaccctttttgcaccattttaattactgattggtcttaattgtcaattaatcaggcagttttattatttgggctcatttagctaatttgatgtttttaatctaatttcaggaattaatgaaacattgagcttaatccggattttggttatggacttgaagagggcaaataacgcagcgcttaccttagttaatttctaattaggaaatttcgcaattttattttatgttgttcagtgtttattttgttttgggccagagtattgtaatagggcctagtgacattgagcgactctttttaaatagcagccttgggattcgtggaaggcgattctgttatgctattcattattcagagcttttgttttagcccttctgtcgtcttctcgcagccgta

SEQ ID NO: 89799 - DNA, 255 bp, Glycine max
  Clone ID: PAT_MRT3847_5209C.1
ttcaaaaccctgttctcatggcttttggagaagttaacatagttgaattaagggatccagtagctgttgtcaatcatgaacctccacctcatgtacctactacaaaacctgaaaatggaccttattgtcagccaaatgggtttggcaatgtagaagtagacaggaaaagtgcactaaatgaaggccaaaatagcaatgctacattaggcaagaataatttcgatttagagtcctcgtgcacacagactagtttag

SEQ ID NO: 89800 - DNA, 495 bp, Glycine max
  Clone ID: PAT_MRT3847_520C.1
ctggattacgcggttatggatccaaagacggagcataaaagtttcgtcaccggcgacggggttgttgcgaagcacagcaacttctagccgttcacctacggttacgagtacaacactactgtttcacagacacaggctgatatgagccagagtgtatcttctccgtcttcgatagaagttgcagttgtgccggacggtaacacgatgtctgagatatctaactgcagctacagcaaagtggctcctgtgacggagacggtgcaattctagattgcggataaggatgctggagtgctgaggtacagggagatgatgaagaacctgaagttcgagaagaccattcgttacgcatcgagactagcgtatgccgaaacgaggctatgaatgagaggaaggtttgcgaatcgcactgtagcggaccctctggctggatacggtgtcgatgcgtggggttgatgatcatcatatatatcatatatgagtatgaatgcttac

SEQ ID NO: 89801 - DNA, 405 bp, Glycine max
  Clone ID: PAT_MRT3847_52100C.1
atttgttctaagttcagatgctagtttacattctactgaagatacaagagggaaaccttactcaacatttgaggctgctgatgctgaaaaagaactagatatgcttttagattcatttggtgagaccaacattctagattcttcgggctttaagtccaacacctcgattccagtttcatcgggagtagcttctgtgtatcctcctcacatttcaaataaagatccagttccatccaaaactgcaccaattactgctagtctagatgatgtacttgatgacttgctggaaggaacatccacgttgacgaatccaaatgttttattacgaccgcaggaagaaaaacccgtccatcacagcatgcaatcttcttcaaattctggtagcaagtccaaagtggctgatga

SEQ ID NO: 89802 - DNA, 1000 bp, Glycine max
  Clone ID: PAT_MRT3847_52101C.1
aattcggctcgaggaaattgctgtaaagactctatcaaggagctcatggcaaggagtgacagagttcataaatgaagtaaaattaattgcaaaacttcagcatcggaatcttgtaaaactccttggttgttgcattcaaggacaagagaaaatgctaatttatgagtacatggcaaacggcagcctggactccttcatttttgatgataaaaaaagaaaattgctaaagtggcctcaacaattccacataatctgtggaattgcaagggggcttatgtatcttcatcaagattcccgactgaggattattcatagagatctgaaagcaagtaatgttctactcgatgaaaattctagtccaaaaatatcagattttggaatggccagaacttttggtggagaccaatttgaaggaaacacaagtagagtagttgggacctgtgggtatatggcaccggagtatgctgttgatgggtcattttctgtgaaatctgatgtctttagctttggcattttagtgttggagattgtatgtggcaagagaaataaaggactttatcagacagataagagtcttaacctcgttggtcatgcatggacattatggaaagagggaagggcactagatttgattgatgactcaaacatgaaggagtcgtgcgttatatccgaagtattacgttgcatccatgttggccttttgtgtgtgcagcagtacccagaagataggcctacaatggcatctgtgattctgatgttggagagtcacatggaattggttgagcctaaagaacatggcttcatttcgagaaattttttaggtgaaggagatttacgctcaaatcggaaagacacaagttcaagcaacgatgtgacaattaccttgttagaagcgcgataaaactcatgaaatcttagttggacataaaccaaaatgtagatatacaaggatatacatttaagaatttaaatacaaaagttgattaatttatgacaaaaa

SEQ ID NO: 89803 - DNA, 279 bp, Glycine max
  Clone ID: PAT_MRT3847_52102C.1
tcggatcgagcctcgtttttttttttgaattataaaattgtaatttaataatatcgctggcccctgcaaaaaatgccatcttctgataaatacatctcccacacaatacacaattaactctcaagcactcttatcaggaccaacataacaaaccccattgggaataggggtggaaatagcttttttatttcccctagatataatgttaaataataagaccccgacctataaaatccacgggctacatccgtgagcaataataataatttaggtatatcc

SEQ ID NO: 89804 - DNA, 1401 bp, Glycine max
  Clone ID: PAT_MRT3847_52103C.1
ttaggaacaaaacaacatctttcagcctccacttttggtaccttttcccgaacgaaattgtcgacaatatcgagtgacaaaagcagctcaaagaaatcaattaacacaatcgaagaatacaagtgatgtcttcctttgttcaagtcaaaggataaataaaactagtgagccggtttggcaaattttgttctatttatacaagcaattacccaactcatctttttaaataactaatctgctaacgaattttgttctatttatacaagcaattattacaatcatattacccttccactcaccaacaaaatgcttaaatctatttggaaaaattatgtgccttatgcttcatgaggttaaaaaaacattttggttgaaagcttgcaaagtgctcacaaaaatgggaaagaaagaaaacattatgaatggctaagttttctcagttttcatcgtccttcacaaagatcttcagagaaaaccacagtcctagaaatgttgtcattgtcaaaggcacttaaaccagagtaaggacctgaagagaacattgaagatgttccatcaaattcaaaagtgctagaggactgtcgtaggttgggtcgtgcattggatgaggctaacacagaatcttggtattctgtgacgcgctgcaccattttaagtgactgtaccacttcacccattgtgggtcgttggtttgcttctagagcaacacaggctgcagcaatagtgcaaacacgtacaaaatcttcctttggatactttccaccaagtcttggatcagcaatctcttccaaccggtccttatctctaaggattggcctagcccaagtaacaagattctcttgtccagttggctgtgacatatccacaggcttcctgccagtaagcagttccagcaagacaacaccatagctataaacgtcacttttaacaagtaggtgtccagtcatggcatattcaggagcaacgtacccaaatgtccccatgacacgagtagacaaataattagatctgccttcaggtgcttgcttagcaagaccaaaatctgcaaccttagcatgaaaattgttctcaagcaatatgttggatgccttgaagtctctatgtattacacagggctgtgagtcttcatgcaggtatgaaagtccccttgcagcatcaagcgcaatcttcattctggtgtcccaatccaaaggtcttctcgcagccgtgggaccatgaagccaagcctccaaacttccattagggacaagctcatagcaaagtaaattttgtgatgagtcacgattaatgaagtatcccactagttttacaaggttacgatgatgcaaccggctaagcatctcaacctcaaccaaaaactctttgtcaccaagttgccctccactggtaagccctcgagcc

SEQ ID NO: 89805 - DNA, 268 bp, Glycine max
  Clone ID: PAT_MRT3847_52104C.1
cctccgaagacctagggtggcaatattccaattcttgtacttattggcctcagctcaagatatgcaagtgatttcatccgaaaatcagaaaatgacttaatatttccccaagattgaatgatcttcagccgataaaggtaatgccatgttgccacccaactctttcctactgagggaggaaaccttgggagccttaaccaagcatccctgccaaaccagctaccatactggatgcaccagattcaaagcataagactaaaggcagatg

SEQ ID NO: 89806 - DNA, 810 bp, Glycine max
  Clone ID: PAT_MRT3847_52105C.1
ctaaaagaaatcaagcaacccaatcgaagaatacaggtgatatcttcctttgttcaagacaagaataaataaaactagtgagccgtttggcaaattttattctatttatacaagctattaccaactcatctttaaataaataatcagctaactactaattattgcattcacattaccattccactcaccaacaaaatgcttaaatttatttggaaattctgtgccttatgattcatgaggttaaaaaactttttggttgaaagcttgaaagtgctcacaaaaatgggaaaaaaataaaaaacattttgaatggccaagttttctcagttttcatcgtccttcacaaagatcttcagagaaaaccacggtcctagaaatgttgtcattgtcaaaggcacttagaccagagtaaggacctgaagagaacatcgaagacgttccatcaaattcaaaagtgctagaggactgtcttaggttgggtcgtgcattggatgaggctaacacagaatcatggtattctgtgacgcgctgcaccattttaagtgattgtaccacttcacccattgtaggtcgttggtttgcttccggagcaacacaggccgcagcaatagtgcaaacacgtacaaaatcttcctttggatactctcccccaagtcttggatcagcaatctcttccaaccgctccttatctctaaggattggcctagcccaagtaacatggtactcttgtccagttggctgtgacatatacacaggctttctaccagtagcagttccagcaggacaacaccctagctttaaacatcactt

SEQ ID NO: 89807 - DNA, 212 bp, Glycine max
  Clone ID: PAT_MRT3847_52106C.1
tttttagagcgctaaaaaaaaaacacgtttatatgtgggtttcccacaaacaacacgggtcatataaacggggacacacacaaccccaggtttagaacacaaaagggaaccctatctttcccggacacaaacccaccccctaaaaagagacaataaacccgaaacagaaatgtggggtattatacactttttaagccccccgaattactttc

SEQ ID NO: 89808 - DNA, 262 bp, Glycine max
  Clone ID: PAT_MRT3847_52107C.1
ctcgaggtcttacttaaatcaataaaattgcagaatagatcactagagacccagccatatttaaatggacgctgcatttatcttgtctgaatgatgtgctctgggataacaacagaggggaagatacagtcgctactcttcgttattcattttgcgatagagggtactgaagtcatgtcatagatgtctgtgtgtgtgatcgtattcagttgatgacagcagggtgtgtctcagttaagcttgggaatttgatcgactctgc

SEQ ID NO: 89809 - DNA, 1290 bp, Glycine max
  Clone ID: PAT_MRT3847_52108C.1
ccacgcgtccgtaaaacctcagtctctcactcgcagatctttcggctgcgagaagaccactgaaggagactcacccaaaaccaacctactccaaggaagtcccctaatcagaaccagagatggacaccaaacccaccgagatcagcagcggcaagatgttcggaggttacaacaagagattcaagcatttcagccttaccctgggatgctccatgaacttccacatctacttccctccatctccttctccctctcacaaattccctgtgctgtactttctctctggcctcacttgcaccgacgagaacttcatattcaagtcgggtgctcagcgtgccgcttccgccgagggtgttgccttggttgcccccgacacttctccgagaggcttgaatgtggaaggagaagcagacagctgggaccttggagtaggtgcaggattttatctcaatgccacacaagagaaatggaagaattggcgcatgtatgactatgttgtcaaggagttgccaaagcttctgagtgataattttccacagcttgaaatatcaaaagcttctatatttggtcattctatgggtgggcatggtgctctaacaatcttcctgaaaaatcaggataaatataagtcagtttctgcctttgctccaatagcaaatcctataaattgtccttggggacagaaggcattctcaaattatcttggtgacaataaatctgagtgggaggattacgatgccactcgtttggtaacaaagtttcccaatgtttcttccaccattttgattgatcagggagaagatgacaaatttttgcctgatcaactgttgcctcacaagtttgaagaggcttgtaaaaaggccaacgttcccctactgttacgtttccaacctggttatgaccacctttactactttatagccacattcatagatgatcacatccgacatcatgctcaagctcttagacttaattaagttatgtgcactctgatgagtgatgatctataactattttgtcaactcttctaactttactaagctgttcatttgctcgtggtaccatgggttgtacttgagtatggtatggaacttctttcttcgtattacaatgtttaaaactaatcctttgtctatgaaatatgtagtaatttttctttttttttctaatgccaaatttatcatagattgtagtatattttgatagaagtattctattattaaagaatagtcttatttaaccaaaaaagaaagataatgagaacgcgcgtgcgcggcgtcgccggagccg

SEQ ID NO: 89810 - DNA, 396 bp, Glycine max
  Clone ID: PAT_MRT3847_52109C.1
attaattatatcttttcttctttatttttatttttaacaaaaagccatgtagagtagtacgcactacccatagccaagtaacatgttacaatacacaatagtcacaattggttccctaagcagcataaatgaactaccattggaaataaagagcaaaatactattccctcccaaggtttttcaaaatggcatttatctacaacttaagccaaaaagtattgaccattttcataaatttggaacagatgctttcatacacttcacacatacattggcgcattggcctttgaatgggcaaaaaaaacaagccaataaaacaaggatgttcaaaaaaataattttgacaaacttcaaaaggaagtcaaaaaattaccgaaaaaaaaaaaataaaatggg

SEQ ID NO: 89811 - DNA, 352 bp, Glycine max
  Clone ID: PAT_MRT3847_5210C.1
ggccctcccaccgggggccaaggggcgcccggcaggaaccctgtaggcggaggggggcccaaaccggaaggcaagggggcatgaaagttcagggccaacaaaaccaggggattttgccattggcggcaagttggcaaccataaacaatatgtgtgcatacgggctcaatcctggtatttcaggccctcgtcttttgggcaccattcctcagtccaattcacaacaaactgtttggaatcaaatggcaacagtgagaacaccaccgaaatttgaacctagcaagcagagcttttgacaaacttcaaatgaccctcccgggggaggaaatctaggggacaaaaccggagaatgg

SEQ ID NO: 89812 - DNA, 303 bp, Glycine max
  unsure (1)..(303): unsure at all n locations
  Clone ID: PAT_MRT3847_52110C.1
tatatatattatgtgantgaaggatatgtatactataaagagttatagtatatagttctgcataaatgtagtgtaagatgatggtattacatagattgttattatatgtactatatatatatatatttctattaagtatgtatagttatgatgtggtggttatgagcggacggaatttaatttagggtcgacgaggacgatattagtaggccgcggttgttttttttttttttttatagaagaagaatatggattgttttaaataaaaagaagtgattgggtgaaagggaataaaagcatgag

SEQ ID NO: 89813 - DNA, 325 bp, Glycine max
  Clone ID: PAT_MRT3847_52111C.1
cttcgaaagaaaagttttttgttttgggaaaaggcaacacataggttttgcattacatccatttttatagagttctgagttttgataaacttggtggggactgtcccctagctttatgatagggggggcaacttcctggaccctaatacgaggggggccatgaccattccctgctttttaaaggaagcaagaaaacacacttttaccacactggaacccaaggcccgttacttaagttttaaaggacgtttccaaaactggtttttacttgcactatccctagaaaacctaggatggaaatgttgaagaaattttccacttgaag

SEQ ID NO: 89814 - DNA, 643 bp, Glycine max
  Clone ID: PAT_MRT3847_52112C.1
ggatactgacgagcttgttttcatttaaagatagttaagacaatctctaatgatatattatgccaagaaccaattaataaaaattaatatctatagaagatgtagaaatttgtgatagaggatgacaatcaaaacaagcaatctcattaaatggtgtttggtctaaatttttctggtaaggaaatggtggatctgtaatatccagcatgactgttagcccattgaataaccatagttgttttagataacagacagtgtatgcaaaatttgacaaggttgcgattttctctagagcatgtctgaaaaaagtttgctgtgccctcggaaatgttgtgtcctctggaaggataaagcaacctatttttaattaaacattttgtgcaaaaggttgctctatgggcccgttgtattgtgcttttttttaaagtaaagttattctttattaaaatagatgtgtaaaacattattatattatggtagtatttgtataaataaaaaggcgaaagcctggaatattagttgttgtagagttgtgtccgaagttaaaaagtacgaagctgagaattgcttattgctaacgagcgctgcaaaagattaatgataaaatcaccttgattttgcagctaagcaacgggcgcgtcct

SEQ ID NO: 89815 - DNA, 734 bp, Glycine max
  Clone ID: PAT_MRT3847_52113C.1
ccacgcgtccggctattgcaacaggtactcaacgattttcatttcatttgtgtagtaagtaagaagcggaaatcaaaagcgaacgatcgaaggcaagaaaaacacgcttgggcccttgcactggatcgaaatcggagtgaaggatgctggcgagtccgagagcagcagcaacagtaacaacgcaaccgcaagagtcatgggaatcaatgctcccaggcccacccagccgcaacaacttcggatccgcagatctgagtcctcacggcctcatggcattcccctccggcagctccatctccatcgtcgacacccgctccatgcagttactctcctccttccccatccctcctccaccttcctccgccgcgcccttcgtcaccgccctccgctggtcccccctccccctcagccgccacctcctctcctccgaaccctcctccaaccacctcctcctcgctgccgctgaccgccagggccgcattgcgctccttgatttccgcctcaagtccgccctcctctggttcgacaccgactccaaacaaggcgtccaggacctctgctgggcccaggcccgccccgattcctacctcctcgccgcgattaacggtccttccactctgtctctctacaacgccgctaccggacgttgcgtttggaaatacgacgcttcgcctgaatacttctcctgcattcgcccgcgatccctttcgattcgcgccgcatctgcgccgtcg

SEQ ID NO: 89816 - DNA, 184 bp, Glycine max
  Clone ID: PAT_MRT3847_52114C.1
ttattttactacagaatgggtcataaagcaggaagaagatgccttgtcagcgttcctcattcattgcttttggttttcttatattcacaagttgagttacttatattaaaggaatgtctgataaaccccttataattataaatcccaatgtattttctccttaaaaagaattattaatttttta

SEQ ID NO: 89817 - DNA, 1457 bp, Glycine max
  Clone ID: PAT_MRT3847_52115C.1
ggctcgaggcatgttgagcgtgggacaactgcagattgttgggcacgattatatgattgttggtctgcagttgatgatattggatctctatctgttatctaccagatgcttgaatctgatgcagcaaaaggtattctatacttcagacagtcattgcttctcctaaggttgaactgtcctgaggctgctatgcggagtttactgttagctcggcaacatgcatcaagtgagcatgaacgtcttgtatatgaggggtggatcttatatgatacaggtcattatgaggaagggctccggaaagctgaagagtctatcaacatcaaaagatcttttgaggcctttttcctgatcgcctatgcattggctgactctagtatagatccatcatgttcaccaactattataccaactctggaggaagcgctgaagtctctgcatcataatctgagaaaaggtctgagtattaacatccttgaaacacaaaatcttatctggagaaggtggctatattaggtccgcttcgtgtatatctgcacttatattgagccgcacctgaggatggacagccataaggaacaggaagtcattgcggaatgataaggctgctgcgtatatggaaatgaccgaacttattaagaaggcaaaaaacaatgcctctgcttatgagaagaggtctgagtactgtgatcgtgaacaagcaaaggaagatctggagatggtcactagattagatccacttcgggtctatccttatagatatcgtgctgcagtattgatggacgaccacaaggaagaggaagccattgcagaactctctagagctattgcatttaaagctgatttgcatctcttgcatctacgtgcagcattccatgaacataaagaggatgtcttaggtgctctaagagactgtcgtgctgccctctcagtggacccgaaccaccaagaaatgttggaacttcatagccgagtcaatagacacgagccatgagtcaaaaacatgatcactttggctagatcatggaattgcactttgaaaacttggctgcactgaaaaagttacagtcatgcatgccatgaacatgaagaatggatattggagtgaccggcatttcagctgccataagctgagtcatgaaaatcaaatttgtaacatagaaagcatagttaaattatcatcctgtctatagtgatgaacatgtgaattattaccattcttttgccccgggggagtggtcccaattttgtaattgttaatcttgattttttggggtatattatgagtgtcaaatgtgttgtttatcaaaaattttgtttcttgattaaaatggtgtgcaaggcaatatatgatgatatttatttactatattgccgagcctgtaatcagtgccatgcgtgcatgaaatattgttaatccataaattctatattttcaagaccttaaagccattaaaaaa

SEQ ID NO: 89818 - DNA, 268 bp, Glycine max
  Clone ID: PAT_MRT3847_52116C.1
cgaaggccttgcctttttttatttgaacaagtttttgccaaatccacaacctttctaaaggggtgtatttttcaaacccccttgagggggatacaataaagctacaaacaattaatttattggagtttacataacgacatacctaagttaagtccacattaccaataaagggggccaaaataataaaaaaagtttttatggtaccaactgtaattacggggctaaattttgaatgcttacaatcttgaaaaagagccttttttttttt

SEQ ID NO: 89819 - DNA, 1142 bp, Glycine max
  unsure (1)..(1142): unsure at all n locations
  Clone ID: PAT_MRT3847_52117C.1
gacccccatctcgcgttggtgcggagcatccttcgcttcaatctctctctctttgcgctttctgcaaaccgaacatttcatctccaaagggatcaacagcccacgcgtccgcccacgcgtccgtacggctgcgagaagacgacagaagggggaacctttcatctccaaagggatccacaggccgaaggagaaatggggctgacattcacaaagcttttcagtcggcttttcgcgaagaaggaaatgcgaattctgatggttggtcttgatgctgctggtaagaccactatcctgtacaagctcaagctcggagagatcgttaccacaattcctaccatcgggttcaatgttgagactgtggaatacaagaacattagcttcactgtttgggatgttggtggccaggacaagattcgtcccttgtggaggcactacttccagaacacccagggtcttatttttgttgtagacagcaatgatagggacagagttgttgaggccagagatgagttgcataggatgttgaatgaggatgaactgagagatgcagtattgcttgtgtttgccaacaaacaagatcttcctaatgcaatgaatgctgctgagattaccgacaagttgggtctacactctctcagacagcgccactggtacattcagagcacctgtgcaacctctggggagggcctttacgaaggtctggactggctttccaacaacattgccaataaggcttaatgcctttgggagtcttgcggattggtaattctggatgcaggggtgaacattatctagcttttatttcttggtcctcttccaagacaactcgaatttgtgctcatgtaatgcggtttaggacatctcgaatttgtgctcatgtaatgcggtttaggacatctcggtgctaaattgtagtaggattttacttcttgggatgcgtaatactctgatctttctattgggtttggatgcaatgtccataactgtaatggagatactaattcaatgcgccaccgggttctgtctgatttatagttttattttggtcatgtatcattcatatattgagtatgaaatggagattttgtttattgttttgtaagattcccgaaaaaaaaaaaactatataccacttcgtnnna

SEQ ID NO: 89820 - DNA, 398 bp, Glycine max
  Clone ID: PAT_MRT3847_52118C.1
accttgctactgcgctgccacactgcataccttaggtcttccgaattctaagctaaattgctagatggctagcgaaaaggctcatatcaacattggggcgtgtggacatgtggaccctgacgaggcttccaccattaacgagctcaagaagcctgatgtagacaacgaagcttcacatcataccatatgaacgcatgcacttacaggctaaccagggaaccataatatcatgttaacataatactctggaaccctaatgtatcagtgacatcatcagtgagtctatcaagctagctgtgctatggttacgtactatgagatgagagaccagatgaacagtgccattctgatgtattgctttgcttgtgagtgcatgcatgcttcttatcttctgtcta

SEQ ID NO: 89821 - DNA, 645 bp, Glycine max
  Clone ID: PAT_MRT3847_52119C.1
aaaaattaaaaaggatcttaaaactgcaacttagccgcaccgatatacagagttttaatacaacatcatttacacgatgataaacattcagcaatttatttggaaagcacttataatacaagccaaatctagaatacataactgaccagataataaatatcacatcacaaccaaagtttagtgtagctatttgcaaaggaagaactatatgaaatacatatcacacagtttgctgaaagtttaaccttggcaagcttttcacacgccacaataggctttcatattagcactgtaagtgaagtttagtaatgcaagatgatcaaacggcttatattgcaatggatgttcttcatcaattagctcttcaggtactttcagaattcctctgtagaaggcaaacaggcctagagagtaccttgtttcattcccattcatcataaccatatgattaggggactttattctgtcgttgctccaagccatgagtgcatcaccagccattacaacaaaagaagtaggtgaagagaaatcaacatcaatccagttaccgttcgttgtctccaccatgagtgcattgacatgattttgatgaagaatagttgtgaagcttttgtcagtgtgagccacaaaacccagttgaggctc

SEQ ID NO: 89822 - DNA, 132 bp, Glycine max
  Clone ID: PAT_MRT3847_5211C.1
caaatctcttttcatagaaacactggcaaactcataacagtgctgtcgactattgtatgggcgaaacttttgctactcatataaaatactaaccggctttattcagcgatccttttaactgattcaagccta

SEQ ID NO: 89823 - DNA, 435 bp, Glycine max
  Clone ID: PAT_MRT3847_52120C.1
aaaaaaagaaactttcaattttttttgttttgcaaagggggaaaggacccccctcaaacttttagccatcggattctgaagtttggccctaaaaaaaattttccccccccttttgtaaggggggaatataaaaagccacggtaatccttttgggggggggaaaatgacccccacccccctttggccaaagggggggccattatttgttctttaacaattggacttaaagaaaaaccccctttcttttcctgccaattattccggaaaaacaaccgcccctttttttctcccttccaaaggaggggggggcttaaccctatccaacaatagtgcccgcccccctggggtcttaaccggcccaaaaattgggggccggccgcccccaaggggcaaaggtttttaaggggcgggggttccccccccctaaagggcaat

SEQ ID NO: 89824 - DNA, 964 bp, Glycine max
  Clone ID: PAT_MRT3847_52121C.1
cccacgcgtccgcccacgcgtccgcccacgcgtccggcaaagcatccttcgtttcaatttctctctgtcagcgctttctgcaatcgaacctttcatctccaaagggatccacaggccgaaggagaaatggggctgacattcacaaagcttttcagtcggcttttcgcgaagaaggaaatgcgaattctgatggttggtcttgatgctgctggtaagaccactatcctgtacaagctcaagctcggagagatcgttaccacaattcctaccatcgggttcaatgtggagactgtggaatacaagaacattagtttcactgtgtgggatgttggtggccaggacaagattcgtcccttgtggaggcactacttccaaaacacacagggtctcatttttgtggttgacagcaacgacagggacagagttgttgaggccagagatgagttgcacaggatgttgaatgaggatgacctgggggctgcagtattgctcgtatttgctaacaaacaagatcttcccaatgcaatgaatgctgctgaaattaccgacaagctgggtctccactctctcagacagcgccactggtacatccagagcacctgcgcaacctctggggagggtctttatgagggtttggactggctttccaacaacatagccaacaaggcttgatgctttttgggagtcttcttgtggattggtgattctggatgcaggggtgaatattatctagtttgtttttttggttctctcatgagacaaattggctttatgttaatgttttatggcttaggacatcttgatggctaaaattatagtaggaatttgtttcatgggatgtctaaatacttttgagttttttttttttttaattgagtttggattcaatgtttataactgtaattgataccaatcaatgcgccatcccattgagttatgattttattttgctaatatctctcta

SEQ ID NO: 89825 - DNA, 891 bp, Glycine max
  Clone ID: PAT_MRT3847_52122C.1
cacaggccgaaggagaaatggggctgacattcacaaagcttttcagtcggcttttcgcgaagaaggaaatgcgaattctgatggttggtcttgatgctgctggtaagaccactatcctgtacaagctcaagctcggagagatcgttaccacaattcctaccatcgggttcaatggtcttgtattccacagtctcaacattgaacccgatggtaggaattgtggttaacgtctctcagtgcgtgagccaagaccggtaagtgaactgttttgcatcatcatgaccatttgtggttgagcaacggggacagagttgttgaggccgagttgcccaggatgttgaatgaggatgaactagagatgcagtattgctcgtatttgctaacaaacaagattttcccaatgcaatgaatgctgctgaaattaccgacaagctgggtttccactctctcagacagcgccactggtacatccagagcacctgcgcaacctctggggagggtctttatgagggtttggactggctttccaacaacatagccaacaaggcttgatgctttttgggagtcttcttgtggattggtgattctggatgcaggggtgaatattatctagtttgtttttttggttctctcatgagacaaattggctttatgttaatgttttctggcttaggacatcttgatggctaaaattatagtaggaatttgtttcatgggatgtctaaatacttttgagtttttttttttttttattgagtttggattcaatgtttataactgtaattgataccaatcaatgcgccatcccattgagttatgtttttattttgctaatattcctcatgattattattgcatgataccccaaaattgagaaaaaaaaaaaggacg

SEQ ID NO: 89826 - DNA, 1127 bp, Glycine max
  Clone ID: PAT_MRT3847_52123C.1
tacggctgcgagaagacgacagaaggggaggactgggaggatagaactgaagtggctgtgtggtgttacagttgagttgagcgatctcttctcttttcttgtcttgtcttttgcaatggctaatgcaattataatgccgggttttctgcttcgacccactacccagacgacgccgtttcggttgcccaatcacactcactccttccattcccctcgctgctccctttccctcacaccccaatcggctaaagcttttgcagttccaaggaggaaagcattgtccttgatcttatcgagttactttctctcggaggctggtttagcattggctcaacagtctcctgtgttccgcgaatacatagacgcatttgatggttattcattccagtacccggggagttggattcaagtccgaggtgccggggccgacatattcttcagggacccttttgttcttgatgaaaatctatctcttgaaatttcttcaccttcatcttcccagtacaagagtgttgaagacttgggtccaccccaagaagctggaaagaaagtgctcaaacagtatctgactgagtttatgtctactagactcggcgttagacgtgaatcaaatattctttccacgtcttcaagagtagctgatgatggcaggttatactatcaagttgaggtaaacataaagtcatatgccaataacaacgagcttgctgttatgccagaagcccgagtggtacgtctggaatgggatcggaggtacctatctgttcttggggttgaaaacaaccaattgtatgagttgagattgcaggtgccagaaaatgtgttttcagaggaggaaaatgatcttcgtcgaatcatggattcgtttcgagtgaacaagattgccgcttagaactagagtgttggatacatgaagatattccacggtctttgaattttaatctcatttcttctttattctgatgatctctttctctaatctttttcttttttacttgattgaatttttttcttctttggctaaattttggccatactatcatatcatttgttacattattgttctcactttcctatttatgtgagtctgcttgttaaattaattttaacatgactgttaactgtgc

SEQ ID NO: 89827 - DNA, 1311 bp, Glycine max
  unsure (1)..(1311): unsure at all n locations
  Clone ID: PAT_MRT3847_52124C.1
aatttcaagttccgggtcgacccacgcgtacgcccacgcgtccgcccacgcgtccggttggtgcaaagcatccttcggctcgaggaatatcatcatttcctaggagtggcgatttaacgttggctttttaggttattttcttaagtaaaaagaaggaaataaataatcctctttctctcttcttttttactctctctctttcgctttctactctttctaccttcccagtatccccgttggtgcaaagcatccttcgtttcaatttctctctctcagcgctttctgcaatcgaacctttcatctccaaagggatccacaggccgaaaggagaaatggggctgacattcacaaagcttttcagccggcttttcgcgaagaaggaaatgcgaattctgatggttggtcttgatgctgctggtaagaccactatcctgtacaagctcaagctcggagagatcgttaccacaattcctaccattgggttcaatgttgagactgtggaatacaagaacattagcttcactgtttgggatgttggtggccaggacaagattcgtcccttgtggaggcactacttccagaacacccagggtcttatttttgttgtagacagcaatgatagggacagagattgttgaggccagagatgagttgcataggatgttgaatgaggatgaactgagagatgcagtattgcttgtgtttgccaacaaacaagatcttcctaatgcaatgaatgctgctgagattaccgacaagttgggtctacactctctcagacagcgccactggtacattcagagcacctgtgcaacctctggggagggcctttacgaaggtctggactggctttccaacaacattgccaataaggcttaatgcctttgggagacgggagtcttgcggattggtaattctggatgcaggggtgaacattatctagcttttatttcttggtcctcttccaagacaactcgaatttgtgttcatgtaatgtggtttaggacatctcgatggtgctaaattgtagtaggattttactttttgggatgtgtaatactctgagctttctattgggtttggatgcaacgcccataactgtaatggagatactaattcaatgtgccaccaggttttgtctgatttatagttttattttggtcatgtatcattcatataatgaaatggagattttgtttattgtttgtaagataccaggaaaaaaaaaactatattcacttcatacctttaaaagatatgcatgcttaatttgtgtcatccatcattcatatattgagtatgaaannnaga

SEQ ID NO: 89828 - DNA, 354 bp, Glycine max
  Clone ID: PAT_MRT3847_52125C.1
ggcattggattcctccttgtattcatcattatatagaaatggaaaagcaataaatctcctttctcaaacaaaaaatactcaatttttaaaaacaatcatctacaagatttccaaaataaacccatgccttgcacaggttgataactagttacatgtaaaagttgagctttttgcataaaacattaaggtgttatgtttgataaaatcaactgaaaaaattaattagtagttgaaaattaaaaaattaacttattaaataagaagtatttaataaattaattgtcgaattaattaaaaagtgtaaaataacaaaaaaaaataataacatgatttatttaaaaaaataaaaagaaa

SEQ ID NO: 89829 - DNA, 386 bp, Glycine max
  unsure (1)..(386): unsure at all n locations
  Clone ID: PAT_MRT3847_52126C.1
agcaagaacaaagctacgggaaaccacaagggcagngggcaaagcaggaggaagaccaagagagaccaagcaagaagccccgcggacgaaagaccaagaggcagaaggccgcgaacaaaaaccaaacgcaaaaaacgccaaaactgcgtgggagggagagggacaacacgactggagggccgccaggagacaaccccggatcgaaggaagaagngaacaagagggcgagcggaagggcccgcaacgcccacaaggacaaggcaacggacaagcacgacatccacaaaaagggccggacacggcgaggggacataccatgtgggcaggtatctcgggctcctgggatcccagtaaatgggatattaacaaaccctttctcggatcca

SEQ ID NO: 89830 - DNA, 333 bp, Glycine max
  Clone ID: PAT_MRT3847_52127C.1
gttggtggatgcaattagggtaatggatttgatggaggagaatggggttcagcctaatgaggttacttatggtgggatgattgaggcttattgtaaagggaggaagccgggggaggcggtgaatttgctcgaggatatggttacgaaggggtttgtgccgagttcggtgttgtgttgtaaggtggttgatttgttgtgtgaggaggggagtgtggagagggcttgcgaggtgtggagggggctggtgaggaaggggtggagggtttgtggcgcggtcttgagtactatcgggcattggctgtgcaaggaggggaatggtgttgaagctaaggg

SEQ ID NO: 89831 - DNA, 241 bp, Glycine max
  Clone ID: PAT_MRT3847_52128C.1
gggggaaaacagagagaaaccagatttttttccatatctcaaaaaaggtggctagagagttagttccaagaagaatttaaagcccttttaactaaggaaaacaattaaccccgaggggggggggggggcggttagcaaagctaaaaacctaataaccccctaaaagaggttttataagtgacccaaacaattactctaaaacatggagagaaaaaagggggaacctttttttatccccccc

SEQ ID NO: 89832 - DNA, 309 bp, Glycine max
  Clone ID: PAT_MRT3847_52129C.1
ggctcgtggtgtgcccaccattttgttttagtcgagatggtaaattgcagcgggggggtttgttttaaagtacattcctgtacagaacgaattaagcacttcttattaacaagagatttgcacatttggttcttgtcacaaaaaaaaaataaaaaaaaaaaaaaaaaaaaaaaataaaaaaaaaacactaaggaatgtaaatcaataagaacataagaactgcaaaattcaaattttctggatcatggtaaaagatagaacccatgtacaagcatattcctcacgataaccactagttcacacctatat

SEQ ID NO: 89833 - DNA, 1586 bp, Glycine max
  unsure (1)..(1586): unsure at all n locations
  Clone ID: PAT_MRT3847_5212C.1
cggaattcggctcgagcgtcgatctggcatcaccttgacacttcttgtggataaagctcttttttttctgcactctaaaaaaaaaagcgtttctctctcattttctttctgtcgagaaaatttagtgaacccaaaaggagagaactttctttggtttgtgtttcattttgttgtggttttctgtaagattaaatggctgaggttttgaccaaggcgagtttggtttcctcttcttcttcctcatggcatggggttggtcaacggcatcatcgaagggtttcaacggtttccaacacttgtagcttcggttctggcgtgggaaagttctcttctttgaagatgaagtctcaggttctcagatcttggtcctcttcttctgagtttcagggtataaagcttgtctttcatgtaaatagaggattacccaatagggtcaattcgcgcttgagagcttcaactggggctcagatgagctttagactagggaaagttcagaaatggtgggaaaaggggcttcaacccaacatgaaggaggtgacttcggcacaagactttgtggattcactgttaagcgcaggggacaagttggtggtggttgatttcttctctcccggttgtggtggctgcaaagcccttcatcctaagatatgtcaatttgcagagatgaatcctgatgttcagttccttcaggtgaactatgaggagcataagtccattgtagcataagctgcaccaatgccacgatcaagaagttcaaagatgcattagccaaacacaccccagacagatgcagcttaggcccaaccatagggttagaggagaaaaaagatgcattggccaaacacaccccagatcgatgcagcttgggcccacccaaagggttagaacgagaaagagcttctagctcttgggcaacacaaagatctttccttcacctactcacccaggactttacaacctgcacatgcagatgaagagttgggaaccgaacctgctcctgctcctggttcaaaatctcttcctttaccgtcaatgattctcaattctgaggtctctaaaaagagaaccttaaccacttcagggagatgatgtggtcagtttgtaagcaaaacccatcttctgaccccatcccttgtacagtgtagatctggtttggtgtaatatcttcacataatatacttgtgagaatgaagatatcattgcagattaactcacatagtatgatagtgtgtattcctcaaaggcatgtttttttgaatccatgcattgctgaggttagggaaattagaagctgtagaattactagttaatagttacttttttgcgtgtatgaggaatcgcttcttatcctattgttgtaaaatgaatgccattttattcaccaatggataatttgtttcttgttctgagccaattatttcttgtaatagtttaatttatttcccaagttttgtatttttttagttgctgaagtattgccaggtgcatgttaaaatattaggtattgtcatatcggaaaaaaagatatgtaaaaggtattgtggtttttaaaaaaaaaaaaaaaaaaaaaaaaaaaaatttttttn

SEQ ID NO: 89834 - DNA, 653 bp, Glycine max
  Clone ID: PAT_MRT3847_52130C.1
ccacgcgtccgaactaaggttgtccaaattcaccatttcttcccaaaattcttcaattggtcattcatttccataatccaaaaaaggtttcagatttggcttttcacaacatcatcaccaaagtggtggagcaaggaagcaagtgctcatggctacagtggcatcatcaatggttgcatcgtcttcgccctcgagtcaacccttttgttccttttcaaaccccaactcatcatcatcatcgctctctttcaaaaccaaagctattaccaggacaagaccaagaacaaaaaccagaactagaacaacgagggtaacatggctgaatcctcaccctcgtggtgctttgggtgaggcaacaccaccacccacaaggtcacctcctttccccaaagatggatctatcaaggggcttgcgcttccccagaaaccccgctgatggacattaaactgagggtaaaaccctggctcgtgctgtccatgaaactggctacacccctcacattgtgggcccccaaaatgggtccccaccccatcaaggggggtggggggggtcacttccaggttcccccttctttcccttcggacaacttactcatgtggacactggcatttctgaagcctgataaagaattgccaaccttgattgaggggga

SEQ ID NO: 89835 - DNA, 657 bp, Glycine max
  Clone ID: PAT_MRT3847_52131C.1
ggtgacacgatagaagagctagtgacgtcgcaggcaggcggacgtagagctgtggaggctctaaagcgcgcgcgctggtttttttttttttttttttttttttttttttttttttttttttttttttttttttttttttttttttttggggaagaaaaaaaaaaaaaaaggggggaaaaaaaaaaaggggcaaaggaaaaaaggggagagaaaaaaaaaaagggcaaacgaaaagggggggggagcaaacaaaaaggaaaaaaaccaaaaaaaaaaaacgaccaaaaaaaaaaaaaaaaaaaaaaaggcaaaaaaaatccggggggggagggggggggggaaaccggcccaaaaaggagcccgcctaaacggaaagccaaacttatcaagggggggggggaaaagggaaaggggggtccagggggagaaattggaacccggggaaagggagacaaagggaaaaacccggaggggaaaaaaagggggggcgaaaaaacaaaaaaagggggggggggaaaggggaagggaacaaaccgaagggggggggggcaaagggggcacacctacaaggcaaaagcgcacggggaggggccaaaaaagaggaaagcaacgggcggggaggggggagcaagggagagcgccccccggggggggggg

SEQ ID NO: 89836 - DNA, 1053 bp, Glycine max
  Clone ID: PAT_MRT3847_52132C.1
gtatgagcaagagttttgctttaattgcatattggccattgatgccattgtttgtacaattgatagatcaacaggctgtctgttccgcctattgatttggatgcataaatcttcttttcagatatgaagtgccccttactctctcaaaccaaataaagaaagaaagaaagaaagaaaaaagatataaacaactaaaagcaaagcaatagaaagtgatctaaaacgacagataaaccatgtcggttgcttctaagtgattttcaggaaaagtccttgagcactgaaactctaaaaatgggtttgacagatgacaggcaattaagctattgtatgtatgacctttctcccgctttcaatttgtgcacacggttaagccatgtctttttcatcgtgacctggtgcttggagatacgtatgaacttggttagatggagatgataataatttctaatattcattttacactacatctttttcatgggcgtcaattcgttcttctgcgtcatatttggaaagttccttaacctgctcttggcctgttagtgtttgtgccttggcagcttcctccacccaatttaaccgcgcaataaataccaataacagcgtcaagcaggtaacaataccagtcagaagtccaatgaggagtccaacaagcccaagacagagcttgaaggcaaaaacaacaccaagtggcagagcaaggaaataaaatccacctagattcgcgtacatgcccaaccagggtcgtgctgtccctcgaactatgcctccacaaactgccagcggaaaattaaacacttcaaccagagccatcagcaacattgtcttctttactccctttataattgccatatcatggctaaacagtggcccccaaattcccctggcagccaccatcaccaagctacctatgcaaccagagataaagcccaatgccagagacacacatgctgatcggtaagcaagaccagcttggttcgcaccaagctcatttgagacacgtgggaaacacaagtggctagtgacagcatcactagaaaagccggacgcgtg

SEQ ID NO: 89837 - DNA, 204 bp, Glycine max
  Clone ID: PAT_MRT3847_52133C.1
cccacgcgtccgcttaaattgatgttttaccttattaaatcagtttttgttaaaaaaaaggagaggaaaaaaaaataaaaaaaaaaaaaaaacaaacaaaacaacgcctctcaaggtctcgccgctctatcggacccaggcttacattccctttcatgccaccatatagctctcatatagcgccacctaaaccacattcactgg

SEQ ID NO: 89838 - DNA, 366 bp, Glycine max
  unsure (1)..(366): unsure at all n locations
  Clone ID: PAT_MRT3847_52134C.1
accatgtacaaaaatctggaagcgggttcggattatcagtcacatgtattancctatccaacaaatttctcgtgtaaaacttgctagtcaactgcaaattaagcagctgaatccaagtgagtgaacatttcactttccatttacgtggaaggttatcaagtcaagtttacatactcacttatagagcatatatcttcacatgatcagaatcataatcatccacatctgatatattaactgagtaggaccatgaaaatgacttgcttccacttggtctcttgactaatccctgggaatcactgcggagtccaaagcgtcttctaaaaacaaagtagcacaagtttgctagagtaccaagttgaattg

SEQ ID NO: 89839 - DNA, 182 bp, Glycine max
  unsure (1)..(182): unsure at all n locations
  Clone ID: PAT_MRT3847_52135C.1
agcacgcgcacgcacgcatgcacgactatttcaccaacacgagcctatcccccgagacgggtgancccacgaaccaaaaccgcaaccacatactcatcncattcagaaacgcaaccataaccactctaagacatgaacccgcaaatcctgacagacgaaactcagctcctgacagcaacgac

SEQ ID NO: 89840 - DNA, 199 bp, Glycine max
  Clone ID: PAT_MRT3847_52136C.1
ttcgcctgcgcgcacggggtaggctacttactcatatacacattcatgcttgagcaaacattccataggtattggtacactggttgatcaaaatgcccaacaatggcgtctgtctctagaatctagaccgggcagctatcatcaaaggagaaagcacttattggcgtatatcccaagccgattgggatatggagatggc

SEQ ID NO: 89841 - DNA, 736 bp, Glycine max
  Clone ID: PAT_MRT3847_52137C.1
ctctgcgtccggctttctcttgagtatgtctgtttttgttcactaaatactgctatcattcattcttcctttttcttcttagctttctctctcttgtacaatcttcttcaattctcttataataattactattattctttttagttttttggttcattcaaaagcacaaagttttcttctctgatagcttagagttttagctttccagattctgtcccggggaaagcctaaaaagagcaaaggaaaaaatagagaaaaaaaaaaaaaagaattgatttcatcatatgtgtgttgaagagcactgaagaagaacaaaacaaaaggattgttacacagtttctcttgcctgtgaatattgcactttaatctcaaaatctgattttaataaaggaaaagagaagcaccctctttctctctctctctgtctctttatatctctctcatatatattctgtaaccatcaagctatataccccttctaaagaagatgcccttggaagggattttcattgaacctacttcaacttctataccagatctttcccttcacataagtccaccaagcacttcctctttctcttctttgatttgcagcaataacaacaacaataacaacacatccggtggtgggggtggcatcaattatgaggcacacaattcaagaagcacaaatttcccttctcaagctcacaccgagctttctttgggaaggaatttcagtgttggaggaggagga

SEQ ID NO: 89842 - DNA, 175 bp, Glycine max
  Clone ID: PAT_MRT3847_52138C.1
attgagataacagaaaattaacgttggggggactcgcgtaaggggtggggatagttacaccaagtttctacccgatcttgtcacttttaaatcaaaagcttttttacccctattaaggacctaaaaaaccaataaaattaacctattaacattaaaggactgtatttacaacatt

SEQ ID NO: 89843 - DNA, 293 bp, Glycine max
  Clone ID: PAT_MRT3847_52139C.1
ggctactggcggacacctaggcacccatagacaagcaatttcatttctcgcgaccaaatgctgcacagagctgtgcttatccacggagagggggatgcccactgttccacaaccttgctaactgccaatacatccacaatcttgctataaacaccctggaccacagaaacacataagcagccaaaggaaaagaaagcagagacgactccctatgactccactagcgaaatctgagcagcctaaaccgggaaaactgacactcaggatagctatacaaactccgtgctgctagg

SEQ ID NO: 89844 - DNA, 451 bp, Glycine max
  Clone ID: PAT_MRT3847_5213C.1
ggcagtagggatgatctcttatgtggtgcctgtgtatatagctgagattgcacctaaaaacttgagaggtgggctttagtcagtgaaccagatctctgctacaactggcactatgctgtcttatctagttgggtcttattgtcaactggagagcccttgctattataggaagttcgtcttgtgcagtattaatacctgtattattattcatacctgaatcccgcagatggccaagatggggatgatagatcagttttaaacttacttgcatgtgtaactaggatttgacactagatatatttgttgaaggacatgaaattaataaatctgcgccttcaaccgagaaaaagagcctgtattcgagttgcagatcctaagatgaaaggatattgtctccctgtaatggttggaattggatgacttgttcttcaaccattatatagaatgaatg

SEQ ID NO: 89845 - DNA, 245 bp, Glycine max
  Clone ID: PAT_MRT3847_52140C.1
gaaattatatcaattagagtgttggatacccatcgttttagttgctaagttgatatatttttactgtagtttagggactaattggaaggatttttcaatacaatgaaatgcgggggatagtgatcttgtgaactttgattactgtcatgagccttttctttaaagttgcttcatgttttcaaactatgttaggaattgtagttcatatatctgctttacaatacgatatgctcacttttaaggaa

SEQ ID NO: 89846 - DNA, 322 bp, Glycine max
  Clone ID: PAT_MRT3847_52141C.1
gcagccaaaagcgagtgatccgggtccttatttggtacacgccgccgctaacaaacagcagcagtaccgagcattcccgtgcctgtaagtggacaaaatcacaaccacattgccggggaattgatcttgccaatagaggtctgcggccccaaccacggtttttaaatgccgccgccccagtgggcaaatcaaacttaatggcatccgcccttccttattggccccccccaccagcccatagtttttgatatttttcccgtccaccccccatacccttaaatatctgttcctactgttatgcgccctcttttctccccccctc

SEQ ID NO: 89847 - DNA, 668 bp, Glycine max
  Clone ID: PAT_MRT3847_52142C.1
ggactcaaattctttggattgattacacctgataaacaaaactgcaatacgaaaaaatactgagataattacaactaaatgcaataatgagcacacaaaataacaattgtacataatgcacacgatggttccccaccactcaatgaaccccccaaaaagccgatgcctcaaatgcaagctactcgaggcatatagtgtaaatttcatgaacatctttccatttgaaaggtcatgttctcacatctttcagtgcaccccctttttcaagctcactgaccatatctttaagtgatgtaaccttcatagccaaggtcctatataatctagaataccgtgctcgagttccatcggcagtccttgccagggcaagcaagcttaaagcctcaggtagttcagcaaatacttgcttcatttcctccaagctcatattttccaaaatagacggccttggggcaaccctcacaatctcgccacctttaggttccttaactcgagcctcagctttaatgattagttctgaatttgagtttgctccacatttgattataaatggtgaggtattacccgtattgaattgaaggacgttccactgtgccacatcagttccagatcccgagtctgtatcagttgatggcttgcgagaatgtgatagattttgaatgcggtca

SEQ ID NO: 89848 - DNA, 2099 bp, Glycine max
  Clone ID: PAT_MRT3847_52143C.1
ccacgcgtccgcactgccatttctttctctgagaaccaccatcagttcctccaagtccacgttaacctcaacgagaattccgttgttcctagcgatgaactcgttcgccaaatcagaacccgtgtcatcctcagcctcttcatcatcatcaacgtaccagcaggtgccggagcaagatgctaataacgacttggaccgcgtagcagacaacacgtttcgcaggtacacgtccaacgttaccaaggggagtggcaaaggaacagccattgtctggttcaggaacgatctcagagttttggataacgaggctctctataaggcatggctttcctccgaaaccgtgttacctgtctattgtgttgatcctcgactctttgccactacttatcatttcggctttccgaaaaccggtgcattgagagcgcaatttctccttgaatgcttggctgacttgaggaagaatttgatgaaaagaggactaaatttgcttgtacaacatgggaagcctgaggaaatccttccttctcttgcaaaatcttttcaagctcatacagtgtatgcacagtaagaaccttgcagttaggagctgaatgatgaaaggttactcatgataggtctcgagccagtagtaacatcaccagtggtgttgcatggtattacagttgcacacaacatcacttaaggtgtaagtagtttggtgcactgggatgtgccactttgatggccttccttttgatgctactagaacacaaaagagataaactcgattgtcataaggataatgagactgaacaagctattcgctctcgcatcaaactaaaaccatctcataataatgatccgcaatcgtcgctttgtgtagtctgcagcctatgcgtttgcgttagccagctcgaatacaattgttatgtcaatgaagtttgtggggggtgaaactgcaccgttgagcatggtatatggatacttttcgatagaaggacttgctgcatggtatatataagagaccaggaatgtggatctttggtgcgtaattattctaccgaattctcaccatggcttgcctcactaagctgtctcctcgtttcatatatgaagaggtgaagagatatgagaatgatagactagcaaatagttctacctactgggttttgttcgagttgaaattgtcttaacattaatgtctgtatctttttcattttcgtttttttatttttttgataatgaatctgtacaatttaaaaacagttgtggtagttcctaggtcagatgtggtattgggatattcttgtaatggatgatttcttcaagcatttattaggtaaaaatgatgaataaagtattcatgtcatgtcagagaagatgaataggtattgagaattaagatgatttaataagcattggggaagaagtgtagttcacatggtgggagacatatatttttgattatgatccatgttctaattatggaatctagacttatggatcggaagttgtttatggtcccatagaatgtctgtagaccagcatcccaaaacaagccacaaacgttatgaccctgaaggtgagtatgttgcatactggttgccgcagttgcgaaaaatcccaaaggagaaaagaaactttcctggaaatttaatatacattcctcaaattgtgcctctcaagtttggaacaactagtggacccaataaggacaagttctttggtgcaagaagaaccaccgatagaggaagtaaaagaagatagaacaggagataaatttgaagaagagaagaagaaaaatatggcagcaccaatggtgaaggccttcctccaatgggacgtagaattctccttctgcatggtagcatattggtcctaggggctttgctcgggtgtatcaaaaaatacaatatgcatctttttgaattttagcatttcctagtttaaattcattcttattgatacttgttctgttatggctgttctatgtttcttagctgtatgagaaaaaaggtttgaatccctgaccctttaaacattaacttatgccataaggtaaagtgaaatgacccttgaaacatcttcgtaaaacgttccccaaaatatttgaccccccc

SEQ ID NO: 89849 - DNA, 584 bp, Glycine max
  Clone ID: PAT_MRT3847_52144C.1
aggagatgaatacccactttttattgaataataatttgtttaaatagaaatttttataactaaaagaaatcataaaagcaataactaactttctaaacaatagccactaacataacggcgactaagtaacaaaaaaaataaaccgtcctaaagactcgatcaaacagctagcagaaaacaaattaataggcaattgctgatacacacatttaacaactaactaaaatttcgagtatataaaaaattccatttatctagatcgattgcagggctgttaacaccactttctgcattctctatatctacatcaacaaatgctctcgtccatattcacgtactattacaggcacgcttgtaggagggagcatgccataatctgtcacaataaccgagacataatctgaaggagtagcatcatacatcaaattcaaaagcctcaaattatcttcactggcccaattgctaagataactgacatccattcgtccaggaaccctggcaatagcatctgggtcacctagttcattagacatattgaatccagttgcaccctttcatgaaatttatatgcttcacaacagatc

SEQ ID NO: 89850 - DNA, 246 bp, Glycine max
  Clone ID: PAT_MRT3847_52145C.1
ctcgagccgaatcggctcgagaaaaaaaatccaaaaaaagaaaaataaaacgcttaacgcagtacaaaaaccacagtttcaatcacatctctctctctctttctcgcaaatttctactttctggtaagattttctctctcgttttctcgggaaaacctcgggatctgtgtttgcttgacgcgattccacgatttcccctaatttttcggtctgaaattgcgattttttgttcttcgtttttgtttc

SEQ ID NO: 89851 - DNA, 1237 bp, Glycine max
  Clone ID: PAT_MRT3847_52146C.1
taatttttaaaaaaggtgatgagagactatcatataaataattctagaatttgatttttatgcaataagagattgattgatattcacattcgctcagtacactaattataaaatttgaggacctacaaataaatttttctcaaacttgggcgggtaatttcaagtagccaattgggttttacacttttactgaccttaatttctttcttgcttcacgattatgtatgggagttctcaagcttgcgatgatgatactggaagaattaactaagatgattatatagccatgatgaggaaagtcaaactggattaattagacaatagccttcgcaaataatcaagttgatcataaattgccagtcttactggttaattgtgaagacagaaggaggctcaggttctacacttttttgtgagagggattaagttgtgcattcaaaagaactgccctgtcttacctgtcatatatgagagctgttccaaatcaacgttgttttgcttcttgtcctgttagtagtgtggtctcgtcgtacagtttttgcaagcgattataatatttttataaacgtaatttatcattactaatgttctttggtgaagattttttctactttttgcggagactagattaggtacatatcaaaggaaaaatttttccatcctttttttcacatgtaaggcaatgtttattcagaaatacattcggtttatgctaagtgttaacattgtaattaacatctaatgctttttgcctcattccttattattttatatcaaaatgaatttcagtttttttggatgattgtcccatatcccatttattgcaaggaccttctaaatttagtttagcaacatatcgagtgaattagtgccaatacatattcccttctagcatacttgttcatgttagattgtgatataacaacatgtgcttacaatgtatccaacaactagtattatatactaggagggaagtttataggactggcttaattgtttggcaaagacagataaggagaggacacttgaggaaagatgttgcggctgatagagaatcatgatcgcgtagtcagaaaaaataaatggaatcgagccccatgttgacgatgctcaagttgatcattgactcttggctattgttttaatttgattatgtcatgttagttatgaatttaaactatattaaactttcacattgcattttattgaactttgcatttgcactttatcaatattt

SEQ ID NO: 89852 - DNA, 252 bp, Glycine max
  Clone ID: PAT_MRT3847_52147C.1
ttgttctttctctttctctccttccttttcatgactcactttttactcccaagtcccaaccacaacccctgctcttctgtcctcgatcagtgccataaatccaattctttctttctatctatctctggcccaaattctttttattgtcaccaaccctaaacctaaacccggttgggaagggtgggaactcaataaataaattttttttctttcaacttttaaggtggtctgtgaaaaagggtttattttttc

SEQ ID NO: 89853 - DNA, 159 bp, Glycine max
  unsure (1)..(159): unsure at all n locations
  Clone ID: PAT_MRT3847_52148C.1
ctttgatcttatcatgccaganaagcaagtgtggaaattttccacaaatttagatgctncaagttacaaaggctttcaaagctaaatactttcccaatggaggattcttggaggctcccttaggccacaatccaagctatatctgngtagcntccaagt

SEQ ID NO: 89854 - DNA, 231 bp, Glycine max
  Clone ID: PAT_MRT3847_52149C.1
agcaaacatttgctgttgatgagtattgaaggagtcataaacatatttcatactctaaaattatcatattccagtggaaactgacaaaagctgagatatgagtcatttcatctctatgtattccacaattacaaacgtgacatctattctttttatttattggggctgtatgaatactaacaattaacatcaatattagctatagcctattttcttcgctgtcatcaaaat

SEQ ID NO: 89855 - DNA, 265 bp, Glycine max
  unsure (1)..(265): unsure at all n locations
  Clone ID: PAT_MRT3847_5214C.1
aaatatcattgttggcaataattttgtcagatgctaaggccgtctcatgatgtcaattctgctgatggagtatctgatgcatgttctattttcgtttgagatacaaatatagctgctccggttatgtgagatatagttacactttttcttccttctcacacctatgctttgttacattgctcaggatcctcctactcttatttttttcccctcattctagattgctcggtnctacaaacaaataaatttcacactcttttgtctg

SEQ ID NO: 89856 - DNA, 335 bp, Glycine max
  unsure (1)..(335): unsure at all n locations
  Clone ID: PAT_MRT3847_52150C.1
cacattgcanaaacgtaattcagtttaaattctctcacgacttaagacatgaatgcaaattgaaactatttttccatcaaaagcaacttcactggattaaccttttatattcaaagcagcttgtaatcattttttttagaagtttttaaatgaaaataattattttctcaaaaataatcaaagccgggatggtagaatttttattttttttcataatttgccagttcaaattaatgaggaagtatccaatggttaatgaataactaaagccccaattcaagttttattgaataggttgagagatggactattcccttatcctaaagcccatcctg

SEQ ID NO: 89857 - DNA, 732 bp, Glycine max
  Clone ID: PAT_MRT3847_52151C.1
ccttttattattcctctcttctcttcattccttcgttcattccctcataaaaacctttcaagtttcactctttctctaacctaaggaaaaaaaaagcctttttctcttattccttcattctcaaccaaaaaaagctgaaacctttcacacgaggttccttttttccgacatggggttctcgcattcggacttggaatcggaatccaagaagtgggtaattgccggaatcggtgtttgctcgctcaaacccatcaaaacaaagcgcgttgctggcggcggtgacaacgaagaagaagaagaagaagaaacgcgttccacgacgccgacggcgaaagaggcgagaataccggaaaagttgccgtgcccgccggcgccgaggaaacgccgaccaccgtcaaggtgtggtagcaacggtggcggtggtggttggtgaaagagttcttcacaccacctgatttggaaagtgtcttcaagtgccatgttgagaaagccaaatgaatggttccacctcattcaactaacaacaacaacaacaaagcaaggttttagaagagaagaattgaggtgtacttagtatttggtcttggaaatttggttcctctaaagtgagtaatttgagtttcataaggtcccatatatagtataaaagtaagtaatctcagtcgttaatgataaaattattagttaatattgcgtgcacgtgcataacaaattatgtatgtatgtgctcgg

SEQ ID NO: 89858 - DNA, 512 bp, Glycine max
  unsure (1)..(512): unsure at all n locations
  Clone ID: PAT_MRT3847_52152C.1
ttttaatgaattcttttaggggacatattttacaaaagtcactaacaacaaacactcacaggagtgggccatctgaacttgtacacattcctatgcacttaacttggagggatgaaatgtaccaaagattacactgctaccaactcgaaagagagaaaaactagagggacaaaaaaaaacacgaggaacactggcacccagtgtttgatcgaggaacacatacctctgcattcacactcaccaataactgcctgaacatgtccaatgatgacatgtgagcggagaaccacaccctcgactaccatgtcctggggagaacaacctcgtttattataactccagctcataatgattgcgactgagatgaagattaaccctgcacatactgacccttgataaacccttctgacttcctnggaatttgcggccacatgggtgcaaacacaacaacatacttttagcttgcctttgcaagctttccaaacggaggtggaggcttaggaatcactagg

SEQ ID NO: 89859 - DNA, 375 bp, Glycine max
  unsure (1)..(375): unsure at all n locations
  Clone ID: PAT_MRT3847_52153C.1
nccnacacacanaccnnccanacannaacaacaccncccnaccacatgnncnaacaactagccnnttcnnacnctngacanccntctcgcccanncncgccnacncagntnncngaaacanannccnncccaaacntncacncaccntaanaaccngcannccgnanatatcaagcnaacacgctagcnccannagncacncnnnnnnnccnnggcatnttgnagaanncanaccccaccaaagntcancngntnanacngcacnanccagagtncnnncangagtaccacatntcccgnncanngancncctnntcncagcaancgggnncagnaccncnntacangccanngnnngnangggtgcnnanagnc

SEQ ID NO: 89860 - DNA, 202 bp, Glycine max
  unsure (1)..(202): unsure at all n locations
  Clone ID: PAT_MRT3847_52154C.1
nngncgcnngcntnngcncggcattcggctcgagngactngnnaagatggtcaantnttttatagtttgttgtttgagannaactctcnggttccncttgatggcttcntgcttcnntttnannagnacanctttggtcttgcagctgctggaccccttcaggtttcacagttgcncccngaatgtcagctaggncatcctc

SEQ ID NO: 89861 - DNA, 357 bp, Glycine max
  Clone ID: PAT_MRT3847_52155C.1
ggctcgagctcgagccgcatacatagagaaattgactcatgtaaaaattatcccttcaaatgaagctagacctaaaatgatccagaggtggctgcggcgagaaacaaagctcatggctggtcagcacagatccttggggcttttctggagacacggggcatcaaggcttgtgtgggtcgacgagctattatgatgggaattgagcaagaacgacgacccggtgggttctcatggtggggaccttaacctttgccttagcgctagaacaacaccacccatccagaggaggagctccaacggggtgtaccggaccatgacagggatcccaagggtcgagcctctgctctgccaagctat

SEQ ID NO: 89862 - DNA, 232 bp, Glycine max
  Clone ID: PAT_MRT3847_52156C.1
accacatgccatggcaacaacgtcaatatgtatgagcttcagcctggtaatagcattcaagggtctctctttatcttcttctacatcgttcttcggtggaagtactggtacactccgcgcgggtcctaactcggtggtgtcgctgccccggcgctgaccactgacgatagagaacgcatagtagacgtgggcgggcagctccaataacggctgcgagtcgcagggcaagctc

SEQ ID NO: 89863 - DNA, 404 bp, Glycine max
  unsure (1)..(404): unsure at all n locations
  Clone ID: PAT_MRT3847_52157C.1
attatantacaggcagtttgtagcagagatcacggagaaggtaaggaaaatggcagctgataggcagatcactttcaagatgtataaacggagaggagagagggacctgaaagaaaaggcaaaggaaaaaaaggatgggaggaagacgagggcgagacaacgccggtggggtggaggccgtcagaaattataattttcatcagtgaagcttgacttaaaatatgtagtaatcccagaggagtctgatttctggcaagaatttggtcaagcaaatcaattgaatggaaatctcaagattttatttactggtcaattcattagaggatctgttttttctccgaggttatgcatttggtggcaggcaacaggcaattgggcaantttacagtcatctgatgatctat

SEQ ID NO: 89864 - DNA, 328 bp, Glycine max
  unsure (1)..(328): unsure at all n locations
  Clone ID: PAT_MRT3847_52158C.1
atncatangnnactaagctnngctcttcngntcgnnctcagancncgttggancagngatcttctnnnaannangactcnntgtntcangganacatcaantnccaganaaacnngaagatntgtcanttaccgattcaattcntagtcggnnataacatgntnggatncttnagantgggcnaattgacacacagcatcncanagggnnctnacnntnattgtggaaatggtnantcngcctagnnntgnatccancngangatgcnccttgtgnncttanatgagnancttcganncgctgncaggctcaatctctggtggcgctc

SEQ ID NO: 89865 - DNA, 606 bp, Glycine max
  Clone ID: PAT_MRT3847_52159C.1
gcccactcgtccggttttctctctctctctctctctctctctctctccttctccccctgtttttgcttgctgcgtaatacgaaataaatttaaaaaaaaaaacgttcgctggttaatggttttaattttattgttctcagattaacctttctctttgtgaatcctattcaaacgtcgattgtgaatctgagtgtttttttactttgattcgattcgatatgaagcgagcgaggaaatccaacagggtttcgtgggctactggagagaacctgtgtcaggtaaaattgttcttgtctgacgattacccctcaatagttggtcagaaatcacaagatcatcttcaagcaaagacatcatcaatgttacattctagtattaacgaacctaatgatttgccccccgggtttgaaagcagtcatttcctaaaccaacccaaggttgaattatccaacattcccctgataaaatgggaatgccctcctctggttgttgtcagatctcaatggcgtgttgcagcaggtgaagaaagtttggtgaaagagaatcagaaactggcagaaatgagggtgcttggagcactgtatgcgcgggtttgtggccttgctg

SEQ ID NO: 89866 - DNA, 524 bp, Glycine max
  Clone ID: PAT_MRT3847_5215C.1
catatcgaccagtgggatcactctccctgagattctggatgatgaatggctaccgaaagaatgtaagcctcccattctagaggagaatggggcaatcaacctcaatgatgtgagaacctggctctaacgactctgaagagcaccatgtgacagagaaaaaagaggagcggcgtacagccctgaatgcatttgcgttatcctccatgcccaaaggactgaacctggcccacttgctagtgctgagcagggctttaaaagggcaacaagcttcacctcaaaatcccctgcggatgagagtaatcaacacgattgaggaagccgcagaacctcttggctgtgctgtgccgaagaaaaacgacaagatgaggcttgcaaatgtgaacgctggcaggaacgggccaccttaatgttgccgcagagatttgttaagtggtgccttctcttcacatgctggaggtcctgcaggcaaggggggatgccttggagtgccatgagttgtacacgaaactttgtacacgcctgga

SEQ ID NO: 89867 - DNA, 635 bp, Glycine max
  unsure (1)..(635): unsure at all n locations
  Clone ID: PAT_MRT3847_52160C.1
tacggctgcgagaagacgacagaaggggaaggaaggaagagagcaccaaggcaattagtcatgccatatttgttatctttatactctctgtgagtgcaagatgttgtggacaagaagaccttgataatgatatattagctcctatggagaaagcagagcaggaagctctatactccaccattcaaggctttgttggtgattcctggaatggctcagatctctatccagatccttgtggttggactccaattcagggggtctcttgtgatctgtttgatggattttggtatgttactgccttgaacattggaccggtccatgacaattctctgagttgtgctcaagaattggaatttagacgagagttatttgagctcaagcacctaaaagctctatccttcttcaattgctttcaatcacaagacatgtttccagcaaccatccccactggaaactggcagaaactggcaggcagcttagaatcactggagtttaaatcaaacccgggtctcatcngaaacatcccctcaagttttggtgtcctcaagaacctccaatcactantaatattagaaaatattgtaacaagtgaaataccatcaaacatttgcaatctcatcaaatttaacaaacta

SEQ ID NO: 89868 - DNA, 275 bp, Glycine max
  Clone ID: PAT_MRT3847_52161C.1
gacatagcactatcctgggactcacgtcgtcgcttaacgccttgtgcttaacaagcgtaggaggctgtctcatcatcctttggataggcacgtattctctggtagggctgacgctctctgtttcctgagagaaatggcttgttctgtggggaggttatctctgctttgcctggaatgctaccttcttgtataatggaaaacttacatgctggctcaaactatttaagcctcgtcaattgtctccgttcattcctgacatactgatgaaatcaatc

SEQ ID NO: 89869 - DNA, 293 bp, Glycine max
  Clone ID: PAT_MRT3847_52162C.1
gacgtctctcagcacagagcgcggcatgctcacccgagaccggtaccagcaatcgggatccatcccattgtcggacgtacatccacacataccaaaacaacagcacccatatccagagaaatctatcctacgcccttggaccaactttatcacttccgtcatcggcgaactggcaacatcttcaatgccgttctacgcaagagattgtccatgaccagggctcacaagccttcattgtccttgtcaacggtgcgtaaatctaccacagggaaagaacatatcagtgctctcat

SEQ ID NO: 89870 - DNA, 476 bp, Glycine max
  unsure (1)..(476): unsure at all n locations
  Clone ID: PAT_MRT3847_52163C.1
ggagnaaaagcattttggttaacttcgtgtttgtggacaaaacacaatggttatatttcctccggcacatccgtatttaacaagtctgccaacacactcaaaagcatcctggttaaatcccatgtaggagaaatgattcggccttctcactttgctgccaggggttgggtatgcattaccagtgaacctttgtaccgtaaatgaataagtccctaaaaaacttaaacatctctgcctcaaaggcactcttgaaaagatcaagttccctgtccaaatcattaatagaccggtaatatgcctgctttggccaaaactgattagaggtgggtatcctggcgataatttcccattgaatagtgggaggaagctcgtatccaacatacaacacatatgggtatctgcgaagctgtatgcataagaagcagccgatagagtgttcctttctcttgatgctgaaggtcgcgggatagatgatc

SEQ ID NO: 89871 - DNA, 2959 bp, Glycine max
  Clone ID: PAT_MRT3847_52164C.1
ggcaggttttctttctgcttttttttaatatatattctttctctttctccctaattaaaaaaaaggtcgctcttgtttcggaccttcctggccacgcgtccgtctgtctcagttttttttttttttttctttttctcgcttcttctccgactataatttttctctcccgatcagctagggtttgatctaatctcgatctcgcatgcgcaaccgcaactgtattctgtatgcttgtcgttcatactcttgctggggtttagaagttttcggctcgcaaaaaaagattagaagaagatgcttttgacaaaaaatagggatgatgaatgcctttcttgttcaatatgttttttgagagaaggaggatgagtgttcatgtattaaccagcttgtaattgcccatgtatgaattttgattgaagaatgatacatatggggtgtgatttctttatgttgtttatacacatgaggtttagttaggaggcatttatcgtagactcgtagttaacttggatcgtcacaaccaagcaaattatacaagcaatacagttgtatctttttgaatcatatagttgaggaatggatgatgaaagagattttgagttgttattttacagttggaataacaagaatccgactgatcagcttttcattatatcttttcttgttgctgctcttgttggaattttgaccatagcctacacggcctttcaatggaggagaaacatcaatctaagttggatgaaagccatagctagatctaagaaaaatccaaaggcaaggcactgaattcctgccttggcagattcgagttgaggttgatggggatgaaattgaggtccttgagcttgcggaaggtgtgcttgttgcaaatatctgaaactacatgggaggtgtagaattgtggcaaaatgaggatgaacgttgctgtacttgtggtgcagtagctcatctgagctgttcatctagtgcacacaaggactgcaagtgtgtttctatgattggatatgagcgtgtcacacaccaatggactgtttgttggacagatgtagctgaccaacctgacgaaactgctctctgtagttactgtgaagagctatgtgcctgggactgttcctcagtggaccccctatatggtctatcatgtggtgccatccatgaggaagtggtgattttaggagcccattggctcatgaaacggattaaatttgcgatttgggccaatttagaagattgatactatcaccactgtatgtgaaggaattgaactggaacttgccaaaggtggatttttgagttcaattactcatggggctaaatgaaatagcatcatcagttcgggcaagtattaggaaccagagcaaaaagtacaaacatggaaatgaaccatctgttgaatctgggaacagtgagagcattggtgaagtgtccaccgaaagcactggtgaattctcatcaaatacataatggtcatcatgaagtgggtgaaaaaagtagctcgaataagggggttcgacatcaagatagtgaattagataataagttggatagaaaacccactcttagacgcaattcatcaatcaatcagaaggatgaatcccactcattaggagtgaagcagaaatatgatttgattgatctgcctctggatgcaagaccattgttagtttttataaacaagaagagtggtgcccagcgtggagactcacttagaatgcgtctgaatatccttttaaatcctgttcaggtgtttgaattgagctcaacacaggggccagagatgggactttatttgtttagaaaggtgtctcacttcagagttcttgtatgtgggggagatggtactgttggttgggttctgaatgcaatagacaagcaaaattttgtttctcctcccccagttgctattcttcctgctggtacaggaaatgatctcgctagagttctctcctggggaggtggcttgggtccagtggagaggcaagggggtcttactacatttttgcaacacatagaacatgctgctgttacggttcttgaccgttggaaggtaacaattagtaatccacaaggaaagcaacagctgcaaccaacaaagtttttgaacaattatcttggaattggttgtgatgcaaaggttgctttggacattcataatctgcgtgaagagaatccagataagttttataaccagtttatgaataaagttctatatgcaagagaaggtgctaaaagtattatggataggacatttgcggatttaccttggcagattcgagttgaggtggatggagttgaaattgaggtccccgaggatgcggaaggtgtgcttgttgcaaacattggaagctacatgggaggtgtagatttgtggcaaaacgaggatgaaaattatgataattttgatcaacaatccatgcatgataagatacttgaagttgtgagcatatctggaacatggcacctcgggaagctgcaggtcgggctttctcgagctcgaaggcttgcacaaggacagtcaattaagatacaattgtttgccatgtttcctgttcaaattgatggagagccttggtttcagcaaccctgcacaattaacataacccatcatggccaggctttcatgttgaagagggtggctgaggaaccccttggccctgcatctgcaataattgctgaagtgcttgagaatgctgaaacacataatgtaattaatgcttcacaaaagcgagctcttcttcatgaaatggcactgaggctgtcctagaattctctccaccctgcgaatgtgattaaagattttgtatttcttttgaaatatattttgcacactttgtgtattacttttcctttttgaatcctttgtccaaacttcctgctacttctgaagcaggcttgtgtattacgaatctttacatgaaaagaaagaatgaaatcagcaatatacagttatatgtaccca

SEQ ID NO: 89872 - DNA, 170 bp, Glycine max
  Clone ID: PAT_MRT3847_52165C.1
ctctcaagcaaccttgttttttaatgttcatattctcacttttacgtcaggggtgatgactggaattttttgcactgactattattcacatctcatgagggcctgactggatgtggctcaaccacaacctagttctgtaaggcccccatgttggcggtccacgcggcggg

SEQ ID NO: 89873 - DNA, 201 bp, Glycine max
  Clone ID: PAT_MRT3847_52166C.1
agtgaccagactgggccaccttgtgaatgctggcagtatctgaagccgtgcacagatctaccttgagtcgctcccgcactaggtgcaccagattctcgacccgctcttgggtcccaccctgctctgactaggtgatcaagctcacgtcggtccagcatcaaacccgggtccagtacaggacgctgttcagggccttcgtcg

SEQ ID NO: 89874 - DNA, 366 bp, Glycine max
  Clone ID: PAT_MRT3847_52167C.1
tttggtgatcaaaatttcagatacccttttctgcattaaatataaaacgcggaagctacagcaggaggcattgtactggatgcagatcaaatcatgtgaaacatatatctaaacctaatcgtcatcaaaacacgcatcattcatgtcgacatcgccttctccatcgtcattgtcctcagcttgtgcttgaacatcaaatgctgcagcattgtcagactgcacatcattatctaatgtatcaacaggtccagtcacctgagatggttcagccacctttgtttgcaaggatgtcagactttcatcactgaagaatgaggaatatggttgtgaaactttgaagaaacaggtccttttctctgcattttc

SEQ ID NO: 89875 - DNA, 238 bp, Glycine max
  Clone ID: PAT_MRT3847_52168C.1
acgagctctcccttccccgtgcaaatatctccaaatgattaaaagcatgtttggtttcatgtagaaaccaccctaaaccttgcttgtgtatgaaaagaaacctcaaacacggtggaatcctgtttggcacagtttaaggcaaaattaagtttgttctcaaatgtagttgtgactccttaaatgctgaagcaacatttttgttacttttgcattaggggaaaaatgttcatttatgatt

SEQ ID NO: 89876 - DNA, 995 bp, Glycine max
  Clone ID: PAT_MRT3847_52169C.1
gacttcacagaacgacaactgtgccagcattcattatagagagacgtagtactacacttcttgagatcgatcataataaacactcaaaccaaacaagcaaaactaaacttaccaatgaagttgaagcagcagaaaatgagagtagtagtagggtcagtgtggctgtgcctctttctgttggctgtcggggagtcggagggagcggatttggcggcgaagtgcaacctgctggttcagaaagtgctgccgtgcctgaacttcgcgacggggcaggcggcggttccgaccaaggactgctgcgaggcgacgtcggagataaagaagagcgacccggagtgcctgtgctttgcgatccaacagactcacaagggtagtccggaggtgaaaaatatgggcatacaagaggctaggctgcttcagctaccttctgcttgtaacttgaagaatgccagcaccaccaactgtcctaagcttctgggtctatctccaaactccgctgacgctgctatcttcagaaatggttcgttgaaaacgaattcagcttcaacagtctcagaagaaatccacaagggctcttatggaaacatgcttagacctgttctcgttgcagacctaatagctgttctcctcgtcatgattccaataggttcgtgatgggtgccttcaattaatgactcacgaagtaacagataggcaccactttaaatgaaagtagccgtggtagttgttttcctactcatggatgggtggattttaattactttgcaggttgcagcatatatagaattaactgatttgcgtctgcaacatcttgttatgttgtctttattagttaataattatcttaatttgtatggacttcttttccacatgctagactattgaaaatcaaggactgttgtgttttaatttgttttaggttgtacatttcgaactgccttatgttatgcttatcgtccgtcactcactcattagtttaatttttacatcaaaaa

SEQ ID NO: 89877 - DNA, 305 bp, Glycine max
  Clone ID: PAT_MRT3847_5216C.1
gtcttagtctttacgttttttggccccctaaacttggtttgaaatcctattggttgcccttacctgtgtccttcctcgtctaaaagctagattagcctaaattggttgtccattgccttccctctttattaaaattccttccggcttttcaagagtgagctctgcttcttggggatcaatggccctaccctttttcggatcatttaccattaacagcgaacctctctttgcgacttgtagtaaaactagccatttaagccctccttaccccttggtctttaaaaagcctttttcttcagattcct

SEQ ID NO: 89878 - DNA, 247 bp, Glycine max
  Clone ID: PAT_MRT3847_52170C.1
gtgaggagcaagaggcagtgtagtttgcaaatcccattctcattaccaaaacgacacaccaggaggtcgtttttcattctcaggttttcataacaaatttttgaaatggaagataaaggaattaagcaggagtcaaatgcttcagcagctggggtttgtgaggtacctggagaacctactattgtaattaatggggtgcctgacataatccccagcgactgcaatgttgctcccactcccataagtc

SEQ ID NO: 89879 - DNA, 227 bp, Glycine max
  Clone ID: PAT_MRT3847_52171C.1
aggagtggaatcatgtaacaagaaaagacaaatgcgttggtactagttcccaaagcatttgtcctccatatgttgaactggagatgatgcaagttcaaggtctttgtcatcatcagaggagtggaatcatgtaacaaacgtaaacatgacaaattgggaatcatcagatcaagactattcttcccttgaagaggaggactagtgaagaaagacagtttcatggaaag

SEQ ID NO: 89880 - DNA, 307 bp, Glycine max
  unsure (1)..(307): unsure at all n locations
  Clone ID: PAT_MRT3847_52172C.1
gccgcccaccctttttttttttttttttttttttttctttttgtgnaaaaacaacattacgcaattttaatttccattggcgacccttcttcggttagccccaacccttaaaaaaaaagggaaattaaccttaccctttaccaaccaccttttaacttagtggtgcccttttacattacattttaaccttgggaaccttaacaattttaacaaaaaaattccttttaacaatatcaataaccttaagcttgcctttttttatctctacccaaattgggcaaccggattctcaaaaccccctttttaa

SEQ ID NO: 89881 - DNA, 648 bp, Glycine max
  Clone ID: PAT_MRT3847_52173C.1
gccaaacacggccttggaccgggaattcgtttttcgcaaaacttttgctggggaatttcccaacgccaccatggtgtactttcagctggtttttgctgccatcacgttgattctcatagcgggggcgttgcttgggagaatgaacttttatgcatggatgttgtttgttccattatgggttacgttctcttacaccatttgtgccttcagtatatggagcaccgatggatggttgttcaagatgggcctcattgattattctggtggctttgttattcacctttcttctggggttgctggtttcgtcgcagcatgttgggtaggaccaagggcagtgaaggacagagagaggttccctccaaacaacatacttctgatgctggctggggctggcttactatggatgggttggtctggattcaacggtggagatccatacgcagccagcatagatgcatctctggccgtgcttaacacccacgtgtgcacagcaatgagcttgttgacttggcttttccttgacatcctcttctttggaaaaccttccgtcattggtgccactcaaggcatgatcactggccttgtttgcatcaccccttgctgccgtgtggtgcaaggttgggcagcaatcataatggggaatgatgt

SEQ ID NO: 89882 - DNA, 236 bp, Glycine max
  unsure (1)..(236): unsure at all n locations
  Clone ID: PAT_MRT3847_52174C.1
aaagaaaaccaaatttnttaatctatcacactgatatacnacgcggaggggtggtatataaatatggccgcgccaccaacaatacaaataatgacgtggggcatgaaacctatgcattataccccaggataactctcattcacattgaatcccaagcataattgaacacccactaaatctaccatttttacgaacatacactacaggggtaaactatacatttaaaaacaatccaa

SEQ ID NO: 89883 - DNA, 1173 bp, Glycine max
  Clone ID: PAT_MRT3847_52175C.1
ggctcgagctcgagccgaatcggctcgagttcaagttgagatcctaacaaaaagcttgaatcaactgtgctcgtaacaagaaggacacccaagacaaaaacacgaatttcataggaagcatccttggttatttcaaaggaagcacgctaaaaaaagagagagaaaaaaaaaacactcaaattgggttattcatggaagagactacagagcgtgttgctcttcaagagagattgaggatgatgtcttcggaaattgtggaaaagggtcaaagcagtgaaagcaacaagcaaatactgaggtcaacacttaaggataacgctcccgtggtgctagagatcaagcaatacaacgaacacttgaatccacccagagaagaaatcaacacccttataggagaaaaagatgcaaaagaaaaatttgtttgtaaatgcttctcaagtgtctatctttgatctctgcagatttgggcagaagaggggtcattcatttgctggtggtgagaagcaagctcttgtggcaaaagatattgaagagaacctttacaaaatgagagcaggtcttgagcttcttagcaaagggagttttgaaggggcgaaagttgaccttttgtaaaatgaattggccacacgtgatcctgtcaggagcccatgcatccaaaaaatcgagcctgcgtccatcccaaaagagctttgcaagagggagcttgccaagcaatttcacaattccaaaatcaagttcccattggtctacaagaaagttagaccacctaccagaaagctgaagaccacatacaaggccaaaaagcccaacttgtttatgtaacgtggttgatgaatgagttacaaatacttggtgtctatcaggcgtttttagtagagacgtacccgttggttttttactgccagattttgtttgaggttcttttagactattttcattgggtttatctttatgtttctgttggatattatcttttgatcattttgataattgagtagaattgaacaaaatttatatatatggctgttaaccaagatgttaataattttgaatatcgcctacaagtcactcgaaggaattaggctattgccccccagtcgtaatgcaaacatttttcgatctatatcttaatagatgctgtcgaatgacctgaaatcaggttgatttttggat

SEQ ID NO: 89884 - DNA, 440 bp, Glycine max
  Clone ID: PAT_MRT3847_52176C.1
aaaaacacaccaaaccctcgcatgggtttataaatatgtaacccaacaacttctttttctaaaaaaattttaacttttacaaattccgcttaaccaacacttatcaagtcagatttttcttaagtaccatctctaaacccaaaagtgaccaccacattaataaaaaccagccatcccccctttaaacccatttgcccacctccccttaatttaatccctcccgaaatccaaccccaactctaaaacctacaaaaagtattctaatttaacaaaacctttttctttcaatcaaaaaatagatctttctaaactcaacctctttcaaaaccccatctttaacataccctattcaaaaaaaaatttatatcgaacaatttaattatcttcattctatacccccatctctttaaaaaaaaaatgccccttccttataatttttt

SEQ ID NO: 89885 - DNA, 312 bp, Glycine max
  Clone ID: PAT_MRT3847_52177C.1
gatgtgttgcgttgacaaggaccaggatcagccccaacaaacagaattgttggaggtgattagctcctgttgtcttacacacaacactacattgatagaaattttccatacgactgcacaataccaatgtgggaaaaccgtctaaattcatataatcaatgcccgttcacatccttcagaagaaatgtctcaatgtggaagtcgacgtgaacccaaaaagattgatgccaggttgagacaaagaattgatcctcaatacaatgatgttcacgctcagatggaaacaaatttgtttaaattgtctcttgatga

SEQ ID NO: 89886 - DNA, 126 bp, Glycine max
  Clone ID: PAT_MRT3847_52178C.1
agaagacgacagaaggggacctaaggtcatatcagcagctggagagcgactgcaagcttcctcagttttgctcccctgtttagggcgtttcaataggcttggaagggcggccaagaattttccaat

SEQ ID NO: 89887 - DNA, 263 bp, Glycine max
  Clone ID: PAT_MRT3847_52179C.1
gcggaaggagtttcttgctttctttgacttacattactaacggaacggacaaaaaaaaatttttattttgttattcaagtaagaaaggctcgcaggacaaccatgtagatggatgaaaaccttgcttgtgtaagaatgccctacgccaacaccttcctgaacaccctacatttagaagctggcttgcaatcttgctataaatagcaggcaaaaaacgcacacgcttggtgaataaatacaggcgagggtggaagcaaattcat

SEQ ID NO: 89888 - DNA, 338 bp, Glycine max
  Clone ID: PAT_MRT3847_5217C.1
ggagatagaaaagctctttggcttgtaatgaaaggtaagcaattgaacgttagaagccgaaagagagtggaataacaaactagtcttaagaactccctaatgaaagtgaaactttccctaagttaagcaaaatcacctgcctgtgaagaagctcacaaaatctcttgcaagttaagtttgtatgctctgaccttggttttgggaattgcaaactaaactgggttaattaagaactaacccttctcgcccttcctatgtagattccacaattcaacaatcaatcatcatgcctaattgcctcctgttgtgaacggagaaagaagattctcatcatcatc

SEQ ID NO: 89889 - DNA, 181 bp, Glycine max
  Clone ID: PAT_MRT3847_52180C.1
agcctcctcggcactctgtacggcaggctgtccttagaagcatgctgcgtctgagctgtcaccgtgcataacattgctcgtactcctgctgatgaccacgacttcgccagttacgaccactacgtctccgtcacgcaaatgtccgatgatatcacatgccgccgtaccatcatcgttgtgg

SEQ ID NO: 89890 - DNA, 397 bp, Glycine max
  unsure (1)..(397): unsure at all n locations
  Clone ID: PAT_MRT3847_52181C.1
ttttttttttttttttngggaaagaggcttaaatggattttcaattgatttcaatttaaagccctagcctgattggcccattgccaccttgggaacaaaaaattgaaggggccccccccctaaatttttcatgggatggcaggaaattaccatggcccgtggataaaccatgcccttccttaagccctcccccccccaatttttaattggcgggcctttcttgggggaaaatcccgggggggcctttaaacaaaccttatgggccttaaaacatttttggtttttggcccctttggggttacctttaccccccccccccaaaaatccccccttttcctttttttttttttgggggtgggttacccggccccaaaacaaaatttttggtacctggctt

SEQ ID NO: 89891 - DNA, 1702 bp, Glycine max
  Clone ID: PAT_MRT3847_52182C.1
gactgcgactggagtggttccctcagacatatctgtaacgctgcttcttctgaaaatttgtttttaaaataaagggtcaacaactttggcgaaaattagatctcaagtggtttcaatagtgatgtgtacatgagaacagatacagatatgaaaacttttgccttcgtctgtgtctgcagccacaccacttagaagccatgtccttcccccagccttgcgactgtcctcacagatgccctcttggccatcgaatacgcccttgggaaacttcgggagagagactgatgttagaagatggattcacttttgcaagcagaggcattagggtgcttaagaaacccgatttggggatggtgtttttaattcgtcaaagttggggtataaagaaatttgaacagatcctagttatgctggtcagtttgtactgatgacaaatccacatatttggtaacactggtgtaaattttgatgatgaggaatcaagatagtgcttccttaccaatccagttattagaagttctgggtttcaatttctcaatctggagatgagcacatattcctggagatgacttagcaatatggaaggatatcgtaatttatgacaatgacacacgggatatcacgaggaggatactcctaaaatgaagcgccggtcgtgtgaatttgagatgttgatactcgtgcaaacacgcggcaattccggaaagaaggcagtcttgttggtgttgtgagcactgacaaatccagtagggttgaagagctgagtctgtgcattaagtcgggttgatacaacaaagcaagaattgggattttagtactaaggggcatggcgcagactttccatgtttttgccataatgatttttggaatttagcaaaatatacttaagcgcttggcatcctatggctgtaaaatcactgtggtgccatctacatggccggcatcagaaaccttgaagatgaagccagatggggtgctttttagcaacggccctggagatccatctgctgttccttacgctgttgagacagtaaagaacattctgggaaaggtgcctgtttttggaatctgcatgggccaccaattgctgggtcaggctttaggaggcaaaacctttaagatgaaatttggtcatcatggaggaaatcatcctgttcgtaaccttcgaactggccaggttgaaattagtgctcagaaccacaactatgcggttgaccctgccacactgccagaaggagtggaggttactcataggaatcttaatgatggaagctgtgctggccttgcattccctgctcaaagaataatgtctcttcaataccacccagaggcatccccaggaccccatgattctgattacgcttttagggactttgtagaattaatgatgcaagagaaaaacaagaaatccgaaccccaaatatcaacagtgtctagtttggatgcgtaatgcttgaagctgacactgggaggaattgaaattagctaaaattttagggttatagtcaagtactgatcgattgtctcatcacacaagatttcaattcttcaacttctgggacaaaagcaggcatagcatgccttcgaagtgtccatgtgctattttaaagatcaaacccattgttaccgtccaattctgggcctgttaaaagcgtttttatcatgatgatacctgacctatgaagtgatagtttattacttt

SEQ ID NO: 89892 - DNA, 442 bp, Glycine max
  Clone ID: PAT_MRT3847_52183C.1
aatatgtatgagagggagaggcaagctcgtaaagagaagaaaattgctgctaagagcatgaccccatcgaagcgttccatgcctagacagagtgagagtccatctctgaagaagcggaagcagttaaccatggatgactatttgagctcggggaagaagaaaaaataaatggacgtatgccctatatttttctttgggaaagtggggttggatggtgtggcgattttgatatggcctagctgacatttcaagtgatggcctggtgtgacttcccaagtccagcactactggcctcgtgatttttgtgggcctgaatataatgtttgattattgaaattttgtaaatttactaacaaaccgatagattagatgcttattttattttaactgcagccaattcaacatatttaatgcgctcatcttcatcctagtgttttttagt

SEQ ID NO: 89893 - DNA, 1586 bp, Glycine max
  Clone ID: PAT_MRT3847_52184C.1
gtaggtgctgaactggtttttagttccaaggacagtacaattaccagatgaggatattgacagaattattgctaaaggagaggaagcaacagctgagcttgatgctaagatgaaaaaatttactgaagatgctatcaaatttaagatggatgacactgctgagttgtatgattttgacgatgagaaggatgagaacaaatttgatttcaaaaaaattgtgagtgaaaattgggtcgagccaccaagaagagaacggaagcgcaattactcggagtctgaatacttcaagcaaacaatgcgccaaggtggtcctaccaaaccaaaagagccccgtattcctaggatgccccagttgcatgatttccagtttttcaacacacaaaggttgagtgagctgtatgaaaaggaagtacgctatctcatgcaaacacaccagaagaatcagataaaagattcaatagatgttgatgaaccggaagaggtgggagatccattgactgctgaagagttggaagaaaaggagcacttgctagaagagggattttcttcatggagccggagggattttaatactttcattagggcctgtgaaaaatatggccgaaatgatataaaaggtattgcttctgagatggaaggaaaaactgaagaggaagttgaaagatatgcaaaagtcttcaaagaaagatacaaggaattaaatgattatgacagaattattaaaaacattgaaagaggggaggcaagaatatcccggaaagatgagatcatgaaatgctattgggaagaaaggttggaccgctacaagaatcccttgggctagagttgaagatacagtatgggcaaaacaaagggaagttatacaatgaagaatgtgacagattcatgatatgcatgatgcacaaacttggctatgggaattgggatgagttgaaggcagcgtttcgaaggtcacccttgtttcgatttgattggtttgtcaagttcgcaaaaacacaagaaatgccaaggaggtgtgacaccctcattcggctggtagaaaaggaaaagcaagaatatgatgagagggagagccaagctcgtaaagagaagaaacttgctgctaagagcatgaccccgtcgaagcgttccatgcctagacagactgagagtccatctctgaagaagcggaagcagttaaccatggatgactatttgagctcggggaagaagaaaaaatatatgggcgtatgcgtatatattactttgggtatagcggggcggatgatgcggcgattatgatatgggcctagctgacatttcaagtgatggcctggtgtgacttcccaagtccgtgattttttgtgggcctgaatataatgtttgaatattgaaattttgtaaatttactaacaaaccgatagattagatgtttatttattgttaactgcagccaattcaacatatttaatgttgctattcttcatcctagtgttttttaattcatacttaaggcttaattactgttttagattttcaatttgaggtcttatttttatttttttaattgttataattgatatttaaagccgtccgtgttgaaaatt

SEQ ID NO: 89894 - DNA, 424 bp, Glycine max
  Clone ID: PAT_MRT3847_52185C.1
ataatataatttttttgtttttttacaagaagaaaaattaagtggctgtttacagttggcccaaatttttcacaaatttatgcccgttttataaggtaaaaggtttaaccccctggggggggggggcccttttccctcccctagaaaaagacttttttggggtttcttatttgacgacccaatgtaggggggctggagtaactttttcgagcgcgcttccttggattaaaaaagggtatcccctttccgggctttgtttaattcattagctcccccccctcttttaaaaacggggggtggccccattccaaaacctttgcccctggatttaactcccaattggcgggccccgccccggttttttttttcttgccacagagttgtaacacctccagcccctgttgaacccccaggaggccccatt

SEQ ID NO: 89895 - DNA, 317 bp, Glycine max
  Clone ID: PAT_MRT3847_52186C.1
tttttgggtccttgagaaattacaattgctgggtggaacagaatatgaattcttatcttaaacttgagtctggtatagccatatcgacgttgctaccatacgaaaaagcaaacctataaatacgcactacgctgatacaagatattgataagatgttggtgaatgcggggaatatgtcgacgaatcgactgggtatagaagcaatgaagattaaaggtcgtggcataaagccgtacacaagcttcaaagtgatgcggtcactagcagacaagtgcacaaagagttcagcttgctgtactaaatccttgtccataaaa

SEQ ID NO: 89896 - DNA, 329 bp, Glycine max
  unsure (1)..(329): unsure at all n locations
  Clone ID: PAT_MRT3847_52187C.1
gangcaaacataacgggcgttaattttttttatcaacttcttaacacgacattaaaacattaaattaacttctcattcctaaatgacaaaacaaaaacttataatcaatcaaccattacactaaaatcttctaccatacatttacactagaacattttcaaccaatcacctttctacccaatattacataaacaaatattatatcatcccatcccctatcaaattttattcaatcataaaaaaacaaaacgaattcctctcaccttacaaaacgatatgcagacacctgagccataattccttatttaacccattaacatttttaaatt

SEQ ID NO: 89897 - DNA, 1822 bp, Glycine max
  Clone ID: PAT_MRT3847_52188C.1
gcagtgctagcaagagtcaaaaaccttgaaaatcaaaacacaccaaagaagaacacatgttttgagcgtccggccggcacagacctgaccctttcaaacctctttctcggcaaagttccttcccctgcaatatcaagaaattcacttcattaacaacacacacacactcatgccatgatttctcaaattagcatgctttcccttttcttcttcctcttctcctcttttctaatcgttttcttcttccgcaaaacctctgcacttcacatcctcaaccaatggttcctttccttcgaaaaccgtctccaccttcaccagtccttcaaaatccctcgctataatcttcactctctggacaatagcctctaccggaaaatcctcacttacctcgattctcttccctccgttgaagattccgattacaccaacctcttctccggccccaatccctccgacatcttcctccacctcgaccctaaccacaccgttcatgacaccttcctcggcgccaggctctcctggaccaacgcctccggcgacgcgctcgtccttcgactaaagaagaaagacaagcgcagagtcttccggcagtacttccagcacattctctccgtcgcggacgagatcgagcaacgaagaaaaaaggacgtcaagctgtacgtgaactccgacgccggcgagtgggcgctcggcgccgttcacgcatccggccagctttgagacggtggcgatggacgcggagctgaagaacaaggtgaagtccgatctggaccagttcctgaagtcgaagcagtactaccaccggctaggccgcgtttggaagcggagctacctcctctacggcgcgcctggcaccggaaaatcctccttcgtcgccgcgatggcgaagttcctctgctacgacgtctacgacgtggacgtttcgaagttcaccgatggcgccgattggaaggtgatgctgatgcagacgacggcgaagtctctgatcgtgatcgaagacctagatcgcttgctgacggagaagtcaaagtcaaacacaacgagcttatcgagcgtgttgaacttcatggacggaatcgtatcgtgctgcggagaagagcgcgtgatggtgttcacgatgaacgaaactaaagaggaggttgatcaagcggttctgaggcctgggaggattgacgtgcacatacacttccccttatgtgatttctccacctttaagattctcgcgagtagttacttagggttgaaggagcacaagcttttccctcaggttgaggaggtttttcagaccggggcccggctcagcccggccgaggttggcgagattatgatatcgaaccggaattctcccacgcgggccttgaaaaccgttatttcggtcttgcaggtccattcagagggacagaggttgagccaaagcgggtcgggtcggaatagcgatgataacgaaccgggtgcggttatatgtagggagagtgttcacacggtgagggagttccggaagctgtatgggcttttgcgtttgggaagtaggaggaaagaggagtcctattcggggcccatagagaaagaggctccacgtatctagactcgggtcggataaaagtaatcgggttttctttcctttttttattttctacaaaaaaatgtatagttgcttgccaagttgcccgagttttttttttttgcagttagaaattatattgttgtatctacaaagaaaaataatggtaggtcggtaaggtcgaagcaactacacctcacatttttgtttagtccgttgataagaacacatatcaaatgcatcacttattctttaaaaaaa

SEQ ID NO: 89898 - DNA, 215 bp, Glycine max
  unsure (1)..(215): unsure at all n locations
  Clone ID: PAT_MRT3847_52189C.1
ctttgttgcgatacgtcattggtttggccctcatctcgctgcaggtatggaccattgcaagcatttacgaatccttgggcgaattcggctggttttttggagacttcttctttccacataacatacgaaggtatttatatngtnntanttatctatttttcaacaatactgagcgcacgatattatttgttggagtctggggcgccgcgatcata

SEQ ID NO: 89899 - DNA, 150 bp, Glycine max
  Clone ID: PAT_MRT3847_5218C.1
ctagttgagtgtggagtagtatatagtgagatgtaaagtagactggtatgatggaaggtgaaggttagatgtaagacgatagtttagatatttagttagtggaagaagtgaggtgggtgttgatcctgttacctatagacgagctatgac

SEQ ID NO: 89900 - DNA, 237 bp, Glycine max
  unsure (1)..(237): unsure at all n locations
  Clone ID: PAT_MRT3847_52190C.1
anattatcatcttaaagttggtttgtttttctatgtatttntntttattcatgttcttccttgtgnttttacnattttntaccacttctattttctaaaaatcagtttttgaaaaatatttttaatttaattgtactcagactaactggggaaagcatatttccttgcttatattgttaatacactttcgggcattgttagaaagagcagagacccttcaggcttcagtcctcaagt

SEQ ID NO: 89901 - DNA, 599 bp, Glycine max
  Clone ID: PAT_MRT3847_52191C.1
aagacttacaaaaatccttataacgatacggttgagaaaagacgacagaaggggaagagtcaaaaagcttgaaaatcaaagacaccaaataagaacacatgtttttacctatatcgattgccggcacagacctgaccctttcaaacctctctctctctctctcatacaaagttccttccttcagctgcatcatgtaccctgctgcaactgcaagacattcaattcattaacaacactcgcattattcaaactccaaaccaacgcatgcatgatttcacaaattaacatgctttcccttttcttcttcctatcttcctcttttctaatccttttcttcttccgaaaaacctctgcacttcacatcctcaaccaatggttcctctccttcgaaaaccgtctccaccttcaccaatccttcaaaatccctcgctataatcttcactctcaggagaatagcctctaccggaaaatcctcacctacctcgattcccttcccttccgtgaagattccgattacaccaacctcttctccggccccaatccctccgacatcttcctccacctcgaccctaaccacaccgttcatgatacctttctcg

SEQ ID NO: 89902 - DNA, 517 bp, Glycine max
  Clone ID: PAT_MRT3847_52192C.1
cggatcctttaaagctgtcgagctttcgtcctttttttctattgacggcggagcttataattattacaaacacctgaacccgggttctagtgaaaacctactaaccatcaggatcctttgaggggggatatattcaaatagcagacctttggctgggctgggaccaattgcctaaaacaactctttatgtttggacaaaacccacactttcttaaaccagtatattgaagctgaaattggatcatcgccattgaaggccacatgtaccgatgcaatcactgtatcatgtaaacctcattgacatacagaaccgccaatttaaaaggaggtcatatctaacaagaccacgtactccgaatccttttatattccggacgagaagcacaccatgaatattttgtcatgaccttttgtgcctggatgaaagctagttactagatatcttttttgccgctctctcttgaagggcgacatctccatgtagtccgcataattaatcttcattttctttatggtc

SEQ ID NO: 89903 - DNA, 449 bp, Glycine max
  Clone ID: PAT_MRT3847_52193C.1
gagagagagagtgtgtgctttcattttgttccaaaaggatcattcaagttgaagtagattcagacagtttggaacccaccagaacaaaaaaaaaaaaaaagggctaattgaaagatggggtagacaaagttggattctttttggtttctttctttcccatatatacctttttcatttgattttagtttttcccccagacaccagccatggctcttcctctgaaaccttcttgagccaaaggctgtatcaagctcaaaaacaatcatcatagtcagggtgacatattccaaaggtagtttgatctttgaagaaagtaccttattcttgagaattcttaagattatggaagcttcttcatgtgttgattatgctgacacaaacatgagcattagtaaagcttctttttgacccattgccatgggtaaagaattcaaagtttcaaattgctg

SEQ ID NO: 89904 - DNA, 215 bp, Glycine max
  Clone ID: PAT_MRT3847_52194C.1
ggctcgagaagacgacagaagggggccctaatcgtgagaagaaaggaaaggcaaaagggaaagatggtgtgcgataatgaaggcgacggggaaagaccttcttgccattcatgcgtgcaacctgttttgccttcctgagaactaccagatgaaatacttcctttattacatccttttctgggcccagctcctttacttcgccgaagacttcaacg

SEQ ID NO: 89905 - DNA, 152 bp, Glycine max
  Clone ID: PAT_MRT3847_52195C.1
ggctcgagggattatggtcgctaccgggaatactatgagcaggacgttgggtctagagactcagaacttagggtcagagctgagggcttgaggattacgcacaacacagtagatgatgatccgtgccagagaacgatggatgaggaatatcc

SEQ ID NO: 89906 - DNA, 309 bp, Glycine max
  Clone ID: PAT_MRT3847_52196C.1
gacaacatcctaaaattgattttggtccatttgaaattaccaattaccaaagatgtttggaatcatcggaggaaacaagggtcacaagataaaggggaacttggtgattatccaaaaaaatttgttggaaatcacaaacattacaatgtgttaagggtctcaccggaaccggcattaacaccattgggagactcctccacaccgtaagcgctttggtctcacatatctatatacatcacaatagtgacaacagcgcatatacacatgagaaagaaaaagttggaaacgctacaaatttaagaagacaag

SEQ ID NO: 89907 - DNA, 204 bp, Glycine max
  Clone ID: PAT_MRT3847_52197C.1
cgaactcattgacttcatctacttaatgtcattgatgtccgagatatgcagtatacatttctctataatctttgtgagcagctgaacttgggatatttatggaatattattctgatatgttctcctcaggatggttttgtccctatcagtactggtagaatttgagatcaatgccaagctccagtgcacgtgagcacttcaaca

SEQ ID NO: 89908 - DNA, 476 bp, Glycine max
  Clone ID: PAT_MRT3847_52198C.1
agaaatgaaatacgtactccatccaagtggaggtacagaagcctgaaatagaagccagtactttggggcttgttggggtgacactcccacataaactttgacatagaattctcttaaatttgctgtaacattatccacttctatatattgtgtttcaatgttatttcccaatgaatcttttacaacaagatttgcgtcattaactggtattctaacaatgtcactgcgattccatccaagtgggttatacaccactaataccaaactcttcgcttgtggaataccgtcttctgttggtgggcagtaactgatattgagtaattgacactgggaaaatgcccatgtaggtgctgagcattgaacccctagtttcttgctagtaagacaattcaaagaagaacttacaaccgcttcagcccttgaggcttcaatagcaagtcgttttgcatagtcattaattgtgtgttgcttggcag

SEQ ID NO: 89909 - DNA, 447 bp, Glycine max
  unsure (1)..(447): unsure at all n locations
  Clone ID: PAT_MRT3847_52199C.1
cccaggaccaaaacccaacggaaaacttaacagacaaaaaacattacaaaaaaaagggcttcccctaaaaaatgcaaaggaaaccttaacaaacaaaaaacaccccaaaaaccgaaaaacccccgggggggaaaaaaaagggggggccccggcatgggtcccgaaaacaacaaaaaaatgggaaacaaaggcgggggggggggcggcaatgggaaacacggttttttttaaaaccttacggggaaagggggggggggggcccaacaccggggccttgggtatgggaaaaaaaggcaaaaaaagggggggggcagggcanaaaaaatggggaccggggcaaagggagggggctctaaaaacctgggcggtccaaagaaaatgggaatggcaaaccgggggtaaaaaacgaaaacttccgggggcacgcgaatttccgggggggggaaa

SEQ ID NO: 89910 - DNA, 425 bp, Glycine max
  Clone ID: PAT_MRT3847_5219C.1
cacaaacacaactgaaaaaaaaagatgatgcatatcatggtactatgtacagtttgagcatgccagcttgtaacacatacgcttgacacttgagagctagaactacaacaacaagaagtagatcaagaccaccagatgaaccaccaactctatgactccagggacgatcgagcctggcgaaggtccgtgggagaaaggcccttaaggatagggctcttagctattccaagcggagcaaggtcaaccaaataccaaagcttagggatcgaaggatcatgatccaactaactcttatggactatggtttatcaagacatggggaagccacagctggagccaccatgcttatggcaggtgctctatcctaagaggaaaaccagtgatccctgctgctatatacaagcttcattcaggaggcaggagat

SEQ ID NO: 89911 - DNA, 1553 bp, Glycine max
  Clone ID: PAT_MRT3847_521C.1
tattaagacacgagacaagatggatcgagcgagaagagacgaaaacccacatgacatttttgcccctcacactttcccctgtttactccacgccccttccttgttccttcataaacacaacacttccttcttgcattcggcaaccaaaccatgcagcgcacggcggtggcgacagatgaaccacggcggcgctccggcgacgcgtcggcggcggagggggagaaggtgttcaaggggagcgaggtgttcggtgacacgtcaccaaattatttaaagacgattttggccctggcgttgtggctcggaaccattcatttcaacgccgcgttggtgctcttcgcaatcttcttcctctctctccacaaagcattcttgcttttcggtttgcttttcgtgctgatggtgattcctgttgatgaaaagagcaaattcggtagaaaattatccaggtacatatgcaagcacgtttgcgcttactttcccatcacgcttcatgtggaggatatgaaggcttttcatcccagtcgtgcttatgtttttggttatgaaccacattcagttttgccaattggagttgttgcattagctgacaacacatgttttatgcctcttcctaaaataaaagttcttgctagcagtgcgatattttacacaccatttttgagacacatatggacatgtgttgggtctaacgccagagacgaaattcacgtttagcatgggcctgtggatgctggctatagttgtatcttgatacctggtggagtgcaagaagcatttctcattgagcatggttctgagattgcctttcttaaatcaaagagaggatttgtccgcatagcaatggagaagggaaaacccctggttccagttttctgctttggtcagtcaaatgtctataagtggtggaaaccaggtgggaagttagttctgaattttgcgagggctgtcaagttctccccagtatatttttggggaatttttggatctccgataccctttaaacatccgatgcatgtggtagtgggtagaccaattgagctcgagaaaaatcacgagccaactcctgaggaggttgccagaatacatagccaatttgttgaagcacttcaagatctatttgaacgacacaaagctcgagctggatatccaaaccttgagttgagaattgtttgatatggtcgtaacttcgacccatagtttcatgggggtaattacacttttcttctcttaggttaggctttatttgggagttttgaagatggagtggagtgattggttcatgattaattggatttgaatggggtgaggtaaataaatactgttgattgattgagaaaggagttatctttgttgtcttagaagtcacattggtaattaatcatgtaaattgtaaacttccaattatgagtccgtgaacaatttatatcagatatatttataaatcttagattaatttaaaatgttactttatgacatagggtgtgtttgggacaactgtaaaagatagattatttcaataatcgattataatcatcatcaaaaaaaaaaaa

SEQ ID NO: 89912 - DNA, 2816 bp, Glycine max
  Clone ID: PAT_MRT3847_52200C.1
cagacgcgtgggatctctgtctctatgtctctaatccaattcagttagcttctcgggctcgagctcagccattaccacctcttcactctttctctctcttcccaaactaaacataaacatacattacacatttctagggttctctcacacaccaagattctcctagctgcagctgaaggactgtgaagatgttggagaaagttgaagaatttaacacggagaggatgatggaggaatttgagagggtgacaaaggatgctgagaggattcaaagggaaaccctgaagaggattttggaagataatgcttctgctgagtacttgctgaatttgggcttgaatgggaggacggatcctgagagtttcaaggcctttgttccacttgttactcataaagatttggagccttatatcaatagaataattgatggtgatttttcttctgttctcactggcaaacccatcacaaccatgtctttgagttctggcactactcagggaaagccaaaatatgtaccatggaatgatgaattgtttgacaccacattgcagatatatcacacctcttttgccttcagaaacagggaatttcccataaacaatggcaaggccttgggctttatctacagcagcaagcagttcaaaaccaaagggggtgtgctagcaggaactgccacaaccaatgtgttccgtaacccggggttccagcatgcgatgaaggcgattcagtccccactttgcagccctgatgaagtcatatttgggcctcatttcttctccccacgcgtccggccacctcttgtgtggcctaatcttcagggaagaagttcagttggtgtcttccatatttgcacacagcattgtctatgcttttaggacctttgagcaagtttgggaggagctttgtgttgatatcaaggaaggtgtccttaacagcaaggtcacagtgccctccattagggaagccatgtctaagctcctaaaacctgaccctgagctggccaacttgatccacaacaagtgcatggggcttagcaactggtatggcctaataccagagcttttccccaatgttaagtatgttcatgggatcatgactgggtcaatggaaccttatttgagaaagttgaggcattatgctggagagttgcctttgttgacttctgactatggatcttctgaagggtggataggaacaaatgtgaaaccaacagtaccacctgaattggccacctacactgtgcttcctcaaattggctactttgaattcatccctttgagagagctagaggaaattaagggagatgctagtttcctttgtatggagcctaagcctgtggggctcactgaggtgaaagttggtgaggagtatgagattgtcatcactaatccagcaggcttgtaccggtaccgacttggtgatgtggttaaggttatggggttccataattcagctccagaaataaagttcgttcggcgtagcaatcttctgcttagcatcaacatagacaagaacacagagaaagatcttcaattggctgtggaatcagcatcacaattgttggcagaggagaaattggaagtagttgactacactagccacatagatttatccaaagagccagggcactatgtaatcttctgggaaataagtggtgaagcaagtgaagaagtgcttggtggatgctgcaactgtttggacaagtcttttgttgatgctggctacacaagctcacgcaaagtcaactgcataggtgccctcgaactccgagttgttcggagaggaacattccagaagatacttgagcattcccttgcactaggagctgctgtgagccagttcaagacatcaagatgtgtaggccctacaaacaccaaagtgttgcaaatattgaatgaaaatgttgtcaagaactatctcagtactgccttcaattgagttgtaagaatagctatatctatctatctatctatatatagatatatttatatagttccctttctcaattgaataaaaactttgccttgtttttctacttttcaagggagattctagtttcctttgtatggaagctaagcctgtggggctcactgaggtgaaaattggtgaagaatatgagattgtcgtcaccaatccagcaggcttgtacaggtaccggctaggtgatgtggtcaaggttatggggttccataattcagctccagaaataaagtttgttcggcgtagcaaccttcttctaaccatcaacatagacaagaacacagagaaagatctgcagttggctgtggaagcagcatcagaattgttggcagaggagaaattggaagttgttgactacactagccacatagatttgtcaaaggagccaggacactatgtaatcttctgggaaataagtggtgaagcaagtgaagaagtgcttggtggatgctgcaacggaatggacaagtcttttgttgatgctggttacaccagctctcgcaaagtcaactgcatcggggccctcgagctccgacttgttcgtagaggaacattccagaagatacttgagcactcccttgcactaggagctgctgtgagccagttcaagacaccaagatgtgtaggccctacaaacaccaaagtgttgcaaatattgaatgaaaatgttgtcaagagctatctcagcactgccttcaattgaataaagtttaggaagaatagctatctctctctctttttctatatatatatatatatatagttttccttaatttctcagttgaataaaaagtttgccttgtttttctaaaaaaaaaaaaaaaagggcggccgcc

SEQ ID NO: 89913 - DNA, 547 bp, Glycine max
  unsure (1)..(547): unsure at all n locations
  Clone ID: PAT_MRT3847_52201C.1
gtgaagagaaagaaggaaggagacatttataaaaagctctttcccttcccctaaatccctcacactcattccatttttacctttctctctcgctcgcaaacgcaaataataaaaaacaaggttttagccatggcatcgaagcggatcttgaaggaactcaaggatctccaaaaggatcctcctacctcatgcagcgccggtattttgttttgtgattttggttttgatgcaagtactttatacgatccatgattttctatcgcggaatgatcgcgtattatgtttcgggaattcggacaattttttagccgttcgtagattatacttccgcttagggtaacagagtgatctaagcatgacttggtgacgctaaagctgaatcgggtgtgctgaatttgtgtttaaaaataagatgtgtgtacatgtatgagggacttatgatgatctggtggttntatttggattgctcaacaaattattgtggacttccggagtaattcttaccttacattaaaccctacatggctatttcttttttttttgcttg

SEQ ID NO: 89914 - DNA, 224 bp, Glycine max
  Clone ID: PAT_MRT3847_52202C.1
cgagcggacgacctttctcaggatcgagtacctcattatgcttgatccgtactttctaagtctgtcgtgataaatctgatcaacattactgttattcagatgaaatgtctgagacacattcttagcagacaatactcagtacttataacctgataatcgaacagaccatctgtactctctgatacgagggccactgatatgatccatcctgcgtggagcatcta

SEQ ID NO: 89915 - DNA, 233 bp, Glycine max
  Clone ID: PAT_MRT3847_52203C.1
gggcttatatttttaaccaaaggggaaacgggggacaaagccggggagggcggccggtttaaaaaaaaactgcccaagcagcccaaacgggacccaagaccatacctgacataaatgatggaccgtacggacaccacacggaaaatcccctggaaaccagggctccgaggaaacaaaaggacaccctaaaaaaaaaacggccgcgggggcggacgcgcgggcagacacacggg

SEQ ID NO: 89916 - DNA, 490 bp, Glycine max
  Clone ID: PAT_MRT3847_52204C.1
aaacggggaaaaaccccttccctaggcaaccccatttattatggggggcccaaaaaaaaaacaggggggggcgtgggaaaattcaaagggaaagggaacccaaaaaaaaaaaaaaaaggggacaacaaatcccgcggggcaaaaaaccaaaaaaaaattaaaaccacaagctttacaggccaaaaaaaaaaaaaaactttgggaagcctttttttgaagaaagccccccatttggggggggggacccccaatctaaaaacattaaaaaagctggccttgggggggggtccccccccccataatgggacaaaattcaaaaaaggggattcacccaaaattatggggggaaacttaaaaaaaaattccccgggggggggcccgggggcccaaaccaaaccccttaagggggggtttaaggtaatctttggggaaaaccccgcggccatttttgaaaaaatatgggaaggccttggaaaggggccaatttttt

SEQ ID NO: 89917 - DNA, 291 bp, Glycine max
  Clone ID: PAT_MRT3847_52205C.1
ccgccagggcagccgtcactgaaactgagggaccgtgcctgtccgtcattgcttagatacctgtcgaggtggccaagcgccttcgtgagccaagactggttgtgaaatgcatatggatggaaaagatcatgaggcttggcctggagcgagtcctgccgggccacggcactgtacctataaggccgtactcattgtgggcccggaatgatgccttggcagagcggaaggcctgtgtacaaagtaccgccacggatttctgagaggacgatgaggatgctcctcaatcaggcc

SEQ ID NO: 89918 - DNA, 149 bp, Glycine max
  Clone ID: PAT_MRT3847_52206C.1
tcccaggggcgggaaggcgacaatgacaaggatgcccccaaatccatgaagacacccatgctagcaccagagggatgccctgaacccagaaaccacacagggagaaccgaagaaacgacatccacctgaagcagaaagacacaacaaga

SEQ ID NO: 89919 - DNA, 473 bp, Glycine max
  Clone ID: PAT_MRT3847_52207C.1
gatttatttaattttaatgctaaatgtagttttggtcactaaagggtctaaattgatattaattcttcttttttaagggaaattgatattaattattgtatctttaaaaaagtgattttgatcttgtattttgtacttggtcaactcgaaataaagtatataggccagggtctaaattgattttaattcttgtatcttaaaaaccattattttgataatctatataaactaaaattcattttagcttaatttgaattataatgttaattttgatttcaaggttaaaatttgttttcttttttcacttgttgcttttgatatatagcatattagggattgtgatgcttagtgtttgtcttaacttgatgaactttgattgcggaacaggttgtgtttgattatgccaaggacagacctattatcttctcaacattccagccagaagcagcaatgctcattcggaaattgcaaac

SEQ ID NO: 89920 - DNA, 295 bp, Glycine max
  Clone ID: PAT_MRT3847_52208C.1
cacatcttactacaatttttacacatttaccatacaatctccatacccgcactatttctaaaatcgaatctacacttcaataaaaaaaatcaaatctctacaatcaaaaacattatgaatccgatccagcatcttaaattacctcaaataaagctaacttgattccacacaataacaactaattcacaacttataccattcatacctccttactcatatcattacttacaacaaccatataattaaacattttattttcacctatattatatacttatcaattatctaatcatat

SEQ ID NO: 89921 - DNA, 362 bp, Glycine max
  Clone ID: PAT_MRT3847_52209C.1
cccacgcgtccgcccacgcgtacgcccacgcgtccgctctagtgcgttgctgcagctaagcctctctctctctctctctctgtcactatcgatctatcccaccataaccattaaccaccactctcataaactattcattccacagatcaccaacatttcccaattcgttcaccctctgaatcacacttctagcactttctaactgcaactcgcctatacacacatggattcaacatgttatggctgcaaggtggacaactgccattgactctaagaggccgtaagagacaataccttgaaaggaaatagatgtcgccaacttcgtcttctatggctgcttgcagcgaaaggaggattgaccg

SEQ ID NO: 89922 - DNA, 420 bp, Glycine max
  Clone ID: PAT_MRT3847_5220C.1
cacactcctaagtgggttaaacctatcttgtttttttcatctttatgctttgttattatttgaaactgtaaatacgtgcttaagtgtttatcttttacgtgagtggtgagataagtcctacacccggacttgagggaaacataagataggatggtggtataatcatagtgtctttccgagagtgagtttcggatgtggcacatgtgataaccccgctcaacggagggatcttgggaatattactatgttggcatgagtagtcgtgttcagcattaatatttccaagcgacctatgaagttgaggacctttagttacctttagcccatcttagccttttaggacgtagtgcggtggctaatcaagagtagtcttgaattggttgatacgcgatactacactcaaacgaggctttcctatgg

SEQ ID NO: 89923 - DNA, 191 bp, Glycine max
  Clone ID: PAT_MRT3847_52210C.1
gcacgcctacgacgctcggaactcggattgcggctcacgggaaaaactgaccatgggcaaacgtacttatttgattcggaatgctctgcagtttttttaatcagggaatggtatttttatatgtaaatttgtgaaaataatatattaacttttgtttggatacatcatacatagattaatatttttgtttt

SEQ ID NO: 89924 - DNA, 286 bp, Glycine max
  Clone ID: PAT_MRT3847_52211C.1
agaatataggaaatcctgatttaccaatggcaatgggcatgggaccagatcaaaaaggtgtgcgtattaaaagaattggacccactggttcaaaatcttatggtctgaaaccatttgatggaattcttaactttgattgggtcaatatttcgaatggatgaaccagggttattcctttccttaccaccacctttgatctggttcatttaaggcttggggagcccatgggttcaagtaacctggcttttcaaaagtccactggggataaagctctattaaaggtttt

SEQ ID NO: 89925 - DNA, 366 bp, Glycine max
  Clone ID: PAT_MRT3847_52212C.1
ggggccaaaaaacagttttcttaattaaaagcttatcattttttggatcccacccctccctgaacgggaaacataaacctgggggttcacaaaagtccaaaggcgtaacccttacaatacccaaggcttttttaataaaattgctgaaaatattcattttctaccctaacaagggtttttttttcaaagcatgcccccctttgcccgggaatttcccatttaaaaaaaacccccttcccccccccccggtttttcaaacctttaaaaacttcatactaaggattattaccccccgagggacctaccccctcaaaggtgttttctcacttgcccccctagggtttcccacggggggccctaatattg

SEQ ID NO: 89926 - DNA, 355 bp, Glycine max
  unsure (1)..(355): unsure at all n locations
  Clone ID: PAT_MRT3847_52213C.1
cccacgtgnccggcggcggcggggtaagaccgttctccgatgcgaattctagaaggaggagatcggtatcggtggttcggtaccaaattagcgattctgagagtgacctggaccgttctcagaattctaaaagtcgttcaaatctgaaaaagactgatgttggaaacaagctaatgcacaaacctgtcgcttcagatcaaagaccagtgctaagaaagtccctaagccagaaggatttaagggcatatgatggttactctagtcattcttcagttctcactgatgatgaaggaacaagtgctcactctaataaaatgggaattgggaaactacgatcaggttatgcacataaaaa

SEQ ID NO: 89927 - DNA, 231 bp, Glycine max
  Clone ID: PAT_MRT3847_52214C.1
ggatacattaagcatttatggttaggattttgggaactaatagtagcggtgaaaacgtgagtgcatgtcttctgcaccttatgatgacgatcactgtgctggtcgctataaacttcagtaaacgaaacatctactcacttaattgtgcccatgattacctcgtcaccagcattgctaccgtcagatacgcatcatcacctgaacctcattgcatgcagttctaggttcatg

SEQ ID NO: 89928 - DNA, 149 bp, Glycine max
  Clone ID: PAT_MRT3847_52215C.1
tttatatttgaggtccgttataacaatccctctgcgttaaatagaagaagcggctgcatttctccttaaaaaaggacagcagtgaccagcctagcaaatcggacgctttctagtctatgaaaataacacacagtgttgagatgcgaact

SEQ ID NO: 89929 - DNA, 168 bp, Glycine max
  unsure (1)..(168): unsure at all n locations
  Clone ID: PAT_MRT3847_52216C.1
ctgaggtgatgngntttgaatntggcttctcccgncnaagtgnagcccttattttgctcnncaaanaactccacaaaacttccaggtagctttnntttgaagagnnnagncagtgacacaacagtagngagacgagtttatngctctgccgntgcncaatcancacca

SEQ ID NO: 89930 - DNA, 1487 bp, Glycine max
  unsure (1)..(1487): unsure at all n locations
  Clone ID: PAT_MRT3847_52217C.1
atggaaattgtctttatatttccagctggcaggagttatattgggagctccatttctcattgagataaagtggcacagccataatatctaaatcaaagccaaaatgccaagacatgtattaccttttacttcatgctttcttgatgctgttgttccctgtgacccttttttatcttgcatgaaaatgaaaatggctgtctgctactattctgttcagttattcttttttttttttttttaataaagtaaaatagtagagtttatgcagtgtattttactttaccatctacagttggtcagacagttgcaaggtcaagaagaaaatccatttggagatgatgcatcaacaacaccaaagaaaatttttcagcttttaaatcagaccatcgagactttgtcaggtgtcctggcgccagaattagcattgcagttgtacttgcaatgtgctgaggctgcaaatgactgtgaattggagcctgttgcttatgaatttttcacccaagcttatattctatatgaagaagaaatttctgattccagagcacagatcacagctatccatttaataatagggactcttcaaaggatgcacgtcttttggtgttgaaaacagggatactttaacccacaaggccacagggtattcagcaaagcttttaaagaagccagatcaatngcagagctgtgtatgcatgctcacatctgttttggttgatgatcatgataacatgaaagatgagagagggtcctattatgtcttaagcgggctttaagaattgcaaatgcagcccaacaaatggcaaatgcagcacgaggtagcaccggatcagtaatgctcttcattgagatattgaacaagtatctttacttctttgagaagggaaacctacaagtcaccgttgcggctatccagggcttaattgagttaattatgaatgaaatgcagagcgacaccacaactccagatccagctgccaatgctttcttagccagtactatgcggtatatagagttccaaaaacaaaaaggcggtgcggtaggtgagaagtatgaagccatcaaggtttcacatgctggataactgatacccttgatgttgtcatgttagattttgaagcaatttgttcttgggctggtccagctactgttttcaattgtctttagattccaaactgaagaaccacttcctgatatgtgcccacagcaaaagtacactcgctcattgagttaggactccgattcactctgtaactaatgaaactgagccaccattaaacattgctagatcttttcttcttccaattttacatcagtttagagaaattacttgtagtacagttgctatatttaaattcttaaagtgtgcacaaaggtttagacggacttgtcgatttccagtggagtctatagtcagactataagagtgtgttttaaactgttgttttttaattttgaaaattgaaaaaagatttgaagttattcttatc

SEQ ID NO: 89931 - DNA, 445 bp, Glycine max
  Clone ID: PAT_MRT3847_52218C.1
tcacctacgaatgctgctcgtggctgtcgcggcttgaaccctggttcgttcctgactctagccaaagggtctgaaagtggagggtcttatggtcaatggcagcgctatagggaggacagctgccacgacgaccttggctgagagcactgtggttctgactacgttgctcatcaagcggacattggatggccactggaacgtgattgacgtgcgctacggcctagtcggcggctacgctgtcattacataccgctgtgccgtagcgcaaccgtcaggcgcgattgtgtgtgggtttgtggcggcgtgggttttgatcgggcttaataagcttgccgcgaatgtagagtacgatgatccgttggatgcggctcagcttcacggcgggtgcggagcgtggaggtgtctcttcacgggattgtttgcgaagaaagagtacgtggaggag

SEQ ID NO: 89932 - DNA, 1553 bp, Glycine max
  Clone ID: PAT_MRT3847_52219C.1
gtttaagatcattgatactgtgaggaagcacatactgactggaggaccaaaacgtctgcctttcactgttccacctcttgttttttcttctttaaagttggtcagacagttgcaaggtcaagaagaaaatccttttggagatgatgcatcaacaacaccaaagaaaatttttcagcttttaaatcagaccatcgagactttgtcaggtgtcctggcaccagaattagcattgcagttgtacttgcaatgtgctgaggctgcaaatgactgtgaattggaacctgttgcttatgaatttttcacccaagcttatattctatatgaagaagaaatttctgattccagagcacagatcacagctatccatttaataatagggactcttcaaaggatgcacgtctttggtgttgaaaacagggatactttaactcacaaggccacagggtattcagcaaagcttttaaagaagccagatcaatgcagagctgtgtatgcatgctcacatctgttttgggttgatgatcatgataacatgaaagatggagagagggtcctattatgtcttaagcgggctttaagaattgcaaatgctgcccaacaaatggcaaatgcagcacgaggtagcactggatcagtaatgctcttcattgagatattgaataagtatctttacttctttgagaagggaaacctacaagtcaccgttgctgctatccagggcttaattgagttaattatgaatgagatgcagagtgataccacaactcaagatccagctgctaatgctttcttagccagtaccatgcgctatatagagttccagaaacaaaaagggggtgcggtaggcgagaagtatgaagccatcaaggtttcacatgctggatgaccgatacccttgttgttgtcgtgttagattttgaagcaatttgttcttgggcagttccagctactgtttacaattgtctttagatttcaactgaagaaccacaagtttgtgttccttcctgatatgtgctgacagcaaatgtacactcggtcattgagttaagactctgattcattgtgtaactaatgagactgagccaccattaaacattgttagatctttttttcttccaattttacaccagttaagagaaattacttgtagtacatttgctatatttaaattctttgtgcgtggaaaagtttagctagtgttttcaattgtctttagattccaaactgaagaaccacttcctgatatgtgcccacagcaaaagtacactcgctcattgagttaggactccgattcactctgtaactaatgaaactgagccaccattaaacattgctagatcttttcttcttccaattttacatcagtttagagaaattacttgtagtacagttgctatatttaaattcttaaagtgtgcacaaaggtttagacggacttgtcgatttccagtggagtctatagtcagactataagagtgtgttttaaactgttgttttttaattttgaaaattgaaaaaagatttgaagttatttttatccaaaaaaaaaacac

SEQ ID NO: 89933 - DNA, 242 bp, Glycine max
  unsure (1)..(242): unsure at all n locations
  Clone ID: PAT_MRT3847_5221C.1
attaagtggccacttaattatatttccagataggaaaaggagaangtgaacactttgatgatggatggttgaaaatttgcatgattttttggcaaatgatttaggcaggctgcttggtacctaattattttgactagggaggcttaatgaatatctgttctaacttcttaagtgttttagcctgtatttttattttatggtgtaataactttgtaatatagggattttttacatgttcctat

SEQ ID NO: 89934 - DNA, 813 bp, Glycine max
  Clone ID: PAT_MRT3847_52220C.1
cttgatgcctgagtcacggcgcgcaacacggtttatgatattaaattaatgggaaattcactagtaaaatattagatgaaatttagatgaaagaactgatgacgaatacacaattagaaatgaaaaacaaaatacacaatcgctgtgccaaaaagattataaaaatgcaatcacccacaaaatttggctccaaacctccaacagagcaacgtaacatttgggttttagctggaggtgttgctatgtgttacaagagaggaaaagtagtactgaacctatggccaatcccttgatagtgaatcacgcattgcgcattgtatgtatattgctgatgttaaatagtattaaattttggttgtcaaaataatagcattagttttgaatgggaagagtactatctttccttattttaacttcaattttaatatgattggtggattctttcattctataaagggactacctacccattttcacttgtactgtttataggtaacacatttcaaatgtggaggggtgtccctgggagttggtatgcaacatcatgtagcagatggagcctctggtttgcacttcatcaatacatggtcagatgtggctcgtggcttggatgtttccattccaccattcattgatcgtacaatacttcgtgctagagatccacctcgacctgtttttgatcacattgaatacaagcccccaccagccatgaagactcaacaacctactaaaccaggctcagactcggataatgcagcagcagcagcagcggtgtctattttcagactcacacgtgagcagctcaacacactg

SEQ ID NO: 89935 - DNA, 573 bp, Glycine max
  unsure (1)..(573): unsure at all n locations
  Clone ID: PAT_MRT3847_52221C.1
atagtctcatgccaatgggggggggggggggtctcaaaaacatatatatgggggggccgggcgtcacaattagggcatcttccaattttttattccataatttctacctttccttttctgaaatcctctacttagttaattgggtatttcctattanacatatnatattatgtgggggggggggggtnnggttcnttaaagggggnggtnttaaagattgaaaactntgaatcaactttaggggacaacacccggcccggtggacggggacaaagcaacaaaggttctagcattagatctccaagcttatatgtattatagcatatctaatatagaatataaatagattgacatatatcttcatcaatatcttcagtgcactaattgataatgggggtcaacaggaatctccacctggaggtacaattcaatctttgagatttttttttctttttaatgggcgttccaattggtacaatggaggtggaaaattttcnccattctaaaaatgctactataccttggacttaaggttaatgggaccgataaagtataaaattaatatataaaaat

SEQ ID NO: 89936 - DNA, 697 bp, Glycine max
  Clone ID: PAT_MRT3847_52222C.1
atccctctccacaccatgggctatggggccggtcatgtcaacccacaaaaggccctatctcctgggcttctttatgatgcctccacccaagactacatttactttttgtgctccttgaactacaccctcgaccatcttagactccttgtgaagcatcctgatgccaattgttctaaaaaatttgctgaccctggcgacctcaactatccatccttctcggttgttttcggaagcaacaaggttgttcgatacacgcgcacgttgaccaacgtgggggaaccgggatccgcgtatgacgtggcggtgagcgcgccatccaccgtggacataacggtgaatccaaataagcttgagtttggagaagtaggggaaaggcaaacgtacacggtgacatttgtgtcgaataggagtgttaatgattccgctacgtctggttttggtagcattatgtggagcaatgaacaacaccaagttaggagcccggttgcatttacatggacctatttttgaggtaatgctagagtgaaatgaaaaagaaaagctgcatgactttagtctttagtcacattgccgttgccatcagtcgagattgtaaaagcaacattgacagtcgttaacagtgtgtgtatcacgtggcagaatgctatatatcaagaatgcttacgactattattaatttcaatgtttcagaatcctc

SEQ ID NO: 89937 - DNA, 489 bp, Glycine max
  Clone ID: PAT_MRT3847_52223C.1
ctgaaagtcctgatcagtcttttgtccctgcaagaccaaccaagaggctcaagacattcaatacctccaacacttgtgccagtgacataatttcccacaaggtttctgcctcttcatcctcccaagttatttcctttgaccacttcaatgccccatcagatgcttcttccctgcaatttcatcgaaacctggacttcgatgtgaagccgaaaatcgagaaagcgtctagtgggaacatggattttgcagctttcgtttctcacggttcgtatgtggacaaaacattcctaagttctgatacgaatcaggttggaataacctctaggaacccaatccaagctcaagagcacgtaatagctgaaagaaaacggagggaaaagctcagccagaggttcattgctctttccgccatcctccctggcctcaagaagatggataaggcttctgttttgggagatgctataaagtatgtgaaacaactacaagaac

SEQ ID NO: 89938 - DNA, 435 bp, Glycine max
  unsure (1)..(435): unsure at all n locations
  Clone ID: PAT_MRT3847_52224C.1
ttgttcagcaggctnntnaacatcctactgaggaggatagtagggcgnnacaacataaaaataatgccgttctctattacagaatttatctactggagaataccttgtcgcatctactactgttgtggcggagatattannccacaattacatcataacctttnnnnnctaaaaagatgatatgccgccccaccaatacatatggccaactctccagctgctggttgctctactggtgaatcttgttgatcatggagcattttcattccttctttcgttgataatnggggatcctcggggagctcatacgcttgtccattttttgattaatggcggtagggggacttgacctactatcatcatccacagccttattatcaggagtttantaagcctgtttaatacaacagtagcagccgtgaagannnctcactc

SEQ ID NO: 89939 - DNA, 168 bp, Glycine max
  unsure (1)..(168): unsure at all n locations
  Clone ID: PAT_MRT3847_52225C.1
atgaaagaaataagtcgctccttcatctggctgataattactgtgaacttatagctggtagcatggaagtgcatcaacttacgngaagncaagtcattatggtgaaccctgcaataggagtgtttgacattctggttgacgatttggaataggctgtggagcttacca

SEQ ID NO: 89940 - DNA, 335 bp, Glycine max
  Clone ID: PAT_MRT3847_52226C.1
atcaggaaaagaatcagaaattataatatctgaatcataaattacataagcttgattgaaccttagttaaaaattcaacctgtatcaccacctcctgcagatgcaatagattgagctaactcagacttcaacaaaagatactttttccaaattttaacccaaaactctagttaaagcaattgacttgataaaattggagaattctcaagaaatttgttaccaataactatgatatgaagaatattactgggtgagaaaatatatttttgggttaacagtccgcagattaatgataccaaaataggaaaactggggcttaacaattctattatttt

SEQ ID NO: 89941 - DNA, 984 bp, Glycine max
  Clone ID: PAT_MRT3847_52227C.1
ggaatgagtttacgattaaatattaacacaattgttatgcgacgttgttttaaatgaacaacacaaggataatctgagaagggacggcaagagataatttacacttctttgtaatcatttattttacaaattgttcatttttaaaaaaataaatttgcatgtttctttgattaaatatttgttttatcatttataaggagttacattgtcaactagaaaactatatatattattagatataaacattaagatttagtttttaagtaatattttaaaagaatcagtatttttgtataattaaatattacccgattaggataatgtcaaaatgaatgaaatagttttggtgaactaaatgaaatataaaatttcatttttagagtatttttctctctctcctcattcatttccaatacatatacatatcttgacaagtttaaaaaagctattcattatatttttccatcaaaagtcatttaaatcaaaactaaaattttaatatatatattgtacaagataaatttttattttatataattatttttttataataaataaattatattatgattatgattattataaataaatattttgagtatataaattataatttagctctatattcaactatttaaattctgatataaggttatttaaaccattaaaagtttaaaatattaaaatataatttagaaataaagataaaagaagattaggttttactagttacaggagtagtgtgaaatgcacatttaaaagatagactagagataatattgatgatatctaattaccaaaatgaaaatccagttttttaaagtgtgtattttaatttataatacatgaatatgtgaattgtcaattcaattaattatggtttatatttttaaccggttgaaaaacaaaagcattattgtcactttgttatagctcagttcattcggacgcgtgggtcgacgcgggaattccggaccgaaaccg

SEQ ID NO: 89942 - DNA, 342 bp, Glycine max
  Clone ID: PAT_MRT3847_52228C.1
acaaaaaaaagcattgatgactaaaccacaaattttgtttttttttatgatgccaaggacaattttgtgttgatcttaggcaagggggggaagcaccaattagttgaggaggagataaacccaataaggaacctaaaaataacactgacagaaaaatctaacatggacagaacaaatgcgccgaaactttagaccggtctaaacatgaagtggtgcacacatctaaatgagcaaacgaatcaatcactaaggaggccaaagacacattctaggctgaactggacattgctagccatgcaacaagggatttataagctaacattagcaacaccccaaacccat

SEQ ID NO: 89943 - DNA, 234 bp, Glycine max
  Clone ID: PAT_MRT3847_52229C.1
acgaggcttcatcaactgcaatcagcgtgcgaactcacaacacacacacacacacgtatatatcatcactcacgctctcaagtgtcaaaccgacatcgatccacaccctacgcagtgacaaaattcgtaaccgttcacactatggttaaagaccacatggaagctggtctccggaagaactccacagcggtccagacggtcctagacgaccttgctcggatcgatgttgcggga

SEQ ID NO: 89944 - DNA, 494 bp, Glycine max
  Clone ID: PAT_MRT3847_5222C.1
atcttcactatagtccacatcacaacccttctattcattcataccacgcatggctgccatgaactctagcgtattgaccgagtaactatgccatataaggagcagcgcgtgcaacagctcagtgggaaaggtcagattacatggcactatgttgcatcctgtgactacaagtagccatcgaacatagctgaggacacagtgtctatagccaaagaatctgaaagctgacggagaggtgcccttgaacattagacctattctctttacacctgtgcgtctcgcaatgatcaagccacagcttcgatcatagccaatgacctcgtgagaaacacggccaacgtggacttgaccgacatgcagagagcagctactactgaagctcactgtggacgagcctacatcggggcattcagaactggctagggccctgccatctctactgttatccatgagctggccaagcagaatagagagccattgcttactgacgactg

SEQ ID NO: 89945 - DNA, 402 bp, Glycine max
  Clone ID: PAT_MRT3847_52230C.1
gggccggaaaacctggtacgacccacgcaccccggtgacgaccgcccacgcgaccggagagaaggcgggagatagagagcgcgggacgcccggagacccaccccaccccacagggggggggggcgcaacaaacgcaaccagaagcagccacggccacagcaagaacggggaaggacgcaccgccggacgagcacgacaaagcaggacacagacaccccaagcgaacaggcaagacggagcagccagagaggacagaaaacgggaaaaccgcaagaaagaaggagaaggaacccgacgaccccgaccgggacgaagacagaaaagctaccagggcaagaaagaaccacccgagaggaggaacccggggcgggggcaagaagaggaaaaacggcgggagcaaga

SEQ ID NO: 89946 - DNA, 448 bp, Glycine max
  Clone ID: PAT_MRT3847_52231C.1
ctcgagccgaacgatgcatccaatccttgcatgaaccataccattcacgactcgaaaactaaaacggttactttaatggtgccttcgcaattggagcaccggcttatcccactgcaacaacactccgacgaagacatggatgaaccagctggccccggcgctgctagccgggacatggttccaccaaaggaatcaccggcaaaaacactaaggaacggatctttgggcctagagaaaagtgcagaacacgttgtgactggctcatatccgatgcatatcaatagacttaaccgacgcaatagctagaacctggaaaaggaacaaaactggccaacaaagatcaagctcgaacatgatacatgcgtccttacatgatgcgactgtaacaaatcatcgcaactgcgactgacaaatatggacccatcgagtatgtgaaaggccgagagcc

SEQ ID NO: 89947 - DNA, 406 bp, Glycine max
  Clone ID: PAT_MRT3847_52232C.1
atcttattctttccctcacgctatctctaggcaacgccagatgatggagacgactgctaatcgacacgctgacgttgtgccaatcgcggatatgctgaatctatgtgctatgcgcgccgagtagaggccaacgtgtgcaagcacagccaggacatctggacgctgccaaggaacgacttgagaaggcatgtgctgaagccagggtggacttgtacggtctgacagatgctactgaggcaccactgtatgactaacgcgctgctgacctatgagctgctgcatatgctctagaccgagatatggaaaattgcgcacgccatcggactgcatcactatccagagaatgtcgacggtgacgagcatctgacactgtctggggacgacccgactcttaatcctacgatac

SEQ ID NO: 89948 - DNA, 975 bp, Glycine max
  Clone ID: PAT_MRT3847_52233C.1
aaaaatgtataaaactgatacccacagttatttatttatgacaatattactatttaaattattttaaaaattaataaatttatcaccataaattatgattagatgattgtataaaatatagacattagagtcttacttaaattccaaaacatgttgtcatttctcacaatataagtatgccccattgttatgtatagacaaccaatatctaggtgcttaattaatcatctggaaagttttgttttagtaattgaatggcaagttctcaagagaagcgaataatggtgttagccatggatgcacatgagcatagcaactatgccttggagtggaccctagaccatttcttcaccccttttggtgcaaatgctcctttcaatcttgttatcgtcaatgccaaaccctctcctcccccggctgtcagtatggcaggacctggagccctaggatctgaaatttttccagccgtacaggtgcagctgaaagcgaatgctgaacaaattgcagaaaaggcaaagcaattttgtgccagtaaatcggttcttgaggtgctagtggaagtggtcgaaggtgatgctaggaacgtgttgtgtgatgctgtagacagacaccgtgcatctgtattggttttgggtagccacggctacggagctatcaaaagagcagttttaggaagtgtgagtgaccattgtgctcgtcatgctcattgttcggtgatgattgtgaagaggcccaagttcaaatattaagtcgctccctgccttcctactgtacttgatgattataaatgcatataaagtttatatttgaatttcataattcgtatcctatgctttgagatgaacattttgacaaaatttactatattttgtataattacctacgaagtacgaacaataagttattactctaatgttgggaatcatttaaggtttatatgacacgacattaatgcaaaccagtaaattttacacc

SEQ ID NO: 89949 - DNA, 396 bp, Glycine max
  unsure (1)..(396): unsure at all n locations
  Clone ID: PAT_MRT3847_52234C.1
acgagggtcattggtggattagaaattaggattgttgttttttattacttgcaggaagaagagaaaactaatgctgcttactatattttatagtagatatatgttttagtggggaaagtggtttggngccnnctnntnnnnngannantnttnattnnnatccaccngtgccnattngatatngtganttttttaaatgacttaattgaggcantttnntttttaacaaaagaacatgtgactgctnggntttatggacccnncccnaccnccctccaacctccacctggangacngatnnccntccctcccccnccaccctccttccnccnctccaccctcnnnacccncnncccccccccnnnncctccnnnnccnnnntnccccccccccnnn

SEQ ID NO: 89950 - DNA, 310 bp, Glycine max
  Clone ID: PAT_MRT3847_52235C.1
gatgccaaatgctgttccttcaaagaggagatatatagttggagatcacgtctctgaagttgctaagatgactgctcccaacatgaaatgaacagtctcttacttcatagcagttggaaatttggctgatgacaccatcaaattagagggttttccccataagctggtggcaggtggagagaacaggtttttattggattgaaaatggcacaagaggaattcgtacagtttggacaacacaggtgcgccagcaacaacaccgcaggatgatgggagaccatatccgcatgctatggcgcaagatagtacc

SEQ ID NO: 89951 - DNA, 1906 bp, Glycine max
  Clone ID: PAT_MRT3847_52236C.1
gatataataatatttttcaaatatagatttttgggtagatttgtcaacctaaagttcatacgccatactcatatggtccatcagcttttttactgaattaaaccacgtaacaaaccgtgtccacatcatgtctagacacatcacacattcaatttttactgaaagtatattggagaataataatttgcttgcccttctggaatatccattcatgcttcttgcttcatgcttccttgaatggcaactcatccaaattcttggaactgtgatttacatttctaaaagccaattttgactgcagaaaaaagttattattttctctatttgaactgcctattcaacagttaaagttacaacgtacaggaaaaccaattcaatttaatttctatctcctatttttctaattgatgaacgaattaaatgtaacttgagtcccctaacagtaagtcgagcatgtcattggaagtgaggagagttgttccaccaacaagcaactctatatcaggtcttccactttcacccaatgccttatgagcttcacgcacctcgagtccattaatgcccccaataacaaacaccaaaatgacattttgatcggcaagacttggtttggcctgaccaaggccaaatcttccaaacccacttttaaacaagcgccccacagtggaagaatgatattctaacccaggcacatcgtacttgcccaacacccttgttagtagcttataaagcaatccttttctatcctcatcaaaattagcttccgtagtcaatgatccatccctcaatggtatattctttctttttaaaccagataacttatgaagaaatttgaaaaatttatccaccctatctcgcaactccaacttcagttgcacatcaccatacactttttcatttttgttgtcatcatcaacatcttcatcaccccatttaccccactgatcatcaaaatcatcaatatctagttttgaaggttcttcagctgtttcctctgatttgtacttgcttacattagtttcaagctcttcccgtagtccatctagaaacttgagatttgctactgatggattttcaagaagagcatctacaacagcttcttttaacaaatgttcctcttgccaagaaaatggcccatcagaaccagatgttggaaaattttcaccagccactatatatccaatgatcatcaacaacaaagcatcttgcaaagaaagtaacccctttgatatctcccttttcccttcatttacatgtgatcccagcagagcactcttgttgatgagatcaccaatttgaatggcaagactttgacttgtttctccagaactaacacccagaattttctctgcgctgctaaatgcatcccatttagcataatttgattcatcaagggaaaacaatgtggctgaagctaattggataattcctttgttccttagcaaagaggattggctcctggacaaagctttgatcatggcttgcaactctggctttgtaacaagaccaggacgagacttcacattcacagtaagattttccctgcgcagagattcttgtagccatttcttgatcagtagggccccatcttttgtttttctatctagaatagcctccaataatggcattccacggaaattttcagaggagataaaggacccggtaagtatctctacatcagactgactaggcttgtcatggattttctggcttaggttaatcaagccttcaacctgagaatcagaatcaccagaattccaaccacacaaaaaagcttcaacagtttctaaaagccgaaaattgtctatttgccaatcttcttcattcaggatctttgcaaggggtatctgaacatctaaaggagcacgttgcaggtaggaagaaccaagtttgagttggcttcctg

SEQ ID NO: 89952 - DNA, 437 bp, Glycine max
  Clone ID: PAT_MRT3847_52237C.1
ctcgagccgaatcggctcgaggcgagaagacgacagaagggctatcctactcttttataacgtagtatttgtagagggatgggaccaagctgggatagtgtagtaatgtgtaaacgtcataagatacatacggcggatccaggcgttacgaacggtgcctctgtcactcctccaccgccaccttccttaacacactgtcacatgctgcacctgctgtttgctaaagtttatcattcaacgacgacaagcaagaaactgcattgaatttttttattattattaggtgtccgtacatatacgtaatataaaaatactaaaaacatagtacatctcactaatgattttgaattacttaacaaagtttttgttatcaaacaacttttatgttcttatgcactgaatatttttttaacttggtttaatatgtttatagacac

SEQ ID NO: 89953 - DNA, 454 bp, Glycine max
  Clone ID: PAT_MRT3847_52238C.1
ggggaaaaggaacccccccttctttactttaaaaagggcccttcgggggactttacaaaaaaaaaattgggggccagggggctgggccccccaaaaaaaaaaaaagcgctttaggggccccaaggggcaaaacaaagggggaaaaaaaaaaatcccgggggggccccctaatccaaaaaacccccccgcccctttaaaagaaatttttacaatggggggccaaaaaaaaaaagaaaaaaaaactttcccggaggggcttttaaggcggggatttggccaaaaattgggaggttttttttttttccccccctttaaaagagggttaaaaaaaaaatttaaaccgggttttttaattccccccccccgggggggggcccaaaaactgttttttgtggcacccttgaaaaaacatttttaaaagcttactaagtttccgggcccaactcttttaaaa

SEQ ID NO: 89954 - DNA, 157 bp, Glycine max
  Clone ID: PAT_MRT3847_52239C.1
atgcatttgtggctcacgagacgaccttacccgtaattcagtcctggctgtctgaacacaaccgtgtatctattgcaatgtacacactgaaatgtgaatcgtaaattatcgtgacggattaaaacatcataccataccgtgatggtgctgccatatc

SEQ ID NO: 89955 - DNA, 190 bp, Glycine max
  Clone ID: PAT_MRT3847_5223C.1
aagcatgctttaacttacacggaacgccagacatcccattggtactgctcatgaagactctcatctcaaagaacgtcaccatagcaaagctagcttaaactgcacactgatgatgacactgttacattaggggtccagattattttgacaacataaatgtctggttcccctacgaggccggacgtgcatg

SEQ ID NO: 89956 - DNA, 410 bp, Glycine max
  Clone ID: PAT_MRT3847_52240C.1
ttttttttttgaattcgaaacttaaactgtcattcatgaagcaaatgactaaagtcattctcaacttccgatcatagatttgttgcatatgtacacaagctaaaagaaaatgaaatcccgaaagtgctaataagtcaccccattacatattatgttgctaacaccattaaaaacagaaaagaaaaaaagttccttatagtagggtttttttttcaatgtgtttatttttttttaataataattgtaattattccaatcgatatttaatcacccttaaattttctcattcatctcccccaatatattttacaaactcatggttgaatgcatgcttgtgagtccccccaaggagcccaattggcctcacttccaacacgtggcatcattgactttcttgattgagagtccac

SEQ ID NO: 89957 - DNA, 372 bp, Glycine max
  Clone ID: PAT_MRT3847_52242C.1
ggatttcccgggtcgacccacgcgtccgggccgcctgaataaggctgtcattcttcagggctccaaccacctccaactttttgcttagggccacagcagattcacctacactgtccttgtcgatgggtggttcaaaaagacaaattgatggggccaggcaatcatttgattccaaaccgataagccctcttggctggcatttcttgacattggacctcttgacatcgggggtactaaccaaaaatttcgggtggagggtggccccttcttttttaaataagtggactccaccttaatttaaaaaccaaaaccccttgaaaaaaatttttctttggcaattctttcttttaaaaacccaaaaaaaaaacccaa

SEQ ID NO: 89958 - DNA, 280 bp, Glycine max
  Clone ID: PAT_MRT3847_52243C.1
ttcggctcgatgtccatatcgcggttgatagcatagcatcggtcactaatggaagccttatctgattgtacctgtgcgcgcccctattataaatggagctttctgcattttctagctatctaagcagtttgctgatcgcttccttgtatcccattttcttcgaatcaactttggtgccgatgctctcttcctcttcgtcgccgcgattatggtctctgttggagtcccaagtcaaaaccgtgttttcggatcagaatgtgctcggagaaagcttcgtcgt

SEQ ID NO: 89959 - DNA, 2468 bp, Glycine max
  Clone ID: PAT_MRT3847_52244C.1
ctctctctctctttcctcccttccttccgtctcaacttcattttcctttcaaatagtaacggtagaggaatctcaccctctccttcctctcctctttctctcttcttccttctctttctctcatattaacctttaaattatcaaatcttaatataaaactaaaaaagtaaacccataaaataataaagcacacttaaaccacccttttgtacatgatctacatttttacttagctattagaagatgatgctgtgaaatctgttagcatagtctttaacctagccttcaacaaaataactttgtggcaacgatactcaatactttcttcatcctttaattattttcaaataaaaataaatgaattgaattgaatcaccactgtcaaaagtatactacaatctaaaagctaaaactagcgaataaggcccaagtactatatatgtacaagaacaaattaatcccaaataacttaaaaaaatatataaaaaaacactagaataatttttttggatctatggatcaagtattgagggatttcaatcttgggtatggtcaaattgaaacggggacttcttggatggatgagagactggtaacctcgtcatcgacgaagaaccttgctgagaaatccggaaaagccagggagattgagatcgaaatcgcgggtggcttcctgtgtgagtggaccccactccctcagaggcggttacgaacgctgttaccgccttcgtagtgacaacgtttgtgtcctcccaaggccttgtcctgtcgaaaacgtccatgtggcagatggagcactcgtgggtccctaccaccaccgttcgacgccgaactcgtcggtcacggcggaggaggtcgggtggttttcgtaaggcgagtcttccggtggactggccttgtgtcctccgagtgcttggtaagacgaagaaggctttgttgcaaaccgaacatttgtagctcagtttgggcggcgggatagcggcgcagaattgttgtcggcagacagcgggtttggcggtggagacactgccggcgccgccgcgagcgagcatgatgagacaaagagcgaggtactcttcctcggtgcatgaagggtgttgcagttgttgctccgtgcggctacgcttagaacgctttcctttcgtccacggtgtctctaagtaactgagactggtttcttcaaagggactaaacgatggagtggctgtggtgggtgattgaagagcttccaaagccatttgaagtgtaagcacttgtgaaatctgtaatagagtgtgaaagggaattagagaagtgcttgtgcttgtgcttgtgcttatgcttgttgcgctttgtgaatctgtaatagggtgtgataggaaataagagaagtgcttgttgtggttgcttttggtgaacttgagtttggcaacaggaggatatgggagtgagttagaaagttttatattgcaatgtactttttccatttacaaatgaaaatgcagcttgcaagagcacttggcttgcaaccaagacaaattgctatatggttccagaatagaagggccaggtggaagaccaagcagttggagaaagactatgatgttctcaaaagacaatatgaagctatcaaggcagataatgatgcacttcaatttcagaaccaaaaacttcagactgagatattggcactgaaaagcagagaaccaactgaatccatcaacctcaacaaagaaactgagggatccagcagcaatagaagtgagaacagctcagagattaagttggatatctcaagaacaccagctattgatagtcctctatccactcagcagaacaacaacaacagaacactctttccatcttctgctagaccaacaggagtggctcagcttttccaaaccactccaaggccagagattcagtgccaaaagattgatcacatggtcaaagaagagagcctaagcaacatgttttgtggcattgatgatcaatctggcctttggccttggttggagcagcaacatttcaattgatcatcatgcaaaaggagagagtgtgagagtgaggagagagtttcatattgcaatgtagtttttccttttccggatgaaaatgaaatcatcaagagggtatctgtgtcaattgattaccatacataatgagttataattaaattaaaaacccatgttttgataaacttgatgtataaaataggatatgtaagtaaatttttctggtggaacttgaaaatttttatataaaaagaataatagattagtcctttttctttttcaaaaagtgaagtaaaaaaaagtttcttaatgtagttttcccttttccggatgaaaatgaaatcatcagggtatctgtgtcaattgatccataatgttataattaaattaaaaacccatgttttgatattaaatatggtaatcaattgacacagacacctctagatgatttccatatttaatgagttataattt

SEQ ID NO: 89960 - DNA, 792 bp, Glycine max
  unsure (1)..(792): unsure at all n locations
  Clone ID: PAT_MRT3847_52245C.1
tacggctgcgagaagacgacagaaggggacattaacacgaatatatatatatatatatattaccagtactggaattcaaatctgaagaagcctagcttgtttcattgttgtccaacacaaactattgctttgtactttgcatagaaaacaagtatcaagagatttggtggtggaggattctgataatctggtcacaggggaagatggaaagcagagtggtatttgagaatgatttgaatctcaaggcaacagagctaagattggggttgccagggacggaggacaaaaccgtgcatgctattagtattagaaacaacaaaaggcaagtgcctgaaacttctcaagagtctgtttccaatttccaaggcctcacctgaccagcatgtggagagtgatccagcccctccagccaagtaagtttactcagcttttcaagaatcatgtttttatttttttctgtgtttaaggtagttatgataaaaatcaataaatttatcaaaagcagtagtttgtggttacatgctatcttcagccctttgccgtgtccggtgtccgacatgtgtccgtgtcagtgtccgacaccgacacgcgtncgtgtcagtgtcggtgtcggtgcttcataggttacatgagcctacatgtgtatggtctattttgtctaattctacatcttcctttagaatctttatatggtaaatatcaaatgtgtgtattatattaaacatatgtatttttatttaatattttctttataaagaagcaggagaattaatagaactagtaggaaaacat

SEQ ID NO: 89961 - DNA, 609 bp, Glycine max
  unsure (1)..(609): unsure at all n locations
  Clone ID: PAT_MRT3847_52246C.1
tacggctgcgagaagacgacagaaggggaccacaatcagctaatcccacactctcttttctctacctacaaaaaaaaaatcatctaagttctaacgatgaatcaccaacaacaatctcctgcagtgactgcatatccagcaggggctcagagcaacctagcagctccaccaccacctgtaggttatcccactaaggatgatcttccttcccaacaaaatgttcctgtcaaaaccactaccaggggtgatggcttctggaagggatgttgtgcgggcttgtgctgttgctgtgccctggattgttgtctctgattgaacatccctgcagtactttatggatttgagcttgttctctctgtcttttgttattttctttagcagattaattttgtatttgtctacgctaataaggatatttgtgtcctaagggacagcaaaatgtatttatgtgacggaattttgtatcttgttgatctttttgtactttgtggaaggtaactaatcacatggaccattattgcaattagaaaccataacggttcacatcaataaaaccactttatttaacggcggangggtgggggtagaaaaaaaaaaagcggccgctct

SEQ ID NO: 89962 - DNA, 639 bp, Glycine max
  Clone ID: PAT_MRT3847_52247C.1
gggtgagctcgcactctgcaaaatatgacgccgttcatacatggcgtcatagctctatacgcaatggaacagtagatgcgaggcaaaaggcgctaaatcttaaacctgcttctactccttgtcctgcaaatactaactcaaggacagccttcgcggcaaccgcgtgaaaggcataatatggctccaagtgaagcccaaaagctaataatatcacttgtggtagaatgcccaacaacacaccgtatacttatcaggtgccaattacttctaaaccgactttaacaggaccaaaccatgctacatatgccaacatctagagagactgatcctataatactacttgaggtaagagactccctgttaataacggactctagagcctatatactgttaggaccactttcttttacataaaagagtgaacaatcgttatgtgggactaacatgaaagacctggaggccatatgatggacaggctgatgaccgtagggataaaagaggctgcacgtgcataccttcaccatgtgtggactattgtcacagagaaggcacactgatgctgctcaggaggcaaagcatgtccttgacaatattctgcgcgaactcgctactacacagtattgtacatgacagagatca

SEQ ID NO: 89963 - DNA, 165 bp, Glycine max
  Clone ID: PAT_MRT3847_52248C.1
cgctctttctttttttttttttttttttttttatcatgatggttattagcatagtttacgaagtcccttgcaccattacccaaccaaactacagaatgccatgaattagcatcagctactatcgaccatacatgctccatgacgacccacagagagttctttttt

SEQ ID NO: 89964 - DNA, 246 bp, Glycine max
  Clone ID: PAT_MRT3847_52249C.1
tcccccgtcgagccactcgtacgagtttttttcacatgcctccgttgtcctttttataatccgcaatgtacgttagccatggaggttctcaatgaacatcaggcccggccaatccccctatgccaggccccgctccccagctcgcctgtgctcgccattccccacggcctcaatggcccttgaccgctccttcagcccggaccacctgaatgtctccccgtcccgcgtcctgcatcggtacccatc

SEQ ID NO: 89965 - DNA, 429 bp, Glycine max
  Clone ID: PAT_MRT3847_5224C.1
aaaaaaaaaaaaaaaaaaaaaaaaaaaattaaaatttaaaaaaaaaaaaaaaaaaaaaaaaaagaggataattaaaaaaaaaaaaaaaaaaaaaaaaaaaaaaaaaaaaaaaaaaaaaataaaaaaaaattgggcggccctttaaaatttccaaagtttatttaccctttaatgcaatataaaaccttttttttagtttaacctaaaataaatcaattgctccgtttttaaaaacttctatacttaaaaaaccttggtttaaccaaattaatttctctgaaaaaaatcccttttttacaatttgttaaaataataaaatggcccttacttattccctttatcaaaaattttctaatcctaattgcttattgttactccctctttaacgttatataatatcttatgtttttttttttttcattcttattt

SEQ ID NO: 89966 - DNA, 511 bp, Glycine max
  Clone ID: PAT_MRT3847_52250C.1
acccccctccgccgcgcaaaccgcaaaacgccagacgcgcgcgagagacacacaaggggggccaagcggaagcgacagacgccgacagcacaagggacaaaaaaggggaaccaacagcgaccagcactgcatagcagaaccacccaagcaggaaggaagaactacagagcgacagagggaagacatacacaaggcacacacacagaggcgagaaaacgagaagcaaggagcacagcacagaagactaaaaccccaaagaataaggaagccacgacgaggccagagaagaccacacagaccccaacaacaaagacatcaaagaccgggatgccccactggccgagggacaagcaccacagacagcaaaaaatacaaacggacacaccaataccaaaaacacagagcgcacaccgagcactagcagggcagggaaccatgcatggacagaaaaaaagaggaaaaagcaccgcaacacaccgcacgcaaggaaaacaaagagaggggagaacaa

SEQ ID NO: 89967 - DNA, 324 bp, Glycine max
  Clone ID: PAT_MRT3847_52251C.1
ttccattctttcttcaacgcgtactcaactggactatacaagactgaatcaactatcatggcatctgccggaacaccgatcactgccactgaagcccctgcctgcaggcctagagaatgcaggaccacccaggcctgcacccgatgctggaccaccaggcccaggaacccatcctggcccctcaggggctacactaccatgaccccatcgcagggacaccaggtccattacccctgccagacccaccatgtccaggacccgatggcccaccaggtgcaagtgcaactggctaactctgcatcagctcactctcggacgcatgat

SEQ ID NO: 89968 - DNA, 1445 bp, Glycine max
  Clone ID: PAT_MRT3847_52252C.1
cagtcaacaggagaaaaaaatgtggccttccgctgtacattcggctgttccatcttcaaaaccgtgggctcggatcttcaaaatcaaaacgaatttccattcgttatcatataaatacctcatcttcatccccaaaaccactttcagtttcagaacacaaagcaatggtggcgctcctagtggcaactacatccgaccctgcttccatcaacccggccaacgcgcttttgggcatgcccgggtggaaacccggtccccatttccaggatgatatgaagagctatgtgaatgaaggggtgagggtgttggtacatgggaagagcatagttgcggaagatgagttggacaagaggtgggaagaagttactggggaggttattgatgaagtgatcttcttcagcaagcacactgctgcctccaacaagcctgccctgactgttcaccctattggagttcctcatttgcgccaaggcgatgttcccccccaaggcggcagacctggatgggcagctcttccaaatcctaggatggggccttggcttcgccttttgaaaaaccttgcccaagctcataatcttgtccctgaatttgagattactttagaggccactcaccatggaccgttgaccaataagccaaccatgtttttggagattggtagtactgaagactattggaagagacaggatgctgctcaagttatggcacagttagtatgggaaggacttggacttggaggtgtgtcagatgtaggaaactggagcagggagaatgataacaagaaaatccttcttgggataggtggtggacattatgcacctcggcatgtggatgtagtattgaaagataatgtatgggtgggtcacctactttctggatattcgctgccaatggaagatccaaaccagtcaaaaggagaaaaaaatgtggagattggtggaacatggagacagtctataaaagctgcatatgaagccacttattctgcatttcctggtggtgaaattcttgcacatctagaccacaagagtttcaagggctggcagaagaatgccataacaggattccttgcggagcaaaacattaaaattggaaaacccaataacttctattgagtggatgctatgtgaacaacatagcttctgcagagtgcggaatgagtcaggctgaagattttggtagatcatactagcaatttaattcagttttcttgagatcacagtgatagttaatgaataactgaagtttgagataaactgatatatacataaatccaattctgatgaaaaacaatatttgcaattacatcaattaaaaccatatatagcaataatactttatagaatgtttgtttttaatgtttgtttccaatgtttttaatgttagacctgtcattaaactgaaaaaaaaaaaaaaaaaaaaaaactcgagactagttctctcgt

SEQ ID NO: 89969 - DNA, 600 bp, Glycine max
  Clone ID: PAT_MRT3847_52253C.1
tacggctgcgagaagacgacagaagggggaacaactcaattccaaaccagttcaatctttaattttcagtcatcactttatattggtcacattttcaaagtaacaaatataagatattctgtggaaatatggcaaaacttgctggctgtgtagctcatttttttattgcagcaatggttttgagcacgttttacgtgaccaaaactgtggcacaatcagagatagctcctacttcacaaatggagactggagaagggtttgctttgtctgtttctggggtgaccttgtgttcttctctgttggcttctattgtggcgtttatgatgcagtgaattgcaaggcattggctcctattcatgtgctgaaattatatatatgtttgatgaatttaaagggttgtttttgtttctttactatggttgcttcttgaacacggtgctgttgattttggcattgtaacatagtattagcttttataatgagtttcatgtttgtaatttgcgcaagtacttaatgtcttaattggtgtgaatagatatgttgtaattatatattgattccattattatccatcaaaatacataaagattttttcccttt

SEQ ID NO: 89970 - DNA, 425 bp, Glycine max
  Clone ID: PAT_MRT3847_52254C.1
cagtcaaaaggagaaaaaaatgtggagattggtggaacatggagacagtctataaaagctgcatatgaagccacttattctgcatttcctggtggtgaaattcttgcacatctagaccacaagaagaaggcatgttatgggcatatgttgaaagttaagaaaactaagtatgattttagctgtgccaaggagtttcaagggctggcagaagaatgccataacaggattccttgcggagcaaaacattaaaattggaaaacccaataacttctattgagtggatgctatgtgaacaacatagcttctgcagagtgcggaatgagtcaggctgaagattttggtagatcatactagcaatttaattcagttttcttgagatcacagtgatagttaatgaataactgaagtttgagaaaaaactataa

SEQ ID NO: 89971 - DNA, 255 bp, Glycine max
  Clone ID: PAT_MRT3847_52255C.1
agtggtgttaaggctttttttttttttttttttttttttgaaatgaactattttgctttggagaaggaacaaattccacacgcatattgcaaatttggcacaacaaaaaggaaacttggggccaggggaaaccaacagttttgcctgtgtccctcaaaaggaaggggtaaagcaggggaaaccaaataaaaaagtgaaagacccccaaaaaaagggggggcttcaaagaaaaaaattttatccttcagggggcag

SEQ ID NO: 89972 - DNA, 448 bp, Glycine max
  Clone ID: PAT_MRT3847_52256C.1
aatatccttgcatcgaccacgctcactaagtctccgaatcgccctttttttttttttctaacctaatttcgtatcttcttcatgacaaactcctatatctaaggggggcgtgattaaaaaaaataccactttcctaacactaaccaaacctaatgtccttaaaagaaaacccccacctaggttcttttcctaaccaagtatttgaatactacattgatttctaaagacaataattcaccacaaacactcctgacactacaacaccattcgctggcaaaatgaagcattctgtgccctcatttaacgagagacttgacgattgatttgtcatttacttttctgaagtcatgataacactgctcacagtccacaaacattacaagaactgcatatatttaaaccatttgaaattctacttcctccttatcatatcaggtgtcaaatttta

SEQ ID NO: 89973 - DNA, 295 bp, Glycine max
  Clone ID: PAT_MRT3847_52257C.1
ctagctatctcgatcgaactgtccaaggtcctgtcacgtaaataatatttggaggattaaatggtctggacttaaacatatgcatggtgtggagcccggtgagccaagcaactgcccattcaccgcgtattggcacgatagctattaacagtgcagttagattacgtagcgggagtgccagcgtaccatcgccaacacgggacaaccctagcgccagctcacaacagtaggaatcgctagatacggaagatattacaactcacgcaacaagttacaagggaggaacaccgggtag

SEQ ID NO: 89974 - DNA, 485 bp, Glycine max
  Clone ID: PAT_MRT3847_52258C.1
ctaaaaaaataaaaataaaaataaaatcaaaaaccaatccaatacaaacaggtttaatattatcaaataactataagggcatatccatagttccttattaggttacagatacaaaatttagctatgacctttgcttttaactcctaataagcattaaccaagcatagtttgttgggactgtactatgcgtgcgtcgtttttacagctagagacatttagccctgaaatcattaagcggcaaaaacctgcaactgcaatagttctttggcaatcttaatgcattctgtcatggggcaatttgcggtaattgcatttgtttctatgggaaacctgctggcagcataacccttctggtgcatggcgctcatcaaggccttcaaaggtggaaaattgatttttgcacggtttgccatctcatccaacttgatatacccaaatggcaacttggggtcactttcatccaccatcagttttataagcttttc

SEQ ID NO: 89975 - DNA, 541 bp, Glycine max
  Clone ID: PAT_MRT3847_52259C.1
ctatctaggaccctaggacaggacaggatgctggctgcgcgcaagttggtgctgcgcgcgagcgcctcgacggccggccgcgcgcaggctgtgcgcgccttcagcggcaactgggagtaccccaaggtcgagggcagcgtggcggacatcaccaaggcgctgaccgccatcggcgcgcggctgtccatccccacggcgccgctgtacttcacgcccctcaagatcgaccacatcgtgcgcgagatgaagggcgcggacgagctgcagcaggtgcacaagacgctgctgctgtgcgacgccaagatggcctacccgtccacgttcgcggccggcagcttcctgtcggcctgcatcaagcagaacgcggccgacacggcactcgagttcctgcgccaggccgagaacgtgcgccactacgtcaagaaccagagcttcgtgcgcctggccgagcactacgcggcccaggaggaccaggagaccgtggacgagatcgtgcgcctcatggggcacaagcgcgtgcccacgtcctacaagatgtaca

SEQ ID NO: 89976 - DNA, 249 bp, Glycine max
  Clone ID: PAT_MRT3847_5225C.1
gcaccaccctgtcgtttcacaggagtacgggaagggcctaccggttgagagtgcgtgggtggggatgcgtgactatagcccccagcttgttgtgccatcgattttggagttcgtgaatcggtttgagggtgggattgaggggattatgaagaggaaccatgacggggttgtgaaaatgggaaccatgttggcggagtcgtggggaacggttctgggtcgcctcctgatatgtgtgctagcatgattatg

SEQ ID NO: 89977 - DNA, 609 bp, Glycine max
  Clone ID: PAT_MRT3847_52260C.1
cgggctcgggggaggataggaagagcgacaaagcgaagggggagctgatgctggctgtttggatgggtacacaggctgatgaggcttttcccgaagcttggcactcggatgctgcgatggttagtgggagtgatgctcttgcgaacattagatcgaaagtttatctgtctcccaagctttggtatttgagggttaatgtgatagaggcacaggacctgatgccaactgataagggtagataccctgaggtatttgtgaaggctattctggggaatcaggccttgaggactagaatctctcaaagtaggagtattaatccaatgtggaatgaggatttgatgtttgtggtggcagaacagtttgaggagccgctgattttgagtgtggaggatagagttgcgcctaacaaggatgaagtgttggggaggtgtgccattcctttgcagtatgtggagaggagactagatgagaaacctgtgaacacaaggtggttcaatctggaaaggcatattgtgatagaaggggagaagaaggacaccaaatttgcaagcagaattcacatgaggatttgtctagaaggtggttatcatgttttagatgaatctactc

SEQ ID NO: 89978 - DNA, 406 bp, Glycine max
  Clone ID: PAT_MRT3847_52261C.1
cacaggacctcgcaatcacttcacaccaacaataatggtagtatattaattgaccttttcttgtttgataccattaaacatcacaaacacccaaacacatacatcactgtgaaactgacaacaacagtaaaagaccatgttgatgaaggagtgcacagcaccacataggagaagaagatgaagatctctcaagccgagacctggtgcgttaaaagcgttccttataatcgtgcagtttacaaatagattgatagttgcacacctttgacacaccaaacccaccttcacgctacaagacgtcacaccctacacctgcaacgccgccgaggggatcattgtcacttcggaatttcagagcacgctcatctctcataatccgagcgacgcggtaggaacatactatgat

SEQ ID NO: 89979 - DNA, 1781 bp, Glycine max
  Clone ID: PAT_MRT3847_52262C.1
gttaaacctggaagcaggtgcacaagtagagcatcatgagaacaacaaatacacggaagccacacataagttgatgaatgcttctagaaaagctcaaactttgattagacagtttggatgtagaagtgagcaagtagatgcaacaattgaagatttgcagaataaattgaaagaaacaacagttgcttttgaattagtcacagatgagagagacttgaataaaaacagagtttcagaactggagtctggtattcaatcactgcaaagtgcttgcagtgagcttaaggataagttagaggattatcatgccttggaagaaaaattagaggaaaaagaggctgagatttcatcaatgcacaatgctttgttggcaaaagaagaaaactccctctttccagcatctcaaatgagagatctctttgacaagatagataggatcaaaatccctattgtagagtccaaagaagatgatttggagccacatacttcagcccctatgagaaaactcttttatattattgatagtgttcctaggttgcatgatcaaataaactctctgtctcatgataaagaaaagctgcaatcaatccttgaaactagggatcttgacattaaggatctgaaggatgaagtcaaacaactcaatagaatctgtgaagactctaaaatgatcaagaatgaattgtctgagctcacctatgtattagaaaaaattatggatattttgggagctggtgaatgggttgtagataggaaatctaaaggttcgaaggaattaataccagcattggagaagcatatcattgccattctttcagaatctgaaaattcaaaatccaaggctcaggaacttgatattaagttagttggaagtcagaaggttattgatgaattaacgaccaaggttaaattacttgaagattcactccaagataggacttctcagccagacattgtacaggagaggagcatatatgaagcaccctcattacctgctgaatctgagataattgaagttgaagagggatcatcacttagcaagaaagcaatatctcctgtcccatcggctgctcatgtgcggaatatgcgaaaaggatctactgaccatcttgcactcgatattagtggggagtctgataatttgattaacagggtagataaggatgatgataaaggtcatgtattcaagtctctgagcactactggattcgtaccaaaacagggaaagctcattgcagatcgtattgatggactctgggtatctggtggccgggttctcatgagtcatcctagagcaagattaggacttattggctatttgtttgtcttgcatatatggctactggggacgatcttgtagaaaagttgtgaccaaacctacctggactgctcaacattgaatgtcctgcgtctgcaaattgtattatcgatataaaattgtccctttttattcatgtctttctttttgcttctttagcctgtttttctttagtctcgtcaattcactatttgttctctgcaatcacattttagggattcagagattctggtcttcaatgtttgggctcattttttgacagccttctttttctttaaaatcgaagcccctccattgtattagcctacaattgtttgattgcttcaatattaaaggatttggtgggtagaaaataggtagatgaattttttcgaacgttaatgtaataaaaatgtagaaagattttaaggatgacttatttatatctcaagcagtgaatgagaatgaagttgaaggatgactc

SEQ ID NO: 89980 - DNA, 235 bp, Glycine max
  Clone ID: PAT_MRT3847_52263C.1
ctgtcatgctggtgaccacttgcttaatgtctctagttatagtctcgcgcgggcgcacgatcatactggtggcgagttactccatactgaggataaaaaacatcgaagctccatctttaccagcacacctcaagcagttccaagagggcgcttaagtactcattagaatcgctctacatgaagctattcacatatataagctgccatctcacacatcgccagagcctgaacaact

SEQ ID NO: 89981 - DNA, 112 bp, Glycine max
  Clone ID: PAT_MRT3847_52264C.1
aactacatataaactcgttaatttatagataaagactgactattttctttgtgtatatcttgttttgggaagattaaaaacaaagatcctttgtttaaagcaaataaactta

SEQ ID NO: 89982 - DNA, 531 bp, Glycine max
  Clone ID: PAT_MRT3847_52265C.1
actactcttctctctctgcctatctgtaccctgtcgcttgctactatccctggcggacatccacttacctgtatgatacatggtgaccacatgccccaggcttttccgccacattgtctctcttaagagaatgatgagctcagcggaggacctgactgcctatgtgcagacctccatcatgctcacgctctgtctagaaacgatcggtaccaccatccctagcatctacttctgggtgcccaccgtcctattcaacagcaatgctttgacactctggggtggtggttgcctctgcactgccaactggttgtggagggactccttattacacgcttgggggtacactggtgctttccacagcagcaacagtgacagagctgtttaggccaaagaacacttgcgcactactggtactgagggagacctcagatactcagtatggctaggttatgctaactgaccggatgcttacaaagtaatgtacccaggtgcatgtcccggctggacgcgtttacaatatcctttacagtg

SEQ ID NO: 89983 - DNA, 476 bp, Glycine max
  Clone ID: PAT_MRT3847_52266C.1
ggcaagagtctctacatatggcccctgaaagttataggcctcttaggccttattgttctgtgcctgtggctggccttacgtcccaagaacccctcctactccattatgttcatctccatacaacatccctccaactcaagtgaaaactgcaccatcttttacagccttcaaattgaaaacccaaacaaggactcgagcatttactatgacaaaacgattttaagtttcttatatggggagcctgatgacgaggtgggggagacaactatagtcccattccatcaaggaactggcaacacccgggatgtatctgatactgttaatgccaaacctcgaccattcaaacctctcttcagtgccatctcaaatgcaaccacagagttaaaagttgctttgatcacaagataccgatacaagacatggtgaattaagagcaagttccacgggttacaactcaaaggtattctaccaattga

SEQ ID NO: 89984 - DNA, 157 bp, Glycine max
  unsure (1)..(157): unsure at all n locations
  Clone ID: PAT_MRT3847_52267C.1
gngcnanagaaaaaaacatagaaaaggagnngagnccaagaatgggcaaataaaataaatgttaactatgggaaactagtgcctggactatcatggaattactatgggaagacaaggctctccctcgttaggattgtaaggaagcaacgagaggatg

SEQ ID NO: 89985 - DNA, 482 bp, Glycine max
  unsure (1)..(482): unsure at all n locations
  Clone ID: PAT_MRT3847_52268C.1
tatacggctcgcggctattgaattttgcaagggaatcgaacacggttgtcaatcctttggtcagcttctcgtcacttcattcgttccccactgacttattatttcgatattcttttctcgagaaaatttcactttcccggaaaatcactccgctcctcctctcactctgaaaaggttaaaatcgtggattgaaaaaagcaaaaaaaataaaaaataaaaattgaaacaacctgcacgatcttcgcgttctcgatgcaaccagaatcgctatcggaaaaggttttggtgctcgcggaggaagagaaagaggagaaggaagaagaagaggaaaaacatagcgagagcgtcggtgtagagattattggttaccgatgattcctcccaggcggaagaaatggaccgaggcggaggagaaaaccctaatcgacaagtacggngagatggtagcggacggttcgctggcgaagatgcggactcgggag

SEQ ID NO: 89986 - DNA, 336 bp, Glycine max
  Clone ID: PAT_MRT3847_52269C.1
ggcacaagaacctattttgtcattgaagggtatagctgagaactgtataacaaacacacacaagtggactaaagaccgatttctcacaccattaactttcattacaaaacagtcttgttttcccactcctaaagcttgaaaatgcttgtacacactcagataagccaggtgggaagctagctgctagttcttccaactgattagcgagattaagaagtcccctaggttgtaacgtaagcttacggaaggtaaattttttgaccaacttaaccatgttgctatacactgatggtcttgttggcaagatgaaatttatcactcatagcatccatccca

SEQ ID NO: 89987 - DNA, 404 bp, Glycine max
  Clone ID: PAT_MRT3847_5226C.1
cgcacacattatgtttcgtacaacttatgatttttaattatgatctttctggggacgacgacaataacataaacacccacctttctatcgttttactagcctgccatgtttttgagcttgagatttatcctataaactatttttttttggaacctatttgtacattgacttagtcataatggtcccccacagctttgtgttaccgtgcaaggcttgatatttttcaatgattgcgcgctacggatagtgtacacctccagctaaaaatcatttgcacagggaagggagattgctaacatatgtcagagtgccaccgacaaatgcctatagggaaggagccgagagggttctttgattagctacgggcgatgcgtgaactgacatagctcttatgagcggctacg

SEQ ID NO: 89988 - DNA, 312 bp, Glycine max
  unsure (1)..(312): unsure at all n locations
  Clone ID: PAT_MRT3847_52270C.1
aagggcagcaggacgccagcaggaaccggcccggaaaccccggggcgacccttgcgaccgaataacacnagggcggaggcgcgagaggaccgcaggggagaaaccgcgggagaccacagggccaccgagacaacaagacgaaaaagcagagacccggacaccccgggagaggacaggcgacagcaggcgaaaaggagagaccggcagacacaaccaccggggggagggcagccagcccacaaaacccgagccggccacacagccccagcgagaagaaaaaacacaagggaaaaaaagaagggagccccggca

SEQ ID NO: 89989 - DNA, 397 bp, Glycine max
  Clone ID: PAT_MRT3847_52271C.1
atccagtggacgggctccaaggaacttcagattggtggatgagcttgagaagggacaaaaaggaatccgagatggaacagctagctctggaatggatgatggtgactacatttacctgcgctcttggactggaaccatgatcggcccctataatcctgtacatgatggaagaatatatcaattgaatgaggtttgtgataaagactacccaaaccagcccgctactgttcaggatgattcactactcactatgactcgtgctactgatgaagctggcgtggttgaatcacagacatatctgcttcgtgcgtcttggcaacggacgtctgccatggaagatattctgaccctactgaagaatgagatggcggctacacataagctgaagcttgtgcaa

SEQ ID NO: 89990 - DNA, 250 bp, Glycine max
  Clone ID: PAT_MRT3847_52272C.1
agttgagccttttccaattgcagaagttgaagctcgactttgtaagttggatgagatttcaactttgtcgtccatcaatctgacgcatgcatatagatctgaaaaatattcagtacaaaacagatcagagttggagaatttttcgcccaatactcacgggagtttctgttgctgctgcttctcaacctacccatgttgagaattcagcttttgttgatggttctgttgggcagtcaaacactttttcagt

SEQ ID NO: 89991 - DNA, 316 bp, Glycine max
  Clone ID: PAT_MRT3847_52273C.1
gtcacctacgctgcacgcaccctcttttcctcttcgtcgtcgtagcgacaacgaaccagtgagcgtagatacaatggaacccatttgattttcaggtatgatcctcccatctactatcattgtgttattgcaaactacattttaataacaattccgatattttaaatgttggacggtttgtattcccttatctcttttctccacactgcaatagacgacgtctgtcgtatcctcaactagggtttccccgaatgcggcctgattcctacgagtaagaactggacgatccagtcatcgattttttgcgagattgatc

SEQ ID NO: 89992 - DNA, 530 bp, Glycine max
  Clone ID: PAT_MRT3847_52274C.1
ctcgagccgatcgcatttcaaagctacaacttgtcattttatgccaaatgatacaaatgcataggctacagtatagggtgtggaatgtccttttagatagaaaggaaggtaggttgtattgtacttcggtaattcttgctgctctcatttttgttcacaacctacaagttggtataacgttaggtaaggccaatggactagcttctgttcatgagggagatagagttagttagtgatggttatttaggattctaacagattgaaagagataagatataaacagatagggagacaaaactactggattggattttagtaaagatgagagtgggttttgagggagagattccaggctctcaaaatcctaagtggacacttgtattcattctttgcgagtgaacgttgtttacgttgtattttcagttggtggcttatgtggaaatggcacaatctgaatatgacatggtgaaccttcatgaaggttgtgatcaaacatttcctaccacagttctacctagatcacttggtct

SEQ ID NO: 89993 - DNA, 262 bp, Glycine max
  Clone ID: PAT_MRT3847_52275C.1
ctcgagccgctcgagccgattcggctcgagcacgaggtctcacataacaccaaatctcatcatgaccatcatcatcataatcagcatagcataaccctcgttatctctctctaaatctctctcaattctctctccttagatctgcgaattatgcttagattccgatagataaaatgaaattcaatcaatagtcagtttggatcctcgcggcggggaatggaagcgttgtggttgttgttggtggtggtgcggtgaatctagc

SEQ ID NO: 89994 - DNA, 561 bp, Glycine max
  Clone ID: PAT_MRT3847_52276C.1
attaattcttccgttcattctattcattctccacattctctagctcattctccacattatacattctgtctataataatatataacaatagtaatcactaaaccatggttactaaattcctcatattcttctttctttccatcattgccctcacctctgtcactgccgaagatggcacaggtttcgtgggctcaccaaaccgtaagttcctgggcctgaaaaccaaagaaaaactcagccatttcaggttctattggcatgacatattgaccggaagcaacccctccgctattcaaatcattccctcagttccaaaatacaacacaaccacttcgtttggtttggtaagaatcttagacaaccctttaaccttgggaccggagttgagctcgaagcaagtggggagggccgaagggctctacgcgtcggcgtcgcggtcggagcttagccttctgatggtcatgaacttcgccctaaccgaaggaaagtacaatggcagcaccatcaccattatgggaaggaatagggctctcagcaaggttagcagggagatgcctgtga

SEQ ID NO: 89995 - DNA, 343 bp, Glycine max
  Clone ID: PAT_MRT3847_52277C.1
cccacgcgtccgaaaaaaaaaaaaaaaaaaaaaaaaaaaaaaaaaaaaaaaaaaaagaaaaaaaaaaaaaaaaaaaaaaaaaaaaaaaaaaaaaaaaaaaaaaaaaaaaaataaaaaaaaaaaaaaaaataaaaaaaaaagaaaaaataatacataaatctatctatttagaatattattatcaaccttattgacaattaatactatcacaaaaactcaaaattatcatcactgaattaatacctattatcaaggttgatacattttgctaaatgatatttattaatcatactttcattcagtattataatattagatttaaaagagaattgccattatatta

SEQ ID NO: 89996 - DNA, 197 bp, Glycine max
  Clone ID: PAT_MRT3847_52278C.1
gaccacacaagacggaaaacgggagaaagccggccacaggaacgagaccgaggacagcaacgggcagaaaggcggaacagcggcgaaaacagccgggagcaccgaggaggagccaagggcagacaacgaaagcggaaacgaagcaacaagaggaacaagagcaagcaacaaaaaagcagagaaggccaagagcgacg

SEQ ID NO: 89997 - DNA, 180 bp, Glycine max
  Clone ID: PAT_MRT3847_52279C.1
ctgttgcgtttttgctaggaccaacaggggccgtggagcactcaacactgccaaaactgttaagaagcgcacggatcgctggggtcgagaacgcaacgctatagacgaacatagaaaggactcaaacagtgaatgttttggaggtgagcacataccacactaacagaatgaactgcaatt

SEQ ID NO: 89998 - DNA, 155 bp, Glycine max
  Clone ID: PAT_MRT3847_5227C.1
ctttgtcactaaaactcatgaatatgattactgacaaaggaattgagaaaaacagccctgggtttttcttgtgaagcaagaattctcatcatataactcgagacctgacttcgccgcgtactctactgctctttcttgagccgtcttcaatcttg

SEQ ID NO: 89999 - DNA, 1381 bp, Glycine max
  Clone ID: PAT_MRT3847_52280C.1
atcaatactctgttagtgtaaacagggtaatagtgcatgtacccactcgcacagaagtgaccccaatatacttagccatatctttacttcccaaaacttgctctacaatgagtttccttcgttcttttgcaagaaacaaggatatatcaaaagtaggacgcagaggtatccattgcatgcagaaactatgtgcagaaaaaatatctcctgattcactagagaaggcccaaaatcgtgtgatagatgctgcactcacacttgttcgagaaaatacaaggcttaagaaagaactcgtgcatagtttgggaggtgctgtggcaacttcaactcttcttggagttcctttgggtcataattcatcgtttcttgaagggcctgcatttgcacctcctttcattagggaaggtatttggtgtggtagcgcaaactccacaactgaagaaggaaaggatttaaaggacttgcgaataatggttgatgttggtgatatccctattcaagaaatgcgagattgtgggataggagatgagagactcatgaaagttgttagtgattctgtcaaactagtgatggaagaggatccattacgtcccttaattttgggtggtgatcactcaatctcatatccagttgtcagagccatatctgagaagcttgggggaccagttgatgttcttcattttgatgcacatcctgatctctatgatgaatttgaaggaaattattattcgcacgcttcttcttttgctcgaatcatggagggtggttatgctcgtcgactcttgcaggtcggtataagatcaataaacaaagaagggcgtgaacaagccaaaaagttcggggtagagcagtttgaaatgcgacatttttcgaaagatcgtccatttttggaaaacctgaatctaggagaaggtgctaaaggagtatacatttcaatcgatgtggattgtcttgatccagggtatgctgtaggagtgtcccactatgaatcaggaggtctttctttcagggatgttatgaacatgctgcaaaatctcaaaggtgacattgttggtggagacgtggttgaatacaacccacaacgtgacactcctgatcgtatgactgccatggtagctgctaagtttgtgagagaactcgctgcaaagatgtcaaaatgataactattaattctgcctcgtgtgtgtgacatttagtttacttcaatgcactcaacttttcaatttatagtgttgttgttatgaataaataatacatgcactattaccctgtttacactaacagtgtaaagatgatgtatgtgtataagactaagttttgttgtgttctattagaagtattaatcgtgttcaaaaaaaatgtatttgtcatgtgaaggaaa

SEQ ID NO: 90000 - DNA, 440 bp, Glycine max
  unsure (1)..(440): unsure at all n locations
  Clone ID: PAT_MRT3847_52281C.1
ccactcttaaacccatgcacatggacgcatggcnntcatacacataatattatgccagaggaaaacatgggtagctactatgatcctattggaacattattgccttgacgcactatttatatataagttnngnnnnggggctctgtccatagcagctcccattacgatcttaactggatgacctgaatgtgtccttaccacctgtacacccaatgctcgtgcaaccagttgttnnggagtcgcgtgacccaaacggacagttctgaccacacatctggccattgtgacaagaactggacctatactagaaccgttggtgctctatgccctatgcactatcagattgctatgaatgccaccccgagccactgccccagacactgtnncactggaccagtctgncttttggcannnagccttgataccccatgcgtctacag

SEQ ID NO: 90001 - DNA, 344 bp, Glycine max
  Clone ID: PAT_MRT3847_52282C.1
cttcttctcttctctgcttttccactccttctcctaactcacccctcccttttatttccattgttattctgcctaagcagtttcttccaaacttccttttacatttccaatttctttattctttcaaaagggtttgaactttgaagggaaaggaaaaaagatttggtgcccaacccaaatggggggacctatgggggtattaacccgttggttggccgggcagcttccattttaaaactaacccgggtgcccaaggccacaaggcccaaatccctggcttggccttgggggttttgggggcctccccataataaaaaacttggaaaaagggtggaagggaccaa

SEQ ID NO: 90002 - DNA, 270 bp, Glycine max
  unsure (1)..(270): unsure at all n locations
  Clone ID: PAT_MRT3847_52283C.1
gtcatcatccgcagctgctgttattcgcaccgcaaactttcagtgagcctctcatcgncgtcnagnnnaagcgcanctccaaaggganaaagggaggcatccagaaggcagctgatcccnncgccaagaaggattgggacgacacgatggnnccnnctcnnnttcaagtgaaaaatgttggcaaaaccctcgtctctcgtacgcagggtaccaagattgcttctgaaggacttaaacatagagtgtttgaggtctccttggctgatcttc

SEQ ID NO: 90003 - DNA, 344 bp, Glycine max
  Clone ID: PAT_MRT3847_52284C.1
tatcttctttacctatctttctctctcatctatgtcccaaaaactaactgataatttctacaaattaatgctccaataaacaccactcaatcatttccccacctatgaaaccactaattattaaacttactagaaaatagtctcaaatcgcataccaatatatctataaactgcagcaaacaacgattctacctattacccaattttcacactatataatacaccataacctatacacctgcactaatcctctaacttaaactcccaccgcattcacattcaaaaatcactcaaggttgttaaaatgtatgaaactgatgacacaagctctaatatatcatact

SEQ ID NO: 90004 - DNA, 279 bp, Glycine max
  unsure (1)..(279): unsure at all n locations
  Clone ID: PAT_MRT3847_52285C.1
aaagcacaaagcaaagctcatccttgagttaaaaaatggcagcancttcttccatggctctctcatccccatccttggctgggcaagggcgtgaagctgggcccatcagccccagaagtgggaagggtgagcatgaggaagacgtcaccaagcaggtcttcctcaggaagccatggtaacgggccagaccgagtcaagtatttggggccccattctctgggcgnagcccccgtcctacctaaaccggtgagtttcccaggcgactacgggttgganact

SEQ ID NO: 90005 - DNA, 412 bp, Glycine max
  Clone ID: PAT_MRT3847_52286C.1
cgatctcatttcctttggctttatgataggcctattaattaaaacacataattccaattcatatagggacgtttttatttacttatttgttgataaagcggaattggaattcctttccttcggcttcaggataggcctaataagaaaacaaataattccaattcatatatgaacatttttgcctccttatttcttgaaaatgtggaactggaattacccgaggaatttccgatcttcattttcctttggcctcaggataggcctaataaagaaaacaaataattccaattcatatatgaacatttttgccttcttatttcttgaaaatgtggaattggaattccccgaggaattccgatctcatttcccttggcttcaagatagggcctataagacaacaaataagtccaat

SEQ ID NO: 90006 - DNA, 968 bp, Glycine max
  Clone ID: PAT_MRT3847_52287C.1
ccgcggcacgtgtaggaggtgcagtggtagtgggaggcattcatagaattgggaccttgacctccactgtcaccgtgagaagaagaagtaaagcagtgactactgcaatgcgagcggtggttcagcgcgtggcctctgcctccgtcgaggtcgaaggccgcatcgtctccgagattggccccggccttctcgtcctcgtcggaatccacgactccgattccgacgccgacgccgattacatatgccgaaaggtcttgaacatgaggctgttcccaaatgaaaatacgggcaaagcgtgggaccacagtgtgatgcagaaaaattatcaagtcttattggtgagtcagtttacgttgtatggattcctgaagggtaacaaaccggattttcacgtagccatggcgcctcagagagccaagcccttctatgcctctttagttgacaggtttaggaacgcctataactctgatgcaatcaaggacggtgtatttggagcaatgatgaaggtaaatttggttaatgatggaccagttaccatgcagcttgattcaaattcaccaaagaatacagttgatgcagcagaatcttgatcagtggttgatctggcttgatgaagttgagcttgaattttggctcttccgtcagaaagaccaaatgcaagacattcgattatgtgttattcattctagttgaagttctttctcccccaatgtagtgactagtgaccccactttgtaacactatttagttcaaagaatgccttagattgtccctgttcgttctgccatagcttgggaatagagtttggaacccttttggactaaacaagctaataccggatgactactaatccgggttacccttattcaaggttgtattttaactggttccatccaatattgttaaataaccattataatgcccccataaagctataacatgccgtttttttaaaaaaaaaaaaaaaa

SEQ ID NO: 90007 - DNA, 407 bp, Glycine max
  Clone ID: PAT_MRT3847_52288C.1
atatattaatattttttttttttttttaaataaaaacccaatgttaaagggtaaaagttttccacaaaaagcaccccaatataggcttaacaagggaaagggacaaaacccccggtaaaatttgaacttgggaggtgaacaaattaaaaccaatttttcaaaaatatatgtcacttttttataaaaaaggtatacacccgagaaaagggggggccctggggggggggtttaacaacacaaaggttaaaacaccaaaaaaaggttttttaaaaaaccccctttggggaaataaaaataaaagtgggtttaaaatgaccccccattgagaaacacgtggacccaaaggaaaaaaatcttaatagccttttccccccaaaggggtggggaaccttgcaaaacacaggggg

SEQ ID NO: 90008 - DNA, 1814 bp, Glycine max
  Clone ID: PAT_MRT3847_52289C.1
acgatgggtccgcaccaagggtgaaaatggagttagttctaaacagcacaacaattggagttggagttgtttctctgatcctcctcttgtacttgtttttgcgtggtggttcatggaagagtggggaagagggtcctccaacagttgcaggtgcatggccaataattggtcacctcccattgttgcttggttcaaagacacctcataaaacattgggtgacttggctgacaagtatggacccatattctcgatcaagattggtgccaaaaacgcagtggttgttagcaactgggaaatggctaaagaatgctacaccacaaacgacatcgccgtttcctccctccccgatcttatctccgctaacctcttgtgctacaaccgatccatgatagtcgtagcaccctacggtccctattggcgccaacttcgaaagattttaatgtctgagttcctatctccttcccgagtagagcaactacaccatgttcgcgtctctgaagttcaaagttccatcacggagctcttccgtgattggcgtagcaataagaatgtccagtctggctttgccactgtggagttgaagcaatggttctctcttcttgtcttcaacatgattctgcggatggtctgtgggaagcgctatttcagcgcttctacttcggatgatgagaaggcaaacagatgcgttaaggctgtggatgagttcgtgcgtctcgccgccaccttcaccgtgggagatgccattccttatcttagatggtttgactttggtggctatgagaatgatatgagagaaactgggaaggaattggacgagattattggcgagtggttagatgagcatcgacaaaaaagaaaaatgggtgagaacgttcaagacctcatgagcgtgttgctttccttgcttgaaggaaaaactattgagggcatgaatgttgatattgtcatcaaatcctttgtattgacagtaattcaagcaggaactgaggcaagcattactactcttatatgggcaacaagtttgatattgaataatcctagtgtactagaaaaacttaaagcagaactagacatccaagttggaaaagagagatacatatgtgagtctgatttaagtaagttaacatatcttcaagctgtagtcaaagaaactttaagattgtaccctccagctcctctctcaagacctcgtgagtttgaagaggattgcactataggtggctacactgtcaaaaagggaactcgtctaattacaaatctttccaagatccacacagatcataacgtttggtcaaatccattagagtttaaaccagaaaggttccttacgactgataaagatatagacatgaagggtcaacattttcagctattaccatttggaggtggtaggaggatttgtcctggaataaacttaggccttcaaacagttcgtttgacacttgctagttttttgcattcctttgaaatcttaaatccatcaactgagcctcttgatatgactgaagtctttagagcaaccaacactaaagccactccacttgagattcttattaaaccacgcctatctcctagttgttatgaaagtatctaatatttaattatgtgttagttgtgtgaacctgctgtctgtattttttatttttaaactatatgtaatctgttttaaaataagcctggtttgccttgtaagctattccaaaactatgtattttgttgcttaatctcatttgaataaacatgaagcaagagattgatggtgttttcttcaaaaaaaaaaaaaaaaaaaaaaaaaacccggtctagttctctc

SEQ ID NO: 90009 - DNA, 439 bp, Glycine max
  Clone ID: PAT_MRT3847_5228C.1
ggagcactccttctaggaacatacttttaatgcagcgcttaatggtgctgaggacatggactatatataaagacatcctcttgccacatctgggggttatcctcatgtgcttgaacgcaataatggcgatctaggcaatgggagactagaatctggtgatggcaaagcaatgacatctcttccattgaccagggaagctgtgtctcacatcgagcggatacataaacctgataaacgtgccactacacagattgacatggtacgtcccatggatgagatactgactgctcccgaaataaatgacaaacctgagacactctggtgcactattctgcctatggagcataaagcaggggaccgtcatacgaacatagatgttgtgggggacattctggagaagaggtacacgcataaatgccaagatggaatcaacccatac

SEQ ID NO: 90010 - DNA, 256 bp, Glycine max
  Clone ID: PAT_MRT3847_52290C.1
ccacacttccgcccacacctccgcccactctttctctgacgcttatacttaaaatcacggggtctttcataggatggattggactatcattttttaatacaaatctaacgtgttaacttcttttctgtcaattattgtgccccaaaggcttgcccttatcctctttttctcaatcttcctgcaaaaatatctttcaagtcacacacatttctaaataacatttaacatgcaccaatagctccaatattttcttaat

SEQ ID NO: 90011 - DNA, 407 bp, Glycine max
  Clone ID: PAT_MRT3847_52291C.1
ggaaaatgaatgcccctcttacattttctctgcgtgagggctagtctactcacgcaactcatttacagctcttggtaccactaaagacaaaaaataaaatgtgtgaaacaaaaacaaagtgccggaattagaggaggaaactcttaccatcaaccccagtaaagctcaagatcgagaggacccaccacatgaaccggcaactgtatcgttgattcttctccacaacgaacatgttgatagcaggccctcttattaatcgccctcaccgcttcctatctgatattgcaacgatttgaggattacggaagccgatacctctacgtctctagaggcgggatccagtggaagaagcaagaccggacctccgcacatatgaacggactaggcgggatgttcatcctattgac

SEQ ID NO: 90012 - DNA, 427 bp, Glycine max
  unsure (1)..(427): unsure at all n locations
  Clone ID: PAT_MRT3847_52292C.1
acgagctcagtttcttttaccttacctttcctattattaattttcccagcatttccctgttataaacactgcttgaattgaaatattgaatcaattcttttcctgaggtgtaaataagagatataagggaaggctagtagtagagggtgtgcaagcaaataatacctctcttacagtgactagtagaaaaaagcattccgctcatttcttaaacaacttgttttttgcagaaatcttgtattgaaatgtaattggcacactctttaatgcacaatgcatgcattggattgcacctctcattttccccattaaattactagtactacaaacaaatgatgaaatgatggatgtgaatgacctatangtggaatangaattanattattgtanttttangtcttgnaatatatattgaaaatntcaattc

SEQ ID NO: 90013 - DNA, 950 bp, Glycine max
  unsure (1)..(950): unsure at all n locations
  Clone ID: PAT_MRT3847_52293C.1
gtgctataatttctgaagtcagcgtcttgacattcctacgagatctttcccttgaccctctttcacaaacaaaattagcgctatcttcagcttcaaaattaaccatatctacaggttcaggatttggcttgtgcgttgaatcttctgcgccatgttcttggtgaacaattgcagcattgtcgagtgcaggtacaataaggttctgaaaacaaacatatggccattgaaagaatgaaagtgcattaagtcgttcataaggattgttcaagtacaatgcatatttaaaatgagaccagaaaatgacttcttaatggtactttactttcttcccctgtgtagctccttgcttgttagcttcaacttctaacacgtttgccagattctgcaatcaacagggacaaattcactgaatacgtgatgcatagatagatgtttagttcaagttcattgccaaataaagatatagcaaaggacacttcatcttttacttcttcatttgccaacagttttgcattgaagttcctgcgagtataacaagcaagtctggttaataattagcagcaagacacaaggcaagctactcatgaagagcaactaggaaattgaataacctttttattggccttgaaatcaatttcccttcagtgattctaggcacctccaaattaccaatatctccaaaaacttgacggcacccttgtccaacttccgtatctacagcttttcctgcaaagaatacgccaacctaatgcnattgaaaatgtanaactctaaacccaaagaaaagactgacactgatagatttggcaatagacgacataatcgagtggtagcccaaaaaatccaactcaatcagtgagatcacaattttaagaaatattctagggtaagtagtacatgtgtctagttttgttgaaatattgtctgacaatttttgcaacaaatttcat

SEQ ID NO: 90014 - DNA, 407 bp, Glycine max
  unsure (1)..(407): unsure at all n locations
  Clone ID: PAT_MRT3847_52294C.1
ttttgataataggttggacagattaaagaaaaatacatataagagaaatgctacaacaactacaacagccttatctgtctaagtgaggtttgctatatggatcccatgatatatttgggcttgattaataaccaaattttcaaggatattattcaccatgagatccccttttacagtttcttccagtgtccttcgtggtttccctctatatcactttaaatgaggttaaaaatcattttatctactatccttaggggttctaatataaattagaattgtgacacctacaatagacagaagagttttgaaacttctaataactgttcagtaataaaaacattntccctattttgttatacatgtagattgaaataatcaagtaaagttttaaaaaatattatatctac

SEQ ID NO: 90015 - DNA, 404 bp, Glycine max
  Clone ID: PAT_MRT3847_52295C.1
catttgctttacctttacaatgaataaatgacttctatccaactcgctgttgactcgcctctaacaattttacgattgcattgtaactgtgcatagtcggcatcaactactggctggggccggggatattcacagatagaacctgtaattaggaacgcgcattctctggccctttgaaggacactcgtactagcttgcacagatgtttcacacgcgacctttgaccgatcatataatggtgggcgacgtagtgaactgaggccatgaataaaattactagcagtatagacgcccgagatgacggagtaccatgattgttctcacaattagacagcatgttgcatgctacatgcctggaacacatgagagtggcatcagcagaagtactctgagtgtgcatttat

SEQ ID NO: 90016 - DNA, 304 bp, Glycine max
  Clone ID: PAT_MRT3847_52296C.1
gctccgagggagaaccgactgcgccgctgccgccgatgtggatcccacgccggaccaggccaaggagacgactcggttccttggcgagaggaatcggccgtgtgggcgattcgcggctgagattagagattcgcggaagaatcaacgcgtttggctggggaccttccattcctccgaggatgccgcgcggtcctactacacggctgcccatatacttgcgcgtgcccaaagccggatgcaattttctgccatcatacggcccgacagaggcgagaccaccactctcagattccgctctaccagg

SEQ ID NO: 90017 - DNA, 1284 bp, Glycine max
  Clone ID: PAT_MRT3847_52297C.1
cccacgcgtgaggtttcttattacagtagttgacgcggcactgcacagtagtagagaaaagctaacgcgtgtaaatgaagtagtgagtagagcaagagcgacaaagagagtgccaggtgtgtgaaggagctcgttacttgggatccagttgttgttattcttaatcggagatcgcagcggcggattgcatgagcggcggatcggaggcggtgtgagcagaggatcgaaagatgtctgcgatcatagtgtgcgggaagagatcagcgctgttccaagaccttcctcccaagaggatccgttgttcctcttcttcttctcccgttcacctctctcctcctccttcttccctcctccaccacctcgccgcccttttccctgacatggaccaccaccttctcgagaaagctctccaagattgcggcaacgacatcgactccgctatcagaagcttaaaccagctccgactaggagcaccaccgcctccttctcttgattctactcccatcgcatctgatactgctcctcctcaattgcaaggtggagcaaaatgtgatgcagaagtttcaggttctgatgatccagcagctggactaaagtatcctacaagcggtgccgaatgggtagagctttttgttattgaaatgatgaatgcttcaaacatggatgatgccaaatctcgagcttcaagaatgctagaggcattggagaagtccatttgcgcaagagcaagtgttgaaaccgagcgaaacattcaccaggaaaatatgatgctgaaggaacaagtggaggcccttattcaagaaaacgtgattctgaagcgtgctgtcggtattcagcacgaacgccagaaagaatatgaagacagaaatcaagagttgaagcatttgaagcaattagtgtcgcagtaccaggaacaggtaagagctttagaggtaaacaattatgcattgacaatgcacctaaagcaggctgaacaaagtagttccatccctggccgttttcatcccgatgttttttaggtaacatggctgtttctgtagtttaaataatcatgattgaagaagaaacgaggtaatgaatttatattactccccatttttaattaatggtggatattgaagatttatactatttaatgatgcgtggatgtggcaaaaaaattgctcctcccatatattattagctcttttgatgctgatacccatgtgataaatattttcgatgtgttagaattttgatttggcatgcttcatgcaaaaaaaaaaaaaaaaaaaaaaaagaaaa

SEQ ID NO: 90018 - DNA, 537 bp, Glycine max
  unsure (1)..(537): unsure at all n locations
  Clone ID: PAT_MRT3847_52298C.1
ggctcgaggataagctgttttccgtcaattcactgtcagcttcagcgtatgatggtgaaaagaacatcttcagcgcggtgcctttgccggaggaaacatttaccgtggacgtgtccaaaggagaggacgaaaggcctgtttcttatttggtctctctgacattggtgagtaggctcgagcttcggaagttgagggattacctcagtggaagcgtgctttcgatccctagggatgttttgcacggcttggatttggtggtgaaggaaaatccttcgaagcagtgtgtttccttggggcggtgcttcttccccatgaaccctcctttgaggaagaaagatcttaaccatggcataattgcgattggagggtttcagcagagtcttaagtctacttctcagggattgtccttgtgcctggactattcggttntgtcctttcggaagaagctgttggtgttggattttctgcacgagcatattatggacttcaatctaagggagtctgggcggttcaggagacaagtngagcatgtactta

SEQ ID NO: 90019 - DNA, 154 bp, Glycine max
  Clone ID: PAT_MRT3847_52299C.1
tgcccacaacatgcgtgacaccttgcacatcatgcttcagatgagcagagacatgatgttcggcgggcaaatgccagtcatcagagtgaggatgatggcggggcaatttgctaaggataggtcggatgtcgttgaggagaacaacggggtgaag

SEQ ID NO: 90020 - DNA, 305 bp, Glycine max
  unsure (1)..(305): unsure at all n locations
  Clone ID: PAT_MRT3847_5229C.1
gaaaattcaaactttcgtccattactcttaaacactttcttttttttcctcacatccatttttcatccttaacatgttcattctacaatccaaggagatcgacattnacactccaacctcttttttccaacccctttcaactctttccaaaccttactatataattgctgaaaatactataactcatactccccctacacaatttctcccactacttttttaatacctcacattacttattgtatatatttcaatctcattataaaatattgcacttcaatttacatttttactcattcacatat

SEQ ID NO: 90021 - DNA, 266 bp, Glycine max
  Clone ID: PAT_MRT3847_522C.1
tttttttaaaggattgaaatggaaaaacgggggtgttttgagaaatttctgtaacaaccatgagatcctctcggaagttgtcagatgcacactaaagccctacaaagcgcgtttgcttttcaaactaacgtgtattgacataacgtgtcgatttacctacatcacacaatggtcacacagcaattactagcttcatgacatccactactcacacttagctgttgcttccttttcgtaacactataaattctccagggccattttct

SEQ ID NO: 90022 - DNA, 510 bp, Glycine max
  unsure (1)..(510): unsure at all n locations
  Clone ID: PAT_MRT3847_52300C.1
atcaacttcgttgaatcaattcgggccaccaacatgtcacgactcaaactctacgtgatgcaacttaccgaactcactgatagctcttcctccatcttgatggttcaacgcagtcgaaagaatggttttcccttcatcaaccgaatgaagagtggaccaatgcatgagcaaattgccacagcattccaggcttatggtgaagtgggtaaagttactgtgcatcatttaacatctatctctctattgtcaacaatgcacgaggacatatgccacgttgcagaaaagaaaggtgtggcaatgattatattgcccttccacaaaaggtggggaggggaagatgaagaggtgacagaagacttagggcagggtttgagggaagtcaatcaaagggtgcttcaaaatgcagcctgctctgtcgcagtgctagtcaatcgtggggttgccagaaggtacgaacaagaacctgagacaagtgttgctgcaaggaaaagagtgtgcataattntcatt

SEQ ID NO: 90023 - DNA, 250 bp, Glycine max
  Clone ID: PAT_MRT3847_52301C.1
gtcgcattgcagttaaaaaaaacaaaaaaatttaaacaaaaaaataaaaatcaaataaactgggataatataagaaaaaaaatagggattcatggtttattcgttccaggggctcctgccttaccttctcttgcatgcgactgtcatagtacttctatggtgtttcctaattttgatttactggccatctttttacaactgtcacacctgtaaaaacactcgtgttacctaatttaatagcccttggctc

SEQ ID NO: 90024 - DNA, 328 bp, Glycine max
  Clone ID: PAT_MRT3847_52302C.1
accacgcgtgcgctagatttgaagatcttggcattgcctcactcttgcttgcgccaagatctgtcctggtccgctccccgcctttttctttttttagatcttggtcttatccatgatgtcgtataacttcaaatttgaaagctttacctttctgagattgcttcttttttgcttctatccccttccccttttggagtatgaaaattttcctgcaaaattactgagctacgatcactgagtgagagacaagacttataacgatgatgaattatttcccggacgaggtaatatagcacatatttgactatgtggtgtcacacagtgatcg

SEQ ID NO: 90025 - DNA, 311 bp, Glycine max
  Clone ID: PAT_MRT3847_52303C.1
ccacgcgttcttacggttgctataatactacagaaggggttgtgtgtgtacaatcatatggagtaggggcattaaaaatgcttatcttcgtgaaaactctgacatggtagactataaccctctaggtctacagcagttacaccatttactttgttaaggccaatattcaagacaaggaaggcatttttcttggatcagtcagcgtttgattttctccggaaagcagcttgaatatggaaggaccctgttcgattacaacattcctgaaggaatcaaccctttcatttcttccttaagtttcgtggtggctt

SEQ ID NO: 90026 - DNA, 894 bp, Glycine max
  Clone ID: PAT_MRT3847_52304C.1
ccacgcgtccggatatacacaagttgttatgatggaactgttcgactaatggatgccgagaaggaaatctttgatctggtagttgatagtgatgagtgtatatttgctctctctcaaccaacaaatgaaacaaactgcctatattttgctgagggttatggaggtttgactatttgggataacaggattggaaaacgttcatcacactgggttttgcatgaaagtaggattaacaccatagatttcaactgtgaaaaccctcatattgtagctactagttccactgatggaactgcctgcacctgggatttgagatatactgatggggataagctcagagccttgaggacatttacccacaaaagatctgtgcaatctgcttacttctctccttctggatgtagcctggcaactacaagcttggacaacacaattggtatttacagtggagttaacttggaggatgcagctgttattaatcataacaatctgactggcagatggctttctactttcagagcaaaatggggttgggatgactcatatctctttgttggaaacatgaaaagaggagttgatgttgtctcatcagttgaaaggaaaatagttatgactctagagagccagcacatgtctgccattccttgcagatttgatacacactcttacgaggttgggatgctagcaggagctacaagtggaggccaggtttatatttggacgtcgcgctaggataggatgtttatttaatatccacttctgtagtatgtttataaaatgaaacttcaatagtttctgattccagactgttttcatgtgacacgtgaaatatttcctaatatgctaattacgtctgaaggccaatgtttttagctttcctcctctttatttgca

SEQ ID NO: 90027 - DNA, 292 bp, Glycine max
  Clone ID: PAT_MRT3847_52305C.1
gttttggagtctgtgtctttttcttcttcctagtataggaatactcggaatataccaatacattagcaaacacatatttaagcactggataaaactcaagctgaaaaaataaattatgacgaagatgaatgaagttactataatcgtgggagagggggggctaactcaaaaatattactgggaaaaaaggatgagctcaagagagactagtagaaattgaatcatgatgaactcttacagatagagacacaccacaaggcagccattgaaaccaagtttagagtgtataacc

SEQ ID NO: 90028 - DNA, 1612 bp, Glycine max
  Clone ID: PAT_MRT3847_52306C.1
cccacggctgcgagaagacgacagaaggggacagtgattcatttcgaaaaccaaatccctaattttctctctcttcaatggcgccgcagaaactcaacgattacgaacggaagcgactcgagaacattcgccgcaacgatgaaatgatggctgccctcaaactccactccaaagccacccaactctccaacttcaagcgtagtcaaagggttggaaccaaatcctacaacatgaaatcggaaaagaaacccaaaaccgaaaccccaattgtgattaggcgctccctccgaacaagaggtattccgccagattccaaaggtcttgtcggagattccgtgggccccaccactcccactaaaactaaaccttccgttgttaatttgggtcctatttccatggctgatgctcgtgaaagcgctcactctgatagctccttcgttgaatcactcatgggtatggcccaattgaaagcccaagatgctagtgttgaaaaagggaaagtggaggcttcccttgggttggaatctctgtatttggatccctagaatattgcgcgggttgttcctggaaggataaccagtttgcgattttttccgtccagtagtgtcaaaatggtcgcggtgggtaacaactttgggaatgtcgggttttggaatgtgggagaaagtgaagttcatttataccgaccccatcgagctcccatttcagggatcctgaaatatgctaattacgtctgaaggatatacacaagttgctatgatggaattctccggctaatggatgttgagaaggaaatctttgatctggtatttgagtgtgatgaaagtatatatgctctctctctaccaacgaatgagacaaactgcctatatcttgctgagggttatggaggtttgactatttgggataacaggattggaaaacgttcatcacactgggttttgcatgaaagtaggattaacaccatagatttcaactgtaaaaaccctcatattgcagctactagttccactgatggaactgcctgcacctgggatttgagatataccgatggagataagctcacagccttgaggacatttacccataaaagatctgaacaatctgcttacttctctccttctggatgtagcctggcaactacaagcttggacaacacaattgctatttacagtggagttaacatggaggatgcagctgttattaatcataacaatcagactggcagatggctttctactttcagagcaaaatggggttgggatgactcatatctctttgttggaaatttgaaaagaggagttgatgttgtctcagcagttcaaaggaagatggttatgactctagagagccagcacatgtctgccattccttgcagatttgatacacactcttacgaggttgggatgctagcaggagctacaagtggaggccaggtttatatttggacgtcgcgctaggataggatgtttatttaatatccacttctgttatatgttataaaatgaaacttctatagtttctgattccatactgttttcatgtgacatgtgaagtattttcaaatatgctaagtacctctacaagtggaggactgacttcctccttttct

SEQ ID NO: 90029 - DNA, 417 bp, Glycine max
  unsure (1)..(417): unsure at all n locations
  Clone ID: PAT_MRT3847_52307C.1
agtagtaacaaataagcaattttgttctttaaaaataaaaactagtaaaatgatgtcatattcaaaagatcagcctatacaattaaagtctctatactggactttttaggcatactacagacaggacaaacttgcagaaaagttctcaaggtttacacgaacagaggngcctgcaaggaagaancataaaacacgannnnngagaagnacaacannngcaanccatngnccntttcctaatttggtcaacctcttccaccccaccaccacggcacaatctgttttctcccgttccttcttccattgccctgtttctcatgttttcatcccaacacgactctgcatcctctgctgtcaccctatacagagctctttctttcatctcttctaaggtgttatgaagagacagtaccatag

SEQ ID NO: 90030 - DNA, 201 bp, Glycine max
  Clone ID: PAT_MRT3847_52308C.1
gatcaacaacatactatctgtatatgggaggacaagacttaaactaattcgatccttcaaataaaaattacacgcctaggaagtatcaccattaatgttaggagaaactattacatgcctttgcctaatgaggaacggcgcaaacacgtcggattacgaatcctaaacctagctgctccgttctactggccttaaagtact

SEQ ID NO: 90031 - DNA, 191 bp, Glycine max
  Clone ID: PAT_MRT3847_52309C.1
acgactacgtatagctcggaattcggctcgagggaagaggcggatgcacttccagctatatatgctactgatagctttacattcaaacatcatgttgtttgagatttgaatctaatacttacaatcgcgtgcttggaaatgataaaactgacacgtgcttggaagaggtggatccactttcagttatctat

SEQ ID NO: 90032 - DNA, 920 bp, Glycine max
  Clone ID: PAT_MRT3847_5230C.1
tggtaccacaacaattcggctcaccaccactcaaacatttctcactaaaacacacactttctgaaaagaacaaggatccattttcttttccccaacatggccagaccacaacagcgtataccgaggtgtccgacaaaggcattggggctcttgggtctccgaaattcgccaccccatattgaagactaggatatggcttggtacatttgaaacagctgaggatgctgctagggcctatgatgaagcagctaggctaatgtgtggtgcaagggcaagaacaaacttccctttcaatccaaatgtgtcacactcatcatcttctagttcaaagcttctctcatcaactttgactgcaaaacttcacaggtgctacatggcttctttgcaagtgacaagacaagctttggcatctgagtctcagagaacaccaccctcagtgcaaaatgcaacaacctccacaaccacaccaattagcaacaacttcagtgtgaagagtgagcaaactcatgcagtgttgccacataagagaccagaggaggagcaagagtcagaggcaaataggggtgtgaaaagggttaattctgtggaaaatgttcctctgcaattcaagcctcttgaggaagatcacatagagcaaatgattgaggagcattcttgattatggatctattgaactctgctctgtcatttcaccccaggccctctaattgaatgtgcatgtttttgagctgaatttaaagtcacaattgtaggttgccttgtgattaacaaaattatgggtaaaatttgactgaaattgctgctgtggttgtgaagagcacaaaaagagtggccacaattgcaattacataatgcaatttatatcggacggtctgccggccgcccatgttgaaattgtgcatttgttctgttctcattct

SEQ ID NO: 90033 - DNA, 370 bp, Glycine max
  Clone ID: PAT_MRT3847_52310C.1
tcggggaatgcctattccttattttcaagaaataaggaggcagggaatgggcatatatgaattggaattatttgttttcttattaggcctatcctgaagcctaaggatatgagatcggaattcctcggggattcccaattccacatttttatgaaataatgaggcaaaaatgttcatatatgaattgtaattattcggtaacttattaggcctatcctgaatccaaatgaaatgatatcggaattcctcggggaattccaattccacatttccaagaactaccgacgcacatatgttcatatatgaatcgtaattatctgtactcttattaggcctatcatgaagccaagagaaatgagatcgcaattcc

SEQ ID NO: 90034 - DNA, 559 bp, Glycine max
  Clone ID: PAT_MRT3847_52311C.1
gccagtgacgaggaggatacaacctctgcgtctatttcacataatcagaaagtgcagcaacaacaacccgcattatccaatggtgttgctgcaagctactcagagctaagtccaaggtctggtggactggttgactatgatgatgatgatgatgaagattacaggcctcccccaaagaagaagccagaagcttctgaagaggatgaagggacaatggagtctctcagtcggaaaagaaaattgccttctaagaaccctgagcttgcaaagaagttgtccaaaaattcaaaatcgaaagatagtgtttttgctgccttgtgttcaacattgagccaggctgtgctacctggtaagaaaccttcaatcaacgttcataccgatccttgtagagaagacaataaagaaaaggaaccaaatgtttctagaaattgctgtgagaatagcaatgcaacagctgaagcgaaccatgtagagaaagaaacttctgcctatagaaatttttctgatgggctgtacggcactttcagataatggacagttggggtgggaggaacataca

SEQ ID NO: 90035 - DNA, 204 bp, Glycine max
  Clone ID: PAT_MRT3847_52312C.1
ctccagccggtgtagccgattccgccccagctccagccgctatttgtaagaaagatgcttgcagagttgaatgtgcaatcccttatgtattttcgctcagaggtatttgctatagaatttataatgagatgcttcttacatataactatgacaaatttctgcacccggcttaagctccaagggtggtgctaccacccttcaaaa

SEQ ID NO: 90036 - DNA, 319 bp, Glycine max
  Clone ID: PAT_MRT3847_52313C.1
aaaaaatattacccttttgctttcatcattagaaacgaagagacaggctaaacatatacccacggttacggatcaacacatccgacaatcagatatgttcctattctcatcttagagtgtattaaatcttatatgacaagactcacacatcccagggttggtccaagaaacctagcctacatatactttatacacaaaagcacaggttacatcacatcatagcctttccttgatggatatgaccgatgaccataaactctgttctttataaggagcgcagatcaagtgtgtaacattaacctccaaggccgctctgaca

SEQ ID NO: 90037 - DNA, 337 bp, Glycine max
  Clone ID: PAT_MRT3847_52314C.1
ggctcgagctcgagccgcatcgggtcgggacttgttgacattattatgacgtaatcgcaatccttttcataatgactccattatggcgaccagcgaagacactgagctgcgtgagcgatttagcacaacgcctacgaggcaggagccgaggttccggacgttaatgttcgatccaacaccctctgttgttgcacggttaatgctttgtagcccagcaagttcagtgagccaaacttccagagctcattgggaagaccttctgcgttgttagggcacgggagattcttctcagacagagagcacaattggaatcgggggtacacacccctctggttcc

SEQ ID NO: 90038 - DNA, 224 bp, Glycine max
  Clone ID: PAT_MRT3847_52315C.1
tcaaacgtcacgtttctggcatcattacaaatgctccggtaccatgactatcatgaaatctttcgattctcgatctcacaggttctcaattcccaatagacaagctcccttacagagtcttcaagctccaatctgcttcgcctcctcgtcgctgcgtagctatctgctacttcgatcctcgacctctcctaaatatcttcggaaggtctcttctatcgacatct

SEQ ID NO: 90039 - DNA, 1057 bp, Glycine max
  unsure (1)..(1057): unsure at all n locations
  Clone ID: PAT_MRT3847_52316C.1
ctcgagccgaatcggctcgagctcgtttttatattcatattttctctgttttcatttcattattttcttcttctcccttcgatttctccagaacagcaagggagaatcaattcctcatcgttgcaatttttctttcactctctagattctcatctttcctctcttctaccccttcagaaaaaaccatgtcttcatattatatgtatatctagctcttcattttttcttgctcaagattatgctgtaaaattctgaaactcacagtttcagccacattttagacttaaagatctgcgcgttgacccttggcaggttcagcttttggagttgttcatcctcataagcctttgattagtccaagtttttcttttttttctctctctctctctctcaagttcaaagtttttgttcctttttcccgtgtctttctctctcccttgctgtggacttgaggaatgctattcctcatcattgcaattctattctttcactctcttgtgtctcatctatctctctctctctctaacattcaaagtttttgttgttttccccccgggtctttctctctcttgctgtggacttgtggaatgcctggggtcagagaccttctgagacatggttctagcagccttttgttgaatttgggtcactggtttctgtcataggtggtagagaatcttgagtccttcagagatctaagcctctctcttggtgttttgttcttcaccccccccttttttgttgtggcattagttgtgaaagtgaaagagtgaagagaaagatgaatgaagatgaaaaatattagtggtagcatcatgaatggaggtggttcaagttggttgtagatctgagccgggttcaaaggaatgggaaatgaagccaggtggaatgttggttcagaatgaaaactgctgattcgggtcggaacccagcacttttgccaacaattagagtaaaggtcaagtttggttcaatttaccatgaagtcaacattagttcccaagctacatttgnggagttgaagaaaatgctgtcagggcttaactgtttacaccat

SEQ ID NO: 90040 - DNA, 1080 bp, Glycine max
  Clone ID: PAT_MRT3847_52317C.1
gaaaaccatttgattaaaagttgacgcgtccgcaccctcttccatgtgaacaccaaaggaacgaatgctccaccccgcactctcttttccggctctcagacgttgtaactttgtcttctctctcagtctcgttgaaccctaacccacaacccatctccggtattcttgccctcggcttcccttttggcactggtcagaaggtaatttcctggatgagatagaggattgttggtagaggagggaaagacatgggtgccagcgagaacaatactgcaaaaccaagagtacgcccaattgtacgcttagggatctttctcatctctcacaccaacattctcagtgtggtttgtttcatcgcaggggtggtggctcttctccttctccctatccttgccaagaacacctacatttccgagaatgccctcatgccagatttggaggttctgcaaacaacatgctctctactcaccatgtatctgatgcaaataaactcatcaaggacttaactgatttggagttcagatctggggcctcaccaattgatagtcaaaaacttattgcacattatatgtcagccttggatgctgaagttacttttcacaagttttaccctcaatttgatcagttccatccactgcacttctttaccagtcccaattcaggtataatctcagaaaatgcaacttgttcttcgtttggaatcaacactgttggaattatcagggcaccatgcggggatggcaaggaagctagtgtcttggtaacgccttacaatccaaataaagttggtctgggtgaggctttttccttgggcattgcttactcagtgttctcactgctttcacgtgttacttggctggcaaaagatattgtatggcttgtggctgattcacaatatggagaatattctggagtggctgcttggctaagagcatatcaggccccttctatccagagacttgacatagttaatagtgaaacatgttatgggagcagcatttttaatgaacttggacagggtctttatttggatggaaagttatatggtggttttagacatgcaggaactatgggctggac

SEQ ID NO: 90041 - DNA, 578 bp, Glycine max
  unsure (1)..(578): unsure at all n locations
  Clone ID: PAT_MRT3847_52318C.1
gtgacaaaatactatcctgtttaacaccagataaagctatcctgtttacactttttaccagcttgacataacttgaggacaaaaaagttacaactaaacttgttgcagaccatttgacagtgattaccattccttcatgaccgatagagggctatatagttgtcctattgattttgaagatgtcttcattttatatattgtttgatactggccagcaatacctccatcaagctgtagagctgagtctacccttcattttcattggattggcgtctcataatcctaagagtttctaagaaatctataataaaacatctatgggataaaactctgcagcacgtgtctttcatttatctgcttaaaaagttgcatatacagacagcaggcataaaactctaaaacctagcttcagataggttcagagcccccttgagaactatataggcctatcttcacaatcttatcttatgctgcccatacgttggaagtcagggggactgattcctgtctgagttttgatgggcatcatccagaattaaacatgttcccaaatgaagtnttggagaatataaacaagc

SEQ ID NO: 90042 - DNA, 742 bp, Glycine max
  Clone ID: PAT_MRT3847_52319C.1
tcataagtatataaacccacagccaaagtggtcagaattccgtgaagccagttttggtcatggtgagctgaagattgtaaactccactcatactttctggagttggcataggaatgatgatgatgaaccagtaaaagctgatgatatctggataacctctttggccagctcaggatgcgttgatcagaagacacatgaactcagaagtacacttttgacgccctaaaactcagaactacgtggattagcaaaagttatgtaaatattgatgattagacaagtccttagtttagtttgtatcactactagcagcagagtgagtaaactgaggtatttcagtacatagctgctggttgtgctggtgcatgtatttaaatattctaagggcatggactagtcagtaaatggagtataaggctagttgtcactctgcaattgatggtgttgcttgttttttctgaacttataagattggtttctgatttctatataggaaaactaaaactttgcttacttaataaccagcaataaacatgtgggttttatattaaaccccaattccccctaaagggaaaacttttacccccccctattggccgggttttaaaaaacttgggactggaaaaacccgggggtttcccaaataaatccccttgggaaaaatccccctttcccccgggggggttaaaagaaaaagggccccccccatggcccttcccaaaaagggcgcaacctgaatggg

SEQ ID NO: 90043 - DNA, 613 bp, Glycine max
  Clone ID: PAT_MRT3847_5231C.1
ggaatggcgttcatttggcggttctgtggtgtgtctctatgcaacttcacagcctctaatgcccaaaaagggccttctggttctctgcccataaccttggacttggagcatcatataacaaccccatctttactgtaagaattcaaccataaccattttcttctcaattcccaccatttctcatctttcacccataaacaacatcaacatgttttatcagttcttccatcgaagaagaagaaggacgcgcggttaataggagacaacttattcttcacacgccagtagctgcagcagctgcatttgcagtcccaaatgcattggcactcaatggtgattgctattttatttttttccttgtactctaacagattattatgataaaacttagacgcaattttttagtgttgttttctaattcttcaatcagaatttgagattcaaaattagcgaggtgtaactctaattctgactgaaacgcaataccaaaagtatttatggaattgcatgtaatgtgagttttgtgaattaaaattcatctgtatgtatcatataacatcttctcactttaaatgtgttttgagtgtcccttctgtcgtcttctcgcagccgt

SEQ ID NO: 90044 - DNA, 178 bp, Glycine max
  Clone ID: PAT_MRT3847_52320C.1
ggcgggggccctttttttcgattgaaaggagggggtgttaacccttggaaaaagaccccccaaaacctttggggaacttaattcttttttaaacaaggggaaaactttttcagtggggggttaaacggccgtcttttcattatttccgggggggggaagcaattttttaagtttttta

SEQ ID NO: 90045 - DNA, 608 bp, Glycine max
  Clone ID: PAT_MRT3847_52321C.1
gcatctcccacttcccatagaggcatcaccaattcaccatccaaaaaggaacaaaccgcaaagttggaaaacctacatacattgctcgcaagtagcatctgcaaatcttccaactccaccatgttcggttccgcacgaatcctctccgacgtcactctccgcctccgtcaaaacctttcggttcacggtgtgcgcgtgcagaacataaacatcggaggcggtgtgggaggcgagatcccggacaacaagcgtctggtgtacgctcttcagaacctccacggaataggccgttccaaggcgcaacacatcgtcgccgagctcggcgtcgagaacaaattcgtcaaggaccttagcaagagagaactctattccattcgtgaattgctctccaagtatctcatcggaaatgatttgaaaaagtgtgttgagagagatgtgggaaggttggtgggcattcagtgctaccgagggattagacatgttgatagcttgccatgccgcggacagaggactcatacaaatgcacgcaccaggaggagccggaaaactttctccggatccagataggtactgctcgagaaacagattaatgtgagacgatgaaataa

SEQ ID NO: 90046 - DNA, 190 bp, Glycine max
  Clone ID: PAT_MRT3847_52322C.1
accagctgttaccaccatacgtcgacctaatgttcgtgttgcagcagcttggactataacagttatataacatttccggttcgagggagcgagttctaatgttcaacgttactgctagtgcacaacgagatttcgtctctcgtagttgagttgctatgcagttcagctgcaacgttggggtacgcaggca

SEQ ID NO: 90047 - DNA, 607 bp, Glycine max
  Clone ID: PAT_MRT3847_52323C.1
aacacaacactaacacaagcaagcaatagaagcaacaatgagagggagctatatcaaccatcaaacttttccaaaggagcatgaaaaggaagagaataagaaagaggctaataattcccagagccagaaaaagaagctagagaggatgccaacagaagacatcaatgctagtgctgaggccttcatcaagaacttcagacaccatctgctacttcagaggctccaatccatagagaatcacaagctaatgcttgcaagggaaaagtagctgataagtgatgataacatatatattctcaattattattattatataaaaataaatggtcgcatgcatgcggctatatatatggctaatgtataatgttgtgtttgtattatttctgtaagttgagttatttgttcttatatatgctgaacagctgaagcatatttttataccgaggagtaagagaaattaaataagcacgtagataattgtagtccctgaccctcatttggcttagggtacattgcaattaatatctttgtataggttatttgttttaatacggattaataccttacattcaaaaaaaaaaaaaactcgagactagttctctctctc

SEQ ID NO: 90048 - DNA, 224 bp, Glycine max
  Clone ID: PAT_MRT3847_52324C.1
ttcttcttatatctactcttatactgtatttcccttaaagatatctatgttacactccctaactttttatcattaacatttttacatattcaaatctatctctattcaatgtacataatcaacatacccataaatctatcatatactatcataacacaattattatattgtagatagttaaaacattattttctccaactatttaatttttaaaaacaataaca

SEQ ID NO: 90049 - DNA, 418 bp, Glycine max
  Clone ID: PAT_MRT3847_52325C.1
ggaaaatttactttctcccaccgcccttcctataacgctattacaatgcctttgctctctatgagagtaagactctggtgcaacagactgctattactattaatccgccccatgccgatctttcaaatgaccaaactcttttgaagtgagatactcgtgttatgaaattccctaacatcacttcttccctatttacacgtacacattttgtccttatagcccttcaaaacttggcatcttgataccatcaatcgataagcttgaccactccttctggatcaccaacaagaaacacatgactgatctgaattaaaattttcaccgcatgaattaattacacatggttcaaaacaggtgcatgctcctacaactctagttgctgatagataaccctatcatgttccaatgcatcgtgaca

SEQ ID NO: 90050 - DNA, 636 bp, Glycine max
  Clone ID: PAT_MRT3847_52326C.1
cggacgcgtgggttgtgaagcatcattcttgcaagactgacattttctggaggctgatccctatcccgaggacaagaacaacacggagggaatgtggtgaagtagaggctatctcttggacaagaaaggtggagtgacccacctttgctggaagcataaaagggggaattaactcaaagggtagtagtgatggtgaccgattgcaattcttgaagtcagaaattagaagtaaagaggaaggtttagtgatcaagaaccacaccttgttgggcaaagaaaccaaaagtggagcaaataaagcaagagaaacacggattaaattaaaatagttacatgggaggaagaagttgatccatcaagggaaagggagaaacacgtggaaaatagattggagaatgtggacggaaaataccatttttaggataacctagtagtagaggagattgagaggaaagttgatggtggagatgcaaccaaggcttattgttttcaaaacccagatttcagaaaaagcttattacaatgaaacaataatcactgttggatccagatttgacatgaatgtgggtggaacatcaatggtgttggactctaggaattcaaacttgctgggtgagcctttatggttgaactttg

SEQ ID NO: 90051 - DNA, 537 bp, Glycine max
  Clone ID: PAT_MRT3847_52327C.1
cagtacgagactttactgcgaagccacacatgattgtcattcgatccttcgacgtcaacaagcctggtgctgaaatcgatgagctcaagggtggtgttgctggtggcagtatcctgactggtgtactaaagctgggagacgagattgagatcaggcccggtattgtctcaaaggacagcgccggaaagattcagtgcaagcccattttctcaagagtagtgtctctattcgctgagcacaacgatttgaagttcgctgttccaggaggactgattggtgtcggtacacgcgttgaccctaccttgtgtcgtgcggatcgtctcgtcggtttcgttcttggtctccgtggacatcttcctaacatctacactgagctcgaagtcaactacttccttctccgaagattgcttggtgtcaagactgcagacggcaagcatgccaaggtagccaagcttgcaaagaatgaagttttgatggtcaacatcggatcaactgctaccggtgccaaggttgtggctgtcaaggctgacgctgctc

SEQ ID NO: 90052 - DNA, 736 bp, Glycine max
  unsure (1)..(736): unsure at all n locations
  Clone ID: PAT_MRT3847_52328C.1
gactgattaaaataacagttttctcacaaatggtgtatttacacaacacccatcaatttcatattcagccaaacacccagtgcaagtatgtctctgcttattgattgcagcagtagtttattattttattatcttaaattgacaacaaactattacatggtttcggactagatatagtcttgaccaattttcacgtgacattttttactcttaaaaggtataattacatgtcactgacggggatttattttgcaaggttttcatagagcagacaatgaaaatggtgcatggcctgctcaaccgttggagcatatctgcccacacgatatgctggggactggaggcccttctggacaccttcacacaacacaatatcttctatctgcactttctcactatcttgtaaacttttttctatgaaatctttgtcatccttcagagaatgttcaagatagtagtcaaatattacttgacatttgttgggtcctagtggaaccacaagattggtgtccatccaaggtccatacctatttatcatgaagttagggtaaacaaaagcatatatagctgttcttcccagtcgatcataattccctcggtttttctctgagctgccttcacagctttggatgcttaccctttcaaacatctgtctcactcataaccatcctttngtacataagcaatctctnntatcaaagaactactaaaaatnnagnnnnnnaagtnnnatata

SEQ ID NO: 90053 - DNA, 448 bp, Glycine max
  Clone ID: PAT_MRT3847_52329C.1
gttggaactttggcttggaacctttgggctgtgctatgtgcttgcatggtcgtgagaagatgatagaaggggactaagaattagcctaacacttcagcatattgcaccaaagaacccaagacacatcacgacgagagtgtggcctttaccatcgccgtcgggagccgccccttcggtactagccctcgctctacccggtaccgtgcaccgggaaaagtagaattttagctataataagcgttcttgaagccgtaacagtgagaaagatcttcataggaattaagtacgttatgtctgccgtaattcttccaaggcggagaaagaagaagaacgtgaagaaggctaaaccctatgattatgattataatatttggagagggaatgctagttatatggcgagaaaggagaagataaaggcgagtagttatgcttacctttaccttaatgt

SEQ ID NO: 90054 - DNA, 268 bp, Glycine max
  Clone ID: PAT_MRT3847_5232C.1
tctttatcgaatcggctcgagtacggctgcgagaagacgacagatggggctgtttaaatatttagataatacaacattatgattaaattaaggaactatgtgacataagtccatctaggatttagcacatggtactataacaaaaattatatattttttcgtgggtcaaaatcatttatcaagtgtctaaggttacacttgcattatactaaagcatatacaatatctcgtgttaatgtcttgatcaaaagttgatggtctatataga

SEQ ID NO: 90055 - DNA, 390 bp, Glycine max
  unsure (1)..(390): unsure at all n locations
  Clone ID: PAT_MRT3847_52330C.1
ttnnnnnnnnnnnntnnttttttttgttaggcagaactatgccttttcctttcttaattaatagaaaaaaacctgctttttttttttatttccataaaagggtgaccccatacagaggaccggccatttgtacaacaaaggggggggaaatcctttctttggttggcacaggcccaaaccaagagcaccttgatgcccccccggaaccccattaacccgaccttatttgggcatttaacggaagggcctgggtttcctttgtggcttcaagagggggatttttcgcacccaaccggcccctccgccaagcgttattcccccaaatattaacttaatcccacttcccccataaaaaaaaaaatggcccattttttgaccaaccaacaaaaa

SEQ ID NO: 90056 - DNA, 153 bp, Glycine max
  Clone ID: PAT_MRT3847_52331C.1
tttaaaacatccctcctcgataggaataatatacgcctccccattcaccacctacttccatacaaacaaggatcaaccaatcccatattcttcacttacaaattgctctcccaccaagacaaatccccccccacctcaacatcaaacatcttc

SEQ ID NO: 90057 - DNA, 1667 bp, Glycine max
  Clone ID: PAT_MRT3847_52332C.1
ccgggtcgacccagcccacgcgtccggtttcgtttcagtagagtgacaaacattttcgatccacaacaaggttttctccaggggcaaggggctggtttggtgtttctttcatttcactttatatgaatacatagaaaagtttgaagggttttagggatttgcatcatgttaggttcattaccaatattgccactccctgctcctccctctgatggaaatctaggtcctctccctgagtctcaagtgattgataatgaggagcagaacaaatcaaattctgcttctgttccagcgccggcaacagttgccacccacaccagaacgattggaattatacatccgcctccggacattaggaccattgttgataaaacctcccagttcgtcgccaagaatggtccagaatttgaaaagaggattattgcaaataacacaggaaatgtcaagttcaatttcttgaactcatcagatccctatcacgcttattatcaacaccggttgtccgaatttcgcgctcagaatcagtcttcagggctgcaacctccttcccagcctgcagactcggctgtccctgaatcagccccgtctgatagcaacggcgtagcagcagcagcagaaaagatcgacgtttctgcccagtttaaagctgtaaggaaagtgcttgaaccccctgaagctgaacagtatacagttcggcttcctgaaggaattacaggggaagagctggatattataaagcttacagcacaattcgtggctcgaaatgggaaatcttttttgacagggttgactagtagggaagttaataatccccagttccattttcttaaaccgacccacagcatgtttacgttttttacttccctcgcggatgcatattcaaaggttttgatgccaccgaagggtttgacggagaagctaaagaagagcgtgtctgatatgactactgtccttgaaaggtgtgtgaataggctggagtgggagcgttcgcaagagcaagctaggcaaaagggctgaggatgagatagaacaggaaagaatacaaatggctatgattgattggcatgatttcgtggtggttgaaacaatagattttgctgatgatgaggatgaagagttacctcctccaatgactattgaggaggttataaggagaagcaaggtgacagccatggaagaagacattgttgagccaggaaaggaggtcgaaatggaaatggatgaggaagaggcccagcttgtcgaggagggtatgagagctgctagtttggaagaccgtgatgacgtgaagcagaatgaagtcagggttactgaagaccctgaaccaccgatgagaattgttaagaactggaagagaccagaggagaggatttctgctgaaagagattcaaccaagtttgttgtttctcctatcactggcgagttaattcctattagtgagatgtcagaacatatgcggatttctctcattgatcccaagtacaaagaacaaaaggaaagaatgtttgccaaaattcgagagacaactttggctgcggatgatgaaatttcaagaaacattgttggacttgctcggacccgtcctgatatattcggtactacagaagaagaagtctccaatgctgtcaaggcagagattgagaaagaaaatgatgagcaaccaagca

SEQ ID NO: 90058 - DNA, 1039 bp, Glycine max
  Clone ID: PAT_MRT3847_52333C.1
ccacgcgtccgcgagctaccacctccctttccgtagcttttcttcctctcactggttaaaataagtgacattaatttcaatggagtcatctactaaaaaaatgacgagcaaaaaaaaaagttttaggaaaaaacaatgaggaaacaagaagttattttacatggaatttggagatggaaagcgtattaactgatgtactgagagatcaaaggaatttgggcaacaagggtgacggaggttggaaaaggtcagcattgaatactgcagccgcagtgttgtctacaagcttcaatgtttaatgtcagatcagataatgtcaaaaaccgtatcaaattatggagatcgtggtatggtattgtaagtgacatccttggccagagtgggtttgattgggatggcactaaacacatgatcacagttgagaatgaaaatgcttggaatgaatattgtatttcgtacaaatcggaaaaaccgtttcaattcaaggtgcttcaaaactgggatgacatagtgtggattggagaaaaagaaggaatagcagcttctttggataaaatggtcaactcttttgacagaatgctaaaaaaaatagatggtaaagtcgatgatgaagatattcaagaagtgttacgtgaggcaactttgatactagattttaatagacaacaatgggctaaagctattaaatggttaactgacgacccaaagcaattagttattgtgaaaatcttccaattcacgaaaagacagattatgttttaacacatcttgcaaaatgaaacttggttattgcctattaactacattttggagaaatttcatcaaatcaaagcaagaaaaaaataggttattctaatgtggtttgttcatgttgtttgttttggaccctctaatttgcaaaataattcatgaattattgagtattataagtgaagtgacatcaatgttgatgaaaaaaaattttaggtcttgaaatggattgaaggattttcttttcttaccaacaatgaaattaaaatcaatgtttgaattttgtatg

SEQ ID NO: 90059 - DNA, 280 bp, Glycine max
  unsure (1)..(280): unsure at all n locations
  Clone ID: PAT_MRT3847_52334C.1
ttcatncancntantnaactcanaatcntntcaaactnncaancactnnnaaaatcntnnntntcaananntaaatttananatnatatcnnnnnaanccncacataanacnnanaananatnaaanactaaactttntatnancancannnncntaaattnntacaantacacnanaatcanaaattnttnnaannaatataananttcnnaaacnatatananccntnacaaacnnanncannatcnnnacactatntaaaaaaaaatcataannana

SEQ ID NO: 90060 - DNA, 307 bp, Glycine max
  unsure (1)..(307): unsure at all n locations
  Clone ID: PAT_MRT3847_52335C.1
gagaacgaanngnggcgctaaacnaaannggttcgnncaaagnaaagagaagagaanagaggganggcgngcaacagcgggncnnggcncaagcccccanccaccaacgccaaacgcgnncccnngnncnncggcccaaccccaaccngcgncaaaancgangggccgggggcggcccaaaaccaanggcanacccgcagcagaaacancccccaaancaaacgccannggggcgaagcnncngagcaaacgcncgcgncncaagaaagaaacagcgnggcgncgcacaacaaaccgggggacagaa

SEQ ID NO: 90061 - DNA, 295 bp, Glycine max
  Clone ID: PAT_MRT3847_52336C.1
aattaggcagtaacaaatctttgggattggggcgtttgccctaattacatgctaaacatacaaaactcacaaatatttacgactgtaaaaattgcaaaagattcatgctataataaagttcgaatattacatttttcaaataacaaaaaaaacttaaactagatcattataatgtaaatactgtataaatcttctaaaaaaaagacttttatgctaaaatatttaaactatgtgcataaatattttaagctcttgacaaataaacaaagtatttgctttttatacaaataaaata

SEQ ID NO: 90062 - DNA, 357 bp, Glycine max
  Clone ID: PAT_MRT3847_52337C.1
tttttgagactgaagtgcagatcatattaataaaataactaaacttacaagcgcgtgcggattatcacgaactgaactgggaacttactcttgtgcgaaacatgaggggggctcacactttatccgaggcattcttcccttatctctcgcgcccctcaccttcccgttcctccttcccttcatcactgctgaccacctcccccctcgcgatcctgccttttctgagccaatccctccttgctcttctctgcgccgctgtggatccgagtccgggactgctcggagtggtcggcgtcaccgggctgatatgcacgctcctagcatccgccggccccggttgagttctggaccgttcaa

SEQ ID NO: 90063 - DNA, 263 bp, Glycine max
  unsure (1)..(263): unsure at all n locations
  Clone ID: PAT_MRT3847_52338C.1
nnnnnnaaaaaaattttttttttttttnaaaacaannnnannnnnnnaaaaaggaaaactttcccttttccatggcaaagaaaaaccaagcctccccccataccaattcccaaaatataaaagccggccccaaaacctggggccgggggccccaaaaagataaacaaacccccccggccgcacccagcccctttacagggctgggacccccaacccggggggaagagatggctccaattaatcggctttcccagcggcccccg

SEQ ID NO: 90064 - DNA, 168 bp, Glycine max
  Clone ID: PAT_MRT3847_52339C.1
gtcagactctcactgggactgtatagttgctgtttcctgtatttgataatatctgtcaagaactgcagggtaattcaaagtcacgctattagcagcaagtgtgagcagtgttggtttccccagtctctacatccctcatcctttctttcttctttatggttgtctatt

SEQ ID NO: 90065 - DNA, 463 bp, Glycine max
  Clone ID: PAT_MRT3847_5233C.1
gcggtcgtttgtggcaatctaaatattggggtgacgcccttgtagatattttttaggggctagggccccaaaggctgacactgtattagcccaaattgttgcggaggatcacagagtgggagcttagggacgctcaggggccttagtagatacagaggacgaagattagaaataggttgaagctcaataatgcgagactctctatctggttctacctcctaaacgaaggtgtagtgcgattgtaaggacgaccatataaaatgttgggacagtgcaagatccgcctctttgttgctaatcacgatgatgggatattgatctgttagtgaagaagagtctggatgatggtcatcataccctgtgtgatcattcagagagccgtaattattatagaggtatatgataagcctgtgccagcgagcccaatctgtgcgcacacgagtgcccccctaaaggatggctc

SEQ ID NO: 90066 - DNA, 124 bp, Glycine max
  Clone ID: PAT_MRT3847_52340C.1
ctgcagtttaactgatgaggacatggtcaaatgatgtacagaatttttgctgtgtaggctccggttactttgtatttatgtctttaaatataaatactgtgtaaccgctggtctatggggttag

SEQ ID NO: 90067 - DNA, 308 bp, Glycine max
  unsure (1)..(308): unsure at all n locations
  Clone ID: PAT_MRT3847_52341C.1
aaaggnaatttttttttttgttttggtcttttttttttttttaaaaacaacaatatcctgtggggactttttttatttggcccatctataaatagcactgttgcaggggtttttttgaacttgcatttcaagtttgaagggctaagaatgaatgggagaaacacccccggtcttttgattggggggggaagcaattcttttaccatttaaatttttttaaaattattagtcccccccgggaacttttatgatacagggtttcccaaaaaaaaggggtttggcaacatttccggatccctaaaaaacaa

SEQ ID NO: 90068 - DNA, 1044 bp, Glycine max
  Clone ID: PAT_MRT3847_52342C.1
ggtttgatggaagaagagaggttcatattcacccttcttctatcaacaatcgccccaaaggattccagtacccctttcttgtcttccttgaaaaggttgaaacaaacaaagtatttcttcgagatacttcagtcatatctccatactctattttgctgtttggagggtcaatcgatgtcctgcatcagactggacagctcatcattgatggatggttgaaattgactgcacctgcccaaatagctgtcttgttcaaggagctacgattagctctccattccattctgaaggagcttattagaaagccagagaatgcaactgttctgaataatgagatcattaaatctatcatcactctgcttttggaagaagggagcatacctcaatgattgagtatcaagtataaactcatgtgagctaattcatttcattaaattaaagctgctttgataatcaaacataaaagaaggcagatttccgcctgctgtaatctcttggtcattctgtttgagtaaaaggagctgagctttctcctctgtcgaaagtaaagctcttttgaacgttcttatttctttactgtctttggactattgattataaattctgacaaataagttcaaacatatagttgatcatgtctgcgctttagcttttatgctctatggtaagggaatggcatattctatttctagataggtagagattttattcaagtatagaccaggtgggtttttgtattgacctaggtgctggccctattatttgtttagaatgtgttcatagtcttacatgcttttatcgtgattgttgtgttttcaatatatatcttacaatagctcgtgaaatgctaaatcagttgctgaaaaaatataatataataactaaccatagttaggcttgacattcctcagagaattatatattctaaccttgctaacttgacaactattcttggattatatcccagttttcgcctcccgctgatatattcgactcgatgatatctcagctgtcctactatgtgctgatgacaacaaggcacat

SEQ ID NO: 90069 - DNA, 128 bp, Glycine max
  Clone ID: PAT_MRT3847_52343C.1
gtaaaattctgattcttttattttcagccacattttaaacggaaagatctgcacgttgaccgggggcaggatcagcttttggtgttgatcatccatattagaccttgaatagtccaagttataatatt

SEQ ID NO: 90070 - DNA, 416 bp, Glycine max
  Clone ID: PAT_MRT3847_52344C.1
tgctcgagctctctctctatagatctgtctgtatttctgattatatcaccttatcctatttattttgccatgacccaccaactgcacatgagggtactgtgagctatgttaactatttaattcatacatgtaactggcatgacttgaatctaaatagtaatgcacttgctgcagccgaagcatatgatatcagtgactaatctgatattaatattatctcagctgatgcagtctttagaaatgcaacaataggtcatatgactactgatgatacatcacataccgattggcaatgactgagccactgtgcatggactatggtgatgcgacgcactgagactagcatttgataccacctaacacacatcaagtcccatgcatatggtcacccagttcagagacgaaatgatatatgc

SEQ ID NO: 90071 - DNA, 443 bp, Glycine max
  Clone ID: PAT_MRT3847_52345C.1
aaatttgcttcgaatgatccgtcccaaggtcagatggttgccgctcgacgagtcaatgtggttccaccgacaggtcgcctatgctatgctcatcttcaccgtcatccacactgcagcgcattatgtcaacttcttcaacgtcgaacgagttcaagtgcgcccacagattgctcttcaaattcactatactgaagctggtggcatcacgggtcacatcatgttgctctgcatgttgctaatctacaccacggctcaccacaggatccgacaacagtctttcgaaactttctggtacacccaccacctgttcattcccttcttgctcggaatgtacacccacgctaccagctgcttcgtccgtgacaccgtcccaaattggtctccattcgacaaggaaaacttctggacgcactgcattggttatgaggggtggcgatgggagc

SEQ ID NO: 90072 - DNA, 263 bp, Glycine max
  unsure (1)..(263): unsure at all n locations
  Clone ID: PAT_MRT3847_52346C.1
cttatgcctcccacactcccatctcacacacccctagcatccaacaatgtcactgaccatgggcctccaacatatcgaagcccgactccctccgccccaaactaagcccaaagctaaagaccgtcgccacaaccaccatcgactgcagcaccaccaacaacaacaacaacaacaacgcgtcctccgacctgaaggcgttctccgacgcgctggccctcttctccatcctactctccgnccctctccacgtcggcgccgacatc

SEQ ID NO: 90073 - DNA, 303 bp, Glycine max
  Clone ID: PAT_MRT3847_52347C.1
agccacgcgttcgtccacgcgtcctctccatttagaagatgaaacttaatcgatcatcactgggacttactaatacatgagggcatacgagacccagaacaagtatgagagctctgaggttgaggtccaggatcgtggtgtttttgactttctcggtaagataaaggatgaagaagacaagcctcatcctcaggaggaggtcattgccaccgagttttaaaaagtcactgtctcagaccaatgagagaacatgcacatgccttttagaaaagcttcaccgatcttacagcttctttagctctt

SEQ ID NO: 90074 - DNA, 321 bp, Glycine max
  Clone ID: PAT_MRT3847_52348C.1
gggcaaaagttctgttgaatttcatagcatttttcccccatggataaattgatggccaaagtccatgccagtttaaaaatccgttcacccaaacacccacaactttttactgttccagggataattttttttcatagaaacctttactttttagctataaacacaggtgtttttaaaattttaatttttattggaaaccacgacgtaaatgccacacgactttttccaaagcatttgctcctcaccatgtcatgtcgggagaaagttccctccaaatatgagatgctggggggagatgccttaacggaaaccaaaaaagag

SEQ ID NO: 90075 - DNA, 280 bp, Glycine max
  Clone ID: PAT_MRT3847_52349C.1
ttcttaagatgagataagaagttgtaaaattatacccttttcaaactaagatcaacatggactactacaccctggttcaaaagttgagagggaacctatcgtggaggattccacacccccaccaatgaatgggcaactaccaccaccctaatgctttttttttactcaggggttatagatgttatgaggaggatgagattgaaggatccctccacaaccgggtgtttagcaccacccctcacacttatgagagagttaaggggggggagtattaacaaaa

SEQ ID NO: 90076 - DNA, 1249 bp, Glycine max
  Clone ID: PAT_MRT3847_5234C.1
atggaatcaaagattcattttcatttaaaatatcaaaagcacataaaccaacaaccacatcacctaatttacaaaaaatctaattatttttttaaaaaaacacctctcattcattcactcactccagtacttctcatcaccctctttctcctccccctcatcactctccgacccatccccgcccatcttgaaccgcgtcacatcctccaccgctgcgctccggaacagccccacgtctacggcgccactcaccatgtgatacccacgcgacctcaaatccctcgccccatcatacaccgtggcgaaacctgcgagataagccccaatctcaacgtcgtcgtttcggctctccaacaccttgttctcagcatccttcaaaacctccctcactttcttgttccctgggtcccacaagtaccctaaactcgcgctcagatccaacggcccatctgcacgcagtctacgccatcaacggcgggcgatcgcagccagtgttcgccactccctcctcggactctacctgacacatgataagtagctcgtcgaggtaattaccgagcccctgcgtcgtccataccgtacttggcggcccgatggggtggatgggccgcgcggagtccggtgggaggaagaaggcagtaggagaccgcgtcctgggccgactgcagggagtcaatcatggggaacatgaggccctgtgggccgaggtcgagggctttcttggcccaaccagcggtggactccgggacgcggaggatggcgccggtgttgccggcggcgagggcgtggaggcaggggagggcgtcgtggatgccgccaggaccgtgctccatgtcgacgacgacgaagtcgtagccggcgtggcccgcgatctcggcgagggtgggggagaaggagaggaggaagagcccgtagagggtctctccgttgcggagtcgggacttgaggtttaggggggaggaggaggagagggtggggatggatttgggaatgaggggatgtgaattgggggaaatggttaggggcttggagagagggaatgcgtgggatttggaagtggaaagggagagaaaatgaggtttgggtttggggagaagggaagagaaaggagtgactgttgttcttcgggttgggggagctctgatgctgcttgtgcttatgctccccatttttgtgtgttgcttctactattcacctcacgcgtgggtgtctcgaggagcccggggacgtgggtcgacccgggattccg

SEQ ID NO: 90077 - DNA, 719 bp, Glycine max
  unsure (1)..(719): unsure at all n locations
  Clone ID: PAT_MRT3847_52350C.1
cagccacataaacacttattatttgtgcattagctttattaggtatgataaactatccagcacaatacaattaacaagttattgagtttcaaatagattggcttgcttgtcttaaaacggcaaaagatatggtagaggataaggaacaaaagaggttggcatcccaactatgttggcaccgcaacccctaaactccaaaaacaccatcactaaatatattaatattataaaactgagagaaacagtacaattgagggggccaaaccgaacccaaaagaagagactaaggaaacccataaaaaagaagccctagcctgtacctaagaagctcttgatcaacaaaagatggtggagaatcccaccaagtatacctaaaagactgtgcaccatatgaaacaagcatgttagcacaagcattgccttcacggtatatgtgagtaatcctaaaattaaagttgttagttagcttttaacaattcatccaatgagtataaagataccaatgcactgttaagggatgataaactatccagcacaacacaaggataaaacattgaatagtttcagaacaaaataatatttcgctagagttatacatccattataatcccttctactgcatgcaaattggntcgttgatcttttgntggttgcaattttggtatgattctactaaaactanatcatatttaatagtgacgaccatgcttaaatgcttt

SEQ ID NO: 90078 - DNA, 370 bp, Glycine max
  Clone ID: PAT_MRT3847_52351C.1
gggttaaaaaagggttttaatcccttaaatttttttttggataaaaaaaacccacctaaggttccggaaaaaagggggctttccaaaggaacccccctaaaaaaactggaaaaacgaaaaatcccccaccgggaaagaaaccccaaattttggaacccccaaaaatggggtaaagattaaagcttttgcccctataaaaggggagcccaacaaaggactttctactccaacaaaaaaatgtaaaaccctttcacaccccttaaaagaggatttgggggatttaaacccgggcagggaacctaagaggccccccatgggacctgggggaacccggcctttaaagggaaggggcccccttgaaaaagggggg

SEQ ID NO: 90079 - DNA, 213 bp, Glycine max
  Clone ID: PAT_MRT3847_52352C.1
aagcggaacgtcgagcctataccccactcatacactatttataaatttatgtatgatacatagcggtacaatatatatcgggaccacataattcactcaccatatgctacggatacaataaacggctacaagagcgatcgcccaccgctaacgccgtttcttttcggagccaaacgaccctacaaaaggagagaaaaaagggggcaaccatcg

SEQ ID NO: 90080 - DNA, 495 bp, Glycine max
  Clone ID: PAT_MRT3847_52353C.1
gcaattgaccttaattgtttttttttttgtttgaataggcacatgacgagctcccctcctcccaagctagctacttcacaatctacggtaaagaggactaaacaatccacacaactcagaagattgactattaggcgcttagatgaagaggttattagttcatgttgatcagaaaacttcaagtccttataaaactaaattcaagacctatttgggaggtcattgatcgaaaaaaaaggcttgtattttgcatcgtaatcaggacatttgttataagttgagaacatgatttgggaggacattctagtatttccactaaactctttatgttatggtaatttgatgtacttaacatgcatattcttggtattcactaattcttaagtaacattttgtaatgaaggaacactttgaaatttcaaatgctaggaggaagatcattttattggtgagaatgagatggaggtcattcaagtcaaaactgaccacgcataa

SEQ ID NO: 90081 - DNA, 206 bp, Glycine max
  Clone ID: PAT_MRT3847_52354C.1
aaatctcagatgatagaaaagtcatttcttcctgctcccggccacggatgctcacatgtgtcgactattgtaaggagaggttacaccaaatagtcaatgaagagattacaaagcgaaggataatttttaatgggaattaacgatgaataagtttaccgcgcatggacaaatattactaggtggaggcagacatccagactccaaat

SEQ ID NO: 90082 - DNA, 637 bp, Glycine max
  unsure (1)..(637): unsure at all n locations
  Clone ID: PAT_MRT3847_52355C.1
ccacgcgtccgctcatcttaggttaactctagtgatgatgtgttgtccttggaattcattattacacatcatcaatgacgaaccacgaatcgattattcacgaataacgatttatgattatataattaattacaaataaagtaaacttgatacatgtaaaattacattattgtcatcaaggactaatccttatccgtgtaatataccaagtccccggtgatatgatagattattaatttgaaactacagaactagcaaactcttttgggagaaaattcagaaacacacaaagaagaaaggaaggatttgctcctcattttctaaaccttcttccatataaatattcatagtaattaatgtgaaaataaagactaattgataaaactaaaatatataataattacaattaaaacataacattaattctacattaaaataggtaattaaattgattaaatgatatattaaccttttgaaatatctaacgaaaatatacaacatcaagtccataatagttgaaaagcattcagatttattaattctataaatttttaaaatgtggataaatattgttcttgagattnctgggttatctaaaacactgtttttcacggtttgaaatcctttgacattgaac

SEQ ID NO: 90083 - DNA, 214 bp, Glycine max
  Clone ID: PAT_MRT3847_52356C.1
tgcttccccaatggcaatacaactcaagatcaccttcgctaagactcttgtatatccctagggcctctctgcctcttcaccacttcacctcgtgccttctacaaagcatattatatgcttcactgttaacgtcatccaatcagacaatccaacctatcaaaagattcatacaatcaacggtgacccattcattggaatcctgaaaaccccagta

SEQ ID NO: 90084 - DNA, 483 bp, Glycine max
  Clone ID: PAT_MRT3847_52357C.1
gccgcacttttattacagcatttttttcttatattttttcacaattaacattttaacttttttattgacttttattcaaatgtctttatttttcccccaccccccccggacccgggggggaaccccgaaaattcggacccggacccgcgagggacccaaatttccctaaataaaaagcaataaaaaactcgggcaaaactatgaaaaaaccagccctttcgaaaaaaaaaatcccctaaaaaattccaaaaaaaaaccaagcggaaaacaaaaaactgaacccctgggtgccttaagaaagggcggagccttattaaaacttacgcggtaaacggcccattttaaaagaaggaaaaccctgttaccccctggtttaaagaaaacaccccccccccgggaaaagcggtgtgccttatcgggcaaccaggggtttgttttcaacccggaaagaaacgaaaaaacggcactgggcaccaccccact

SEQ ID NO: 90085 - DNA, 130 bp, Glycine max
  unsure (1)..(130): unsure at all n locations
  Clone ID: PAT_MRT3847_52358C.1
caactttaaggcgcatagaaagagcagctatagctgctgcgactcctattacttaccattcaagggaactcctgctcctaatccacgaacacctacaggcatnctggnatnntgggnnggcaaccaaaac

SEQ ID NO: 90086 - DNA, 178 bp, Glycine max
  Clone ID: PAT_MRT3847_52359C.1
gtagacttttaaatcatttcaaggttttagccatgtcaagtcaaacattgaaacaatcctatcaagaacatgtcaagttgatgcctttgatttggaaaatagaatcaagcttagaccgtttcccacatgattcttgtggtcatttacattttcaaattattttacattattgaaaaaa

SEQ ID NO: 90087 - DNA, 1077 bp, Glycine max
  unsure (1)..(1077): unsure at all n locations
  Clone ID: PAT_MRT3847_5235C.1
ggtaccggtccggattcccgggtcgcccacgcgtccgcggacgcgtgggcttgcagtggaaaacgaatcaagcgttgaattggtttgaatttgcactcccaatccaaccaacgtcgcaatttcaattcttttcactccaataattcaattcaccaatggagcttttgaagcctttgcaccctcaccatgcacccattttgcgaattccctttcacgctgttccctcctcctcttcttcttcttctcaatctaaggttccccttcctatgatttctaaggttcatgtagctgttgggaaatcgctcgacaaagctgtccccttgcttcgatggactttaaatcacttccggaacgcggaaatcgtcattgttcatgcttatcaaccttctctcaccatccccactctattggggaaattgccagcatcacaggctagtcctgcagtggtgtctgcttttcgaaaagcggaaagagaacaaaccgtgaagctcttagacaagtatttgagcatttgccgcgctgctagggttagggcaagcgttattgtaactgaagctgaccaagtccaaaagggaattgttgatttggttattaagcataatattgagaagcttgtcattggagcaataccagaaaattgcatgaaagtgaaaaggaattccggtaaagcaaattacactgccaaaaatgctcctccattctgtgaagtatggtttatctataaaggtaaacacatttggacaagagaggcttctgaaacaccatgctattcatcctcatgtactcaacccgagattgccaccagagaaagcttgagatgtagatcttttcaatatggtaatgaattatttgactcagaatatcttcaaccaaattcagcaagaactactactggttctggaagtagaagttgggttcagggggaaatcattgaaactgaagccattttttcatccagttgcagcagtcattgttccccccaaaatcctttctcgggcatatttagatacatatttagaaggccatgggaagaaagaattacanacaacttattgaaaccaagagagaagctgagct

SEQ ID NO: 90088 - DNA, 343 bp, Glycine max
  Clone ID: PAT_MRT3847_52360C.1
aacaacaacttccgttctattaaaccctcacacaaaccacaatacattacacaacacaaacacatgcagagaacagcttacaaaaagacataacacaacacaacacaacacacttgtttggaataagagacagcaatcaaaagatttaaccagagatttgaatagacttgacttgaggcttcttctgttcttccttgggcacagtaacagtcagcaccccattctccatagcagctttgacctgatccattttagcattctcgggaagcctgaacctcctaatgaacttcccagggcttttttcaatgcggggccacctatcaactttcgggtcttggtcttt

SEQ ID NO: 90089 - DNA, 500 bp, Glycine max
  Clone ID: PAT_MRT3847_52361C.1
gtatctgagccttcatggcctcaaggcattcatcttccacagcttcatttccatgcagttactgtcgttgccaactaccagggctgcattgcgttccttgatttttgcctcaagtcctccctcctttagttcaacaccgactccaaacaaggcatccgggacctctcctggacagaggcactcctttggttagtctttgtatacatgaacatggtgctccttcatttgctaatttgtagaacctttgatgtatttttccaaatgataatttttgcattgataccaattaccaaacatatgcataaggagattgttgttttctattatctgttatggctcactatattctaattgcttaggagttttcagtttctctatttttaaaaaaatatggaatattcattatatttaatattttttgaaatacaaagagttgttcttttacaaactcttaatttttttatggagatcatcttgtatacagagagctattctgttgc

SEQ ID NO: 90090 - DNA, 435 bp, Glycine max
  Clone ID: PAT_MRT3847_52362C.1
gataagcaacaaaacacaaagaagcttttcgattcataaggtacacacacccacagcaaccaagctttttacgcacacggggggataggggaacatgaattaaaaaacaaggaaggtcttattaaaaaggatggccacagacaaactattgatctataaaaacatatctatagctctatatatatttactttccgtacccctttgcctataaggaccaaagataccctccatgtgaactacccttcttgccaaaaatttgataagccctattaaaggaaagtacatgcaaatcttttgaaagatttgaggcaaatttgtgatattttttataccttataaaagattgacaaaaacatttcttacaagaaaatccaaataccaaagctgacctatgaactaacaacaatttttttgggaagcacgtattcattctg

SEQ ID NO: 90091 - DNA, 430 bp, Glycine max
  Clone ID: PAT_MRT3847_52363C.1
cgaagttattcagggtatgcttatatatttcctaacttagtttcctttgatttgatttgttcttgtaccttttgccattcattaatccaaatttgatgcataattaaatgtgcaacttggacagctgttggatcttcattttgttgcccacccctctagtcttctaataagtataatattgttcatttaattttaatttgccattttgtattaatggatgtatgttgtttagtggtagacacaggtcaaggagtatatctaggtctccagaggctcgaggtcgctctcgttcttttgaaaggattcgtcattctccacgacgacggtctatttctcctcacaggcattcaccacgacgttctccttataggaggataccttattcaagaagatctagatctccttctcctgtacgacgtagaatgcattc

SEQ ID NO: 90092 - DNA, 107 bp, Glycine max
  Clone ID: PAT_MRT3847_52364C.1
gcaccattgatgatcggaatgcaagctcctgggcttcacgatagcccttacaattcattgatagagagcagagatgtctgcatataagaacgactctgtatgggaac

SEQ ID NO: 90093 - DNA, 501 bp, Glycine max
  Clone ID: PAT_MRT3847_52365C.1
attagatgtaaccattttgctccctctttactttgtagctgctgaaatgttctcaagttgatataagactaatgggttctggtcatgcatatgaagtatgttggagtcagaagttaaagctagttgctgttgttgtttagttctccactagtcctggttactattataacttttggggaggtttggcaaaatttgaaatttgaggtacaaagcttctggactggacacgaatgtgctggctggagctagatgtgtctctggagtttgggctgcacagggtccaatgcgattggtagtcaataccgtgatggctagaagttttgagagaagtatggaagctggcacattgggaatgattggtcataaacgttttatgagtgacatcccaagtaaaaccagtgagacaaacctatctggttttcgtccgctatctactcatcttcctctttatcagccccaactttcttagaccctctcaattttcaatagaattgctggagc

SEQ ID NO: 90094 - DNA, 1234 bp, Glycine max
  Clone ID: PAT_MRT3847_52366C.1
cggtccggattcccggcgcatcactcgatctcactaatcctttctcttctcagttctctcgttagtattcttccaatctccgtcgatcaccactaacaccaccatgtcgtggctcctccgatccaccaagtcaaaactcctctcttcctcatcttcactttctagaaccttcccctctctctcacgctccggccccacacttgacctccctcagatcggagccatctctcccctccccgatctcttccaccgcaacaccgctaccatgcctttcgcgaaggaaaacgcttccggtggaaacttggccggtcttcccaaagttcctgcgaatacgcttggcagtgactctaatgcgatcaattctccgaggtacaaagcttctggactggacacgaatgtgctggctggagctagatgtgtctctggagtttgggctgcacagggtccaatgcgattggtagtcaataccgtgatggctagaagttttgagagaagtatggaagctggcacattgggaatgattggtcataaacgttttatgagtgacatcccaagtaaaaccagtgagacaaacctatctggttttcgtccgctatctcctcatcttcctctttatcagccccaactttcttcgaccctctcaattttcaatagaattgctggagctttcctagccggtgtcattttgcttttttatatgatctatatgaaattgggtttggttagcctcacctatgactctttctaccagttcatattttattcatcaaaactcaacctgcttgtcatggagatttctgccttagccgtgtcctatcatctgtatagtgcaattcgtcatttattcttatgattagaatcaacaattgacacctgaactgtacgtttgaacctgaggtggaactttgcataattcgaccttggaggcatgcatccatatgtctgtcagtcataaggaacttcattaagaaatgtgaatttgctttattgtagttatgtattattgacttaataattacaattctggcacaactttctgtttagtgctgagcataactgcatctattttgcacctgacacttggtcatgcttttttgcagccctctcaaattgctgtaagtaaatgttgcatttaataaatgcatttgagttttggtgactcttgaaatgcattatcccttgtacgatgcaagacatttttttggcagggtattcaaggcattattcattgctt

SEQ ID NO: 90095 - DNA, 328 bp, Glycine max
  Clone ID: PAT_MRT3847_52367C.1
ttcatgcgaacccccacgcgtccgagtttcgaaactatctttccttcccagataccggttcaaccaataagtaaataaataaatacataaccgatccgatccgaaccggtggatctcggtggttccaaggaggctcacggcggctggctacgccgagtccttgttctcgccttctgcgtcgatggaatctggtctggcatacatctaccaaggagtttttgaagaaaatgtgtctgactaagctattcgactgtgaaaggttcgagcaccttgcgtatctgaacatggcacaaaatgtggtgtgctcaatctggactttcataatgat

SEQ ID NO: 90096 - DNA, 2950 bp, Glycine max
  Clone ID: PAT_MRT3847_52368C.1
aaaatcttttttaccctattccattttttttctttttatcatttaaacttggggaggggaatcaggctctgcacctcaaacccccactcgacctcactagtccccatctcttcccttctcccgcaagtattcctctaatctttgtcgatcaccaccacgatcaccagtatcctcaccatcccccggctcttccgatccatctagttctaactccctctcttcttcttgtacactttctagatccttctcctcttcctacacgagccggctctacacttgcccttcttcagcaccgaaacacctcccccatcgcccatttcgtcaagggaaacgcttccggcggaaatttcaccgatgtacacgatttcggcgcaaacatggccggccttgatactgatgcgtccaaatctgcttggtactaagcttctgaactgaacaccattgtcctggttgcagagctttttgtctctagagttatggctgcactggggcaaaatgtcattctggagcttgagctggatagggtcaaatgtgattggaagtatgtaaggtgatatataggagttgagtgagcattaacgtagctatgagaagcatattaaattgtatctaccgtggaaatagccacaaacttcagaggagcagtaggcaatcttctcatttctttacaacatctatcttcacggcttcctatttatcagccgcaaggtgtcactaccctctcaattgtcatttccatttatgttataatcagtttacggctaggtttggttggagtgaatagatacatttccatttgcacggtaactattagtctttctaaagccgttctttttacttggactaggtttagaaccatacatggcttccttttgatttaggagtagatcttgcatcttcttaaggttcctatgtcgtctcttatcttcctctttctgttgtcaggccagtttataatcgtccaaaattgacacccagaggtaccccatcatatagtaaatgtgtcatgtatccatctttataggtgtgatgttttttaaatgtagttaagcaatgtcaatttggtatttttaattaatgttatactaactgaataatgcaagttctggcataatttgaggtccagtgctgagactgaatctatctacattgcaactgaaattttgtcatgatttttcgtattccctcgcagcttgctgtatgtaactatcgtatttgatacatcttttttgctcaaagcttcattttttgcttttattatctgttattcaatgttggcttatagcttaaagctctccaacaaaccaaaatctattaatgcactagctttctcggctgcagtacttgtatctggttcagtatgagtcaatttacatatttcctctaactctgacctcttcttaaaaacaagttctttcattctgcttgcttttagtttggcaagcctgtccacttctgcaaaagcctgaaaaatgaatcttgttgaaaggagccccatcagaggaggatcgaagatgcatgcgctgctcgactagcctagcccggtctacccctgtttgatataagactaatgggttctggtcatgcatatgaagtatgttggagtcagaagttaaagctagttgctgttgttgattacctctccactagtcctggatactattataacttttggggaggtttgcgcaaatttgaaatttacccccactcgatctcactagtcctttctcttctctcgtcccgcaagtattcctccaatctccgtcgatcaccaccaccatgtcgtggctcctccgatccaccaagtctaagctcctctcttcctcttcctcttcttctctttctagaaccttcccctctctccctcgccctcagatcggagccatctctcccctccccgatcttttccaccgcaacaccgccaccatgcctttcgcgaaggaaaacgcttccggtggaaacttgaccggtcttcccaaagttcccgcgaataagcttggcagtgattctgatgcgaccaattcttcgaggtacaaagcttctggactgaacaccaatgtgctggctggagctagatatgtctctagagtttgggctgcacagggtcaaatgccattggaagtcaatactgtgatggctagaagttttgagagaagtatggaagctggcacattgggaatgattggtcataaacgttttatgagtgacatcccaagtaaaaccagtgagacaaacccatctggttttcgtccgttatctcctcatcttcctctttatcagccccaactttcttcgaccctctcaattttcaatagaattgctggagctttcctagctggtgtcattttggttttttatatgatctatatgaagttgggtttggttagcctcacctatgactctttctaccagttcatattttattcatcgaaactcaacctacttgtcatggagatttctgccttagccgtgtcctatcatctgtatagtgcaattcgtcatttattcttatgatttgaatcagcaactgacgcctgaactttacgtttgaacctgaggtggaactttgcataattcgaccttggaggcatacttccatatgtctgtcagtcataaggaacttcatttagaaatgtgattttgcttaattgtagttatgtattatcggcttaataattacaattgtggcacaacttaaggagtattttgcacctgacattcggtcatgcttttttgcagccctctcaaattgcatgcaagtaaatgttgcatttaataaatgcatttgagttttggtgactcttgacttgtgcgattcaagacattattcattgtttttcttttcggaagttatttaaaaatcattattgttctctccttataaagtaatattcttcctttttttataatatcaagggggggggcctttttagggggcccaattttcctt

SEQ ID NO: 90097 - DNA, 175 bp, Glycine max
  Clone ID: PAT_MRT3847_52369C.1
cccacgcgtccgcccacgcgtccgcttacacttgcgtttacgcttggacggactcagagtggatcacttcaactgctgctaatacccatccataattaataaatatacaaaacaattacctcacgattatacttcacatattcacatatctaaacccttatcgattctactatat

SEQ ID NO: 90098 - DNA, 680 bp, Glycine max
  unsure (1)..(680): unsure at all n locations
  Clone ID: PAT_MRT3847_5236C.1
ggtgttgtgttggatttgagttttcagttttcactgcagtggaaaacaaaatgactgaatctccaatttccacacgccattggcaacgagtcaattaaaaagtcaagctttcaatgggtttcaatttgcatcccaatccaaccaatgttgcaatttccattcttcctaatccgacctacccactgttgcttccccattcaataattcaattcctgcactgcaccaatggagcttttgaagcctttgcaccctcaccatgcacccattttgcgaattccctttcacgctgtcccctcttcatcttcttctcaatctcagtctcaggttcccctccctatgatttctaaggttcatgtcgctgttgggaaatcgctcgacaaagttgttcctctgcttcgatggactttaaaccactttcggaacgcggaaatcgtcattgttcatgcttatcaaccttctctcaccatccccactctattggggaaattgccagcatcacaggctagtcctgcagtggtgtctgcttttcgaaaagtcgaaagagaacaaatcatgaagctcttagacaagtatttgagcatttgccgcgcagctagggttaaggcagccattattgtaaccgaagctgaccaagtccagaaaggaatngttgattngntattaagcataatattgagaag

SEQ ID NO: 90099 - DNA, 324 bp, Glycine max
  Clone ID: PAT_MRT3847_52370C.1
cgacccacgcgtgcgcccacgcctcctgattttctattacatatatctacatttttcttctataatcaaaaacacgggtttgtcgtataaggatgtactgtccccactcactggtactgttcttaatatatcgactcagaaatgaaacattgcaaaacatgagactgaattaattggtaaaactacattgtaatatctcaaccacataatggatagactatcttcacatttcctctccaacttgaaatgattgaaccttgttccactgtcataatacagtataggatatatcatgaatttatacccttactataaatgactcat

SEQ ID NO: 90100 - DNA, 256 bp, Glycine max
  Clone ID: PAT_MRT3847_52371C.1
tacggctgcgagaagacgacagaagggatatatctaaatagattaatatattctttattttttgcatagtatccaaagcagttttatcattaagatgaaaggtggaaacctcatccattttttgtggagacaccaataaataaagcaagccaaaagagaaaaaaacaacacagcttgtgataataacagtttttaccatcacatgctatagtagatttataaatcaagcataccaatcatccactgaaagaaagcc

SEQ ID NO: 90101 - DNA, 608 bp, Glycine max
  Clone ID: PAT_MRT3847_52372C.1
atcaagtggaaatggttgttgttccgcaaccggatcatctttggagcagaattctctccttaaatcaggggttggagaggcttggaagagggtcctcataaacataatttctcctcttggtggtctgatttaagatcaattgttcagcacagtagtatgaccgctgtcaacaagcaatttctttggaaattgggtggtggggatcaaattttattttgggaagactcctgggtgggtgatggctctgttcttagagaaaaatacccagatttatatcaggtatcttctcaaaaattccagacagtggcaagcatggggatttttggagaaaatggctgggagtggaaattttcttggagaaggcacctctttgatagtgaattgggggaagcaacagcttttatagaccagacctcagctctaagtcctgttgcagacttgaaggatgattgggtgtggggagctcaaccaacgggaatcttctctacaaattctgcttacaactgtctcagatctgagcagcctctccatcagccaaacagtggctttagacagctttgggaaatcaaaatcccccctgcagctttatcctttgcatggagattact

SEQ ID NO: 90102 - DNA, 389 bp, Glycine max
  Clone ID: PAT_MRT3847_52373C.1
gggaccccgggccccaaaaaaaaaactttcatttattactaaaagggtcttggcatttttgaaattacaaaaaagtttttaaatagttttaaaaattacaaacaactttatgcgggggtaatgatccttacacatggccaatgccccttgcaaatgaaatgttattaatccccaagagccaaccttttaatccatttgaactttaaattaaaagggtttatgtggcccattcttgcttatggcccaataaaatgggcaaattttttgaaaccaaaaattgtgtcctttctgactttggggttgggggggtgtggatcatcccaacaagggaattggggaaggggccaataatcaacctttttgcctttttggttaaaagaccaaggggg

SEQ ID NO: 90103 - DNA, 320 bp, Glycine max
  Clone ID: PAT_MRT3847_52374C.1
ctttttcggtggtaaacgctctatgaggtatcggggcggtgataggactaccaagaaggtggaggaccccaccaacacgacagaattgccaatcaccatacatccgaatgaaaactcactatcttccagatgcacatggagcatcatacaaacgatgtcttccacccaatgttgggacggctaataggggaactgacataatgcgcacctttgctgtcctaagcagccatgcagatgacaaagaagcagatttacagattggacatcctgaaccagactaatactaccatgaccaacatcacactccctccgtgcaacat

SEQ ID NO: 90104 - DNA, 199 bp, Glycine max
  Clone ID: PAT_MRT3847_52375C.1
accacatggcaaggaaaatccacattccattcctaagccttggttaatttgagtggtagggagggttagcctaagggtggcaggtgtggttgctgggatgtccatggttgggggggccataagtgctgaacccatggcacaggctgaattcacgtgcggtctgtttgtcggcgccatgttttcgggcttaagtattttt

SEQ ID NO: 90105 - DNA, 307 bp, Glycine max
  Clone ID: PAT_MRT3847_52376C.1
cctattcatttttttatcaacaatgtttacaacgagctaaaaacatgttaagaagaggtaaagcacaacatagactgggcacttggcatacgcaataacgcactgagaggtttaaacactaaacgaggtactgaaagggaagatatttgttggcccgagccatgttagtccttgtgacgagattgcaaacttaataaacgcccgattcgttggggcgggcggttctcctagaacatccttctcttggggggggggtgaagggcaaaatcattccccacattttgaatggacatggcccgatttctca

SEQ ID NO: 90106 - DNA, 241 bp, Glycine max
  Clone ID: PAT_MRT3847_52377C.1
ttctcctcctccttcttcctcctctaacaatcactcttttcaccgttttcctccaaatccaaaccacctcttctctctcctcttccctccaaacccctctcatattgcctcttaaaacacaaacactcccatatggcttagtttcacttccaacaccatcgtccactcgtaaggtctcattctaccacaacgtaaccttaaccgtttcactaaccgtaggcacgcccccacagagcgttac

SEQ ID NO: 90107 - DNA, 220 bp, Glycine max
  Clone ID: PAT_MRT3847_52378C.1
cgaaaaaggccgaccacttccaaaaccaggtgaatgggatgtcaatgatccaacctcaactaaagagtacacagagataatgaataacgcccctgatgataaaaatacaggaggctacccacatacaccacgaaagactgccgctcatcctcataggatacctgctgtagagcctggcaacactcctactccgaaatggttgagctgcatgcacaaaccc

SEQ ID NO: 90108 - DNA, 274 bp, Glycine max
  Clone ID: PAT_MRT3847_52379C.1
aatattttctcttccctctttctttctctcaaatagaaggtgcttagtagtatggaagacctggattcggtgttcgttaccacgagggagaacacgagttaaggcagaaacttatgaatgccagacatgaacttgagaaatgaaaaatgtcaaggcagaattgcttgatctgttgaacatggcataccaagagagggatgaagcaaggtgtcagttacagaagctgatgaatccattcatgccctctaatccaacccatttgcaaaacgtgttt

SEQ ID NO: 90109 - DNA, 231 bp, Glycine max
  Clone ID: PAT_MRT3847_5237C.1
agtcaggccatgaatgagaatagagatattgcaaagacccttcttctgtactcaaggtggacgcattacactgggcagaaacaaaaggaagatgtaataagtctttatactagggtgagggaactgcaacccaaatgggagaaagggttcttttatattgctaagtattgtgatgaagtgcttggtgatgccaggaaacgccaggaggaactgcttggtgatgccaggaaa

SEQ ID NO: 90110 - DNA, 374 bp, Glycine max
  Clone ID: PAT_MRT3847_52380C.1
gactcaaaaaatcacgggaaaaggagggacactttttaaaaattccctgattacacaccaattaaaagtctttaaaatattcaaaatcccgaaccaagaacaatgacatttccaatatacgggccttaactaaaaatacaaaaggcaaagcctcaaaaaatcaaaacctacaccccaaaaggatcgaccttgtttaaaggaaatacctctctcaaaaaaaaatttgacaaaggaatgtctaaaatgctcataacaaaaatgagctttatatcctattaaaaaacaccaagcttttgtgaggccaaactacggccattaacaagattcaagtaattgacactaaagggtacacgagacctatacagaactccatt

SEQ ID NO: 90111 - DNA, 372 bp, Glycine max
  Clone ID: PAT_MRT3847_52381C.1
atagaaaaatgtgaccttgccattgcaaagtggatgattgatgcttctgtgccatttaatgcaattaattcagcatattatcaacctatgattgatgctattagtagcatgggtccaagttataaaggtccaaattttcatagagttcgtggttgtttattaaataaatgggttgatgatgtgaggaagcttgtggatggttatcgaattgtttggaagcaaactggatgcactcttatggctgatgggtggaatgatggttgtaggagaactttcattaattttctagtttattgtcctaaaggaactgttttcttagctgtgatgtatgtttctcatgctcctcaatctgctgaaatgttgcataagctt

SEQ ID NO: 90112 - DNA, 1095 bp, Glycine max
  unsure (1)..(1095): unsure at all n locations
  Clone ID: PAT_MRT3847_52382C.1
cccacgcgtccgcttttagagaagaggaaaaagcagaaaaagaaggcaaagaagattgaaagttcctatgatgatgaagatagcaaggaagctaggttgactaggattgttgagaaatgtcacaatcagttgacagcttttggtgaagaacaagaaatttcaccttggggagtaaaagtttttggagataagaaagccttcccctctctagagtctcctgatgttggaagttgtaacctttttcagtcctttttgaacaactgtctaaattcagtggttgaattgactgcggacaaaggagatatttttcttgaagggttactagtcaatggttggctttcaaaattagcttttctgtgtggtcatgtagaaaagccagtagccgtttgggccttcaacacaatgttatattcatcaaaagaagagctccacaattcttccagcgaattttggtgtgcaattctctcttctgaaaaggaggttgatcaagcactggtcaaaattgattggtttcctgaatatatggatttaagaagagctcttgacagttatgggtttctctttagattttcatccagtgccgagcctaataatttagattctgacattgaaggacctcctcaaaacattagagcttggatcagatttgtctctgcttgttgtctgataaggagtaaaaaggctatcttctccactgtagaagctgaagagatagttgaaattattatttgtctattcctagatcgccaatttcagggtttgttggtgcttttgaatgactgcatggaagcgattgtcaattactttacagaccaggaatggtgctcaagttgtgagaacatagcaaaattcattgcttgcagagtctcaaaggatttgaattgcattcagactattgaatgtatttcagaagctaactctcgttgcaaacaacttaggagtgctgttgcttatcaaacactgctttcttgttttgatggagtatacagtttgcccttgatttatcaagtttgtgcacgcttgtgcatataaaatatatagtgaaggtcctggtcatatgatggaaangtggcatatgagcaaaaagttatgcat

SEQ ID NO: 90113 - DNA, 514 bp, Glycine max
  Clone ID: PAT_MRT3847_52383C.1
ttctaataagattgcacaatcatttggaatgcaagcaccccttgatcctggtccctcctcgcacagctcaatgtgttacagccattcactttcaaatggcaattcctctacttctaagccttatgaggctgtgaagttggagctcccttcactccaatatccagaactcgatttaggtagctggggttcatcccccccaccttctttgctcgagtcagttgatgatttccttcagtctcctacaccaatcagtacactggagtcagattgttcttctccacaaaatagtggcctgctggatgctttactttatcaggcaaagactatgagcagttcaaagaaccattgttctgacaagagttcaaattcttctactgcaacccctggtgacagagctgacagctctgctttgaatgtgtacgagacagaatgggaagattatgctgatcctgtatctccctttggtgcaacttcaatattgaatgagtgcactggtcttagagccaatatgaat

SEQ ID NO: 90114 - DNA, 429 bp, Glycine max
  Clone ID: PAT_MRT3847_52384C.1
ccacacaacactacagatggataaccttcctacaactagcaccacattcacctgagtcgtacaaagcaatggcttcccttgcaccatacactgctactgctaccctcgtcatatcaaaaatgcttgcaaaccccatcaacttcataactgccacaaccccagcctcaatatgcctctagaaatgcctccttcaaaactgtggctcttttctccaaaaagaaggctacaccaacaccttcaaaaaaagctgttgctgctgctcctgccaatgataaacttaccaagatgtatggacctaacataaggatcttcttacctgagtatctatctgacctatccgaaatcccataattctcgaccaaacaaatccatggagactatctatataacccattccatcttaccacgaacacataagactttcccaaa

SEQ ID NO: 90115 - DNA, 416 bp, Glycine max
  Clone ID: PAT_MRT3847_52385C.1
attccgctcgagcttaataacatcaagtatttttttctatttaaggctgttttagtgttctatgctgaaaataactaccaaaaccaggatccctcgagtgaatgggtctaactctatttaaatttcgttctagattcctcgtcgaacttagtctaaacaagttgcattaagaatacaacatgatataaactaaatccctgcactctgtgtccagacatacagttctctagcctgctctatccagttctaaggatttaaaacactttccaatgccataaattctaactttacacataaatgagtgatcaagccacaaacatgcaagaattaagtgcagatagaagcaataaacacataaaaacaactttaaatagatagtaaaagattttacatcaaagtttagcagaaaccctcaa

SEQ ID NO: 90116 - DNA, 607 bp, Glycine max
  unsure (1)..(607): unsure at all n locations
  Clone ID: PAT_MRT3847_52386C.1
ccacgccgtccgcaaaaccaacatatattgtacactacaatgtcacctattgtcctcctcacttttcttgtgcttcttctgtgcttcccattttcttgttactcttgcaatgaaacatgcggggacctccatgttccctttccattctatgtcaacacttcatgtgagtcaatttccagtgccttccatctctcgtgctcaaattcctctgcccttttactcagaattgggtcagtgagctacacagtgttggaattcttcccagatggtgtgctggttgactttccaggctcatcatcctgtagactgtacaatgacttgaactcttttggcagaaactttgcagggaataataaggacatgtttggagtgtcggttgacaatgttattgngctctatgactgtgaggattcttctctgtgcaaagcagattgtgaaaccattgacatgcctggatgtgatggaaagggtggaggctcccttgcctgctgctatccactctctgaccataccatatggcatgctggagatggcttttcggtgttttctcagtttggatgcagaggggtttctaattgggctgttctgcgaggctcaacttggggaa

SEQ ID NO: 90117 - DNA, 1406 bp, Glycine max
  Clone ID: PAT_MRT3847_52387C.1
aaaaactgcaactgctatatcagatatacataacttattttctcacgatcaaataactactataactaaaaactgtattgttttggtttggtttttgttaaatagaagtcaaaaaagtgattatcatgctcgttttttcctaactattaactgggtccgttttcaattttttattaatgaattgggaacatttgcgaccatctgggaagggaatagttatcaaagtgtcgaccaaggaagagaagaagaataaatggcaaaggaggcgaaaaggtgtggaagaatagtcaaaggaagcaaagatgggtaatgtgctaatgagtacatctgtggttgtgttctcactaaaaggtgcccgttttgagtaagtcttgatcgtcttcttgtttgagaggaattttggggtcagtaagccgttatgttctgtggagtttttggtgggcatagtccaatggaaaactttgtatatataagggtatggaaaatagtgacagcctttttgctctgcaattggcaggaaaatctggctacaacatcacttgacctggattttaagatggaagcagacaaaaatatccatggatttgacatatggaaacaatcttacataaagacttgtgctgccgttgatcaggatttgaaacagcacactgggattgattccttcctaagtggctctacagcattgacaattatcaaacagggtgaatatcttactatagcaaacataggtgattgtagggctgtcttggcaactacttcagatgatggcatattaactccacatcagcttaccactgacttcaagccaaatttacctcaggaggcagaacgcataacacaatccagagggagggtattttgtatggaagatgaaccaggagtgtacagggtctggatgccaaatggtaaaacaccaggactagcaatatctagagcttttggagaccactgcatgaaggactttggactaatctccgtgcctgatgtcacacacagaaaaattaccaccagggatcaatttgtcatcttggcaacagatggggtatgggatgttatatccaaccaggaagcagtgaagattgtttcagcaacgtcacataaagaaaaagctgctcaaaggcttgtgaaatgtgccatacatgaatggaaacggaaaaaaagtggcattgcgatggatgatatgtcagctatttgcctcttctttcactcttccccctctcatcaactccccccagccatcaaaattgttgattaagaatgttgggtggttaaacagttcattacagcttccttgtaagttgtaacacagaaatacatatagacttgtatataaacttatcaattaaaatgacatttgtggttaagtgtataagactgtaaaatctatcttcgttacgatagag

SEQ ID NO: 90118 - DNA, 326 bp, Glycine max
  Clone ID: PAT_MRT3847_52388C.1
ctagcaccatttccaaacaatacccatcaatgtctttatccctcatcgatcatatattcattgatctgtatacaaaatcctcagaaactactactctctgccatgaccatggaatacataaccttataactcatcatcatatacgcaaaggacatcaacaatggtaatcttttatccaaaatggacgtatactccgacgttttgctctgcatgaaccctcttcacactcatgactccaccactcacatccacaaagactccagctgcaaccctacgtagcactaccccgtgaaactatccttcaacgaatcgctatctatggaaaa

SEQ ID NO: 90119 - DNA, 247 bp, Glycine max
  Clone ID: PAT_MRT3847_52389C.1
agataaactgaggtgtatgctcaaccttgaccatttagaacaagtttcagcagcactatccaataactttaacttgaatgagagtagtatttatgggtgtgtaagtttgtgctagcatggttactcaactcaagatatagatatattgttttatagttgatggttcagaagaaaactataagtattttgcaatgggcaatgtcattgtcatgcagattgcactaagatggatatatgagcaaggggc

SEQ ID NO: 90120 - DNA, 283 bp, Glycine max
  unsure (1)..(283): unsure at all n locations
  Clone ID: PAT_MRT3847_5238C.1
gnagaacggagngcacgcanatacttctcagctgngagtgagaatttggagagtannnnnngacgcagctgantgnggacatgtcagtgcaannttacctggataagcanatgcnntcccgaaaacncgaagatgccgtacnatgcngcngttagggccnaaacctccgatcccgnncgttcattctcgaatacacatgcganacgcantgcaattcggtgataaaacaatcaaggcgaggcagatcctagttagcagnggaatccancgtcgaatcgattgc

SEQ ID NO: 90121 - DNA, 352 bp, Glycine max
  Clone ID: PAT_MRT3847_52390C.1
aatctgatgtcgagcttaatgtcaaaattttttttcttgccactgcacaaggtctcaccgcgggtggtctctgtataaacccaagcctcctcacgagaattaccagacatttgcgctcaaaatagaggtttctgacaccctcttgcctttaactataccaggcagtgactattaggccaatggtgtgcccctcttctgcctctaccatggttgaaaccaaaaacggagagtggtttcttggtttggccagcccaacttaccttaatagcacactttctggtgacaatagatttgaccctctgggactatctgaggacccatagaacttcaagtggtacgttcaagccgacct

SEQ ID NO: 90122 - DNA, 246 bp, Glycine max
  Clone ID: PAT_MRT3847_52391C.1
gcacatcccactctcatacagtggacctacaacccggtcttggcgatcctcacttggttcatactgttcataccgcagcagatgcagccatggtgcttggcttcgatgctattgtgggcgataaccatctgatcacactgacggctatctgcctacgtttaagaccagtacttcttgctagaagcctagcagagcccgctctcagtgtgtaaacattgcctggccctataacaaaccgatggctga

SEQ ID NO: 90123 - DNA, 2673 bp, Glycine max
  unsure (1)..(2673): unsure at all n locations
  Clone ID: PAT_MRT3847_52392C.1
agggtttgtnaccccanaanccnncnccancnnnnggctcgagccaatcttctccaccactccacacaaccttaaatccaaacccaaaccaaacgaaaaacacacacacacacaccccaagagaaggaacagaaaaaatgggttgccgttagtatctatgagtttcgatgttatgtatgtgtgagtgcgatagcaagttagaaactactacaacaactcatgtttttcttttttacttcttttgatatgttttttttcccttcctagcctattaattcgatctgttcctgattccgaggcaacccaattcacagttgcaagttaaattattaatcatctagatttggggtatgcttatttcattttttagatatctggaattgttaagctgaaagcttggacaaaagaattttccctctgccacgttcatctcccatttggtggttccttccaaaaattgagggcattctagtaaaactctaacacaacacacacaccaaatctgagagctggatttatgtctctgtttacttctcattggctgcacctcttcacaaactagatggaatgttattttataatccttctccatcttttctcttgagccttccttccatcttctccaccacttcacacaaccttaaatccacaacccaaaccaaaagaaacacacacacacagaaacaccaagagaaggattccgagaagttggtgtgatctgatgcgagtgttaagaagataatctgagaagaaaaaagaaagaaaaaaaagtttcattttttttttcaatggagtcagatcttcagcagcaccctcccatgtttttggatcaccaccagcagcagatgaattcagggttgacacgttaccgatcggcgccaagttcgtatttttcgagcatcattgaccatgagttctacgagcacgttttcaatcgaccctctagccccgaaacagagcgaatgttgacacgctttgtgaatagtcttggtgggggtgatgctgatgcagaggattcacttgctactactcagaatcccccaactgttgttgcggttaaggaagaggttaatcagcaacctccggatgttacatccatgaataatgaaccacttgttctccaacaacaacagcagcagcagcaacaacaacaacaaagtaataatatgtataattatggctcttctggtactcagaatttttaccaaagcactggacgaccacctttgccaaaccagatgaagactggtcatggaagtagttctaatcttatcagacatggtagctcacctgctggattgttttcaaacattaacattgatattactggctatgctgctgttgtaaggggcatgggaactatgggagctgctgctaataacaccagcgaggaagcaaacttttcaccagcaacaaggatgaagaataatgcaccaaacttctcttcaggactaatgtcatcaagggctgaagttggaaacaagagcaatacacagaacaataatgcagaaaatgaagggtttgctgaaagccagggcaatgagtttatccctgcaggtttccccgttggtccgtggaatgattctgcaatcatgtctgacaacgtgacaggtctgaagagatttagagatgaagatgtgaaaccattttctggtggtttaaatgcacctgaaagtcagaatgaaactggaggccaacaaccttcttcttctgctttggctcatcaattgagtttgccaaatacttctgcagaaattgcaaaacacttctgcagaaatggcagccattgagaagtttcttcagctctcggattctgttccttgcaaaattcgtgccaagcggggctgtgccactcaccctagaagcattgcagagagggttagaagaactaaaattagtgagcgaatgaggaagctacaagatctggtccccaacatggataagcaaacaaacacagcagacatgttggacttggctgttgagtacattaaagaccttcaaaaccaagttgaggcactttcggacaatcgggcaaagtgtacgtgtttacacaagaagcagcaataacggaaaaggaggagggtacccgcgtcattccctgtacagcttagtaataatttggtctagaaactagcgcacctttccgataattatctagctacatcacttcttctgcgcttgtttgggagtgtggtggcaaaagttgagtttatatatgatcgatcaatatttgatgcccacatattcaaggcatggtgtacaaaattttctgatatgtaagtctatttgcctttactcttaggggcccccatttacggggatgatggaggatggggtgagttggaaaattgaaattttcatttttgcatcttcaaggttcagccataacgttaaaaaaaagagagagagagagagagaatgttatgtatgggtttggtttcacattcaaggacatgggaaacatggggggaccgaagccaacatagttttgttggttatatatatacttggatgcctattgagtagtgtgtgtttgtacttttattttttttcttttttttttatttttgttatgattttaatgcgaagtagttgtcattaaaagtatgacacatttgaatacatatgagtatttttttttataaaattttttttatattcaaagagtcattt

SEQ ID NO: 90124 - DNA, 1068 bp, Glycine max
  Clone ID: PAT_MRT3847_52393C.1
aacttctcttcaggactaatgtcatcaagggctgaagttggaaacaagagcaatacacagaacaataatgcagaaggcgaagggtttgctgaaagccagggcaatgagtttatccctgcaggtttccccgttggtccgtggaatgattctgcaatcatgtctgacaacgtgacaggtctgaagagatttagagatgaagatgtgaaaccattttctggtggtttaaatgcacctgaaagtcagaatgaaactggaggccaacaaccttcttcttctgctttggctcatcaattgagtttgccaaatacttctgcagaaatggcagccattgagaagtttctgcagctctcagattctgttccttgcaaaattcgtgccaaacggggctgtgccactcacccaagaagcattgcagagagggttagaagaactaaaattagtgagcgaatgaggaagctacaagatctcgttcccaacatggataagcaaacaaacacagctgacatgttggacttggctgttgagtacattaaagaccttcaaaaccaagttcagactctttcggacaatcgggcaaagtgtacgtgttcacacaagaagcagcaataacgcaaaaggaggaggatacccgcgtcattacgtgtacagcttagtaataatttggtctagaaactagtgcacctttccgataattatgtagccacatcttcagcggttgtttgggagtggttgtgggaaaatcagcttataaaagttgactttatatatcatcaaaatcaaaatttgatgccacatattcaaagcatggtgtacaaaattttctgatatattacaagtctatttgcctttaatctttaggggcccccattttcggggatggaggatggggtgaggtggaaaatggaaattttcatttttgcttcttcaatgttccccaataacgttttaaaaaaggatgttatgtatgggttattgggtttggtttcccattcaatgacatgggaaacatggggggccgaatttgttggttatatatacccttgtatgagtagtgtgttttcctttttt

SEQ ID NO: 90125 - DNA, 909 bp, Glycine max
  unsure (1)..(909): unsure at all n locations
  Clone ID: PAT_MRT3847_52394C.1
ccctttgccacgttcatctcccatttggtggttccttccaaaaattgagggcattctagtaaaactctaacacaacacacacaccaaatctgagagctggatttatgtctctgtttacttctcattggctgcacctcttcacaaactagatggaatgttattttataatccttctccatcttttctcttgagccttccttcccacaccaatcttctccaccacttcacacaaccttaaatccaacccaaaaccaaaagaaacacacacactcagaaacaccaagagaagaattttatttttttcaggattccgagaagttggtgtgatctgatgctagtgtttcgaagataatctgagaagaacaaaaagagaaaaaagtttgattgttttctttttccaatggagtcagatcttcggcagcaccctcccatgtttttggatcaccaccaccaccagcagcagatgaattctgggttgacacggtaccgatcggcgccaagttcgtatttttcgagcatcattgaccgtgagttctacgaacacgttttcaatcgaccctctagccccgaaacagagcgaatgttgacacgctttgtggatagtcttggtggaggtgatgctgctgatgctgatgcagaggactcacttgctaatactcagaatcccccaacaactgttgnttgcggttaagggaagaggttaatcatcaacctcaggatgtgacatccatgaataatgaaccacttgttctccaacaacaacagcagcaacaaagtaataatatgaataattatggctcttctggtactcagaatttttaccaaagcactggacgaccacctttgccaaccagatgaaactggtcggggaagtagtttcagtcttataagacatgggagctcacctgc

SEQ ID NO: 90126 - DNA, 491 bp, Glycine max
  Clone ID: PAT_MRT3847_52395C.1
gaggttttgatgcaacgctgtcactgagaaaggatctctatctacgaaggagcggaataaaacccttctctctgtgattaagagaatggcttcagatcggaaactccacctcagcaagctcagtacaatcctgataagactccagaatttgtgatcaagattttgcagttcctggtccctctcctgatcttgggcttggcctttgttgtgcgacactacaccaagaaagagtagagttgttccttctttatcacattggacaatggtgaagggtctgttagctattttatagtgtcatttaaaggacagtgtttagtttctttctggggtctgagaattgaatctggatttagaccatatagttcagtaagccaatgttttccaactttctttggcaatggtattagtgttattgtgaccggagaacctaatgttggacgattagttttgtttggtttcgttttattctgggtctttgctgcttctttaat

SEQ ID NO: 90127 - DNA, 197 bp, Glycine max
  Clone ID: PAT_MRT3847_52396C.1
aaaatacaagaaattgagtaagtctggcattaccgagcagaagatatgtgcatagccattgaacaaaacggagcttcccaacaacattttaaagcccagcaaaaaacaaatccaggcccaaaaaaaacccagcccctcaaactcagaaaccggagagggctcttccctgcctcttgagcgcgtaaacaacctccatg

SEQ ID NO: 90128 - DNA, 694 bp, Glycine max
  unsure (1)..(694): unsure at all n locations
  Clone ID: PAT_MRT3847_52397C.1
ggaccttcagtattcatcatcaaccagcagctcagcaagtgatcattgacttgaaaggatcttaatttattttattttttttaataatttgtgcctgcaaactgatttctataataatgacattaaagccactgtggcatgacagcatatcagttgatantagtaagagtctacgtgtgcgcgtgcccccgcattataaaagcgagatgtttgaaacagaggatgaaccactgataaattaacaccgataatttcattatcaggacacgtatccagtaattttatgaagggtggaaagaagaataagaaagcagaagccacctaagcttaagacagaaatcccaacaaatcctattttcagaggcctgtaaagagaggttaggttctgccatttgttttgacttttgaaggattttccataggcaatcgatagtagtaaaagggaacttgtgcaggctattgctgcttctacttgatacttgtaactgcatatttttgggttgtgtgtgggaagcatctcgagtggaatgtagttcatgtagacctcctcaaaggagtgaaatctcattttaggatattacatcttaacagataagaattttaagctctataccactttttagtgaactggtgtatttcatggccaagggtcaaacttaattttgttattctaagatctatttaagagactgaa

SEQ ID NO: 90129 - DNA, 2131 bp, Glycine max
  Clone ID: PAT_MRT3847_52398C.1
ttgcttatcttcaatgtcttatgcaatattatagtgctaccggtctattgcaccacgcgtccgggcaaaccaaaaggggaaggaaagcagtgaccacggagagagagagagaggttttgacgcaacacactttcactgaggattttttcctattctgttgctacggatgatagttgacgtacgaatagtaccacagagagagaggttttgatgcaacgctgtcactgagaaaggatctctatctacgaaggagcggaataaaacccttctctctgtgattaagagaatggcttcagatcggaaacttcacacttttgaggaggtggcaaagcacaaccagaccaaggattgctggctcatcatttctggcaaggtgtatgatgtcacccctttcatggaggatcatcccggaggtgatgaggttttgttatctgcaacagggaaagatgcaaccaatgactttgaagatgtggggcacagtgattctgctagagatatgatggaaaaatactacattggtgagattgatgcatcaaccgtcccactaaaacggacctacattccacctcagcaagctcagtacaatcctgataagactccagaatttgtgatcaagattttgcagttcctggtccctctcctgatcttgggcttggcctttgttgtgcgacactacaccaagaaagagtagagttgttccttctttatcacattggacaatggtgaagggtctgttagctattttatagtgtcatttaaaggacagtgtttagtttctttctggggtctgagaattgaatctggatttagaccatatagttcagtaagccaatgttttccaactttctttggcaatggtattagtgttattgtgaccggagaacctaatgttggacgattagttttgtttgggtttcgtttaattgtactacgaccctttttaatgagaaattcttttgtttcatctttctcaattgatgctaccaacttctcaactgatttcctttcccgcacagggcgatcaatagtaggagtccttggctctgttttcttcagttcctttcttttttctttcactttctccccattgatattccctctcccacgtttttttgatcttttctcacccttactatcttctgccttctcttcttcttttgacttatcaatattatccttaccctcatcttcatcctcctcctccatcgccacatcttttttctcctttttatcactctcctccttctgctgaatgccactctctacttccatagcatctacttctggtttctcagcttccactttttcattttcttgtttaccttcaattgtttccttaacctcagtgtcttcatccattttatcattctcaaatatatgatcatctttcttatcctcttctatttctttcaactcatcacctttttcttgatgaaacttttttcacaacatctacttccttatcctccttactggacttgtctttttctgcatgtaacacatttttggccgcttgaacggcaactaaaaagtcaatctgcacagccataatatcttctttccccgtatttgcttccttaatcgtttttacttgcacaccacaaacttctatctaatcctctttttcttctttgacaacattaacttttactttactcatctactttttccacactatcagctttcttatcttcaatttcttttacaatattctctttgattccattgttctccaagacttttcctccatcagtttccaagtcctttttctcagtaatttcatccaaagttttctcctgcaagctctttccatttgaatcagtcttagaaacttcattcgctggttcttcctcacccatactgatcttatttacagtaattatacaaacttactatttcttaagcacgcaatgccctacactgttaaatagcacaactgaagcctacagattcagaggttgcaagagaagaacataacatcaacacagagcttcttcactcacacactccacgtctttctctctctgccactgacagtaactatgttccccttctgttgtcttctcgctgcggacgcgtggggttcagtcacactatgcacgtcattctatctcggccactgtcagtccct

SEQ ID NO: 90130 - DNA, 167 bp, Glycine max
  unsure (1)..(167): unsure at all n locations
  Clone ID: PAT_MRT3847_52399C.1
ttgtcttataanaatgatgagtgagattgagagtntagtttcnggaggctnattttgatttccctatgtncnaatacaagnggnttgcnatggttccnnncngcaaccncngggcnattttaacttttgnggaaaaactttgtttgtggcgtgacgancccatgngg

SEQ ID NO: 90131 - DNA, 313 bp, Glycine max
  Clone ID: PAT_MRT3847_5239C.1
aatttactagcctactgttggaatatgctttcaacttttgaagttcacgtgacttattttattgtatttattgccacatacagttcttgtcaatgaaattaacggctgtaaacccaaggcttgacttcaaccttgacgaactatttaccaaagaggtaaggtcattgctgataacacaattttttcacttttttcttctattactccgattaaataatggttgtggtttcctagtgtcctttgatattatgagaaattacggataaatgctgccagtataattataattaaaaaaaaaaagccttgatgttac

SEQ ID NO: 90132 - DNA, 247 bp, Glycine max
  Clone ID: PAT_MRT3847_523C.1
ccaaaactaatttggggggaacctcctaaggatgggcactgggtctaccttgggaccaaaatcctaagggcttggcttccactggtgaaaaaatgggtgggcccaaacattgagggttttatcccttttttggggggaatcaaaaatattccccttccctgatggcccttaaagaaaaaaatcttttttaaggtggacaaaatattggtgagggaagggttcaatgggtttattaagaggatttctt

SEQ ID NO: 90133 - DNA, 402 bp, Glycine max
  Clone ID: PAT_MRT3847_52400C.1
ttttccatactatcagcttgcttatcttcaatttcttttacaatattttctttcaactctttgattccattgttctccaagacttttcctccatcagtttccaagtcctttttctcagtaatttcatccaaagtattctcctgcaagctcttctcatctgagtcaatcttagaaacttcattcgctggttcttcctcacccatactgatcttatttacagtaaatatacaaaattactatttcttaagcacactctgttaaattgcacaactgaagcctacagattcagaggttgcaagagaagaacattagaacagaacagagagcttcactcacactctgcacgtctttctctctctgccactgtcagtaactctctgtctggacgcgtgggtcggcccg

SEQ ID NO: 90134 - DNA, 472 bp, Glycine max
  Clone ID: PAT_MRT3847_52401C.1
ctatgatttttttttttttttttttcttttttaagttttttttaatcttgaatttctcattgggggcattctggggtttgtcattatgggtgactcctttctattctatctgatgaaaactctttttaagctcgaagaggaaaccaacacgccgtctttagggggggggaaaacccaaaaggccacaactataaggggggggggcctactcgggggggagggggggcaaaaggggaggattcgtgcttgaaaaaaaaaaaaaaaccccaacggtagaagaagttggtaaaaaaaaccccccccggggggaaaaaaataccccccttcggggggggggaaaacaggtccaacggggggggggggggtcaccattgacccgggggggtacataaaaagggggcggacccactcaaaaaggggcccccccaaagggggggggcggattcccggggggggagtttcttcgccaaga

SEQ ID NO: 90135 - DNA, 1402 bp, Glycine max
  Clone ID: PAT_MRT3847_52402C.1
ttattgctgcgagaagacgacaggaagggagtgaccacggagagagagagagaggttttgacgcaacacactttcactgagaaaggatctctatctaccaaggagcagaataaaacccttctctctggtaagtgaataagagaatggcttcagatcggaaacttcacactttcgaggaggtggcaaagcacgaccagaccaaggattgctggctcatcatttctggcaaggtgtatgatgtcacccctttcatggaggatcatcccggaggtgatgaggttttgttatctgcaacagggaaagatgcaaccaatgattttgaagatgttggacacagtgattctgctagagatatgatggaaaaatactacattggtgagattgattcatcaactgtaccactaaaacgtacctacattccacctcagcaagctcagtacaatcctgacaagactccagaatttgtgatcaagattttgcagttcctggtccctctcctgatcttgggcttggcctttgttgtgcgacactacaccaagaaagagtagagttgttccttctttatcacattggacaatggtgaagggtctgttagacattttatacagtgtcatttgaaggacagtgtttagtttatttctggggtctttagaattgaatctggatttagaccatatagttcagtaagccaatgttttccaactttctttggcaatggtattagtgttattgtgaccggagaacctaatgttggacgatgttcccttactgggcttctctttttctgcaagtaacacagttgtggttgcatgaggggcaactaaaaaatctataagcttagcaataatatcttccttcctcgatgttgccttgttaattgttatgtcaagcacatcacagaattccagtaacttctctttattacacttgtcaagtttttcttttactttaatcatttgcttttcctcattgtcacgccacacgaaaccagaaaaccttaatatattactcttgatctcaactgccttccctctccttccaaagagaattgtatggagcaatttgaaggtatcatcagtcttccttctagataacttaaatgccacatttggtatattttttaaaggtgtaccacgacccttttcaatgtgaaattctttggttgcatctttatcaattgatgctaccaacctctccactgacttcctttcccgcacagggcgatcaatagtaggagtccttggctctgttttctttggttcctttcttttttctttcactttctccccatcgattttccctctcccacgttttttttctttgtggatgatgttttagaatgttttttcttttcttttatatcttcagattcactcccagaatcacttttgtcttcactttc

SEQ ID NO: 90136 - DNA, 275 bp, Glycine max
  unsure (1)..(275): unsure at all n locations
  Clone ID: PAT_MRT3847_52403C.1
cacgacaacgacgactccgctanggttttggncnaccgcgttgtcgacaaacancgcggttcgaanttcctcgtgcaanaacttnaacggntngaacgatttcgantccggagaggangncggcggtntaangnttccttggcccacgtgggagatcatgttcgagtgaanccgcngtggccggancttggtttgcccagaagacgaattgctgaatnggntctcgggagataaaatgaggnagttgacatataagcatatgcttccgagatttt

SEQ ID NO: 90137 - DNA, 624 bp, Glycine max
  unsure (1)..(624): unsure at all n locations
  Clone ID: PAT_MRT3847_52404C.1
aattggacttgttaaagcaccaaccgatgcttctattggcactacgagtgaataatatcgacacggttgtgttgcctttcggaacggatgggaagaagcggcccaactcgctgatcagcacaatgaaaaaaatgctaacggtcggaattggctcaatcggccgattgactggcatcggccaacagaagcggagcatcgacgcatcgggcattctcttttggcacgagagggcagcgcgggtgccgatgagcacggggcagcagctgcacattcagcagaagtcgttcgcatttggcacaataaaagcgaaggcgcaaagacttggcctttcccaaattggccttcagttgcacccttcggcaacatttggtcgcattcagaagatgaaagcttgggcctcacccgtccattctttgggcgtcaaacacattggcgccatcgaggcgaacttgccattgtacgcacaactgaacacactatcccagcagaagcaagtcacactgaatgtgcaagtgccgaaaacaccgacgcgtctcttctctttgcacactntgccaatgactttcgttggcacagagaatgttcaaaatgctcgttctcagcagcggtcagcttttcttcatt

SEQ ID NO: 90138 - DNA, 198 bp, Glycine max
  Clone ID: PAT_MRT3847_52405C.1
ggctcgagagctgatctgaaaggaatggcgtccatttcgcaggttctgtagtgttcttatcctatgcccggtatgcatctttgcagcccagaaagagccatcacctaccacaaccttggacttggagcatcattaaacaacaccatgtttgctttcttccatctaagaaggaggggcggttaatatgagacaacttat

SEQ ID NO: 90139 - DNA, 280 bp, Glycine max
  unsure (1)..(280): unsure at all n locations
  Clone ID: PAT_MRT3847_52406C.1
gtggtgtacaccgtcatgtcccggttcccctgcgactccctttaccgcatcaatatttttctctttggaaacacaccaaccatatcttctcttctctttgcattcattttctttcaccctcacaattttnatttttttatccaancacaaaattntganaatataagantttcaattgaagtatttgaaattcttattaaattctctcatccaaacacactcttaaggtaattattacaaaagtnaactatcttaccttgaaatttaatatagaataaat

SEQ ID NO: 90140 - DNA, 379 bp, Glycine max
  Clone ID: PAT_MRT3847_52407C.1
aattaagccggtgctcctgaaggatccaagagccttgattggcaaacctttaaaaatggattgatgggagattgcgacccccggaacttccacaaacgggcccacccaataaattccatggtccgcccaagctttgtttgttgttaaaaacaacagcgggcccaaacctcttggaagggtaaaggccggtccacgggccgggatttgtacccacccgacccttgaaaccggcaaccccatggggaggtggggctacaccaggaccttaagagtccttagcgtccctctaaggatcggggccggaaaaaccggggtaaacaagaacaaaggtcccattgttctcaacacccaaagcggtccctttgttgtagccatcgct

SEQ ID NO: 90141 - DNA, 572 bp, Glycine max
  Clone ID: PAT_MRT3847_52408C.1
aaaaaaaaggggcaaaaggggggccaaacaaacccccccccctttggttttttcctttttaaaagctttttttttttttaccccaaggggggcccaaacccccccccccctaaaaaaaaaaaccccaaacccccaaattttaacgggttcccccccccaaggggggccgggaaaaaaagggcccccccccccccccccccaaggcctttccttttttaaaaaaaaaaaccccgggttaatagttttgtttaagaaaaaaaaaaaacccttttccccccccctcaaaaaaaaaaggggtttgggcaatccccaaacccaattttccaggggtcccctggccctttggcccaaaaaagggcctttttcacccttgggacccccccggccgggaccacggtttttaaaaaggggtccccctaaaaatggggggccccaaagggccggaaaattccgggccttaaaaaacaaaacaaaaattttgtttaccaagttggacccaaaaaagaaaaaccttcccaattgggcccggggcggggggaaacttgtgggggagggggaaaaaaaatgggccc

SEQ ID NO: 90142 - DNA, 321 bp, Glycine max
  Clone ID: PAT_MRT3847_52409C.1
aagccttattacataacgatctttattatatactttagactgtttgacataactttggctacaaaagacacgtttgcttaggctaataacttgtacattcacaagtggataatggctgcaagccccactcttaaagcacagaaaggacctgagcgagtcactcgaccgccccaacattcacacgaaacgggacagttgtctacaagtcacaaaacacctcctgccccttatactctcccgggatatcgtgtacaacgggccaacctttgacaacggatccaccttgggggggaaggacttgtccagttatgtaagaggagc

SEQ ID NO: 90143 - DNA, 552 bp, Glycine max
  Clone ID: PAT_MRT3847_5240C.1
cacgcgtccgctcgccggaatatcttcgccggttgctttttccgatcgccactcttattttttgcgttagctctctttgttttttggccttttcgcttccctttcaaacgcagtaacttctctgttccggtccattctgttctcgcatcatcttaaactagggttcccggaaaccctagccgtggttgctataactgctccatgagtttgggagaaaccttgctggagctattcagattcagcttgttgagataaacgacggcgcttcgctctgcgttttggtgaattttttttttctgaacatgaagagattgagatcgagcgaggatctccattcctacggtggagataagggtaatggttgcaaggattcgaacaatctgaaccgttcgttttcgtcggcgcagcggagcttttactacaagccggagtatgcgcgcaagggttttggtctcgtcgtcttcgtcgtcgtcgcggtacgagagggatcggacagtggaggaggatcgggagggttcgcggctgggttcgaagcgatcagagcacgatttc

SEQ ID NO: 90144 - DNA, 443 bp, Glycine max
  Clone ID: PAT_MRT3847_52410C.1
ggataaattaaaataaaaatatataaatatgggtggggtccatgaaatacttttcaacctcttaaaaattacaccatttcttttttgtgaaaaggaattacaccattggaacatatgcttgaagtttttaaattctatgtaaccatgtaaaacccactaaaagaaagtcaagaagccttctcaattggaaacgctctgatgaacttgtcagctgaaatctgaagtcatgatgatccggaaaaaataagactcttaaaatacaacgatacaaccaacttcatccaacagcattctgctgcatacggcttttcttagtctttattttttttttttcttcccacagtttctcctttgatttatattaacgcatggtgctgcatacggctttatatttttatcttttcctagtcttttttttttttcttcccacagcttctccttga

SEQ ID NO: 90145 - DNA, 596 bp, Glycine max
  Clone ID: PAT_MRT3847_52411C.1
ctgtcactataaaccaagtcagatacgcctctcagcatttctttccctgcttttctgcttaggtaaatgcagaaacaattcaatggggaattgttggagtcttcaatcaggttctccaggcgatcatcccaactccaatactgcccccaacctcaacaatcaatcagggaatattcaattttctgctggtctaagcaacacaagattaacacagaatggcaattctacttctcttgggcgtagcagccactctggaggaatcagcagcaggttctttgggccaagtagtagtaataactactcaactggaaataacactagcacatccctttggggaggctctgagactagccaagcctctcgagttagagatgaagaggagtttcctcaagggcagatcttggataatgttgacttgagagcatttactttggcagaattgaaggcagccaccaaaaatttcagagctgagactgtgataggagagggggggtttggtaaagtatacaagggcttgattgatgatagagcagcaaaaaaaagaggtgaggggttgactgttgccatcaagaaattgaattctgaaagcacccaag

SEQ ID NO: 90146 - DNA, 438 bp, Glycine max
  Clone ID: PAT_MRT3847_52412C.1
agtgggttgtaggtggatatatacagttaaatattaggctgatgacacattggaccggtataaggcgaggttggttgcaaagggatacatccaaacctatgggatcgattatgaggagacatttgctcagtggcaaaaatgaatacagtcaggatcatcatctccttagcagcaagcacaatttggttgggagatgcatcaatttgatgttaaaaatgccttcttacatggaagcttggaagaagaagtatacatggagattccacctggatatggtgccagtaatggaggaaataaagtttgcagactaaagaaggccctatatggtctcaagcagtctcctcgggcttggtttggtaggttcactcaagctatgttatctttggggtacaagcaaagccaaggtgaccatacactctttataaaacactcctaaga

SEQ ID NO: 90147 - DNA, 491 bp, Glycine max
  Clone ID: PAT_MRT3847_52413C.1
ggctcgaggcttcatatataattcctcagcctctatagtagcatcagaaggctttgcagggttacaaggaagtgaaagtgcaaaaaagatgtttcacagacattagttttgataaaattgctgcagaatccatggaaggtagggaagcactatcagccgcagctgtgaagcatagtgttccatgtgcagaaacacttgcagatattgctgcttattgcaatgagagaaagctagctagtagaaacgttaaggatgcctgtgataaactttacatatggtttctcctgaagaaaaaggaggttttattgtcagaagcaagaatactgggactaggcccaagattcatgtcaatttatattcaaaagctagctattgagcgacgcatatattatgatgaagttgaaggtttgactgtggagtggcttgagacaacatccactttggtgcttagcatgtctactagtaagtgtgcatttaggaggggctgccct

SEQ ID NO: 90148 - DNA, 695 bp, Glycine max
  Clone ID: PAT_MRT3847_52414C.1
ggggaggtttatatgctaggtggaaaccaccttggagtgcttagtgatcttcagaatataggccctgctaagcattttcctgtagatttaagagaattcaatttggagaaagtccctggccttgatgggacgaagattactgatattgctgccggagctgagcattctgtcattgtcacagagcatggagaaataaagacatggggttggggtgagcatggtcaacttggtttaggggatactcgcgaccaaaccagtcctgttacagtaagtctcgattatgatctgaatgaagctgcatcaattagagttttctgtggaagtgggttcacgtttgctgtaaccatgccctagagtctactcaaacttgattaaatgctaatttgatatgcatgtcaaaagaagttgccatcagcttggttctggttctgaacttccagtggcagtatatagactgatacatgccaagaaagtcttctgcttctcaaatattattttggaggctgcattgtgctggaaagccacaggctccataggcctctcacaaatttgagaactatgaaaggaggtgaatatgtatgatcctcttcccaaccatacaaaaaaaaaaaaaaaaaaaatagatagctattcatctctttccaatttatggactatgctagaacatggcaatgacattcccagtataagtgggt

SEQ ID NO: 90149 - DNA, 534 bp, Glycine max
  Clone ID: PAT_MRT3847_52415C.1
ttctgcggtagaaaactttgcaaaaaaaaatgtccgacttagaagggcgtgtcaaagcttaccgtttagtggcttacacgacggtttctttctccatcatctcacttttgtcggtgtgcttgacactgccaatgctgaagagttacgtgtccaacgtgggcatgaaaatggactctgagctcagctcatgccagcacaatgccaaagacatttggtccgaagtcagtcagctgaagggaatgcctctgctggtcgccggaaaccgtactgcgcgtagcgcatacggtagctgccaagagtgttgctccggcggtgcccaaggccaacccggccaacccggacagtctggacgacccggaaaccccggagcgcccggctcaccaggacagcccggacaaaccccgcagacgccttgcgagcaagtgcacccgccttcatgcaccccgtgccctggcggtcagcccggtaacaatggtccacctggacccccgggagcgccaggagcacccggccagccccgcaccgaggaagaca

SEQ ID NO: 90150 - DNA, 855 bp, Glycine max
  Clone ID: PAT_MRT3847_52416C.1
tattttcaagcccgctaatgtcaaggcatgcatcagaaatcacaactagatacctctgaggttggttggaggacagtataatggattttatattttcctatatttgcattctctattctgtagctaaaatggaattagtcatgttaccgttcagtttgattaggtttagttgacaaccttaatgaaaaagttaagtgtggggacttagttaattcttcattatgatttgataagaagagaaacttaggtcttgtatcttccttttcaattccagtagtaattattaacagaggttagtaatgcaatctgtacagactaccgagttttatctacaaactgaaaacaaaactgtagactacataacttactgggattaatttgttgctatttttcttgcactaaacattgaattcatttgtgaaattcaatgctttatatgattgattgaattgagagtaaaagtaaaaacgttttctttaatacttatgatttgtcttttggcatgatgatatattttctgaaatacttgtacttgtaactttcatcactgttcactggaattgtctttgttttttgttacattgaggtatattaagcaccaaagtaggggaagggaaaagttgctcaatgggagatctaacatcaacatcacattcatattttgtagacttgagctggtatcaatttagatgcaagcaacgtgctggctagattcatttaatttcattggataatcataagattttggttaaactgttagaggcatgtagaaaattcccacgttaaatgtgattttgtagataaaatcaaaagagacagaaaatcctcgattttaatttattctttggaatagat

SEQ ID NO: 90151 - DNA, 184 bp, Glycine max
  Clone ID: PAT_MRT3847_52417C.1
gtcacagtgaatagtgttttcattttttctcttaattttgggacaactctccttgtgtgtgaatgctgtgtgaaatttgtgtgggagtgctcaataagagcatacaagacatgcttacattttgaagtaactgcccaaaaaatggttcttacacttacatgcttgatttgcctattgaaaacaa

SEQ ID NO: 90152 - DNA, 427 bp, Glycine max
  Clone ID: PAT_MRT3847_52418C.1
cttcgttccctaattgaggactggcagaccaacaggatcaacctaagttagaaagattttagactcgaccctgcccatgaatcattaactcaactgggtattgcttaagtaacacgtgtattaattagcgtcactgtcaagcattgcattatcatctgctcatagcatagcataacatgcttatcccttagatcatcgatctgctgctatggaaactggcgtagcatgctacactcacacgccattctagcttagtgttgcttccaagcactctcacacctgtcatgtgtggcatcttttgacattgacgagctctgttatcaagctctttatatggtgacttgctaaaagtggcctacaattcaaccatgaatgtttcaatgacaaagaatccttcactcgtgaccagataccaaaattggtgaca

SEQ ID NO: 90153 - DNA, 324 bp, Glycine max
  Clone ID: PAT_MRT3847_52419C.1
cacgcctactctagctgatactctggctcaagcacatttcctcattttcaagaaatcccgacgcaaaggtgggcatatatgaactgcaattatctcttttcttattaggcctatcctcataccataggaaatgacatcggaattcctaggataatcccattcccacattctcatgatatccggatgcacaactgttcatatatgaattagaattatttgatttcttattacgcctatactgacacccaaggacatgataccgtaattcactagagaattccaattccacattttcaagaaataccgaagcaactcctgttcata

SEQ ID NO: 90154 - DNA, 339 bp, Glycine max
  Clone ID: PAT_MRT3847_5241C.1
ataatgaacacaaactaactgggttttattccggttgaaaaggactaaaactttattgattcccggtcttacgttttgcaagcctaactacccaacattctcatttataacatctgcctaatggagctgcccttctaaatatttgaacacttgtataaaatgtaagaacttttggatttaaacatgggaatctcctagtagattatctaattctacgctaaactctaacgcaacacacgaactatgattcttattgtgaacagataacaacattctactacctggactcgaacaggggcttcctccacccttgggattaattatgtaacaaaaatcatt

SEQ ID NO: 90155 - DNA, 611 bp, Glycine max
  Clone ID: PAT_MRT3847_52420C.1
tactagctcgctctcaaataacaaacatttaccatcaaggcattttacatctgtccagttggttctctctcacaggaccctggcccctatactctactctttgtacctccactttttctttctacctttgatacaatttcaaattgcgaatcatccggtgcaagagctctatagtttttatattcatggaggttcttgcacaagaggctggtaacatcgggaagatcaagtgtgctgaaaatcttctcaagaagaaagggagggacttcagacttttttacctcttcactgcagaacagcaggattctctaaaaggtggtaagtggagccatgtagttaagatgacccgaggaagtttagggtgattgcaaagacacttgctaaaatgaatggtgttaccattgctctcccaagcagtttgatgctgaccaaagtttagataactcactttagaacctttattttcttgaagcttaggcaagcatctgtgactcctgtctgtgcttctagttagcttgattgtgtacaatcatgcttggacctatgtttcagtatgtatgataatgaatatgataatagcactaagaaatgatggtgcaatgcaactagca

SEQ ID NO: 90156 - DNA, 905 bp, Glycine max
  Clone ID: PAT_MRT3847_52421C.1
actatgtgcaatcaagtaagatcatcctcctcaagttctttggctttcagtttttccttcaccctcaaaagaagtgttgtcttccaagaatcctgatatcgctccaatgcattggtaatagcaataacatcatctttacaaagttggcaaatgccagcattaagaagatgtcctttaaccccatacttcagcaaattattgctgagagactggcgagcaatatcttcataaatctcaattgacctctggtattgttctagctgggcagagaattgagcaactttttgcttgcactggtttgcagaagtgttcacttcttcattttcataaaaatcagctgatttttcatagtaaacaacggcctgctcgatattctgttcaggctcatacaactcagcaatttccttcaaatatctagcagccatagagagtcttccaatctcacagaagatatttacagcattgtctaagcaagatacagactcatttatattagtttttttatagcaatgcgcagcgtcaacataagcttgtgcagcttcatgcttgctttccaactttaaattgcaattcgctaatttgatgtaggtggatcctgctttgtcccatgatttagcgagcttataagaattggcggatttgtcgaaaagatcagcagcgtcctcgaatttggagccaaacaagccccaaccgctgagcttcttctctgccttgttctcaaaatcctcggccctcgccaaatgatcacccatattggaatgaatcaatcgatcaattcaattccctctcccccatgcaatctatgttaatgtccattgttcttcttcttcttttttgagacagagataataatgtcacggatagaaactattcatcaccaaattggaacgagctcgagccgaatt

SEQ ID NO: 90157 - DNA, 482 bp, Glycine max
  Clone ID: PAT_MRT3847_52422C.1
tttatcctccattgtgagaaccatgtgccctacttcatctgtgggttcaagaccacagcatgctgcatcaaggttgagaaccggaactccacgaagtccaggcattcctacctctgaaaggtttggcatgataagagcacctactcctctattcatggcaccagctgtgagaatccgatcagtggtcccggtctgctcagctcctccaaggagatccatggcagaggtgtcccaaagcaaggaaaaagaagatttgaagcctgaagacaaagaggtgtcaagaactagctctgagctaggccatcttagaatatgagtgagtaactgagtatacatattagagatcaataagtctagtagttctttccaaataatatggtcctttgcaggtatttactgggaaaataagcatctccttgataattttatgtgaagccattcattttgacttctggaaatcattttttttaatttttcccccc

SEQ ID NO: 90158 - DNA, 611 bp, Glycine max
  Clone ID: PAT_MRT3847_52423C.1
cgccaaaatgagtgtcccgaaatcgaggtgggatgccaaagttgatgcctgcaagagctggggatggtctgaggaaatggttcttgatgccttcaggaagcatcccatctttatgttagggtccaaagataagattaatgaggtgatgagattttgggttgatcagttaggttgggaccctttggccctcgccaaaatgccgaagatttttggatatagtttgaagggaaggatcattccgaggggtttggttgtccgatatttgatcgggaaaggtttgagaaagaagagtgccagcttgttaaccccattttctgcttctgaaaggttgtttcttgaaaattatgtgatgcgttttaaggaggaaacacatcaactatcaaaggtttatgtggaaaaatgagtttccaagaaaacagggaggatggtgtagcatctggcagttagcaaaacggaagagtacaattttgtaagactcaaccttgtttatgtttttttcatcttattttagtagttttgtaactttgttaatcctgtcacagttgcaactgatttaactgagttgattcattttgatgggttggaactcttgttgattattgtagtctcca

SEQ ID NO: 90159 - DNA, 330 bp, Glycine max
  Clone ID: PAT_MRT3847_52424C.1
tttttgcacacacattcctcaagcataacaaaaataccagataaatgttaaacattccagataaatattgtcaaggagaaaaaaagaaaatcaacataagatatggtgcaactaaagttacattgcttaaactttcggaagtaaaaaaataatttaagtaacaaaattcatatcaagaaatagtaaactatgattggaaccatttcctaagctgtttagaaggttttctctctccatcattctcttgggaacccttgtgtgagaacctggatctatattggtctataagcatgtcaagcttgtctcccacgttctttcctactgaatttt

SEQ ID NO: 90160 - DNA, 579 bp, Glycine max
  Clone ID: PAT_MRT3847_52425C.1
gaatccattcaataaattttgatgacatatttatatatatattatatgtatttcaaatttattgcttcacataaaattatcaaggagatgcctatttttacagtaaatacctgcaaaggcaccatattatttggaaagaactactaaacttggtgatctctaacatgtatactcactcatattctaagatggccaagctcaaagctagttcttggcacctctttgtcttcaggttttaaatcttctttttccttgctttgggacacctctgccatggatctccttggaggagctgagcagactggaactactgatctgattctcacagctggggccatgaatagaggggtaggagctcttatcatgccaaacctttcataaataggaatgcccggactacgtggagttccggttctcaaccttggtgcaacatgttggggccttgaacccacaaatgaagtagggcacatggttctcacaatggaggatgatgaaacacctggtggtctaaaaattctgttggaacttgcttgtgagtgtgctctgaaaacacatgagtcaatactggatgggttttgc

SEQ ID NO: 90161 - DNA, 402 bp, Glycine max
  Clone ID: PAT_MRT3847_52426C.1
aagaaaactgctgaatcattcatagacatggtcaccgtcactggtgcagcagttcctattccctcattcactggcctcaatgcaagcgcatgctatgagagtgccgccgcagttaaagtctcaactccccaagccacatggttctgctgcatacaagcttccatcaaagacgttggaatcactgctgaggccatcgctgcgagcgcagatctaactagcaacgccatagccattgaattgtcactgagcactgaagactgatctctggttatctctcccaactctttctccaaggcccatgaggaaaagatcgtgttctataacaacgcaggtttacgccacaacgttgagttccacaaagactagattcctaccgacgcaagatgcacggaaaatctgcat

SEQ ID NO: 90162 - DNA, 326 bp, Glycine max
  Clone ID: PAT_MRT3847_52427C.1
attctgaagtgaaaaggagcagggggggttatgccacaactcggaaaaacataagaccgggaccataacttcctacgacgaccatcccacaaactaggatattatccatgggttactaaagcttatggagtgctgctcccaccagaaagcctactattttctataactatttgagatggcccggcttttggacacatgaagacccatcttagaaggatcagattcttgcggctttactagaataccatccagctccctgttgaatatgcatgtggagcatgacaagaacatttggggtctcgagccgaataacaagcttacgtacg

SEQ ID NO: 90163 - DNA, 284 bp, Glycine max
  Clone ID: PAT_MRT3847_52428C.1
attgtgaaactaatggatagacgtactcagtatacatatattgagagtggagggttgtgtgaagaagttgctatgccttgttgggtttgtggtgttagtgagtactattggtggcgtggagagtgctcgtaaatgggggaaatctacaaccactgataatgaggcttataagctcgcaccatgtgcctcatctatgcatgatgagaatgatagtgtttctcagaggtgctgtgctcaagtgaagaatattgtgcagaaccgtagatgcctatgtgcagatcttg

SEQ ID NO: 90164 - DNA, 1195 bp, Glycine max
  Clone ID: PAT_MRT3847_52429C.1
ggtcccgggggtctctctcattcttcacccgctcagacgcagaggagcagaagcctaagcctcaaacatggcgagagggttaaagaaacacctgaagaggctcaatgctccaaaacattggatgcttgacaagcttggtggtgcctttgcacccaagccatcatctggaccccacaagtcccgggagtgtcttcctctgatcctcatcctacgaaacaggctaaagtatgctctaacatatagagaagttattgccatcttgatgcagcgccatgttcttgttgatggcaaggttaggacagacaagacataccctgctggtttcatggatgttgtttctattcccaaaacaaatgaaaatttccgtctactgtatgacacaaaaggtcgattccgtctccactctgtaagggatgaagagtcaaagtttaagctctgcaaggttcgatctgttcaatttgggcaaaagggtatcccctatttaaacacatacgatgggcgcaccatccgctatcctgacccactaatcaaggccaatgacaccatcaagctggaccttgaaagcaacaagatcactgatttcatcaaatttgatgtggggaatgttgttatggtcactggtggaaggaacagaggccgtgtcggtgtcatcaagaacagagagaaacacaagggaagttttgagaccatccatgtccaggatgcaactggtcacgaatttgcaactcgtatgggtaatgtcttcatcattggcaaagggacaaaaccttgggtgtctcttcccaaaggcaagggtatcaagttgtctatcattgaggaggctagaaagaggcttgctgcacaaaatgaaacagttgcctaaatgattttgctggtaaaatttagctattttatctcttcggctgtctgagcataggatttttggtgaaatgactgagcatagttttgtatcaaactttatattacaattttgagctgttgatttcagtttttattaccttatgattattaatattatggtgacatattgatttttttagggggtaaaaattactttacttccctaatctttttactttagttgcaatttgacctcttcatatattaaattcagtatattttctcaaaaaaaaaaaaaaagggcggcagacgaaagtgagctagtagacccgggaattaataaggaccggtacct

SEQ ID NO: 90165 - DNA, 369 bp, Glycine max
  Clone ID: PAT_MRT3847_5242C.1
aacaagctaattagattacagaagaacaaagaataaaggaccaaagtaataaaaagtgcttggttaaaagccaagggagaatatgaggaaatggataagagctatcaaaacaattaatagaagggatagacatatgaaaaggaggctaaggagtacgaattcaggcatgagggattccaaatgaatctgaaagcctggctggtgctaccggttgaaggtatgggcccgggaaggacgatcacgatgggaactgtagggagatggggcctgctctggagcttgcctcagataccgctagtagccactgagctgttcatcgaccaggaaatggtcacccatgccaggcctggagaatacttatgatagtga

SEQ ID NO: 90166 - DNA, 309 bp, Glycine max
  Clone ID: PAT_MRT3847_52430C.1
tcgaattcgtctcgagcacactggctctctcttactctctctcttataagctcaatatgttcctactattttcttcctcctactctctcatacggcacatgcagccatttcatgaaggcacgcggtcgccaacatcctctcttttttcatacttcacattatcttctttatcaccttttctatccgtttcttctccgctttaaatttttatacttttattcactagtttcttccttatttcaactatattctcactcaatttttaacacatattcgttattatcaattcttaatctttatttattatct

SEQ ID NO: 90167 - DNA, 745 bp, Glycine max
  unsure (1)..(745): unsure at all n locations
  Clone ID: PAT_MRT3847_52431C.1
tagctcagcacgcataggagcagaagcctaagccttcaacatggcgagagggttgaagaaacacttgaagaggctcaatgctccaaaacactggatgcttgacaagcttggtggggcctttgtatgtacagtactcacagttgttgatgatattatttgtcatttttatttgtaattttcgtttgaactcattttgcctggctgtgtaggcaccgaagccatcatctggaccccacaagtccagggagtgtcttcctttgatcctcatcctacggaacaggctaaagtatgctctaacatatagagaagttattgccatcttgatgcagcgccatgttcttgttgatggcaaggttaggacagacaagacataccctgctggtttcatgggtatgtacatttttaaacttggttgccatatagtgttgcttgttatgaccaaattattgttcgtttggatatctggacaatattgtcacttttgcatattcatgtcaagattttttaattgagttttggacaattttgaccagatgttgtttctattcccaaaacaaacgaaaatttccgtctactgtatgacacaaaaggtcgattccgtctccactctgtaagggacgaagagtcaaaagtttgtctattcatgcataatctctctaatgtctatactcactcgctgctgaaggtgtatctttggatggtcaatactaaaattangacttttaaattagtaaatggaaacttg

SEQ ID NO: 90168 - DNA, 403 bp, Glycine max
  Clone ID: PAT_MRT3847_52432C.1
ttttttttttttttttttttttttttttttttttttttttttttttttttttttttttttttttaaagaaaaaaaaacagttctttttcaagctacaacaaagcaaaacccgaatacaaaaaacactgttttacaaggcccgcttccaactggggatctactccttagcgtgtatggggggtttattcacaacaaggtccacttttttgtaaaaaaaaactacgggggggatagcattctcctttgggacccgggggggttttttaccaaagagggggcccaaaaagagcacaatgaagggtggcaaagctccccccccagcaccaaatttttttggggcgagaacccttaaaagggaaaaactttcttttttttttattgtgggaggttggggttttttaac

SEQ ID NO: 90169 - DNA, 298 bp, Glycine max
  Clone ID: PAT_MRT3847_52433C.1
tttcttttaacaagagaagatgatttcttaattttgaaaagttaaacaaaaacagagtgctgatgcacatggtacaataggaccccccaacgaatccggacatggaaattaaacgtttgaattccatttttttgagaccccttaggggtacgaaattcactctttggcacacagcaggcccatcgttatttggaagcctgcccccttgagatttggactggtctttctaaaccccttacttatgatcaggatgagggggtaaaacatttaattcaaaatttgggaactgcctacaccg

SEQ ID NO: 90170 - DNA, 267 bp, Glycine max
  Clone ID: PAT_MRT3847_52434C.1
gcccacgcgtcgtggctaccaaccctttctctccttttgtcgcttctcttcgatgatggcttagaatgccgcggagttcgacccctcccagatcgtcgacgtcttctacgcgtaccggctgtgggtcggcgcggtggtcccttgccctgaatcgccccgttagctatcgcgtgagatcggagatgatatcggcatgggaaccggcacggcctgattgtccttcgtgtcaccgcagctgaccggcaaaccgtaggccatggtcacggt

SEQ ID NO: 90171 - DNA, 478 bp, Glycine max
  unsure (1)..(478): unsure at all n locations
  Clone ID: PAT_MRT3847_52435C.1
cggctgcgagaagacgacagaagggggattgaaaaagattaactgcaagtagtactctcaacgcattgatcaaacattgatgataagttctgtcaaacaaagattgtttttgaacacttcattgctcacatgaaaaacttatatgatgattacttcagtcaaataatgattgttttttaacatttcattattcacatgaaaatcaatctgatgataattcctatcaaataatgattgtctttcgacgtttcattattcacatggaaaatcacattatttataatcaccatatgtttaccatcgcaaacatgtaattattctgccaaattgtgtcttcctttaggccgagcacaattcgcatgaataatttcatgcgacatttacgtaaattcaatcaaatcaacttacgcaaaagatgttactttgacaacatgttatttcaatcaatttaaccaaaanatacaagataatttaatat

SEQ ID NO: 90172 - DNA, 763 bp, Glycine max
  Clone ID: PAT_MRT3847_52436C.1
ccacgcgtccgcggacgcgtgggcttgtacatacttagaagtcagaatgccatattctccctagataaaggtgagccagccttagattttccaattctgtagcatatgggaaattaagttactagctttccaattcatctgtattacagactacgttgtgatgtgatgttaacatagaaaggatcagataagtcacttacaggttaagaatggaattttttattgcaattctctcttgttccggggtctgaacttggatcctagagtcagttttggtaagaattacagttaaagtctcaattcctggattagagagccctggccccactctctagtctttactttcttacaatttgttgtaccctgcactcctcacccactcccttttattctgttatctttccattttttcttatctacttcagctcgaagtcctcaacaacttagctgtcactaacagaaaccgactgagtctctattctttatattctccctgatttgacctaacatacaacaaacgggctcagagagatctatccatggctgggaagaccacccttataaactctgtcctcaccgctctcccaatttctctcctctccctttttaaaatacctcaaaagacagtccaaagcctgatatgcctccaacggacttttctgtgggggggagacaatgatcataaaaaaattccttgggtgaaatgggctgatatttggttgcctaaaactgatgggggtttggggataaaggatattttcta

SEQ ID NO: 90173 - DNA, 431 bp, Glycine max
  Clone ID: PAT_MRT3847_52437C.1
ttgaatgaatgcaagtgaattttattttatttttgaaaaaatggagagaataaggaaagaaaaatcaaatttattaattgaatgattaatttattttttacctcaggagtaatggtgtagggacaagctgttcgtgcccggagctcggcggcgacgacgttccaattccgggttccgtagcggagaacggccccaccaaggaggagctcctcccaggtgccccacctccccatcacctccgttcccatcaccgtacacgtgtacgcctctgaccaaaaccacaacaacctttttttattaatatcctacgcaccaggctcaatttagtaaacgcccaccctgtttgaaaaagccaccacactttccggcgaccaaaaaacccgtcaaagacggaataaaaatgacttggggccagaaaagaggcttttggg

SEQ ID NO: 90174 - DNA, 200 bp, Glycine max
  unsure (1)..(200): unsure at all n locations
  Clone ID: PAT_MRT3847_52438C.1
ctacacaacacaaggtganacaacagacatacacactacagtatanggtagaaatgggtgaactaatgaatatggtctgcacaataagccctagaacagctcagtggttgcacactgatgtcggatctcactgtgtcatgtccacctctcagcttcactctcatctctacaaggtcancctcttcacctgaggaggagat

SEQ ID NO: 90175 - DNA, 547 bp, Glycine max
  Clone ID: PAT_MRT3847_52439C.1
gaggcaaaaaaaaaattttagtgaattaactaaaaaaggggggggaagggggaaaaaaaaattgtaaaaaaaaaaaaaaatttggcccggattaaaaacccgattttgggggaaaaaggttcaaaggggaaaaaaaaaccggtggggggcccaaaaaaaaggaaaaaaaaacaggttgggcccaacaaagaaaagggggtaaaacccagaaaaaagttgggcccaaattgttttgttttaaatagcagggtgacaaaaggggtttattgaaaaccccttccaaaccaaaaaccaaaggtttttttttttaaagagggggaaggggggccccgcttttgggttttttttaaggggctttataacctctggaggggaaacccaaagggggttttgttttttaggggggggggggcaaaaagggttttttgacacagaattttgaaaattttggggctaaaccagcccttttaaaaaaaaccgaaaaaaaccctcttgttttgggggcctttttggaaggggggggcgccccgggaaatccgggccggga

SEQ ID NO: 90176 - DNA, 533 bp, Glycine max
  unsure (1)..(533): unsure at all n locations
  Clone ID: PAT_MRT3847_5243C.1
tntggaantcggatgcctcggtgccccttttntgtcgtttttcttttctggcttanaatcngccccgcccctttncaantgggtctannttttttttttgtgatggtgggttttancccttggcgcttgtttttttgttgnnnntnntggtcccaacttattcagcttcctatatgagttgttggtttttccttttctttttttttttnnnnnggggttttgccttttcttgaatccccggggggcccctnntcttggtgagaatcttccccggggagctcttgggttnttttttcgggaggaaactctaattttctctggttgagatttggtganngtttttttcttgcnngatgatcctgtttaatttgctgaagagtgaagagccttgcggntttttattttaattggtgcctgctcccncctttattttctgtgttgttcactccncctttgtggctcctccttttttccttcccccccttttttagcccctttgcctttcttttgcgcgttgaaagttggctttccct

SEQ ID NO: 90177 - DNA, 454 bp, Glycine max
  unsure (1)..(454): unsure at all n locations
  Clone ID: PAT_MRT3847_52440C.1
gctctcactctccatataacatttcacattggcaacctttctcattgattccattgaacagagtgtgaacaggaagagatagatagagaggcaaaaacaaacatgtaatgcaaatgcaaatgcaacaataatcccctttccttcccttcccttcccgacaaaaccctataggagtacactacattacacactatctatcaactgtggaaattcaattaggaatgccgtttctgaatattccataaacccacacccactttctgtttctgcccccttccctaccaattttccctatttattttttcttcttctttctattattatgagactntccattctgcaaccccacccccacccccaccggataaagcgctggccccgcatcgacgcgtcgtccttccaccgccgcaaggacaaggtggtggtgatcatgggcgccaccggctctggcaag

SEQ ID NO: 90178 - DNA, 334 bp, Glycine max
  Clone ID: PAT_MRT3847_52441C.1
gctcggattcgctcaaaacgctcaagcttcacaagtctccggccaaggaatttttctctctatgcctcgtttctgattgtgccggagatgcatttggggaagcaccgtgtggagcagatgaggttgcttcctctcactctccaggaggaggcgagttccacaattccttcaacatttttttgttttttaattaactttgacttacttttattaaattaatcatatttacgttttaataagcacatcttaaactgtcacattatctaattgaaagtggaatcaaaatggtcaatttaaaaataggcagacccaatcctattataaaatttcaggg

SEQ ID NO: 90179 - DNA, 319 bp, Glycine max
  Clone ID: PAT_MRT3847_52442C.1
cggaaaattccacccgcttttgaacttcggtaaaaaaaaaacggggcctcggccccctcctaataaaaaggaagtgaaagttaaaccctccggaaaccggttggggtggttcccgaatgctgagcccccagaatggttctatggaaacattatcggcaaccggcgtttctacccattctggttcacaaatccaccagaatgcctgcaatttaacttggactcttgtggacaaaacctttctagaaacatttccggtgtattgatcttaacctgggtggatgtccacgatgtatactctcatcctattaatacctactct

SEQ ID NO: 90180 - DNA, 323 bp, Glycine max
  unsure (1)..(323): unsure at all n locations
  Clone ID: PAT_MRT3847_52443C.1
caaacaatcacaactaagcaacacanactattgcaatggcttctgcttcagtgtgaganacccacaccacagttgaagttagccaaccaaaaaggcatcacaaacccnattactncattgaagtntgccaacccanaacccaanacagctcgttcggcnaaaaattatctgagataactagcaaggtttcaaagggcgtcatggcannannaaaatcaacttcatactatagccaaactcagtttnntcccaggccacatggcacaaacagaggtcctatatggncaactcagnccaaatgccaaaactggggctccaaacca

SEQ ID NO: 90181 - DNA, 1936 bp, Glycine max
  Clone ID: PAT_MRT3847_52444C.1
tggactacttcactcttcttagttagttagcctcttcatttcattttcttctttcctcaaaaagactcaacacacccctgttttatgctctctttctgtcacttgtgtttatccaagcacaccaaaaacagagaaaatgaggatggattatttgaagcaaaagtttcccttcaaccacagaaacctcttcctcaaattgctcctcacaatcttctttataggcctcgctttccgcatcctcttcttccactccctgtcccctcagatttcccctgttttggaatccccatttcctgagaaagtgacattaccagaacctcagacttcaactgttccagaagaagaacatgttcccgaacctccacctgttatagaacatgtttccgaacccccacctgttctcgaacatgttccccaaactgaagatcaactgtctcccactgactcagagaaatgtgattactttaatggggattggatcccgaaccccgtcgggtccagtttacactaatgacagctgcgacctcattgaatctcatcaaaattgcttgaagaatgggaggcctgacagagactttctgtattggaggtgggctcccagggagtgtgatttgcctcagtttgatccacacaggtttctcaacttgatgcggaacaaagcctgggcagtcattggagattccatttctcgcaaccatgcgcaatcgctggtctgcattctttccaaggtggaaaaacctgtcttagtctaccatgacgaggaatacaagtgcaaaagatggaactttccctcatacaacttcagtttgtcacttatttggtcaccattccttgtggaagctgctatttttgaagacaaaaatggtgtttcgagttctgaagttgagctacatcttgacaaactggatagtaaatggacggatcagtaccttgactttgattacattagtttttcaaccgggaaatggtttctcaaatctgcaatctactatgagaatgacaccatattgggctgccactcctgtcctaagaagaacctgacagagctggggtttaactttgcttattgcaatgccttgaaattagtaatgaacttcatagtgtcttcgaatcacaaagggatttttttccggacattcacacctgatcattttgaaaatatggagtggcttaatgggggaacttgtaagagaacgacaccaattaaaggtgagatggaaatgaaatatttgagaaagatgctccgtgacgttgagttagatgaggttggaaaggcagctactgaagcttaaaaaaatggggtgagtttaaagcttgtggatgttgctccattttcactattgagacctgatgggcatcctagtccatacaggcaatttcacccatttgaaaaggaccaaaatgcttctaaagttcagaatgattgtttgcattggtgcttacctgggccaatagactcttggaatgatataataatggatatggttgtcaatgggtaaggaaaaaagacagttaaaagccccatacagttgtgtatattgagtgaattgttactctctgtataccatgattcttgatattcatatttatacggatggacaatggagattggaggcaaataaattaaatgtagcagaaaggattttaaatatcagcttacagctaattttggtatggaagtgcattggcatggaaatctgtttctttgtctccttttctgtttttggggcttgtataacgcgccatccgtggttattttaggcaactatagtctatagttctatctttttccattttcttgcaataaatttgatgagttgtgttgtgttacccagctataaaaatgtaatttaattagttttgaggatggttggataagataaaatgtcagggattatttatacttaattcaatgaatatgttaaaattatcccct

SEQ ID NO: 90182 - DNA, 724 bp, Glycine max
  unsure (1)..(724): unsure at all n locations
  Clone ID: PAT_MRT3847_52445C.1
cagctatgcacacaactgagagaaagcgcaacactcccagagattgaaaaaccctaggttttattcctctcgataagttctcgaagtagatagatagacaaatagaaaaagagatttttttcttcctttttttttgttttttcatgttatgtgttccactggttgggtttgaattagggttctgagggattggttaaattcgatttattttggaatttggagtttgtgattgggtttggggcaccttgtggatgatggtttttcgacaaatgaatttggaattttgtgatgtgagtgaagttggtgctctctagggtttgtgtttgtgtgtgtgcggtttcaatggggagtatgagtgactcagacagaaaacgacgtcactttagctccttatcccctacacctgcagctgctattgccaagaagctacccttcttgcccgtttcagaagacaaaaagcttgatattgttgtacttcagtatcaaaatcaaaagcttacacaaaaattagaaactcagaagttagagtatgcaggtcttgagaataggttttctcatctgaaggagaggcaaaagtcgtatgattccactntagaaagtgtcaagaagtcttnggagcagctggttgatgatttggagtttgtgtctgaacgtacgagagagtcaagcagcnaaacanattctagatttgcatcaatcatggaagatggcagtccatctactg

SEQ ID NO: 90183 - DNA, 328 bp, Glycine max
  Clone ID: PAT_MRT3847_52446C.1
agcccactgataaagatacattcaactatatatattggagtgaaaaggtaagatttatgtagtctaaaatgtattgaaaggctattcataataacatactatgattataagcatcttaagaaagaatgttgattgaagggttggttatatgatacatcgggagccggatgattgtgttaatggtcactgacaccttatttgaggcaaatgataagtgtataagtggacatggaggaaaaaaaacagtatccagtttgtttataattttttgcactttaaattattttttccggagtgaaaatgtgttaagccttcaatttatagagca

SEQ ID NO: 90184 - DNA, 511 bp, Glycine max
  Clone ID: PAT_MRT3847_52447C.1
attgaaaatgtcactcacattgttactaagactactaaaagctataaaagactaaagaaaataagataaaattctgatttcattcattggtccatcaagagggtgcaaagcttacattaaataataaccctaatgaatgataaccctccacttgtcatcatctagtattttaggaaattaaaataaaaactactattaaaaggataatacctaagtcatctaatatttaaactacctatttgggcctctctaagcccatcctatcacattgttacaaagaaagagttaaggactcccatatgcattcttcttttgttccacagcttggttagagcacaccacgtgttttcctgacaattttgaaatgctcagacccttttgaggactttgctatgattatgaatacgcccctttattgggcacagcagatgtataactcgttccactgttcctgatagcaatgtcatgtgcaactgcagttcaatatctgctatcctctccacaatcattg

SEQ ID NO: 90185 - DNA, 226 bp, Glycine max
  Clone ID: PAT_MRT3847_52448C.1
ttttcactcagcattaatcgagaatataatcttgtttgtaatggaaacaaaatacatatatatttaattcattctgaggttaacatcatatgatgcacatgttttcactccttaccatcatcatattcattatgaaaagttcatctacatacatcaggcatgggcgagcggcatatatcaagtgctgcttctactttaattttgagtgccttgaggcgaatgaaaa

SEQ ID NO: 90186 - DNA, 2152 bp, Glycine max
  Clone ID: PAT_MRT3847_52449C.1
ggctcgaggttatatatatacacacacccctctaattcagctttggagtaacctagttgaagatgccatgggaaacctctttggcaaaaataaaaagcgtgacactgaaagtgccaacaataataaaggaagaggtggaagaatctacactgccgtgaccacaagaggcttaccacctcatttcccaacacaattacctcattcacagcctccaccgctattatatccaactctagaacctccgacaccgccaccgccgccgccgccgccaccggcactaccacaatccatgttcaagaaaccaagttttgcgagagttttcgctaaacaaagctcttcagtcatgaacaacaatcaatctggcataattgcgccacttcgatacacaataattgaatcaaccaagaaagtaacaaagcctaatatgccatgatattcctagttggtgataccaactaatcttgatgtgcaaaatacccacacttacaagtgatgagtgaaaaaaatctacactgccaagaacaaatttgtctaaccttcataaaatcaaaattgtgttagccaagaaatgaagaaatcaacgcattgaatgaagctgcgatgggaaactcgcatgctaaaaagcgtgacactcaattttccagaaacgttgttgaagggagagttccctctccgaaaaacaaaaccttgtcgccgtcaccgtcgctagaaccaccactaccacgagaaccaccaccaccagcagctatgtctttgaataagggttcggggaaactgtctgccaaagagaaatatgctctgattcccgataacttcaccaccctagaacaggttacaattgccttgaggaaggaaggtttagaatcatcaaatcttgtccttggaattgatttcacaaaaagcaatgaatggactggaagtgtctcattcaacaatagaagcctgcatgctattggaagtacacctaacccctatgagaaagccatctctattattggcaagactctggctccttttgatgatgacaacttgattccttgttttggctttggtgatgccaccactcatgatcaagaagtgtttagctttcacagtgatcattcaccttgccatggttttgaggaagttttggcttgctatcaaaaagttgttccaaacttgagactgtcaggaccaacatcttatgctcctgtgattgaggctgcaatagacatagttgagaaaagtcatggccaattccatgtgttagttattgttgcagatggccaggttacaacaagtgctgcatctgaacatggagaactcagtccacaagaagcaaggacaatcaaagcaatagttgatgcaagttcatatcccctttctattattctggttggagttggtgatggaccctgggaagacatgaagaagtttgatgacaagataccagctcgcgactttgacaattttcagtttgttaacttcactgacataatggctaagaaatcaagcccctcagaaaaagaagctgcttttgctctggctgctctaatggagatacccttccaatataaagcagccactgaacttggactacttggtcgtgcaacaggaagatcaaataaaatagttccaagacctcctccagcaccatattcccagcttgtgccaccagctcgtgttctgagcaatacgccaactttcatggaagatgaaagaaatcaaatggcatgtgcagtttgtctgacaaatgcaaaagatttggcctttggatgtgggcacatgacttgcagagagtgtggacacaaattaactaattgtcccatgtgccgagagaggatcactagtcgtctcagggtgtacagcgggtgattgtaatgaaaaccatgcacattaattacatagtttgcataacatgcctttctcaatagggtttatatatggtgaggttaaaagtctaaaaatgatagcttgtctctgtttgggatgtttcaagtgtattgaaaaatggagatgaattgtgcaaggtttctatatatatgcatggttcgtgtcgatgcgtttgaagttgtatattactatatacctgcacataatgtttaatatatttatggtctctaatcaaatttttgctctgcataaaaacctacaaaaaaaaaacaaaaacaaa

SEQ ID NO: 90187 - DNA, 350 bp, Glycine max
  Clone ID: PAT_MRT3847_5244C.1
gggaccctacaaatcaaagtgaaacatgtggggtggcatggattttggagcctgaaatgagaggaaagttgggtaaacatgaatgcttatgtcatttgatgaagattgatagtgaaagaccaaagacagagcaaggaatgaagatagagacacggatagctttaatttgccttaagctttttaattacttagggtttatcaataagggttttaagctgaatgaaaatatcgaatgatcaatactgaagcacgtgtagttgaataaaacgtaatcttgctctcttgagaaattccaaacagtataccacacgattaatgaacggtagacttagtaacttttttttcatttc

SEQ ID NO: 90188 - DNA, 746 bp, Glycine max
  Clone ID: PAT_MRT3847_52450C.1
actgtgttagccaagaaatgaagcaatagcagtgagaatctaattcttttttttttttctcttcttccgtccttgttttccactattttatttctattttatagtttctagatcgcgagcggccgacctttttcattttttaattttgtttatatatatatatgggtgtgttcaatttttgcgatccctccctagttgaatgaagctgcgatgggaaactcgcatgctaaaaagcgtgacactcaattttccagaaacgttgttaaagggagagttccctctccaaaagacaaaaccttatcatcattacagtcaccatcatcaccatcacaatcaccatcaccgtcgctagaaccaccgcgagaaccaccaccaccggttatgttttttaatacgggttcgggaaaactatctgccaaagagaaatatgctctaattcctgataacttcactacccttgaacaggttacaactgccttgaggaaggaaggtttagaatcatcaaatcttgtccttggaattgatttcacaaaaagcaatgaatggactggaagtgtctcattcaacaataaaagccttcatgctattggaagtaccgctaacccctatgagaaagccatctctattattggcaagactcttgctccctttgatgatgataacttgattccatgttttggctttggggatgcgaccactcatgatcaagaagtgtttagctttcacagtgatcattcaccttgcca

SEQ ID NO: 90189 - DNA, 877 bp, Glycine max
  Clone ID: PAT_MRT3847_52451C.1
tagttctagatggggagccgccgacctttttcattttttaattttgtttatatatatatatgaggtgagctcaattattgcgatccctccataaaggaatgactttagtacaagtcatcataactgtgttaagcgtgaaatgaagcaatagcaaaacgttgttaaagggagagttccctctccaaaagacaaaaccttatcatcattacagtcaccatcatcaccatcacaatcaccatcaccgtcgctagaaccaccgcgagaaccaccaccaccggttatgttttttaatacgggttcgggaaaactatctgccaaagagaaatatgctctaattcctgataacttcactacccttgaacaggttacaactgccttgaggaaggaaggtttagaatcatcaaatcttgtccttggaattgatttcacaaaaagcaatgaatggactggaagtgtctcattcaacaataaaagccttcatgctattggaagtaccgctaacccctatgagaaagccatctctattattggcaagactcttgctccctttgatgatgataacttgattccatgttttggctttggggatgcgaccactcatgatcaagaagtgtttagctttcacagtgatcattcaccttgccatggttttgaggaagttttggcttgctatcaaaaagttgttccaaatttgagactgtctggaccaacatcttatgctcctgtgattgaggctgcaatagacatagttgagaaaagtcatggccaattccatgtgttagttattggtgcagatggccaggttacaacaagtgctgcatctgaacatggagaactcagtccacaagaagcagggaccatcaaaagcatagttgat

SEQ ID NO: 90190 - DNA, 325 bp, Glycine max
  Clone ID: PAT_MRT3847_52452C.1
agcaatggttgttagcgcgtcggaacctgtttccagtgcggctgtggttgaggcatcccccccccccccccccccccccggtgccattaatcaaaacacccacccaagcaaaaacaggtactactaattactcttatagcctacacactccaacgtaacaatccctacacccccaagctcactataccacacacgtatactaccctacccaacgggtataagtgcgcctaacagtcgaaatagcccgtcctatacttatctttacaccgtagacaccggtaagtgtcttcgcacatcctaacttgcaacttactggcgtcttata

SEQ ID NO: 90191 - DNA, 217 bp, Glycine max
  Clone ID: PAT_MRT3847_52453C.1
gatgctttccatgtgccagaatttgccagacgcttttgccctccaatatatcctttgcaagaacaggagtggcaattgatcgagggaacccctctaatatgcctccatgctcttaagatcatgccttctccacttccaccatcctttgcttccgaaactgttattgactgtcagcctcttgtgattcatctccaggaagaatcatgcctgaggatat

SEQ ID NO: 90192 - DNA, 810 bp, Glycine max
  Clone ID: PAT_MRT3847_52454C.1
gatttcacattgtcccgtttctgtagcgcgccggaccatagtgtagttcattacacgtcctaaaactaaaaaaacatgaagaccatcaacgcttcccaggttgtttccatccccaagggcgtcaaggttgacgttaaggcccgtcaggtcaccgtcaccggccctcgcggtactctccacaaggacttccgtcacctccaggtcgatatgatcaagattggcggtaagcgtttgaaggttgagatgtggtggggaaagcacaagcagctcgctgccgtccgcactgcctgcactcacatcgagaacatgatcctcggtgtcaccaagggctaccgctacaagatgcgtttcgtttatgcccacttccccatcaacgccgccatcgttgataacggaaagaccatcgagatccgtaacttcttgggagagaaggaggtccgcaaggttaccgtttatgagggtgtcaccttgacccgctctgaggacgttaaggacgagatcgttctcactggtaacgatgttgaggctgtttcccagtctgccgctaacatccaccagtctacccttgttcgtgacaaggatatccgtaagttcctggacggtatctacgtttctgagggtggtgtcatcgaggccaactaaattcattcccgtgtccccctcaccgacacatttcttcctaattggaccaaaagataaaaattctgtgttaggaaggaacgaagaataaggcttattcaagaagatatcgactccggccctggtcttgtgtaaaaaattccccggtgatcctggagggttttatgaccc

SEQ ID NO: 90193 - DNA, 348 bp, Glycine max
  Clone ID: PAT_MRT3847_52455C.1
aacacagaaaataatttcccttcaagaactttttcaattcaaaaatggtacccggtcattttttaacccccttttttaaaaccccctttttttatttccaagggtaaaacccttcccgaccaaaaaaaacccttttttttaaataaaggtattttcctccaatttggggccctgaataaggggctcaaggctgattgtggggcattttgataaaaactgagggccctggtttatgaccccattcgaagcctaaaggaacaaatgcccgctcaacttctggaaggttctcaagctttatctgggggctctttccaaaagcgggggctttttttaaggggaaattttttg

SEQ ID NO: 90194 - DNA, 1748 bp, Glycine max
  Clone ID: PAT_MRT3847_52456C.1
catcaacctgtgtttcctccattcagcctctcggcagacaactaacattcttttctcatgacaatcttttacccacctgctaacatactctctgcctccccttcgcacttcgctgtgtcttctctcgtgttgtatggcccttctttcttgatgctatgttgattactggtttttctatctgcacaaaaggggagttgttcacgctttgagacggctaataacaagtcgttgtgtattggtaaaaactagaggctccactattaactgggtagtaagtcgtggtttggaggctatcggtggcccagcatcccgtctagctcacccacagtgcggaactcctccacacttcggttgggccgttgggtgcctcgtgggcaactcaccgccgcagtgccggaggctctcaaccaggtcgcccgagcttgtgtgctcgggtggggtccgttgctttggcggtctcccgccttggggcccccgttcgcgcccgtgtgcacgcggcacgagcacgcccctattgttggctaagcgtcagacacctctcttttccttcttttcatatgattgtaagatgtcaggtgatgcacaaaatcctcaggcagcattatcactgcaatcatcactggctgagccccacaatcgttttgagataggggttaatcagcctatgatctgtgcaaatatccttatatggatcaattttatggactcttctcagcatatggacctcaaatttcgggacggataatgcttccagttaacttgacatccgatgaaggaccaacttacgtaaatgctaagcagtaccatggaattatcagacgtaggcaatcacgtgcaaaagccgtacttgagaacaaaatgataaaacgtcgcaagccttatatgcatgaatcacgccatctacatgcgacgcggcgaccaagaggatgcggtggtcgcttcttgaacacaaaaagctctactgatggaaatggtaaaaatgaaagcgaagtgattaaaaccagcggccgacaattccagtccagtgcctctcagagttctgaagtcctgcagtctgaggttggaatgttaaattcatcaaagcagacaaatcgaagcagtccaaacatctctggttcagaggtgactagcatgtattcaagggaaggttttgatggcttttctgtcaatcctcttggatcttccgtccactctctagcagacatgataggtagtgagcatggtatcattaggcccactaaatgggttgcagcagtaccaggtaactgctacaaccttaaaatttgatttgtaaggagactagtgggcttggtgctgcgatgttgcaccaccaccctatccttgcaagggaccaggtgaagaagttctttttccgtttcctgtgttcattgtgacgaattttgttttggaggcgtgcctctacatctggttttaggcaatccattcttggctactgcttaggcaactcatccttggctcattatattaatagtactttccttttctttctgcacaggcttgtcataacatggttatacatgctaatggcttcatatcctgatgcagtagactatgatgtgtctgtttgtgttaaaataacaagaattctggtttcgtgtgttttttagttatgtctagatgtggtgttttgttctggttttctgacttcgtgttgagctatgtaacatagaactctggattgtgatcttagaaaaataaaacattgatctgacttaccctccgaaaaa

SEQ ID NO: 90195 - DNA, 379 bp, Glycine max
  Clone ID: PAT_MRT3847_52457C.1
tgatggtgcaccatacctcataggaacaccaccacttgctgcaaacactggaggagggtggcactgaaaaagttgttgttgttgatgatggtggtgatcatggagggttggtagtggtacttgtagcactcctcctccagaagaagacccttcattcatcttcttccaagactcttgaagcctcaacctttctaactgagccacgcctaaacctctctggggtggcttctttggaccctttctgctcctggaacatgctgatttgccacctccttcctcatggaacgtgttgtgctgatcagaggccattttttgaaggaaaaaaagaaaaaaaaatgcaacagaagagagaatatgtgtgttcgatataaataaatgc

SEQ ID NO: 90196 - DNA, 341 bp, Glycine max
  unsure (1)..(341): unsure at all n locations
  Clone ID: PAT_MRT3847_52458C.1
ngcttcagtcggtgacagctgttagcatgttgaatgcatactagtctatttttttgctagatatatttgtatttttctattactactttgtctctgcgtttattcttttgcattccatcacagcattattttaattttttaatgttaaaaaggcaggcaccggttgtaatttttatttattttagggtaggggaatgtaaaatatttgttggttgatcccacgagtcattgtttaattatcactaataattctgctttttaagtcaattgctcaagatatgaaataattaaatgaaaaagagagatttaataaaaaaaaaaaaaaaaaaaaaaaaaaaaaa

SEQ ID NO: 90197 - DNA, 719 bp, Glycine max
  Clone ID: PAT_MRT3847_52459C.1
cttaaatctctgttatatagatccaatgataacacattactctctttttagttctcacaaagaataagaccgtgtcacatcactggttacagatgatgcttgaaatatatacagcaccataacacgaccaaaattaagcaactcttttccattgcttacaacaacaaaaattctatatatgcttgcatccggggttaggtaaataaaaaatgacactgaagaagaatcggaatagactcactttgacttcacctcagtatacaaattctatgtccttggagttgccttcaccagcaagtgtaatagtcaataatccatcttcacggttgtagaagaactcttcctccttcatgtccactacacaaagtttcggtctaacgttggagtaggctccaaaacgaccacatcctctgcctttgattttgattatgcattgtgcaacatccatggtgcagtccaaggcttctactgctcctcctgaattgtacatgtcaagcaatcctattggcgcgaatagcacatcatgaccaaacacccttattggagatactgtatatatttcacaatggagagtctccagggacacttcaagttttcctctgcaagatatcttggaaagcaagcctgcattgaaggcatatactatgcagtctccattccaattttcacctgcaacctcttcaagaacttcaacatcaaggggtctcactttccctgaa

SEQ ID NO: 90198 - DNA, 464 bp, Glycine max
  Clone ID: PAT_MRT3847_5245C.1
attgctttcccattcagtctccactctgccttgtccattatctgactttggatataagattgcaactttgcaagtgccttttgaaaaaagcaaagattctaaagcatatccgtttgacaaacaacacaaaaccacatcataatccatcatcaagtgtttgttcattgtggatgcaacataatattaattattttcagttttactacaaaaaacttgagtgccattatcattttatcagtggctctcttaaggaatccccaggaaataataataatattcctcaaatgcatccaatatttctattaaagaaacaaatttctcataaaagcaaggggctcctggtagtgtctttactgcatttagaagccaagagagaagcagttgttgaaatgggaagaaagagtattgaagtgaaagcaacacaagctagcctcaggttgaaataaacacaacacaataattgg

SEQ ID NO: 90199 - DNA, 312 bp, Glycine max
  Clone ID: PAT_MRT3847_52460C.1
catagcagacaccaaacttttattattaacaacctaaaatatcattccatgcaagacagatgccccgacaccatggaagctatttttttcgcggtccatgtcccataataacccagatccattataatcacatttgggactacataggctaacgatgctaaagatgatggggaacgatcccctaccaaaccgaaggagactcacaaacgggttgctgttctggcttggggatggaatatgatgaagacgacaacgaggggttgacaatggggaagataatggcgcatgcaattgagaataccaaatggccgg

SEQ ID NO: 90200 - DNA, 402 bp, Glycine max
  unsure (1)..(402): unsure at all n locations
  Clone ID: PAT_MRT3847_52461C.1
tcgcccacgcgttcgcccacgcgttcggaataaacccatgaatcaaaatattttgttgtaagcgcaggatttaccaattgctatgacatgcattcatgagttttctagttatatttgaatgccatacaaactccaacttaatattcatgcgccatagaattgagagaactattaatgctaaaaattaataaatgacattattacacatacgaacatttttttctcgcatatgatcctgaatcgcaaaagtagcggtttttttatatctgttaatatggaattagctcaattcccattcacctagatatttttttcactggctaattcttgctttatgagaagaatagcaaaaataattttgatctcacatagttaggagtatgacccgnatcgtagataact

SEQ ID NO: 90201 - DNA, 348 bp, Glycine max
  unsure (1)..(348): unsure at all n locations
  Clone ID: PAT_MRT3847_52462C.1
ggctcattctatgctgaccacttactatggctcttctctcatttgatttgagaatcttatttaagccataggctatcgattgggggaagaaagcatgcctttgttggtcaccatcaccaccatcgttaacatcggtacactcctaaataaggcctacctcccttccattcaaccagagcagcgatgagaacagagactaaattagctaagcaatgcatcaacgggaggattctgaaattatcttataatatgacattctactttgagcaagtcacttatgcctattccttgataggagaggganaagcattangccggccagtaccagaacgatgatgaataagtctg

SEQ ID NO: 90202 - DNA, 653 bp, Glycine max
  unsure (1)..(653): unsure at all n locations
  Clone ID: PAT_MRT3847_52463C.1
cccgcttgcatgacggatcacccacccatatcaacaaattacgccgcaaaattcctcgcctgctgcaccgccgccgccgccgccgccgcgattaactcctcggaccgaaagcgaagagcgaaaggcaaatagagatgaacgcttgcaggtgacgtggcatctccaaacttacttttgatttcacttacccaaacccccacacagcagaacacaaattccttactctcgattcgacgcttctctccttccttcaacggcactttccactctggccaccgatatacttggtagctgataacagaatattggtgattagttatggaaacattggaacttctgagcctgaagcagaagttttcttcggtccgggaccaggtcatgtggcagaggctgaaattattgggctctcagtgagcacattaggctcaactatttatatcaatgtcaagaacagaggactctttgcatatcagtcacgtggacatttgctttggagtgtggaacctgtgctttaccaattcggctaccgtcaaggatgcaggaaaaatcttacaaattgttactttgcttcagttcctttgcttgatcattgtgagggtagtatatatatctcaaacacagagggtgaactctattgnttgtcagttcgtagc

SEQ ID NO: 90203 - DNA, 350 bp, Glycine max
  Clone ID: PAT_MRT3847_52464C.1
gggggggggtttttttttttttgggttttttttttaaaaaaacccaaaacccggcttttttaaattgaaaaggggccccgcccattgatagaaacaaaaaattttttttttaagggacaaagttccccccctaatttttcccaattccgggggtccccccccacgccatttaattacatgggcccccaggggggccttttacagggtcccccactaataagaatatgggctcccccccgggaaagggaaaattttttgggtggcaacaacaacgggggggcctttcaccttgaaaggctgtccccaaatttcccccttcttagggggaaccgggggacccttttttttgg

SEQ ID NO: 90204 - DNA, 721 bp, Glycine max
  unsure (1)..(721): unsure at all n locations
  Clone ID: PAT_MRT3847_52465C.1
ccacgcgtccgattaattctctctctcctctatggccacctctgaccaccctgtccaggaatcacgtttctcacgcatgcactacttctccactgacgacgaccaagacgaggatgacgacgacaccgacctcgacttcgtcgacgacagcaatgtcagccctgctgaagaggaggaacccaaaaaatccgacattctcggcggcgagaatttcaatcgccgcagggaatttcgggtggtgctggacccgcgaggcaagtgggttcaggaatggaacagggtgttcctcctcgtgtgcgccaccgggttgttcgtggacccgctgttcttctacgcgctgtcgataagcgacacgtgtatgtgcctcttcgtggatgggtggctcgtcatcaccgtcactgcgctccgctgcatgacggacgcgttgcacgtgtggaacatgtggttggagttcaagatggcgaaacgttcttcttcttttatcggaagggacactaacgcctcangtggcggcggcggaggcggaggcggctatgctcttcgctacctcaaggccaaacggggcttcttctttgacctctttgtcatcctccctattccccagattgtgctatgggtgacaattccggtcttgttgaagaaggatcaattacgttgggggtgacagcgttcttaattatgttcctctttcaataccttcccaaaattatcactctgtttg

SEQ ID NO: 90205 - DNA, 167 bp, Glycine max
  Clone ID: PAT_MRT3847_52466C.1
ctaaaaaaccggccttctgaacagtaatagagatgtagcgctatgcttatatagactcgtatgtagcaggcacaaagactcttgaacgttacaacctgtttccattcctccagggaacgctccggtgccgcgcactaatgaaaaagaatgttctacttccaacaggt

SEQ ID NO: 90206 - DNA, 1052 bp, Glycine max
  Clone ID: PAT_MRT3847_52467C.1
gatcacaacccgtccgcacaatcataatctcatctcaatcacctcaacttcatttctctgctccaaagtctcaatcttttatccaaaaactcaaatgggcatggccacaatcacaatgggaggaaaccacaattcctccatcactccacgccactacaacacccacaaggtgttccttttctgcaactacattctcttgggtgcagcttctagctgcatcttcctcaccctctctctgcgcctcattccctctctctgcggcttcttcttcatccttcttcaggtctttacgattgcgggtgcggtctcggggtgcgctgctgtggggactaacaggtggtactctgcacacatggtggccactgttctaacggctatctttcagggttctgtttcagtgttggtgtttacgcggactggcgattttctgggtcaattgaaatcttatgttagggaggaggatggtgctgtgattctcaaattggctggtggactcaccattttgatcttttgcttggagtgggtggttttgacacttgcatttttcttgaagtattatgcttgtgttgaggggaatagtggggctgttgtgcctgtgaggagtgggaaggtgcagcaggatgaggacttgaaggattggccttggccttttcaagtttgattcttgtgatgacaagaagaaacacaagaataacaatgacatgttccttttgaagttgttgcagctgttttgatgataatctttcaaatatgttgattcgttggagaattggatgcttttttctcctgatagagatatatgtgtgtgtgtttgtgttggctatcatcattatgtaattagttgtgtgtgtgtagttattctttagattcatcttatttgttgttggattattattacttcacatatcatctccttcttgttaagcaagaagttcagttactatataatggtatcagttttgagtaactttatatctggcttgattgagaacgagagttcggttactatataatggtatcagttttgagcaactttatatctggcttgatct

SEQ ID NO: 90207 - DNA, 322 bp, Glycine max
  unsure (1)..(322): unsure at all n locations
  Clone ID: PAT_MRT3847_52468C.1
angtcgcangcacgcgtacgtaagctcggaattcggctcgagcagtccttgaatggttgttgaccccggacacctaactgtccctgatgatcctggtgctgcccgaattcccttgggcgccaagctccctngccaggcagccagtccctccgtcaccagcctttgcatctggctagggaaatcggggttggagacatacagtctgctttgtgttgaaacccagatttgtaccctgtgtttacactgtgctgcctgctctcggggacagtgggaaggaagtgcagccgaggtggcagacccctctgattcattgcctggtcgg

SEQ ID NO: 90208 - DNA, 235 bp, Glycine max
  Clone ID: PAT_MRT3847_52469C.1
ggggtaacagaaaattccactttcggtgggggtggggattcaacattgaaaccaaattattgcaggcaactttttttctggggggccggggattcaaacacaattgccacattaccaaaacatggattctggttgggggggaaatcaagcctgcaacccataaaagttgcattccccaagaaaaaccctggtgcttgggggggaaccacaggtgacttccacaatcaatggtttg

SEQ ID NO: 90209 - DNA, 950 bp, Glycine max
  Clone ID: PAT_MRT3847_5246C.1
cccctttctctctcttgatcctaattcatcattattccacaatttccacaatgtccagcagtggtagtcacggtacagaaggctcatcaagcaacattcccatagaatatcagcagcagcaacagcagagtccagtgacacttagccgctatgagtcacagaagagaagggactggaacacttttgggcaatacttgaagaaccagagacccccagttcctctctctcagtgtaattgcaaccaggtgcttgatttcctccgttatctggaccagtttgggaagaccaaggttcaccttcaagggtgcatgttctatgggcagccggaacccccggcaccctgcacctgccctcttaggcaggcctgggggagtctcgacgccctcataggcagacttagggctgcctacgaggaaaatggaggctccccagagactaacccttttgccagcggctccatccgcgtctaccttagggaggtcagggagtgccaggctaaggctagaggtataccttacaagaagaaaaagaagaccacaaagggaaatatggaagaatcttcaacctcctcctccatccacttctcttgaatattcttcctttggaagatgtgtgtttcacctaatattggataatgtggcatatatatataaattaaattggaggagttctttacttttaaggcacagttcttgggaggtttcgtttctatgtattcggtaatttgatggcaccccagtacttttaagtttctgtttatttgttaattacctgagaatttgtaattaagctcttagcagaaccgaaagctcgtcacacaatcgttggtttatgcctcagtgtatcttatattcaaacatgatttgcatatttacatatatagttgctccccttttcgcatgcatcggttcaataaatttgcgtatttcaataaatttgggttcatattt

SEQ ID NO: 90210 - DNA, 354 bp, Glycine max
  Clone ID: PAT_MRT3847_52470C.1
gcgccttttggtgtttttttgttgtttttttttttttggggggcgaaatttcttcctcaacttgcttgggtgcgttgggaggtacactaaataatgagttcatggggcttcatttggggctttgctctttgaataaaaattacaaaatataggcccagggtgcgtggctatggggatgcagctaaaacacactggacacatacatgggggcttggtttaaaatagggagggtggaagctcagttacttccgacacaacttgagcataatctgagctttagttctcttggggccctcgctgaatttcaccctttacagggtttggctggggcagagcacaagatggaggcctctt

SEQ ID NO: 90211 - DNA, 283 bp, Glycine max
  Clone ID: PAT_MRT3847_52471C.1
gtttaacctaaattgaacttaagaaaatttgatacgttgttaatactcggattttacttcacaccacctgagtattttcttttgttttctataatcaaacttctacttatattttgtaggagtgcatgtgttaattattcttaaataggttaagcattgatgtttatttacatgaaaacggcttggtatgatagaataaccggtaagaatagggggtcttattctatggtctaaactaatataggggtgatgatgaccgataaatatgaaccattggattggg

SEQ ID NO: 90212 - DNA, 720 bp, Glycine max
  Clone ID: PAT_MRT3847_52472C.1
acccacattatgagcacgaacgagaagaagaagaaaaagtcgtctctattgagccgcctcagggtggcggtgcagaaggtgaagttgctactaaacgccaccgtactcagccacgcgtggcatgctgcaaccattctccgcggcgtttctctgagcaaacgccagatcagtttcaacgaccgaccagggttgatgatgtgcactgcttccgatgaaactgattcagaggatttggtttctccagcgcatagccttcagaggaccataagttgtccctccgatgatgatatcgataagagagcagagatgtttataaataatttcagacgccagcttaagatggagaggcaaatctcgctgcagctacgttattgcagggagaatagtcttgaattggtgtctccctgaataattgttcagttttcttgaaatggaggacttttgtgttttttttccgagaaggatctccatttttgccgttcgcgttgatcgccacgagaacatgtacaaaaattgtgaaaaaaagattttggagtgattttgaaggataagttttaaggtttttttttttttttcaatttgtaaagttttggatttttgggattgttttaatcttgggtgatttgcaccaattaaaatagcttgggagcatatgctgtttttgtgaactgctccttttctttctcattgtcccccctataataaaataaatccttttag

SEQ ID NO: 90213 - DNA, 468 bp, Glycine max
  Clone ID: PAT_MRT3847_52473C.1
ggctcgagcagtactgcacgcgccttacggaggcagcgcctcatcaacgcgaactcgacagaagagctggagcggggaggatgttgatgccgaagcggacggcgcgagctatactgacgcgaaacgtgtgcctggggtgaactacataggaccacccaaggctgaacccgaacaatcagatgtcacaacggagagtaagcaatgtctgacatggcttgatcaacaaccaagtagaagcgtgaggtacctgagttgtggaagccgcggatctggctcagtgtgacaactgagagaaatagcaagagggtgggagaaaagtggccacagttcatgatgggcagtgaagaggccaacacaagactacaaaacaaagcctatacacgacacaagaacagcaacaacaacaatggattccgagtagagttcatggttgccaagagggctcatcgagagaaccaatgacagggg

SEQ ID NO: 90214 - DNA, 494 bp, Glycine max
  Clone ID: PAT_MRT3847_52474C.1
agtagtctactcggataacaagcttggcatttatcatgtgaacaaggttcttcttcctctagatttctttcaaaccaataaggctccagctttggctccaacaactcttgcaaaggctcctaaagctgccaagcaaaactcttctgaggatgatcaagaagaaacagaccaaaatcacaataaatccggggcagtgagtttggttagccttggtggagcaatgttgatgtcgattgggatagctttggtcacagtggcaaccatgtggagttgatccatatggcagctgcattttgagttttctttgtccttaatttcttttttctgctttttatttttgtttaaatttttgcatcttttgtggtttcttgtgtgttaatgttatgaaaagggaaagaatccttgaatggttaacgattatgctgttaaaccataattgtttgtttctaacattatggtttatatgaaaggctaggaatgatttcatctttgac

SEQ ID NO: 90215 - DNA, 465 bp, Glycine max
  Clone ID: PAT_MRT3847_52475C.1
ggtttttatgtgccgcgttcttccctcctctgtcttgtgccgccttcttggtctggttcttgcatacgtgttccgctcctcagtcgcgtgccttcgtctggctcaggtgccaagaagtggcttcagcttccccttccatggcgcctgttctcgtccacgcgtaggcttgcgcgtcctcttggcttccactggcggtccgctgtgggccctgttgagtgtcgtgcggtccctcatgttgaccgtcgagagtgtgcgctccccgggtccggcttacggcgtcgttcccgctgtggggtgcgggccctctcttcctctgtctgctgcgcctgctctggcctgtgcttgctagccgatctgcacgtgtgcaggctgcgctcggcctcgtgccgttctgcgtgtctggagcttttctttgcctcaggtaataatgtcgttttcaaaaatatggaaatgggtatgtcaaat

SEQ ID NO: 90216 - DNA, 1287 bp, Glycine max
  Clone ID: PAT_MRT3847_52476C.1
tacggctgcgaaaagacgacagaagggggatacggatagggaagagtattcagtgtctcgtgtagaataatcaatggaagtaggaatgtctctgaacgcgctggttcgtcttcctctctcgaattcacgcttccacgacgatgctgctccgatgattattaggcactctctgttttcgagccgaaagcaacagcagcagcagcagagttataaggttccacagcgtcatcaagtgttcgtggttgaagccaagggcaaaaagggaatgatgtctcgtcaatttcagcgcaatgctcctcctcctttacccaagattgaagacgatggcaatcccaaattcgtcatcttcattcgcatggccaatgtatacctttggtaccctcttagtatcgtatcaggcggcaccactgctaaaataatggttgcagctaaagataattttctcggcaagtatatctacaaagacactcttgatagaaatctcgctgctgttatctacagagatgagaaggaggtacagaaatctgcattcaaacagtaccgtgtattgcgaacagctactgatttcagatacggctacaaacttgttgagaatggcaatataagagctgcactttctaccactgatgttattgagcttccaacacaagataaactaaaaaccgtgcttgacaaagtgaaagacttttttggagatgcaaaggaatcttttggaaagataacatcattgggcactactgaaacagaggagtcagaggaagacacaaaagaaaaagccaaggttaaaggatgaaactatagctggaaatgatttgcttgaattgttatgagtagcctgtggccctatgagatcagaaagctcaattatgtttatggattggttaatggggaaacttctgtgcacaacaatgctactccaggttttgttcttagatctgtaaccatcaaaattgttttatattctgcagagtgaacaccatctttacgatactgattgatcactcgtgtatgttgtaatccatgatgctttggaatggatagcatgtaggatgacatgtaatggcaccgttatcagttcaagagattcctggaattgttgtgtaaattacgggttgtaatatctatgcattttatttgacaggaatttacttagagattgcatttcaactagaccaatttactctagaattgtgatcttctaaactcgatgcaatctggaaaatttgtagaattcaaaaaaaaaaaaaaaaaaaaaaaaaaaaaaaaaaaaaaaaaaaaaaaaaaaaa

SEQ ID NO: 90217 - DNA, 586 bp, Glycine max
  Clone ID: PAT_MRT3847_52477C.1
ccacgcgtccggttgaagccaagggcaaaaagggaatgatgtctcgtcaatttcagcgcaatgctcctcctcctttacccaagattgaagacgatggcaatcccaaattcgtcatcttcattcgcatggccaatgtaatcttacaataccttaccatttcttaattgattatatatttatgcctaaccttgcttcgcaggtatacctttggtaccctcttagtatcgtatcaggcggcaccactgctaaaataatggttgcagctaaagataattttctcggcaagtatatctacaaagacactcttgatagaaatctcgctgctgttatctacagagtaagattcagccccccccccccccttcaatttttttattttatattttatctctgtgtggcttgtgatactgctatataatgctattaatgtttatttaataggaaatttgaagaatttaattcatttaaatactccaacattttatttatgttgattagcgtgttttataatttatattttattgcattggtatttggtaaccagaggcaactaatatgttaatggaagaagtgaattttttttatg

SEQ ID NO: 90218 - DNA, 395 bp, Glycine max
  Clone ID: PAT_MRT3847_52478C.1
attacgcgcgcatatgggctcaatcctggtattttaggttctcgtcttttgggcaccataccttagtccattttcacagtatactgattggaatcaaatggcaacagtgatgaacaccattgaattttgatcctagcaagcagagctttttgtcaattatctattgaccttctcggtggaggaattttagtggacaaaactggagattggatcacacttatacaaaattttccatttagatacttgttgagagttgttgcttggaagaaaggctgcttaacggttaagattgcgattgccgggaatgcattagttaaaatgagtgttgggctttattggtacaagtgtttttaacatacatgaactgtccagagcatctagttgcatgtatgtgg

SEQ ID NO: 90219 - DNA, 422 bp, Glycine max
  Clone ID: PAT_MRT3847_52479C.1
tttgggggtttttttttttttttttttttttgagacaaaaacctaaagatccaatcttgtctcgaaggatgaacacccatttcaacggagaaaggattccccggatcccgatggccgcccatttgaacttaaacaccgtataatacagtttggtgaccacggggggaccaacgacctgtgccaaattgcaccatgatactttgccccggtaataataactccgtacccaataagcgttatcattgggtcgcactccagggcgcgcaaactaaccattttcgcctcttggactcgaaggttaagagacaaccatttctaaaaaaatatctgtataaaaaaattggctctcttgctacgtcaagaagagtgcacattaaaacccaccggatgctggacgtgacactttggagacaacctaaaaa

SEQ ID NO: 90220 - DNA, 460 bp, Glycine max
  Clone ID: PAT_MRT3847_5247C.1
tcactaaaaaaaagtttttcatcttaagagtttaaatttcatctaattagcattactgatcttggattttcaccatttttttctttctggaacttgaatttccaagaatatgatgactgttagacttaggatgggctatctccagtcctataaatccctggcaatgaattatgcgcttaaagagtttagtaattagatctattataatacttgttttactttacctatcctattatatattgtatattggtttgctttctgacattgattagtaattatcatgtactaaatgtgaaggcagcttcaatgttcaaaggaccagtgcctcctattgtccccttttctttagggtctcttggctttatgacccctttctgtatcctccaacatgtgttcatgcatattatcttttttattataatatctgtttccatttctacttggaagctgaacttaacca

SEQ ID NO: 90221 - DNA, 401 bp, Glycine max
  Clone ID: PAT_MRT3847_52480C.1
gaccatttttgttgatgaggagggatgaaacataacctgttaagacgacatgattgtgggcttttcaaatgggagccctgtagctgttaaccctgaaccacggatttgacgtacaccttttcttggaaagcttagccatggctcagaatggtcattctgcttgcaaatcttgggtttaaccaaacaatcttggcccaaaaaggagaatgttcttcatttacaaggagtatttaccctgtgatacaccatttggggtaaagaacctagcataactggctcctggaacacctaatgggtgacggatggggacttatggtatctgctgatagaaaccttgaatctgatgtatccaatggttggggggattgagacatatggaacgcgctcgtctggcctacact

SEQ ID NO: 90222 - DNA, 559 bp, Glycine max
  Clone ID: PAT_MRT3847_52481C.1
agaatcattgttcattcggcgaattatcctattcaaccactcattgcctttcgatctctctctctctcctgcgacacaacatctcattctaaattcccttcaatttcatctctcacacatccatacctcttcaaaccataaaaaaaaattaaaatgattcacctgttggattgaagagcttgttggggttagtatcatggttggttatgaagagtgaggctcaacctgagttgaataccttttaccccattaaaccagaatgtcaagcagatgttccagccactcgttttaaaccaagggctggcaaaactctaagtcaaagaagatggcaggcatcattctcccaagatggtcacttggatattgcaaaagtgctaagacgaatacagcgagggggtgtccatcctttcatcaagggggaagtgtgggagttcttgctaggttgctatgatcctaacagtacacttgaagaacggaatgagctcaagcaacgcaggagggggcagtatgatatgtggaaagctgaatgtcaaaagatggtcccagtcattgttagtgg

SEQ ID NO: 90223 - DNA, 240 bp, Glycine max
  Clone ID: PAT_MRT3847_52482C.1
cacccccttcttttctctgggtgtgggaaaacaacacgcagaaaattttcccccttttcatttttttcgtcaaaaaaatttttccacaatggaacccacactttctccgtttgcctttaattttttactaaaaactttacccttccaactctatttgttttccatccctaaaacaccctctagtctctccttctttcccacaaatttacaattgttccatgacaaccccaattggtcttt

SEQ ID NO: 90224 - DNA, 405 bp, Glycine max
  Clone ID: PAT_MRT3847_52483C.1
cttccgtttttatttggtaattatccgagttctgtcaaatgacagataggagaaagcttcaaagagagggcttgcttttgctagcggatcttgctgacgtgtttgcactatatctatttagaatgaatgacttaaatcccagtttggtacatgcttctggattggggggacgtgcacctacagggtgctggaacaaacgtacgatgaccgtagtgattgtggatccgtaccaatgagttgaagatgatcatggactcttacaacgatgatccgaaagctgctgttgttagccaaatattcgcagaacaatctgagactgtcgaacatgaacgcattattgttgaggataacggtacatacgactaccaagcactggatgcggcccatgattgacactacctaggg

SEQ ID NO: 90225 - DNA, 449 bp, Glycine max
  Clone ID: PAT_MRT3847_52484C.1
ccggggcgacccacgcggccgcccacgcgttcgcacgcccatattgagagacagagagccgcggcaggggcagaagggggaggccccatcaggcaccaccccaggccccacaccgccggaccagcaggcacaaaaccaaacaacgcgaccgcgccgaagggagacacacgccccggcggaacggaagagagagcgaccgcgggagcgacccacaacaaaagacaagcccgacacaagcaacccacccccacccccaaagcaaccacaacgccgccgaccaccaccccaaggaaaaggaaaccgcgaacaagcaccaagccactagagaggccgccacagaaccaggcaaagccgagccacacaacgggcaaaccaacccccagaaactaaggaagcaaaacgcaaaacaagcccccacaaacagccaaacgccggaggagccaaaaaca

SEQ ID NO: 90226 - DNA, 281 bp, Glycine max
  Clone ID: PAT_MRT3847_52485C.1
ttatttttttttttttctttttgtttttttttttttttctttttctccaaacaaaaaacgggtggaaacaaaaatcatgcccactggaatttttttggtcacattttccgggtgcgccctctaatttacaacattgatccatacacaagtttttcatactgccttttccacatgattgaggcatactattggaaccctttttgttgccctggggggtgcccgtttaatttaatacgacttaccactggcacggaagaacatggatacctgctgaatgaccc

SEQ ID NO: 90227 - DNA, 2418 bp, Glycine max
  unsure (1)..(2418): unsure at all n locations
  Clone ID: PAT_MRT3847_52486C.1
cacagacaatcatttatatactttacaatatttcttcgttcgcaccattgcaacacgcaagtgttgttgctgattcagttcgatccagtcttgtctctttatctctgcagaacctaaagggtggttttttccgggcaccaaaatttgtggggttcatcaaagttcgctcctttctgcaaaataaatttggcccaaaagtataatcaatactttgtatttcattttggataatgattgtggaggacgaaaattgtggtgttggttctgggggaggaggaagatggttgcggggttttggaagcttgattaggaggaagcaagttgattctgttcatgtcaggagacatggtcaattggctaggaagttgtcagctgttgatctcgttggaattggggttggagctaccataggagctggagtgtatattctcattggaacagttgctagagagcaagcaggaccagcacttgtgatatcacttctcattgctggaatagctgctggactgtcagctttttgctatgctgagcttgcatgtcggtgtccgtctgcggggagtgcttatcattatacatacatatgcattggaggattgcttggttggtcggttggtctctgattctagaatatacaattggtgcttcggcgttgctcgtggcataaccccaaatctggccttgtttttcggtggaacctactcatttttgggacataccttacccttgaaattgtggttgatccatgtgccattaattcttcttgttaccctcttgccttggaagacccacgcgtccggcacgggtttttgtgacaacagtaaacgtctgtgtcatgcttttcatcattttagttggtggatatctaggcttcaagtctggatgggttggatatgaactctccagcgggtattttccttatggagtgaatgggatgtttgctgggtctgcgatagttttcttttgatacattggttttgattcagttagctgtacatctgtagaggtaaaaaatcctcaacgagacttgccaattggcatatcaaccgcgttaactatatgttgcgttctgtatatgcttgtagcagcagttattgttggcttagtaccatattatgagttgaaccctgataccccaatctcctcagcattttctagctatgggatgcaatgggcagtgtaaggtatataataacaactggagctgttactgctctttttgccagtttgctgggttctgtgcttcctcagccacgcgtctttatggcaatggctagggatggtttattgcctcatttcttctcagacatccataaaggcacacagattcctttgaaaagcactattgtcactggtgtctttgcagctactcttgcattctttatggacgtttctcaattagcagggatggttagtgtgggaacactgcttgcatttaccactgttgcagtttcagttttgataatcagatatgtgccacctgatgaggtacccattccatcttcacttctaacatctgttgatccattattgaggcaatctagtggtgatattggggaagatgggtccgtaagtccagtagatcctgctagttattgtgagaatagtcacctagaggctctgcttgggcatcctttaatcataaaagaagtttgcaaagatgaacagaatgagaaagctaggcggaaacttgcttcatggaccatagcccttctatgtataggcattctcatagttaccagtgcggcttcagctgactggtgtcccaggattttgcgcttaacgttgtgcggaatgggtggtattcttcttttgtgcagtacaattgtactggcctgcgtaaagcaagatgatactaggcacagctttggacactcaggaggttttgcctgcccatttgttccattcttacctgctgcatgtattcttataaacacctacttactaatcgatcttggagttgctacatggctgcgagtttcggtatggatgttgataggagtacttgtatacttgttctatggccgcactcacagctcactgttgcatgcaatctatgttccctcagcatatgctgatgaaatccatcgatctcaagcaagtcatcttgcctagtatttgcacggcagctaccaaagttaccacacttcaggtctatatccatttgttacataattgtgacatattacattacatggcttacaccaatttgtaaatatcctattctaaaccaatgctttctttccgctatcagacggatgattactatgattatttatttgtttatttaaacaagtggccataaccggatgagtccatccttttacaaacttctccctatgaggcattaaccatgtatagtaaacatactcacgaaatactaaacaacatgcgcacaggtttattnnnnnnnnnnnnnng

SEQ ID NO: 90228 - DNA, 254 bp, Glycine max
  unsure (1)..(254): unsure at all n locations
  Clone ID: PAT_MRT3847_52487C.1
ggaaaatggggagctgttcgtggcttgtcatgtgtgaggatttcctagttgccgancgtgttatgcgtgcttcaggagtgtattgaatctgagatgtccttaatgcaacactcgagtataagttctacggacgttgtcctagagtagctcgagacgtagaggacaactttgatgcagatgattttgatgatgcgttgccggttaagaatcatcgtgacgatctagatcggaaccccaatgttagtcatattggc

SEQ ID NO: 90229 - DNA, 398 bp, Glycine max
  Clone ID: PAT_MRT3847_52488C.1
cttcagtttcaagacctaaatgagcacaaaagaagcatacatttggaggttattcgagatggtagaagagtcgagatctccatatatgatgttgttgttggtgatgttataccccttaacattggtaatcaggtccctgctgatggagttttgatcactggtcactctcttgcaattgatgaatcaagtatgactggggagagcaagattgtcgaaaaaattctagtgatccttttctgatttctggatgtaaagttgcagatggcagtggaactatgctggtaacagctgttggtattaatactgaatgggggcttctaatggccagcatttcagaagacaatggtgaagaaactcctttgcaggtacgcttaaatggtcttgctaccttaattggt

SEQ ID NO: 90230 - DNA, 778 bp, Glycine max
  Clone ID: PAT_MRT3847_52489C.1
taaatcttttggttactccatttttttctaattggtgacatatatactttatccaacaagcacaacatacttaataattaggttttctattaattctgttcttgattattgcaggccttgttttttggtggagaggacaacctaccttcttttttggctcgacataccttaccaggtcttgaaattgtggttgatccatgtgcagctgcattaattcttcttgtgaccctacttctgtgccttggaatcaaggagagttcaacggcccaatccattgtgacaacagtaaatgtctgtgtcatgcttttcatcattttaggtggtggatatctaggtttcaagtctggatgggttggatatgaactctccaccaggtgatgggtggtgttttgtgtctctgcattgttgagctcatgatctatagcatatcttttgtgatattgctgaaatttctcttttatctcaggtattttccttatggagtaatggggatgtttactgggtctgcgatagttttcttttcatacattggttttgattcagtgaccagcactgctgaggaggtaaaaaatcctcaacgagacttgccaattggcatatcaatagcgttaactatatgttgcattctgtatatgcttgtagcagcagttattgttggcttagtccatattatgagttgaactctgataccccaatctcctcagcattttctagctatgggatgcaatgggcagtgtaaggtttgctgtggcactttattttaattgtttaggctaaa

SEQ ID NO: 90231 - DNA, 369 bp, Glycine max
  Clone ID: PAT_MRT3847_5248C.1
acttattaccaggatcggttttaatacttagaaattatttatataacttccctattttagaatccatttagaagaagaaataatattttaatgatgaaaatgaggatttatattaatttaattaattaataatgaacatttaatattactatattaaatgtctctttagttagttttcttaccatacctaacacgtcaggtaaattaagcaccataccaacttttggcacctgtctcacgattactcaaaaagcactcgttgattctctcactatatctacaatagaaacatagaataaataaaaacacagtttctttttcttttgttcagctaatttttttattttccttatacaaaagtacaaattc

SEQ ID NO: 90232 - DNA, 344 bp, Glycine max
  Clone ID: PAT_MRT3847_52490C.1
aacagatcttagcattccattctgagacacgcttctctacagagctcttactgctatatctggggcgtgttcccttcattatcggaatgttaatcgttgccatctaattcgatatgctggagtgatcgccattgcaaggtggtaccctaaactatgatatttgactctgagtctcttgcacaacttctgtgatatagctcatggctgaattggcagaacactgctcattgttgacagaaatagtactttcacactgtcgaccaactacacatgctgtactaacacatcttgtaaaacgctgctgcacagaacttgagtcatgccacatggtatattgctctgga

SEQ ID NO: 90233 - DNA, 220 bp, Glycine max
  Clone ID: PAT_MRT3847_52491C.1
ggcgcatatcaacattgagtgcttgatggattatacggatgtccgtggctttatgaagcgagatgagtttgagcaactaatgctttcaattctggaacgtttgaagggacctatgcagaacgcacttgctgaagcaagtcttaccggtgaaaatgtacacacagttgatgcggttggttcacgttctcgtgtaccgtccattaacacaatattgacagag

SEQ ID NO: 90234 - DNA, 397 bp, Glycine max
  Clone ID: PAT_MRT3847_52492C.1
agagaaacagagacttgtgaaatttatttatgtattttttttagtctgccttatactttaggtgagatctttttgaatgttgggtggtggatttatctgatgcgtcatttttgccacccctagtgagaagtttaaagtaacttgcatccgtatggactaatcttgaatgttgtgtatctgttgcatggtgaactcctatttgttatataggttaatatgctgcgcattgcttttcatggaactgggtaccaaattctactgcctaatttcagtgtcaggttgcttagtgacattgtgaaagaatcctttggttgactaagatcaaggttatgtttgacccaacattttctgttctactcaaaaactaccttttatgccaaaaattagaactcaaaga

SEQ ID NO: 90235 - DNA, 310 bp, Glycine max
  Clone ID: PAT_MRT3847_52493C.1
ttcttttttacaagggcactgttagaagactatataatttagtaacttttgtgtttgctgcacgttgtaatcgaaagatggaactatctaacttcacaaacagaatcctcgagcatgctaaacaaaaacgggggcagagattcgatccttggaagattaagaagcaaatggccagctgattccttactgggacataccactaaccccctgctagcagccagaaaaattataacggtgaacttacaaatcaggcactttaataatgcatgctgacccttcagtggtgtgagagaaactggcaccaactttt

SEQ ID NO: 90236 - DNA, 310 bp, Glycine max
  Clone ID: PAT_MRT3847_52494C.1
gcaaaaaagagagcatgattcatggtcacttgacaagattatacaacttattgaattaagcacaaatttactaccgctctggtcgaggtttctcccgatcatgactgaaacttcgctttccggaagcactacttaatctaagagctgctaagtgcaacccaacacatacgcccttcataaataacataagcttaaactttgtgacctcttgattgtgaagcacagctcacaacgttagacctccccttgtgggcactcaaaagaatagcgagctgtttactttgcgggtgatccaaggtcaaggctacga

SEQ ID NO: 90237 - DNA, 528 bp, Glycine max
  unsure (1)..(528): unsure at all n locations
  Clone ID: PAT_MRT3847_52495C.1
ctnnattttntgatttttttttttttttttgtggaggatgggctttttttttgagagacgaaaaggacttcactaacttaatcataaatttaagataaaccagactaaggggtttttaaggtcattggtgggtcgctttttattgaaaaagaagatttccagttttattttattttgggggatatgatttcccttcaaaggggaactggcaagaccatattggcttcatcatttatattcaatattctctttgcccgtaacatggtatcaggggtgggcaccttaatggggggataagaaccttggggggtataaacagggtgttttaggggttcaacaaggggcacatttttaggaacttcaagaccttccctttttacaaggtcaaaggcttttcttaacaactcagggttgataacctggggggggtggatctcccataggggttttctgtccaggggtttaaaaacaaacgactccctgtttggctgccacaagggtgctttacaaggtttattacctttaccc

SEQ ID NO: 90238 - DNA, 103 bp, Glycine max
  Clone ID: PAT_MRT3847_52496C.1
ggctcgagcgctatcttcgggccaaattgtgtatacattctccgcaccgctagacttgctcagtattctacgataagacggtgtgattaataaagttgcagcg

SEQ ID NO: 90239 - DNA, 265 bp, Glycine max
  Clone ID: PAT_MRT3847_52497C.1
atttaaattcttaaagtgtgcacaaaggtttagacggaaaaaaaaaaaaaaaaaaaaaaaaaaaaaaaaaaaaaaaaaaaaaaaaaaaaaaaaaaaaaacggaaaaaaaaaaaaaaaaaaaaaaaaaaaacataggcgtgcataaaaaaaaataaaacttttatataaatgccccttaaatcaaattgacttatagcaatataagaccgcactgactggaaaaaccaatactttaacaaacttaatgggcaataaataaaatccc

SEQ ID NO: 90240 - DNA, 325 bp, Glycine max
  unsure (1)..(325): unsure at all n locations
  Clone ID: PAT_MRT3847_52498C.1
acgngaaaanccaccggaggggaagggggaagagaagaaaccngaagagaaaaaaccagaagaaaaacccaaagagaggggggnggnnnngaagancaaacngcactgngacggnngctttgcgaaaanncgaagaaccattgtgggggggaaaggngnncaancggngagccccgacggaagcaaggacggggggacagngaagggaacaanggacgngaaggagatggngncgnnccngaacgagaagcngaagcgaaacgnggaagnggngccnccnccgnagaaagacgncgnnnngaaagagaaagaaggggnggaaacc

SEQ ID NO: 90241 - DNA, 453 bp, Glycine max
  Clone ID: PAT_MRT3847_52499C.1
atcaaatcttcaaaaagttaactgatgtgcttgcatattgtttctattcagaattgcaaacacgccgagaacctgcccttccccttttataaaaccacccccggccaaaacaaaggggggcaggctgggttaaaaataaaccctccccacaaaaaccaaataaaaggcgccctccctgtttcccaaagtcgccaacccaaggtggcggacctaacctcccactacggattgtccccccgggtggggccttttactgttaaaaaaaccctaaagaaggggctcgagaaaaaactcggcgcccatacctctgggaaaggggaagctatggacccttcatgatgggtactcaaacaagattcttcgggggggggccccacagcgggcaaaaaacagggctgtgtggaaaaataaatgggggccgggccgcccccaaacccaggacttagagttctt

SEQ ID NO: 90242 - DNA, 362 bp, Glycine max
  Clone ID: PAT_MRT3847_5249C.1
actcgctgtattgggagttcatctccgcattcgcgcaaatttcatatcgatgttcaaaggtacagtatttacacagctgatcaatgcagggcttcaacagcccgacttgccacgcggatgctcatgcctaacatttaagctcatccttggcgctcaacgtgccgtcgtttcccttagacaattggattgggctggcacacgttgtaatcaagggtttcatgatgaaattgcaagactttggagggtgtttcatataccatatagttatactaaagggtgtgttgtaggtcatcattaacaactggtggagtaccggttttactctactcttaatttcctgttgggtcttttttaattaaatt

SEQ ID NO: 90243 - DNA, 1086 bp, Glycine max
  Clone ID: PAT_MRT3847_524C.1
acttacattggggtcttcattttttttttcttttgtatgtgaataatttgtttttaattcctatatttttattttcaaattcaaaataaacagaagattgtagggactaaaacaatacacacacacacacacacacatatatatatatatatatatatatatattacaaattatataaaattagaacatttatttaagttgcagatattattcccaattccaatgaattgacacgcttgatatcaaaatcctgccatggtttgaggattaggatgtaagggtacccttctatatgcaattcgcacttcctatcctaaaatagtaaaattattgagatattaaataatttagcattcaactaaaattttgtagatataatttatataaaaaaaaaaattataatccaatggtaaattttaaaataaaattacgcaataaaatattattaaatggtgtaaagttgtaaagaaaatcaaccccgtaaatcaaaaagtttcatttcatccatcacaaaaagatacgactcattctgactgtttagagattattatcaaaacaatgacgagacaactaccacagtttcatgcaaaaacagggaaattaaggaacaaatgccactactaagccaccatgtgagaaggtgtttcgtacagaaaactgttggtcattggctactttcatcttttcctgtcattatgtcctcttcttcatccactggagcataccattctggccacttcttagagttgctcagcctgtagttcaggagcagttcttcatcttgaagactcctagttgctaccagaacaacagttttcagggtaagaacatctgattgactatttcttgaaactccagatttgaaccaaaagctgccaagtctcttgatgtttacttctgcggttccaaataatatgttgggtatgtaaactctcatgttgttttcagtcaatggaaagtcataagggcaaatcatgacatttggaagcatcccttttgcggggtgattagcaaaatgtgccaaggccaacgggtttttgcgctcgactacatcatcattttcattgtcattttctacctgggaac

SEQ ID NO: 90244 - DNA, 443 bp, Glycine max
  Clone ID: PAT_MRT3847_52500C.1
tcgtcgacgcgtgctgcaaaggatgcaagatgactgtcacgagcgcgctacaaggaatatatggggtgacgtaagttaacttggaccgaatagccaacaaatcaacacttgtagactacgtaaagccctccaaagccgaacttcgtgtaccataccgaacatcgaagaatgccaagctgtcgccctaccttccatactacgtgcttgcacatttatacacactatcagtgtacgactggaaaacttcactcacgtacttgcgactcatcaaccacgccaacttgtactaactcgcacttactaactcaactgatgttcattatactacagcattaatatacgaatatccctcatctttttctctcatctaacggacattcttcacttgattgtaaatacactgtactaattaggcattctaattatagtcctttaccatttta

SEQ ID NO: 90245 - DNA, 391 bp, Glycine max
  Clone ID: PAT_MRT3847_52501C.1
cccacgcgtccggcattttccctgatttaatttggtaatataaggttaacttgcatgtaaattttgctttcaaagacaaagcaaagaggtagcagggcgtccgaattcattaatctctaaagtctcgagtctgaaactaaagacaaccaagtgttagtgttacacacacagacacagcatccaatatccatcgagagatgttggaggcgaagtgtctgaagaaagcagtggttccttccactctgattgaggacccttctcctggaagccttcagtgcacacgtcttgctctccgtgtttgcgaggacccaagttcttgttttgtctacatagcctccggtccccacatttataagctccacattgctctgggagaatcttcagtcagcga

SEQ ID NO: 90246 - DNA, 477 bp, Glycine max
  Clone ID: PAT_MRT3847_52502C.1
catgccctgccgggagaaacaagtactctatggactagagttacgtcgagaagacatcacacagatactttagttactgggtggggggcctgagaaggccacatgtggaggctgctagaaatgtggagtgcgtctagaaactagtgatgcaactgaggatcatgctgcctctgtgacccatgcacactgcgactaggtcactatgtataaccttgaagcagagatagcagttatatatgtatgctcaagaaataagaagatgctattgatttgggagctctagaatggagtgtgtgctatggcatgcgatgctctttcataaatatgtcatccgtatcatcaatctttgatcatcaaagactactgcaggtgttagtatgaagttacagtatgcagtgctagaaggaagcttcaggagaagtgtctgttcatggaccatttactcaatctgaatttctcggtttgcttggaataaat

SEQ ID NO: 90247 - DNA, 1172 bp, Glycine max
  Clone ID: PAT_MRT3847_52503C.1
tacggctgcgagaagacgacagaaggggcttcttcttcttcgtacatgtctatcacttcttccacttccttcaagtccctcactatggccgagtcctgcctcctctcttctccctcctcactcttcaacaacaaaaccaaaccctctctattctcacccccctccaaacccctcacactccaattctcatgcatcaactcctcagtctctctctccctcgccgcgcgagctcaccgctctcccctcgtcacgcgcgtggcccaaacttccgattgggcccaacaagaagaagacgacaccgccaccttccaagacgaagaacagggccttagtgaaacccaagcgggcctttccagttgggagcccaacggcgaagacgccggagaagagagcttcgccgaaccgccggaagaggcaaagctcttcgttgggaacttgccttacgacgttgatagccagaaattggccatgctcttcgaacaagccggaaccgttgaaatcgccgaggttatttataatagggaaactgaccagagtcgcggttttgggtttgtgacgatgagtaccgttgaagaagctgagaacgccgtggagaaattcagtcgttacgattttgatggaagattgttgactgttaataaggcttctccaagaggaactcggccggaacgcccgccgcctcgtcactcctttgagccttccttatcaatctatgttggtaatttgccatgggatgttgataatacccggctggagcaaattttcagtgaacatggtaaggttgaggatgctcgggtggtctatgacagagagactggtcgatcacgtggttttggctttgtcacgatgtccagtgagactgatatgaatgatgcaattgctgcccttgatggtcagagtttggatgggagggcaatcagagtgaatgttgcagcccaaaggcctaaacctagctcgttttgagtggtaacttgagtgatcttccaagtccggctgattgagtttccttttaatggctaagtatacagtggcgttttttgtatcttctttgggagctggtttcagattagatttgcaagttgtaatgttattaattttgtgtccagatgaaaatgatttaagttactattccttttctagggattttgaagaaagtcttgatttttttaacc

SEQ ID NO: 90248 - DNA, 1134 bp, Glycine max
  Clone ID: PAT_MRT3847_52504C.1
tagatcgcgatctagaactagtcggacgcgtgggttcaagttgaagttctcaatctgattgcaaaggagaaaatgggtgataatgattcgctctccgaattcctcgcatctgcagtcgacgctgcttgcaaggctggtgagattattcggaaaggtttctatcagaccaagaacgtgcagcacaaaggactggttgatttggtcactgaaactgatcaagcatgtgaagatctcatatttactcatctcaagcaactttactccactcataagttcattggggaggaaaccacagctgctggtggcaatgcagaacttacagatgaacccacgtggatagttgatcctctcgatggaactactaattttgtgcatgggttcccctttgtttgtgtctccatcggtcttacaattgggaaagttcctacagttggcgttgtttacaatccaataattaatgagcttttcactggaattcgtgggaaaggtgcttttctaaatgggaaccctataaaagtatcatcacaaactgaactaatgagcgctcttcttgtgactgaggttggaacaaaacgtgacaagttaacaatagatgcctgtacaaataggatcaatagcttgcttttcaaggtgagatcccttcgaatgactggctcctgtgctttaaacctttgcggaattgcatgtggaaggctggatgtatgctttgaacttggctttggaggtccttgggatgtggcaggcggtgctgtcattgttagagaagccggaggtgttatatttgatccgtctggtgcagattttgacatcacatctcagcgggtggcagcttccaaccctttcttgaaggatgcccttgttgatgttctgcaccaaatcgtgtgagaagcttactattaatcaatgacaaggagaaattgagtcagccttatgttaattcatttcccttttgttaaaatgctttgaattgtgggattcatggcgtcaattatttttctaattctcttgtgaccttaccaaaatattagtatttattctttattttttttctccaaaaatctcacataggtaacgatgcaacttgctttaaaataattccatcgcatagcctatgagctgctgcttcaacttgtc

SEQ ID NO: 90249 - DNA, 454 bp, Glycine max
  unsure (1)..(454): unsure at all n locations
  Clone ID: PAT_MRT3847_52505C.1
tcgcgtgggcgagcaacgagacgctttgtaatggtttccaaacctaccactacggtggcggcaatttcgtcaaggcttgagtggcgcattgaccattttgaaaagctgatgaaattgatgaaaaatggccagaatctgatcagcaaacagatctcctgcacttctcgatcctcagttgtatgggagctgcacgtttacccaaacggaaaacgcgaagaagacgttaataatgtttcatttttcctgcgccaagtctgactgcagcggngcgaagacccagtaatgaccgaattccaaatttatgcattggacgcgagcgattgccggatcagcgtctgcagagacaccaaagacttttccaatcagcagggcaggggaaagtttcaagtgcatcgcgacaaaatgcttgcttccctccgacccgacggtaaaaatgttttgttttttgcttttt

SEQ ID NO: 90250 - DNA, 249 bp, Glycine max
  Clone ID: PAT_MRT3847_52506C.1
tttgagataaaaacagagatcatactcattctataccttgaggaatgaataggctaccccatcagtggatatatgaaccatttacattgttatgaaaccacaggctaaacttaggcatgaaaagatgtgatactaaaagaggcgaataggattttgtagcctcaaacgggcattcggttggatgatgagaatccaatacccatacatctctactgcagaacaccctgcctctgccagagcttaataaga

SEQ ID NO: 90251 - DNA, 438 bp, Glycine max
  Clone ID: PAT_MRT3847_52507C.1
gcccaacggaaatgataccattgtgttcccacttaataaaaaaccgctccctttctacacttattaacaccacacaagacgcgaaaattgtacccggttaatgaaggaccaataccttgaagcacaccatatttccctatatggagggatattattatctttggagaaaacaatggtcattttctgacacctgactaaaaaggttgtccgatcacaattccccacttatttcgacctggaaaaatttttccaataacccgtgcaccctaccgaatgggcagcctcacatttatcccagatcagtcactgaacaatactcatgatgataaaactgtcaggaccagattcctaaggtatctgccgaacctggaggagaggcaatttctgtatgaagcaacactgctactgttattatttactggaagctgaggaacttca

SEQ ID NO: 90252 - DNA, 431 bp, Glycine max
  Clone ID: PAT_MRT3847_52508C.1
taaaaaaaaaaataacaaaataacttgaaaaatttaaataaaaaaaaaaaaaataaggggatgaggcaaatttagaaagcgatgaaaatgccatacgttcaaaaaaattcactatattaatgaaacactggctatcgttcccgtactccataggtgaaatgcgcatgtttgtatgcttgctgtggtagcacacaccatctttgtctgtaagaccattactgatgtgtgcgttgaatcaacaaataattacatgcatctccaacaatatacatcatactccttttcttttaaccaacatgcttacttttatgccagtgacctcgaatttcattccatggacacatttttgttcaatatagatgtcaccgtactctctaatatcccatactacaaaaaacattgattatgggtggacaaatttatcttctcct

SEQ ID NO: 90253 - DNA, 176 bp, Glycine max
  Clone ID: PAT_MRT3847_52509C.1
cgcaaaccttaccatcccctactaattttttttttttgatcctaaaaaaaaattgccttgtctcttgcacattgggaggaggactacaacttcatagcttgcctaaaaacaagcttgcatattataaaaagccttattggtcagactcacattcttgtttccctgaactaatttcc

SEQ ID NO: 90254 - DNA, 506 bp, Glycine max
  Clone ID: PAT_MRT3847_5250C.1
tgtattcaaagagttgcttatctttttgattaacacagctctcaggaacaaccaacaatttgaacccaagctaagcacagcatctattgtgctagcatgagatacaacacaagcacacgctgtcaatttaagtgtatcggatcctcacatctgtaattgtgaaataggtatatcacggaggaagaacatcctgctgtatataaagcaggaaaggaaaagggaagtagataaacagagaactctggctcggaagcatgcattctttcagagtatttctaggttctagcaagaaacatctaaaagcttccgtggttgataaaggcctctgaaggaaactatataatgggtcgacgggcattacttgtaacatgaaaaaatcgcttgaagaaatattggatatacaccgttaaggtagaaagaaggtccaatcttctgcagctggctttgtataaccctcttcgtcttatgacataccaaaaatctggtacctaatagctaaagaagct

SEQ ID NO: 90255 - DNA, 143 bp, Glycine max
  Clone ID: PAT_MRT3847_52510C.1
gtcagcagatcttcctctcaagcttagattctcagcttctcaaatctccttttcgggaatctgatcccaaaataagacttggactataatgtcctcaagaaaatttcaaaatgacaagtttagattgccatgctgtgccttcc

SEQ ID NO: 90256 - DNA, 301 bp, Glycine max
  Clone ID: PAT_MRT3847_52511C.1
cgctcttcttgaggcttcatttctttggatttctggtggttcacgtctggttcaatctttgattacagaaactctaccttcatgggtattatcaacccaagggttatagcacgaagggggagaaactggaattgcggttgctattctgagaggttatgcgcttgcatgttatgcgggacatggcgggacatttcgcagaggtttcgactcttcatacccagcgtgaaaaccactgccaaacgtccttgaaatacatttacaatttcttgcacgtgcactagatggaaaaatatctgttagc

SEQ ID NO: 90257 - DNA, 957 bp, Glycine max
  Clone ID: PAT_MRT3847_52512C.1
tagtgaccttagagaacttgacgcccacgcgtccgcccacgcgtccggctgaagaaaacctaagcttagaattagaaacaaagaaaagaagaaaggaaagaattgatcgttgaaaatgcagggaggaaagaaagcgggagagtccattaaggaaacagctacaaacattggtgcttctgccaaggctggcatggagaagaccaaggccactgtccaagagaaggcagaaagaatgacagcacgtgatccggtgcaaaaggagttggcaacccaaaagaaagaggcaaagatgaaccaggcggagctggacaagcaggcggcgcgtcagcataacacggcggccaaacagtccgccaccacggctgggcacatgggacatggccaccacaccaccggaaccgggactggaaccgccacgtattccaccaccggggaatatggtcagcccatgggggcccaccagacgtcggcaatgcctggccatggaaccgggcagcccacgggccatgtcaccgaaggagtggtgggctcacatcccattggaaccaacagagggccgggtgggaccgctacagctcataatacccgtgcgggtggaaagccgaatgattatgggtatgggactgggggtacttaattaatgatgattatatcatcaaggtttattggcaatagtttaataataaggtttattaaatgtagttagtttggggtatggcttttgtacttgtttgtttggttatctttgtttgtctgcttttctctccacttgttatggagagacttgggtgtggttatgacagtgttttcactacgtggaaacgttatatgtggtaaacttgtacttgtatcatttcgtgataataattaaataaaatagtggttgtgtaaaaaaaaaaaaaaatatttaaaaaaaattctataaaaagttaaaaaatataataaaaaaattttttt

SEQ ID NO: 90258 - DNA, 395 bp, Glycine max
  unsure (1)..(395): unsure at all n locations
  Clone ID: PAT_MRT3847_52513C.1
caaaatgacaacaacatggatcctcagcgtaaagcattttatgaatacttctcagctctcatggagccatgggatgggccagctcttatagcatttactgatgggcactatcttggagcaaccttggacaggaatgggctgcgaccaggccgcttttatgtcacccacagtggacgagttgtaatggcgagtgaagttggggttgtagacattcctcttgaagacgtgagtcagaaaggaggactaaatcctggcatgatgcttctagtggattttgagaagcatattgttgtgaatgatgatgccttaaaggaacagtattcattggcaaggccatatggggatggctcaaaagcagaagtagaactcaaaacatagntgattctgtcatgaat

SEQ ID NO: 90259 - DNA, 383 bp, Glycine max
  unsure (1)..(383): unsure at all n locations
  Clone ID: PAT_MRT3847_52514C.1
cgtctgcgtctttaagggcaacctctacggcgccgacagtaacggccgcaccgtcagggtgcggccggatgacggtggcctcaccctcgccgccgagcctgtctttggtggcgacaagaagttcctcgtggagtccgagggcgcgctgctgctcgtcgacatgtacctctcctactactcctgcacgcagggtttgttccacgaggatttcgacgaggaagatgtggccgggatggggtgggagaggacggtgaagtttgacgtgttcaggctcgacgaggaggggaagaagtgggtggaattgaccgatttacgggacagggtgtcaggttttgtgcatgaatgatccnacaaggaagaagtcgcccggtatggggtggaaa

SEQ ID NO: 90260 - DNA, 547 bp, Glycine max
  Clone ID: PAT_MRT3847_52515C.1
gtttttttttttgatgtcactatcaatttgtttgcacaggttttttccaagcaagtataacagagagataaagtctttgaagatggaggtggagactctgctgatggagatcatacaaagcagaaaagactgtgtggagattgggaggagcaattcttatgggaatgatttgttggggatgctcctgaatgagatgcagaagaagaaaaaagggaatggaaacaacaacagcagcatcaatctgcagctagtgatggatcaatgcaaaacattcttctttgcaggacatgaaaccactgcacttttactcacttggacagttatgttactagccagcaacacatcttggcaagacaaagtcagagctgaggttaaaagtgtctgcaatgggggaattccctctctggatcaactctccaagctcactcttttgcatatggtgatcaacgaatcaatgaggttgtatcccccagcatctgtgctccctagaatggtgttcgaagacatagtgctaggtgacctttatatccctaagggcctatcaatt

SEQ ID NO: 90261 - DNA, 201 bp, Glycine max
  Clone ID: PAT_MRT3847_52516C.1
tcagggcgaaaaacaccacaacccgctttccacaccacggacgagattataagccagaaaaccatctggttacacacacaatattcaagcctttgatactatacttggttaacaagccacgatgatctttggggtggctatgaagggtacacaaacatttatcaggatagccactttgtggggctatgaagggtacaaaaa

SEQ ID NO: 90262 - DNA, 338 bp, Glycine max
  Clone ID: PAT_MRT3847_52517C.1
cttccaaaaacccccacatttttatggggcaccccccttttttccctttatataatttattaggattaggtataattaagggataaaaagaaaatccaaaggggaaaaaaagaaagacccaggggttttttttttattttaaaaaaaaagggcacaccacccccttggttggaacaaaaaagagtcggggggaccttggagcggggagtccaaacacgtaacccagggccatttaactgggtttaattccatcgggcaatccccacgggaagcagggaaaaaaataaccccccgccaattaaagcgcgtaaagccccaacaccattccggggaaggat

SEQ ID NO: 90263 - DNA, 168 bp, Glycine max
  Clone ID: PAT_MRT3847_52518C.1
gacaccatcgactactcttcttagttccagcacaataagctcttcatttctcccagactttcttttccttcaccagcaatgtcagcaggagttcacacttttgttcttcccggacctcatgcagtcccctatgatcactttccatgccaccttctgggtccgtctctt

SEQ ID NO: 90264 - DNA, 458 bp, Glycine max
  Clone ID: PAT_MRT3847_52519C.1
gtgcctatcatggtggtcgagtggacagttctatcatgcatagcaccgacttcagagcctacgggcgtaccaagaaggctcacatgaactattgcttggaaatatacatcttgacatcctctgaccctactgatggacctaggggaagtctcgctggcaatgctcttgaggcgctctatgatccgcctgaatgataacgactccttacatgaagaacacatagagactcttgccagatggcccaggcgctggaatcgaatctcaggaaaccatcagataccactacgacatattgacgctgcgattaacgacactgctctagttattgattgacatacccccgaccaatggccttcttcctcagacgcccatgcacaccaagagcctgactgttcttaagaaacacatgatcctgagactgatctatgaaagagccaaggaaagcattacgcagaaag

SEQ ID NO: 90265 - DNA, 213 bp, Glycine max
  unsure (1)..(213): unsure at all n locations
  Clone ID: PAT_MRT3847_5251C.1
aaagccatgggccacctccaacttctctattgttctctccgtctccctagccttctttttggtgctacntaccaaggcacactcgaccggatancgtttcttncaccttcaacaagttcaacncagtccaacnaaacatnatgctcnaaaaaagatgctagtatttcancctctggggtgtacaactcaccaantnggcagcaanggggtccc

SEQ ID NO: 90266 - DNA, 745 bp, Glycine max
  unsure (1)..(745): unsure at all n locations
  Clone ID: PAT_MRT3847_52520C.1
ccacgcgtccgcgtttctgcacgcttttgttgccgttgccgcttcagttttggcggcaaaatttgcaggttttgtgcgtcgatttgtatggtagtttgggtaatcgattgtgtgaagaagctccgaagcagcaatggtagtcgaagctcaaatcatcaagcctatcggcaagggcatcgttcacagaatctgcgccggtcaagtcatcctcgacctctcttccgccgtcaaggaactcgtcgaaaacagcttggacgccggcgccaccagcatcgaaatctccctcaaagacttcggcgaacagtggtttcaagtcatcgacaacggttgcggcatttccccaaacaatttcaaggttcttgcgctgaagcatcatacgtcaaagttatcggaatttcacgatcttcagtctctgacgacttttggattccgaggggaggcgctgagttcgctctgcgcgttggggaacttgaccgttgaaacgagaacggcgagcgaaccggtcgcaacgcacttgacttttgataattccggtgttcttgtggcggaaaggaaaacggcacggcaaattggcaccactgttatggttaagaagttgttctccaatttgcctgtgagaagcaaggagtttagtcgtaacatacgtagggaatatggcangttggtttctctattgaatgcttatgcccttatagcgaaaggagttcgttttgtttgcaccaatacaacntgtaaaatgtgaggt

SEQ ID NO: 90267 - DNA, 418 bp, Glycine max
  unsure (1)..(418): unsure at all n locations
  Clone ID: PAT_MRT3847_52521C.1
actaggatcctgtacagcggccgtccttttttttataggatattattttatggaacaaagggctgactacattgcaaagggaaatcctgctgtaaaaatacatacttcccgnttaaggcattttacaccttgatcggattggacgaactgctgatccatatactataaacagtattctttccaaacgctggataagattgctggatacattttgaatacatcttacatcatcttgtaccaattaaacgactcattaatggactgcaggcctgttatataaaagtgtgtaaattgagttttttagctaccattttccgaacaaataaattgtcagatcagactgtacttataccgaatgttacaagctgctggggaagtccatacatatcctttaattggctaccttggacattttcat

SEQ ID NO: 90268 - DNA, 507 bp, Glycine max
  unsure (1)..(507): unsure at all n locations
  Clone ID: PAT_MRT3847_52522C.1
ggagaccccgcaacaaagaagccanagcgccagacagagagaaggaaacacagaaggcaggagccgaaccacagaccaaaacgagcaaccggaaggagcgcacacgcacgagaagagaagcgcaagggaacaccnacttcagcttggcttgtttacaagggggtacanaccncttgagtggtctaactatcctatctcctatttgccaggggggttggaggcgaacatattggttgaattgatcttgcaacatagcaacatcaaacaattatggaaaggcataaagcatctgccaaatttaagagctttggatctcagttactccaagaatcttattgaggctccagactttggaggggtccttaatcttgagtggataattcttgaaggatgcacaaatcttgcacggatccatccatcaggtggacttctaagaaaactagctgtcttgaatttgaaaaactgcattaggctagtaagtctacccagcaacatatgtgaggctaa

SEQ ID NO: 90269 - DNA, 342 bp, Glycine max
  Clone ID: PAT_MRT3847_52523C.1
cttcttgatcttttcagtcgacagactgtacatcacaggtgtcatagggtgcataaaggctcaccaatgtgcccaataaccacggcctcacatacttaccatatcacgatactaaggcaattgacaattctcatatgcccaccgatcagctgtcgtacactaacagatcccatgtctaaaagaatctttggttaacaccactttctacacctacctactatgtacattctacaactgattgcagctcagctgatctcagtcagtcattatagcttggcactctagtacctttgggactcagctctctactcttcggcacttcccactatctattatccctgg

SEQ ID NO: 90270 - DNA, 357 bp, Glycine max
  Clone ID: PAT_MRT3847_52524C.1
taagcgcggggttgggctcgagtaactctctaatatatacactaacttcttttcaataccgtaacttcctaaagggggggccctttcaagatgggttggcctctatcataacttagattttagaacatatatagtattgaagcctaaaatattcttaagaaaaaagcaattataaactcttaatcaccaacacattatttcatgtatatagaagcaacaaggccttcatctgttaacggttcaacaataaccctaccatggttgattcctctgagtgagaccctttatagataaaaggccaacactgcacatatcattgattatgtctcatcatggctaacatttaaagatctttac

SEQ ID NO: 90271 - DNA, 303 bp, Glycine max
  Clone ID: PAT_MRT3847_52525C.1
ttaaccacatctctcgaaacttaggggaaatcctttactacaaggggggggccagtgagagggagttatatactactaaaaaggacgccaaagacccgaaaacattggggattactaaaaatccggcccccgtcattcattcgttgaataatgaaagtttcacagagcacccagggctttgggaactgaaaatgggagggtcctgctcggttctgcccacggggcaatgagggtgctgggacaggccgtgagcagcgcaatgaacatgaaaatgatggttgcttgcggcgaccactctaggcg

SEQ ID NO: 90272 - DNA, 403 bp, Glycine max
  Clone ID: PAT_MRT3847_52526C.1
aaagaaagaatctttttcttttataaaaattgaggggaacgaaccgggcgggggggtgggaactaacaagttccccgacatacatccaattaggacggcggcgcatagccaagactacagctaggactaccaggagcccgctccagcgccgctggttgacccgacagagtttacgtcatggtcgttttacaaagcagggatagcagactttgcggccacttttatgtttctctacatcactgacttaaccggtattggagtcccccgggctaagtctaagtgtaataccgctgggaatcaaggaatcccttgggccttcggtgggatgatcttcgccctcctttactgaaccgctggcatcttagggggacacataaacccggcggtgacattttggctgttt

SEQ ID NO: 90273 - DNA, 671 bp, Glycine max
  Clone ID: PAT_MRT3847_52527C.1
gaagacgacagaagggtgtattgacaaaacattattttttttttctgacacacataccaaccaaattaaatatagacataggcctaaatcgtctatattgtcggaccaaagccatagcattttcctttaccctgataatctctacctctaaagctatatctatttgagccacctctactttggtaaccactgagagttcccaccacctactccaatggaattttcattggaaccttcatcgcttgaggcatttgctatgttccagctactatttcttctccaaatgcggcgagaagacgacagaagggatccataattccaattacttttcttgccccaattagaatctttatttctaggacccccaaaactccagttagaattcttgttttcattcccaatgctccaaaaggatttgttagagttccaagcctagttaccactattcatagagttccaatcgttttttcttaccatgatattcaccatattgctaaaaacatggagagtgtacttgttgtgtattgcgatggtgaaatgatttcatcatatgaagggggattatttgaatatcttagtgggtctaaaagtcatcagaataagtgaggatacatcgcttgatgctttaggaaaataattacaaacactatcaaaggtagcataattttact

SEQ ID NO: 90274 - DNA, 317 bp, Glycine max
  Clone ID: PAT_MRT3847_52528C.1
tccacgcgtccgtgctctcgaccgggtataggggggtatggcattggtctcacagttttgggaaatctacccatatacgaaatgcaggctgcagattacatcttccctgcttccaccagaacgccaatgaagctcttcaatttagataccgaagtgggaaccaattgaatagtggcggtctaacagagagagccccttatggggctgagggacatggtgggcattaccactctcagactgctgagggtgggatgtggcatgttcctggcatcaaagtatggcagcgtgaatgtggacgaccgtaagtgagatagaac

SEQ ID NO: 90275 - DNA, 227 bp, Glycine max
  Clone ID: PAT_MRT3847_52529C.1
attggtatagggttaagatttaaactcgttcaattgtccttccccacactgttgtacaggaaaaaacttacttgttccggcagctctaataaaggacgctacctaaaatacccatgcaagaaccaaaagctgccaaacttggcgtagcaccaaacggaatacaatatatcgtcactcagaggcgggataagcctaggatggtcctacaaaataaagacgcccggaac

SEQ ID NO: 90276 - DNA, 230 bp, Glycine max
  Clone ID: PAT_MRT3847_5252C.1
gatctaaccaacagaccgttttagggagacgcgtcataacccttctgcttttctactcactgtcataggcaactttatatacaaaccgactctaacaaacataaggtctgaaaagttgaagcgacaaacagaagattctagagtgcaactccatgctttgaaagacaccatggataagagcaccaccatctatagaccattgcaagttagccagaaggaactccttgaag

SEQ ID NO: 90277 - DNA, 322 bp, Glycine max
  Clone ID: PAT_MRT3847_52530C.1
gaatcccaccactccagtgttggatgagtcccactaacatatccatcatatctggatccccctttcttgcaagcacgtcaaaaacctcgagaaggtttgtgcgggcttggctcgtggcgcaaaggacaatctcctgagggttaatggacctgctaagatgcccactaatgttcttcacatcactaccaagacgttcccctgtggtgaatgtaccaacacatgggatatatttgaacttcctgttcacatgatagtgattgacctctacaggttcgcacatgtggttaagcagatcacctgtatcacaattgaacctcgcgtg

SEQ ID NO: 90278 - DNA, 562 bp, Glycine max
  unsure (1)..(562): unsure at all n locations
  Clone ID: PAT_MRT3847_52531C.1
ccatcggggtggttgtataaaatggacaaattgcattaactcgaatgcctttatttgcatattcaaccgctgctgttttggttaatcccaccacagcatgctttgccgcagcataggcagccaatttgggagcagcgcctaaacctgcaacagaagcaacattcagaataatgcccccaccttgtcgcaacatctgacgaatttgatgcttcattccaaagaacacacctttggcattgacggcaaaactcaaatccagatctgcttcatcggtatcaataaagcttttcataggcggactcatacctgcattattgatcccgacatcgattctaccaaactgagtaactgcactttgcaccaaagcctgtacatctgcttcacaactgacatcacacacttgcgcaaccacctctactcctgcttggcgtagcggttcaactacagtatttaacccttcaatattcaagtcacccaacactaattntgaaccatactntgccagttgctgtgccagcaatgcacccaatccactcgccgcacctgtgattaagaccacttg

SEQ ID NO: 90279 - DNA, 436 bp, Glycine max
  Clone ID: PAT_MRT3847_52532C.1
tatattaccatcctctttctctcatcttttgggttccacataacctgcaacttgtttcgttgatcctcacttttttttcttctcgggatcacttcctcctaaagctacaaaaactatttttgtttcctatatagcagggaagagggaccaatttttttcggtgaccttcttccaatacattggcttcctggtggacaagattttgcaaaaatcatggagggaatgcgagacagaaactcacagcttgaactccaagaccaagagggtactaatattgggtcctctttgtcaaagctgatattaacaagtggcacaaacaccctcgattcaattttctcgaattgccccacaacaacaaatggcagcactagaagcaactccgtgttggattatttagagccctttgggtctttggggtatgagcctttggggtctt

SEQ ID NO: 90280 - DNA, 448 bp, Glycine max
  Clone ID: PAT_MRT3847_52533C.1
attttggtctcttgggcagacacgtggtgctggggcgaagtatctgaacatgacattgactaagaacaaaatgtgaggcctatgggaaccacttgatagaaaggacaaaggcactgtactagagctgaacgaaggatgctaacatatctatcaaggaaattgaagaggttcttattgttggaggaaggactcgcgaggcttaaacacaagaggtggaaccaacgaacttaaaataataatcgagcaaaggagtcaacccagaatagggaatcaacaaggatgcagccatacaggggggactcccacatggagatgggtaaacggtccacatattagatggcactacacttttcttgggtcaagagactatgggtggtatctttaccaggttgatttaccgaaacaccacaatttctacaaataaaagtcaggtgttttcaacagcagc

SEQ ID NO: 90281 - DNA, 149 bp, Glycine max
  Clone ID: PAT_MRT3847_52534C.1
gccacgcgttctcccacgcgttcgaatgttgaatcctttagatattgtaacaaggatccttctatggtggagaattcggagatctttctgacctatactcggtagctctcagaccagatctatgaatatcccaatctacaccagattga

SEQ ID NO: 90282 - DNA, 580 bp, Glycine max
  unsure (1)..(580): unsure at all n locations
  Clone ID: PAT_MRT3847_52535C.1
ccccatctattccaacatgcttgggacgttgtttgagattaccccaaagaaaaaccctcagcttggggacttggatgtctttctcagtgttgtggatatcaacgagggagctctttttctgacacacttcaattcaaaggccatagtggtactattgattaatgaaagagaagcaaacattgaactcgttggcattaaagaacagcaacagaggcagccacaggaagagcgacctttggaagtgcggaaatatagagctgaattgtctgaacaagatatatttgtaatcccagcaggttatccagttgtggtcaacgctacctcacatctgaatttctttgcttttggtatcaatgccgagaacaaccagaggaactttcttgcacgttcgaaagacaatgtgataagccagatacctagtcaagtgcatgatcttagcgttcctgggtctgcataagatattgagaacctaattaagagccagagtgagtcctactttgtggatgctcagcctcagcagacagaggatgggaacaagggaagacagggtcctgtgtctgcaattctgaaggctctntac

SEQ ID NO: 90283 - DNA, 1193 bp, Glycine max
  Clone ID: PAT_MRT3847_52536C.1
gccggaattcccgggtggacgaagcgtccgattcactacctctctataatctccattctccacacttgactcacttctctacaaccctctcaatattttattatacccaacaaaaattcttcactcactcttaatttcttatggcatcatccgagaacgtagccagcattgagccatgtatgcttcgtccccctgtcaccgattcatggctcgcagagttcttcgctcgtgacgccgatgccttaaccaaggctcttcagaagtctctctccggtactgtcttgccggacgaggaaaactacttttctccctttctgcccaagtcagaccccgccgtcgccacccccaccgtctccagcctctccggctccgatcaggactcggcgccgcgccgccgcgcgccgcttccgccgtccgggaagatctccaagaggaagtcccgcgcctcgaagcgctcgcagacgacgttcatcacggcggaccccgccaacttccgacagatggtgcagcaggtcaccggcgtgcggttcggcggcgccggccagccaattgcgccggcggcgggggttgtgaagcccgagccgcagcgtgcctcgggccttgccaggttccccgccggcgcggggtgcctgccgacgctcgacacgtcggccttcctgctggaccatcaccagcaggtggtggggccctcctctgttaactctgggcctgccaccgggctttctgggcccggcccgctccccttcgcccaacccctccttgacgcttccttcgcctccgcagggttagattttgacaccttctccagcttccccactctcgagtcgtggaaagtcatgtgataaagaaagaagagaaaaaaaaaattgagaatatgagatgagatagattctctgaaaattttctttttactttttccctttttgcccctctcgtgggttaatgaatctagcaggggaagctagctaggatgatcttatgtaaatttgggaagggaaaatggatatggaactagtatctctttttttttttttttctttctgtaatttctgtaacatagttactttcttgttattactattatgaaggggtggagatatggtagctttgtttagtttaattaattaacctaattaatgaaattcgaagtttatctctaaaaaaaaaaaaaaaaactcgaactagttctctcc

SEQ ID NO: 90284 - DNA, 569 bp, Glycine max
  unsure (1)..(569): unsure at all n locations
  Clone ID: PAT_MRT3847_52537C.1
attttgtttcccaaaattgcggtgcaaacaaagccactgccaacagcccctacgaaaagaaccttaagacccttctctcttccttatcttccaacgccactacaaccttattctacaacaacacagtcctcggcagcacaaacactacctctgacacagtgtacggtctattcatgtgcaggggtgatanatcccttcgcctctgcaaagaatgcgtggcgaacgcaaccgagaaactatcttcagaccaaagctgttctctttcgaaacaggctgtgatgtggtacgctgaatgcatagttcggtattccaacgtcggcttcttctccaccgtggccacatctcccgaatattctttgtctaacccgaacaacatcaccaacaactcaacaaacagtttcatgaactttttgtccaacaccatgaaccaaactgcagaagcagcagccaattctgctaaaaggttctccacaaaggaagcaaacttgtctcagtctcagaccctttactgtctggctcagtgcacagaagacctgtcaccccaaaactgcacaacctgtcttgcgcaa

SEQ ID NO: 90285 - DNA, 347 bp, Glycine max
  Clone ID: PAT_MRT3847_52538C.1
ggcttggaacctttgggctgattgatgtgcttgtttatgtgcttgcatggtcgtgagaagatgatagaaggggatacaaagtattctacgaagcctcgtgatagttcttacggaggtccgaataagtctgtcgagccgccggaggctgagagggccgggaccagttactaggttggtcttgacagtccgtctatccttcgcatacctaggaaaccgaaggacaaccctcccagcggtcttccggagaagcacgtaagcgctccgcacgggccaggcgccgagaacggataaggcctctaccgaagaaaaaaaaaaacgacaaaattccggagaatctctcccggccg

SEQ ID NO: 90286 - DNA, 949 bp, Glycine max
  unsure (1)..(949): unsure at all n locations
  Clone ID: PAT_MRT3847_52539C.1
tctctctctaaccatcgtatctgcaacttcaactaacttttatgtgagcacccacaatttctttcacgccttcacctgcagtaccttcttccttcaaatcaaaacaatttaaaaaaacccttctttttttcgaattaaaataaaatgttacgatcctcgtaagctttcagcatgacacgtaattgggtttgtttgtttgattgttttgtgaaacataaggaagccgaaggcgtcagtgaatcgaccccccacaccagatgtggccgaaaatgcccctgaaagggaacccacgcttcaagagctcatcaacatcaagttgatcgagaccggagagaaggagcgtctcatggagctgttgagggaaaggcttgttgattgcggttggaaggatgaaatgaaaactctctgcagagccgttgtgaagaagaaagggaggaataatgttactgttgatgaacttatacatgtaatcactccaaagggacgagcctcgattcctgattccgtaaaggccgagttgttgcagaggattcaaacgtttcttgtgtctgctgcactttaagatatctccatggcttggtcagtgttaacctcaccatatgttgtaaagattctgagtggaactagtaagaactgcacacatttgtactgggttttgtttgggaggggtatgactatgtcttgtaaaaccataattatttcactcctttcaatataaatttgagaaatatttttttattgttactcattccgcccgttaggattcgtcagggcttgggctgccttcgcctctcctatttgctgttcaggcgatgggcggatgtactctgtcctgcccgcgctcgtacggggatcctactaaatatgtgaattttattttccattgggacggtgtcattctgaaactagtagaattttaactaatgagatgattttagagagtgnatag

SEQ ID NO: 90287 - DNA, 1440 bp, Glycine max
  Clone ID: PAT_MRT3847_5253C.1
cgtcgcttcgtgaacgtgggtaggagattgggaagcagagaaagaaaaggaggaaatggaggaagcactttttaagacggtgaagaagagcaaaggtgaaattatgggttcttctccggcaacatattgtgttaccggagcaacagggtatattggttcatggcttgtggaggctcttcttgaaagagggtacactgttcatgctactgttagagatcctgaaaagtcactacacctgttgtcattgtggacaagaggtgaccgattgagaattttcaaggcggatttgaatgaagaaagaagtttcgatgaggctgtgaaaggctgtgatggcgtttttcatgttgcagcttcaatggaattcaatgtggttcagaaagaaaacatcgaggcctgtgttcaagcaaatataattgatccagcaataaaaggaaccataaaccttctaaagtcctgcttgaattccaattctgtgaaaagggttgttttcacatcttcaataagtaccatcactgctaaagatagcagtgggaagtggaaacctcttgttgatgaatcttgccaaatccaaagtgaacttgtgttgaaaacacaagcaagtgggtgggtttatgcactttcaaagcttctaacagaagaggcagcatttaagtttgcaaaagagaatggcattgatcttgtgtcagtcataacaaccactgttgctggcccattcttcactgctagtgtaccatcaagtgttaaagtcctactgtcaccaataacaggtgaacctgagttcttcaagatattatctgctgtaaatgcacgcatggggtcaattgctttagttcacattgaagatatatacagtgcgcacatattcctaatggagcattctaatgcagaaggtcgatacatatgcagcagccaaagttgtccattgtctatgttggctaatcttcttgccaaagagcattcctactcaaataagaaaaggcaacgtttgagaaattagcgtatgcactgacagtataaatgatttttacagttttcatctaattacaacctgtcatatggtaagtttgttgagaattaccatgtgcttccaaaaaaagtcaggtcaagtatgatttttgattggttgacagagtaaaactttctacactcagtatatagaaattaacctctagtttttttcattgattatgttattcttatatacacatgaaggattgctgagaagaattctgataatccatcagataattatttgttgcctagattatggttatttacctcccattagacaatagtctttcaatactattgtacacgattttaaaccttttgtatttttattttttatttttgtgatcacaaaaataaatgaagtcatgtttttaaaaaaaaaaaaaaaaaaaaggcggacggtttaaaggattccaggttaaggaaggg

SEQ ID NO: 90288 - DNA, 1488 bp, Glycine max
  Clone ID: PAT_MRT3847_52540C.1
gatgaattaaacctcatctcgaagagtcggccctcgcgtccggttggtggttgtgatgtccaacatgatgttccagcagtgttcttctctaatgggggctacactggcaatgtttatcacgaattcaatgatggaatcgtacccttgtacaggctcgagcagcatttcaagaagaaggttgtgtttgtgattcttgagtatcataattggtggatcatgaagtatggagatatcctttctcgcctatcggattttccgccaatcgattttcaaggagacaatagaactcattgcttcacagaagcaatagttggtctcagaatccatgatgagctaactgtggattcttcattgatgaggggtaacaagagcattgctgattttagaaaccttttggataaagcttattggccaaggatcaaggggctgattcgagacgaagaaaggaaagcacaagagaaattgagagaacaagtctcttcatctgaatcatcagaagcctcacaacaacagtatataactattaggcaacaagtgcaagaaaatccaatgaagaagcctaagttggttattctttctagaagtggttcaagagctataactaatgagaatttgcttgtgaagatggcaaaggaaattgggtttttggtgcaagttttgaagcccgacagaacaacagaaatggcaaagatttataggactctcaatgcaagtgatgtcatgattggtgttcatggagcagctatgacacattttctgttcctgagacctggttctgtgtttattcaagtggttcctcttggtaccacatgggctgcagaaacttattatggggaaccagcaaggaagcttggattgaaatacattggctatcaaattttgcctagagagagcactttgtatgagaaatatgataaaaatgatcctattctgagagaccctacaagcattaacaagaaggggtgggaatacacaaagaagatctatcttgacagccaaaatgtcatgttagacctcagaagattcagaaaaaggttgcatcgagcgtatgagtatacactctccaaatcaaaactgagtctccaacatcaaccaatgtgaatttcaatggtttcttttggttctccgtattcattgatgtgaaaaaaaattaaaattttcttaaaatctagaacattcttatatgcatataaaggcgcacctgaaaagttcttagtgcgatatgttgttgtatagcacgggtatagaaatgtatactaggatgtgtaagtaaaagctacaacttgtgattctcaatctctttttttttttgtgtgtgtaaaaaagaaatcgtgttacacttttctcttcagattcaatcctccttcaatgtaagtagtttcaaattttattgagcggttaaattttgataatgcagtttgccaaactactagagtggtattgaaattcttgacaactatgattgaaaaaaaaaaaaaaagggcggcc

SEQ ID NO: 90289 - DNA, 404 bp, Glycine max
  Clone ID: PAT_MRT3847_52541C.1
tacggctgagagaagacgacggaagggggccatagaatgatcacccatgctcatgtttctctctaatctgtccactccatactactaactaccgaccctgttcctctctcgttccgtcatgaatggatgacagtccatgaccgaatctaaaagagccgatcccaaacttcgctgagaataaaatgggagccggcaccatggctaagaaacccgccggccatgcgaaggcggcgaaggaccctaacaagccatagaggcctcccagtgctttcttcgtttccatggaggactgcaggagggtattcaccatagaacatcctgaaaacatagcactgcctgctgagagcatagctgctggagcaaaatggaagaccatgtctgacgctgaaagagcaccttatgtg

SEQ ID NO: 90290 - DNA, 1075 bp, Glycine max
  Clone ID: PAT_MRT3847_52542C.1
gagaaggcccttcaattcaatgtctaaagatgacaactctcacgcgttcgtttcgcctcgtgaagaccttcgaagggggagacaagagcagagaagccgcttcaatgtctaaagatgacaactcttcttctcaggattcttcatctgaccttgaattttctctctccctatgcccccgctaattcctccttcacttctcttcccattaccgctcccagtcaagttgttggatggcctccccttggagcatatagaatgaacagctataatagccatgcaaaatcaccagccacagaagtattcaattctacacttgacaaaagagcaagcaatagtgctggggttaggaagagtgcagatggtggcagtgatagtagcaacattatttccaaagaaaaaggaaacctcaggacttccctgtttgtgaaagtaaaaatggacgggataccaatcggaaggaaggttgatttgggtgctcacgattcttatgaaaccttagctcaaaccttggaggatatgtttgatgaatcaactacagtcctcactcacaaagtaggatcaaatggagaagatcatggtactgaagttggaacagatgggcattcaaaattgctggatggttcttctgactttgtgctcacttatgaagacaaggaaggagactgggtgcttgttggagatgttccttggtgttactttgcagctccaagattggaagaaaagaacagaagatcgaatacaagctcatatagataatgtttgcacctttacatgttaggatacacaaaacttatgatctaaaatgtacaacatgagttgaaggaatataaatgtgagaaaaaacagaaagagggaagttaattaatactgtgagtaacggatttttatttttaaatgatcaaacctcgcttttttgtttctggattcaattcaaatggtgtttgtttaatttctcttggtatatcacttgaaaggcacaggccccataaattttcatgtaatgtttgtcatataagggattgctgtttgttaataatgtaaatgtaaatatgagatgtatgctagctttcttact

SEQ ID NO: 90291 - DNA, 287 bp, Glycine max
  Clone ID: PAT_MRT3847_52543C.1
tttactgtttttcacacacactaacacactgagcgtgatcaagagcataaacactgggcggaaaccctcttgaaacgggaccgtctagttcataatctaattcttctaaggattcgccgcaagatccaacgtttgccaatgcattgtcgtatcctatgggctattcgggtgggatttctcaaatgaaccctggtgtggacccagcgctggctctagcgttgcctgtggcgaaacatgaggagaatgggagcctatatgctggcatatgctgacctacctgacaaccc

SEQ ID NO: 90292 - DNA, 392 bp, Glycine max
  unsure (1)..(392): unsure at all n locations
  Clone ID: PAT_MRT3847_52544C.1
atttcttttttttttttttttttttttttttttttttattcattagttctcataaagcaaaaacaaatgggaatgtagtttaagtacaacaaacaaaggggggtggctacagatgctttgcaaatttttcattgacttaaaagccttttggcttggaggggaggaagctgatgtattgtcgttggcgaacggngncaaanccaaggaaacggaggggggggggggggnacgcccccccagccccnggaagccccnncaacaccggagaagcancagggcagccaaacaaaggcagcaaccacaggggccagnagcgcccaacaaagnanccaggggaccgggggggcccacggnacacgaaaccgggccccaacncgaannccaagcaagga

SEQ ID NO: 90293 - DNA, 243 bp, Glycine max
  Clone ID: PAT_MRT3847_52545C.1
tctcgagacgctcagccgattcggctcgagcggctcgagcggcgacttgcagccctttttacttcttatgcttcctataatcaaagcatctacttacattttgtaggagtgcatgtgttaagtattcttcaaataggttaagcattgatgtttgattacatgaaaactgttatgctaagattaggggttctaattataggttctaactaaacataatggtgatgatgacagataaatatgagc

SEQ ID NO: 90294 - DNA, 529 bp, Glycine max
  Clone ID: PAT_MRT3847_52546C.1
gttgatggtgccagaagggttagagtacgcgagcgaggtttggccgatccagcccctgaagccaatgtagagatccaaaataacttagataggtggagagttgtgacccatgcaaacgcaaaaagtaagagtgagaaatttccacctcctcatcaggatggagctgttggatatccgctggatgattcaaacaaaagagctgtttcatttggagccactgaaacttcctctgcctctaccatatttgattcaaaatcttggggatcggttataagtcatgatgctgcaagagacaaagggaggaaaactagtaaagcagattcccagatggcatcatcttggaaatttatgcgttcattcaagctatcagcaattggccattcatttgatttattatttagaagcaattcaagcaaataatatgttcctttggattttagcatcctagaatgaggaaaggaatgactgatgccttgataaatcatttttgcccctgcattgtgaattttattttatctttttccgctta

SEQ ID NO: 90295 - DNA, 765 bp, Glycine max
  unsure (1)..(765): unsure at all n locations
  Clone ID: PAT_MRT3847_52547C.1
cgatggcgcactttttctatgtatctcccgattttttgttttggcattgaaaagggtcatagatccaaatattagatatattaattgattactctatcatgcatatgcatgttgtgtactgtatatatcttcagcgcaatttatcattcatttttgtttgtttccctaatttactcggttattataatgtccatctccgcagttgcataccttatagatataaagaagacatagatggtaaaatgagcaacgaattggaagtgctagtggttagttcacagaaaggtcgaggattgatgttcccaaaggtacttttgttataactagttgtattcatttgaatatatatatatgctcaatttggtattcattggtcatttaatttcgtaccacattaattaacatcctatttatctgatctcagggaggatgggaacttgatgaatctgtagaagaagcagtttgtagggaattccttgaagaagcaagagtattgggaatcattgaggtatatattttcttcatcagactttttttttatttaaattgtatcaaatgtttttcttatttttttatttttatatatttgattatattctctatttttatcttttaatttatttaacatcttattcataatannnnnnnnnnnnnnnnnnnnnnnnnnnnnnnnnnnnnnnnnnnnnnnnnnnnnnnnnnnnnnnnnnnnnnnnnnnnnnnnnnnnnnnnnnnnnnnnnnnnnnnnnnnnnnnnnnnnnnnnnnnn

SEQ ID NO: 90296 - DNA, 195 bp, Glycine max
  Clone ID: PAT_MRT3847_52548C.1
cttacgtgttcgaagaggccagatgacagggttatgaggctcgttttgttagctacacagtgcagatgcattctgtttgctaatttgcacgaggaccatatattgctaccgagatagctcgatgacgataactcagagagtggcactgctgccgagagcaacgttgcactgcatggcagtgatcggaatcatgac

SEQ ID NO: 90297 - DNA, 593 bp, Glycine max
  Clone ID: PAT_MRT3847_52549C.1
ccacgcgtccgctctctctctccaaagcttccctcttttttcttctcttattgattgctccaaacccgatgctctttatttaaattcccacactttgcaccaataaatcagaaaaaagaagttaggaatcagtgatggagagaaggaggcaggaattgcatgtgcttggtaaccaaaaccaaacaaagccttaagaagttcatttttgggatgatgtgttcttctcacagacaacaccaaaatccaaaactgttcatttttttcgtgatctctttacttttctgaacgccacacagatccaaatccaatggcagagctgctactaatcacatgcatctcactacttttcctcattcaataccaaaactggcagaaaaagatataattttgaggaggcaattctgttcatccccacagtttcagtttcagtttcagtttcagttttttttttagtgtggtaggtttgtgaaagtctgtgtaacaaacaattacaagtacagaagaaacattccgagtacgctaccaagttaggcttatttaaagtgctagaacttagaaccaggaaaaaaaaaaaggacctttgcaccttgact

SEQ ID NO: 90298 - DNA, 221 bp, Glycine max
  Clone ID: PAT_MRT3847_5254C.1
ggatgatgaatgctcctgatacaaatgatcacactgattgactgtagagcattgctttgttgggttactaggagcatgttacgcttttccaactgcatatggacacgttgataacgcttgtgtttggctaccacaccagaattctttgatggaaattatcctgtgaactctggcgtaccaactcatgagaatagtctttatgctcgaagtaacttaccttc

SEQ ID NO: 90299 - DNA, 506 bp, Glycine max
  unsure (1)..(506): unsure at all n locations
  Clone ID: PAT_MRT3847_52550C.1
ctcactccatcttggaactccagtcgtttgatgagcggggtgctccactcactaggccgggatcagatccattagctctggataactaggtactggtgtagcactactcgacagaactctctctacgctatagaggcaatggactaatctcgctagttatccagagagcacttatcaggatcggagctattcatgtgttatgagaatcccagtgccatatcatacagaggacttgagctgctgtccacacctagtgccatcagttatctctgcaccctgatattgcattaattctgtcgcaagtcacagagtaaaggcctatcactaaagcctcatctaagtggaaactctgatacacgatcaggtgccttgctatacagctaaatccacagttaatgggtctcgacctcagatcttncttagatacagctggaatgatgggagggctgcttatgaagtcatctatgcttatgaagagcacttatgatggcactatgagccagaca

SEQ ID NO: 90300 - DNA, 1354 bp, Glycine max
  Clone ID: PAT_MRT3847_52551C.1
ccacgcgtccggtaatctggagacatattcagaatatgagaatatggacctggagaactttgtctatgaaaaggtttcagaagaaattgaagcaagaaaggaggctagtgaaattgttccattccatcttcatacacacaacactcttctgagtttagttgatgatattgatgtgcctgctgattcagtatccaaacagagtgagaaagttagagtagctagtccatatggggacccttcaagtaacatgctgcgagatgttgatcacagcagcccggtatttctgcggacaaactggcaggtacaagggtacttacaggagcaagctcataccattgaaaagaatggtagtgctgtatctttcaatgggcttgaaatcattctacggcaactacaaaagttggcacctgaactgcatcgggttcactttttaagctacttgaatggtctttctcatgatgattatatttctgctttggagaatcttcattgctattttgattacagtgcagggactgaaggatttgattatattccttcagttagtggtaatggctttggaagatatgaaattggtttattatgtttggggatgatgcattttcactttgggcatccaaagctggctttagaggttttgtcggaggcagttcgtgtttctcagcagcaaagtaatgatacctgtcttgcatatactttagcagctatttcaaacttgctgtttgaaaatggcatctcaagtacagctgcgacactaggatcgtcatactcaccttttacaagtataggtatttcgctctctgttcagcaacaattgtttgttctcttgagaggttctttaaagagagcagaaagtttaaagttaaaacggttggtggcttccaatcatctggcaatggccaaatttgatctaacgcatgtacagcggcccttgctatcatttggtccaaaaacttccatgaagctcagtacttgccccgttaatgtttgcaaggaaattcggttgagttctcatcttattagtgattttagctatgagagttctgcaatgacaattgatggtgcctttagtacagcttggcttaggaatttacaaaagccgacgggttctcttgttttgtgtcaagagaatggatctggcaacagttctaatgcttcccaattcattgcacaaccaacctcaattcctggatctgtgttgcaagtattgggtttgtcttatatacttcgtgcaactgcatgggagttatatggaagctcaccactgtctcgcataaatgcgctggtgcatgcaactcgctttgctgatgcatcaagctcatcagatgcagcattagcatatgtaaagctcatt

SEQ ID NO: 90301 - DNA, 731 bp, Glycine max
  unsure (1)..(731): unsure at all n locations
  Clone ID: PAT_MRT3847_52552C.1
ctccttccttcccttccctctcatctcttcttttctcttctcttctcttctttcttatcattctgtctctattccttctctctttctcctgcaacaacaaccatttaaggttcgttttccgatttccaatttcgctcttctcttctctctcactttctctctttcactttttccaaaccctttcatgggggcttcttcttcctcataacgctgctgctgcacttctcccactttaggtttcgaacgaattgatactactctctctgtctccctttttccattgcgtttgtttcagtttccttcttctcccattgcgtgtgctttgtcaatttgagttgtgcaaagcttcaattagggttcctgctgttgctgctctcgctgattgtcaattcggattcgtgctccgtggcttccgattgcttgcggatttgtgattggagtttttggtgtgttgaattgctagggtgttttgggaattggggattttgtgtttcggtcgagttgggtgtcgtggatgcattgtatgaatagtgtcgaatttggaaatggttgagagattgagtggctctgttgtaaactgtggacttttttttatggttntgtttttggtgtttntgctcatgtgtctgcattttttattaactgctgcagggatttcgggatgcgtttctgcngtctgttgattgtgttggtttgntgagtgtggcgttaacgtaatttggttttgagtg

SEQ ID NO: 90302 - DNA, 498 bp, Glycine max
  Clone ID: PAT_MRT3847_52553C.1
ctatcgcgggcgggcacgcgtacggccacgcggccggttacggtgcttctggacaaaccctgtctccctctaccacccattctctttgctgtctctttatgtccgcctgcctctgtcacctactcaatctcatcaccaccagcagcatcatcatgatcttctccaagctctataacgctgcaatcactcaaaaccggcccattaaaccaaaggagttgacccatttgtgagaacaattctggctaagaaaaggtgaaagggtgcaacttgttcttaaccaatctcacaacattctgcaacgatttttctggaacggtttggttttctgggccgtcgtggaattcaaaaaagattgcaactttgaagatgggtaggggcggaaccgccgcggcggcggaggagatcgccgaacccggatcaaggccggttattctcaaagaaccgcgttataggggcgtcagacaagaccgtgggggcggttcgccggcgaatcagaga

SEQ ID NO: 90303 - DNA, 702 bp, Glycine max
  Clone ID: PAT_MRT3847_52554C.1
caaaacactgttacacacttgtcactcggctcgagaggtcgctgtcgcgctacctcgcacaaagcctcgataggccaaagcatattccaaacaaccatcaattggtgggacctccgttcctgcatgcttcttccccgtttctcctaccttctccgccaccctcctcctctccacgccatggcgcgtgccgtcacgtgcgccactcagccctctcatttccacgcctcgctcggcatcgccacctctcgccaccccgtctctctgccctccaaatcctcgcttttctgccgcacctttcacgccctcgcgcggtgccagagcgaagagatgacgcggcggcgcgtggctggagtccgcgccgggcagagggagtacaggaaggcgaggagaagagcgccgcccaagagcaaaggcaaggagctgcaactctgtgtcgacatttgcatcgaagaagatttgcctgacgatcctgaaattttgagcattgcagagttgcttcgactaaatgttccaatggcgatgaaactagtgtttgatggtttgaaagggtcgaggtataaaacacgagacactgctatagtgatgttggtgggttttgatagtgtggagacatcggtacttctttgtaatgatgagctgatacgaaaacttactaaggagtggagaaatgaagatcgtgccactgatgatctctcatgtcac

SEQ ID NO: 90304 - DNA, 268 bp, Glycine max
  Clone ID: PAT_MRT3847_52555C.1
atagaaggttacctttgactggggagagcttggattctaggggcctttatatatatgacgatggcttgcaattcattatatggtttggtagactgatttcacctgatatagctaagaacttacttcggtcggaccttgcagaagagttagcaaaggattgtatattcaagaaagaggagagagggaaagagagtacaagggttaattatttttgtcattttaggcagttctgtattctaaaattttcatttttatctcatcttgttca

SEQ ID NO: 90305 - DNA, 436 bp, Glycine max
  unsure (1)..(436): unsure at all n locations
  Clone ID: PAT_MRT3847_52556C.1
ggttttgtagttgcatgaatgaattttcaaagcacaagggtttatgctctctcttcttccacgtccacttcttacaacccctttccctctctccctcaatatataaactcttcactcacattcacagacccacttttcttgcaactcaaataagaccctgagtgagtgagccacttctctttttaaccctttttgccactgccccaacacaaaacaaaggcacaaaactggggaggcttgtgtgtgtgattgcagcagccatgggggtctcttctcagagcacccctttgtattgcccctcttgttcncgccacttccgtgctgctctcttttcttggtccttgttggctccctctcaatcacacctccccaggttctttttccttcaaagtggtcatcttttctccattgggtgttgtcttcttctttgccttgg

SEQ ID NO: 90306 - DNA, 776 bp, Glycine max
  unsure (1)..(776): unsure at all n locations
  Clone ID: PAT_MRT3847_52557C.1
caccaccacactcctcatccccttattctagccccataaactattcctcataccctcctcctcctcctcctcctcctcctcctccatctacctcatacatggctcctttgactatcctatgcctcagccacctcacacttatccttaccctcaccgagtccctccagaatggagtgtacaacaggaggtggagtgtctcctctcacgctagtgatagttataaccctcctcactctgctgcttaccctactttggatgatctcatgagcaatgataggttgtcagataataataacctcccaagtgcacctcccttgacacattccccaccaattctatatcttgataggagggatgagttttatggttattctagctactcctcctcaagtttggatcagggggatccttctaggctctcagataataatgatgactcagtgaatagtgagagtttgcagattgtgccggctcagcacaaaggatctctgagggttttgctcctccatgggaatttagatatttgggttcatggagccaaaaaccttccaaacatggacatgttccacaagacgttggaggacatgattggtagattccccggtactgttgcgagcaacaagattgaaggaaccggtagccggaagattactagtgatccttatgtgacaatttctgtgtcaaatgctgtaattggtaggacttttgtgattagcantagtgagaatcctgtgtgggagcacatttctatgttcctggtgcacaccatgctgctg

SEQ ID NO: 90307 - DNA, 205 bp, Glycine max
  Clone ID: PAT_MRT3847_52558C.1
cccacacgtccatacaggcgtcagtacagctgagaagggaacacatattggggaacatctcaactccatttctacacatccctagctctgtcgttccgtctttcgctactgttttccggatgtgcccgggggatgtctgatctctccatcgtctctctctctttttcatcgcttcttccagtgtcttctacgaattccgtttcga

SEQ ID NO: 90308 - DNA, 746 bp, Glycine max
  Clone ID: PAT_MRT3847_52559C.1
acgagattttgcaccacttaacaaatcgcaacagccaaacgcgtaggtcctcttccctctggccgagacatttcataattcataattaattcataattcccacgttctctctcccacgcagtttcgaatccgcaatgaaactcaaccacgtttgaaaaccatgtcaaacatccccacaacgctctcggagatttgcctcacccagtttcggcttgccatgtccatagcagacccgtggcccttctcaagaacccacccagcaagtcccaagtagcaccctcggtcctccttttcacttccattcattccaatacacaccacaccaaacacatctctctcaattcaaattaaggcacatgtccaagaaccgcggattcaacctcaggaggcgcctcatccgggtctcgaaatggatcttcaggaagatacggacgcgggctccacgcgagtaccattgcctgggtgactctcctccgtcacccatggtgaagctccttacgtggggccgcaagctgacagcgggtgccaagtcccgcttgaaagtggcgtccggatccggttatgcccaattaggaaccgatccggacccgagtgtgccgaaggggcacctggccgtgtacgtagggcagaaggacggcgagttgcaccgtgttctggtgccggtaatatacttcaaccaccctttgtttggagaattgctgaagcaggcggaggaggagttcgggttccaccacgaagggggaatc

SEQ ID NO: 90309 - DNA, 339 bp, Glycine max
  unsure (1)..(339): unsure at all n locations
  Clone ID: PAT_MRT3847_5255C.1
ccttccaaaaagtataattcattcattatatacaatattacaataagcagaagcgacattgcaaaactgcaaaaatacaagcaatgcatgcttctttccctaaaaacaacaacaaaaaacacataatcaacaagaaccctaataagttaaactttccccccttttcagattctcccaaaaaattgtgacaagaaccacacactacctcatcccatccaaatcagattcatcattattagcatcaacaacaaaccctttttttttcattctattagccanccgttttaaccctcatccttttcctcgccccatccccaaaacgaccaccgttcgccgccg

SEQ ID NO: 90310 - DNA, 344 bp, Glycine max
  Clone ID: PAT_MRT3847_52560C.1
gctaatcctagttccttcaactcctcgctggcaacaacagcaatactaccaataatggcgctccacaatcatgatgttcgacaacaagctctgtgacataacatgtgaagtgatagatccccatgccctggggctcatgttggtaacattggtgatcgtctacagcttataccaaatgacaaattcaagagcgtataccatagagtacacgcaaatctcataggtccaagaatatccgtcgcatgctttttcaccgaacgtcttaaatcatcaccaataccctatgggcctataaaagaattactgacagaagacagtcatcccacatacagataatccacagt

SEQ ID NO: 90311 - DNA, 1404 bp, Glycine max
  Clone ID: PAT_MRT3847_52561C.1
gcccaatccaaacttcggcattcacacgcggccctgtttctgtctttctcctctcacccttctctttcctattcttaagtttggtattcatctgtgtcaatgttcatgcatctttcttcctcccagaaaccacttttttctttcttttttgttcttttttcatttcaggttgttcaccagtttgagttgttggatctcctccactgcttcttctcctgatcctgttctgtttcaaatttcaacccaaggagcttgggaacaaactcctgctccttcttctccttggtcataggcaatgggaggtgcactgggaaagagtgaatcacctagaaagggatcgatgccagaaactaagctcgaggctaaaatggttgaagcaatgcagcggagggaatctcaaggaagttccgtgaaatcattcaacactataatcttgaaattcccaaagattgatgagagccttagaaaatgcaaagccatatttgagcagtttgatgaggattctaatggggcaatagatcaagaggagttgaaaaagtgtttcagtaagctggaaatttctttttccgaggaggaaataaatgatctttttgaagcatgtgatattaacgaggatatgggaatgaagttcaatgagtttattgtacttctttgtgttgtctaccttctcaagaatgaccctgcagctcttcatgctaaatcacgaattgggatgccaaagctggagggcacatttgagactttggttgatacatttgtattcttagacaagaacaaggatggatatgtcagcaaaaatgagatggtccaagctataaacgaaactacatcaggggagcgttcttctggaagaatagccatgaaaagatttgaagaaatggattgggataaaaatggaatggttaacttcaaggagtttctatttgcttttacacgttgggttggaattgatgaagttgacgatgaggaaaatgacgaggcttaaatcatttcatctaaatatctgactgcctcttcagccaaggcaaaagggtttttctggttttcccttgcaataaaggccaagttgctgcacgttgaattttaaagaaactgtcattcctgaagttcgttatgtaaatagtaagtgtagagctaagtgccgtattgaagaaatgttcaaatttacggattaaatgctactaccatagtgattatgtatcggttgctgcttctttctctttctcgcttagtattcaattctgctatgtattgaactataaatagcctgtgctagtgcactacaataatgagaggcaaactggcaaagtgcatatctacacattaagtccaaaaaaaaaaaaaaaaaaaaaaaaaaaaagcggccgctctcgaggcacccatgcctgacgccggcgtgcatgc

SEQ ID NO: 90312 - DNA, 774 bp, Glycine max
  unsure (1)..(774): unsure at all n locations
  Clone ID: PAT_MRT3847_52562C.1
cctaattctggcgttggtattcttctgtttcatttctgttcaatgttcatgcatctttcttctatatccaatctgcaacacccagaaaccagtttctttttttccttgtcatttcaggttattcaccagtttgagttgttgaatctcctccactgcttcttctcctgatcctgttcagaatccaaggagcttgggaacaaactcctgctccttcttcaccctggtcataagttcatgtctttgtttcttcatttcattttaattaccagaggcaccacttctggtttattgataggcaatgggaggtgcactgggaaagattgaatcacccaaaaagggatcagtgccagaaactaagctcgaggctaaaatggttgaagcaatgctgcgtagggaatctcaaggaagttccgtgaaatcattcaacactataatcttgaaattcccaaagattgatgagagccttagaaaatgcaaagccatatttgagcagtttgatgaggattctaatggggcaatagatcaagaggagttgaaaaagtgtttcagtaagctggaaatttcttttaccgaggaggaaataaatgatctttttgaagcatgtgatatcaacgaggatatgaaatcacgaattgngatgccaaagctggagcgcacatttgagactttggttgatacatttgtattcctagacaagaacaggatggatatgtcagcaaaaatgagatggtccaagctattaatgaaactacatcaggggagcgttcttctgga

SEQ ID NO: 90313 - DNA, 156 bp, Glycine max
  unsure (1)..(156): unsure at all n locations
  Clone ID: PAT_MRT3847_52563C.1
gcngttttctctcggagacacattcnttntcangtgtgagttcatcatnnancncttgattgntatcttgcnatcatttntggcttccttttggccnttcttggcnatgttcatggccttnatgggcatgcanttgttctcattggcctctgcttc

SEQ ID NO: 90314 - DNA, 728 bp, Glycine max
  unsure (1)..(728): unsure at all n locations
  Clone ID: PAT_MRT3847_52564C.1
tcctaatcttaagtttggtattcatctgtgtcaatgttcatgcatctttcttcctcccaaaaaccacttttttctttcttttttgttcttttttcatttcaggttgttcaccagtttgagttgttggatctcctccactgcttcttctcctgatcctgttctgtttcaaatttcaacccaaggagcttgggaacaacctcctgctccttcttctccttggtcattagaggcacccatttttggtttattgataggcaatgggaggtgcacctgggaaagagtgaatcacctagaaagggatcgatgccagaaactaagctcgaggctaaaatggttgaagcaatgcagcggagggaatctcaaggaagttccgtgaaatcattcaacactataatcttgaaattcccaaagattgatgaaagccttagaaaatgcaaagccatatttgagcagtttgatgaagattctaatggggcaatagaatcaagaggagttgaaaaagtgtttcagtaagctggaaatttctttttccgaggaggaaataaatgatctttttgaagcatgtgatattaacgaggatatgggaatgaagttcaatgagtttattgtacttctttgtgttgtctaccttctcaaaatgaccctgcagctcttcatgctaaatcacgaattgngatgccaaagctggagggcacatttgagactntggttgatacatttgtattctt

SEQ ID NO: 90315 - DNA, 465 bp, Glycine max
  Clone ID: PAT_MRT3847_52565C.1
tctatatccaatctgcaacacccagaaaccagtttctttttttccttgtcatttcaggttattcaccagtttgagttgttgaatctccgccactgcttcttctcctgatcctgttcagaatccaaggagcttgggaacaaactcctgctccttcttcaccctgttaccagaggcaccacttctggtttattgataggcaatgggaggtgcactgggaaagattgaatcacccaaaaagggatcagtgccagaaactaagctcgaggctaaaatggttgaagcaatgctgcgtagggaatctcaaggaagttccgtgaaatcattcaacactataatcttgaaattcccaaagattgatgagagccttagaaaatgcaaagccatatttgagcagtttgatgaggattctaatggggcaatagatcaagaggagttgaaaaagtgtttcagtaagctggaaatttc

SEQ ID NO: 90316 - DNA, 259 bp, Glycine max
  unsure (1)..(259): unsure at all n locations
  Clone ID: PAT_MRT3847_52566C.1
cccaaaaacnccaaacaattattgaattcctttcccccccaatggacagcatattatttatcattgcaccttcccatgggtcctgtgattaaaacttccaacaccttcatcttttccaagaatacccaaaccaagcccaccaaaatnnacactccatatcacttgttcaccttcaagtttctccaaaaaaccatctatgctgcagggatacgacccccctttttcacctccttttcctctgattctcacctccccaaac

SEQ ID NO: 90317 - DNA, 329 bp, Glycine max
  Clone ID: PAT_MRT3847_52567C.1
gctttatcgagcatagcttcgcttatctcatacattgtggaagacgagaccaagagcatgcgtgatccgctttgacgttcaggtcacgcatcgcgttgtgttcagacttgtctcggtctaaggaggatgaagatgacgcgcctcatgctctggtggaggttattgccaccgcgttccatatactctctgggtcacaccacggagagaacacgcacagactcgccaaaaagcttatccggtctgtcagaaggtctatctctgtacgcttattgtcctctattttgtgtgcgtgcataatcattatatgtccataacttgctgatcctgag

SEQ ID NO: 90318 - DNA, 603 bp, Glycine max
  Clone ID: PAT_MRT3847_52568C.1
ttcgggaacctccgtagggtactgctctattatcgcgtttcgctcacgcgtgagcatctgagcctcccgaacaaatagtggatatgccgctgcacgacatattgacagtcataaagaatgtgcagaagaagatgaggtccaacaggcccatcccctactggagccatgtgaggaccgacaactactgcaggtacacgttagtgccgcactggcgacgcaccacatattgaattctgaggagcttgttttggcgcaattcagattatccgattaattagtgtttgattttcttgagacataacaatgcttaggaggttgtaatatgtggtgtttaatctccatactatattgatgatagagagatttatggtagaacgttatgacgagcccctacctgcaatatctagtatctgttctaaagatcatccttatggtccctaaggtgattcgcgttcgacaactatggaatatctcgtccatgaccgaattcgatgtctctgttatacattgcgttcacctctaggaggtgcccgttactgaattcgcccgatggtgatccttatgaaacatgctcactggtcgtctcttgacaaccacaggact

SEQ ID NO: 90319 - DNA, 500 bp, Glycine max
  unsure (1)..(500): unsure at all n locations
  Clone ID: PAT_MRT3847_52569C.1
ggtttgggaaaggcctttttttttttttttttttttttttttttttttattttttttnttatttttttctttttgttttcctccccaaaaaagactcacccaagaaaaaaaaaaatcccggggcggcccccgcgaaaaacaacccttttaaaaacccctcccatgggggggggaagaccttgagaaaaaacatccggaaaaaaaaaactccaaaaaagggggggggggggggcccaaaccttaaaaaaaaacccatggcggggaaaaactcacttaaaaaccccgccggccaagaacacacccctgagggggaatcccattggggggccccaggcacacccgcgggggtttcaactacacgataaaaaaaaaagcccccacaagaagaagagccctttggagggtgaaatggcaaaataaacccccgaaagaaggccccggaggggggaattcttaagggaggcatatccccagggaaaaacccccgggaacccaccccc

SEQ ID NO: 90320 - DNA, 395 bp, Glycine max
  Clone ID: PAT_MRT3847_5256C.1
tttacgcgttcgcccacaccaccgccaagggattcaaagacctgcttgccgggtgatttaaaaaagcaaaaaggggaagattgggtgccttggcgctagatctgcggggggtactactatggtagccattgccctcaagcgcccatgcatagaagcatgtgaagtagctaccattaaatacggggtggcggccgggaacaccaaccaacttactgtctatgaacctggccttgataggcgacgcgaagaactagcccaggccttgaaccccttcttcagctactgaagccgaaaaagatgtctttgcagctgacacagcgacagcatctgcccacatcccaaccataactcaagttcttggagctgggctaccacaccatctgacatattgcgag

SEQ ID NO: 90321 - DNA, 274 bp, Glycine max
  Clone ID: PAT_MRT3847_52570C.1
gcattacccgacaaaacaaaaaaaaatagagtaactgataaagcagggaatacaacattggggggatcataaggagaccaatggaacaaatctcctcggaggccacaaaaggacaaagcaggaccgttgtacactttctaatctcctgtacttaattgaggaggtccttcacctttcaacgatctagcttggtcctatctatctatgtgtaattcgatgcggttcaaataggggcactcgctaaactttatgctgtttcaactgtgtgtcaaca

SEQ ID NO: 90322 - DNA, 108 bp, Glycine max
  Clone ID: PAT_MRT3847_52571C.1
tctttttccccttttattgcatggtttgttaatcaatgtagaccaaagatagggacacaagtttaaagagagtcattgaaaagaaatccctacttccacggatgatat

SEQ ID NO: 90323 - DNA, 505 bp, Glycine max
  Clone ID: PAT_MRT3847_52572C.1
ctcgagccgaatcggctcgagcggctcgagctcgagccgatgccactgtctccaccaaagcaaacagcctcagaaccaatggaactggaaccacaacagttataattcaccaagctccatatcctttgccagcaatgccacacatggctccacttccaaactcgtccctcgattccgacgccaacaatcatgcatcattgaattcaatttcggcaagaaaagagaagcaacagagccagtcttggattcccttgagagcatggaaggtaaagaagtaaagactactcttgctcttggcaatggaggttcaggagaatgtgccatggcagtctgaaacttttccttcaatagcagaagccttgattgattccaaatcagcaaaggaaagtaacaacattacttggttacttatgcaaggcaatgacaccattgggaaaagaaggtggcacttgcaattgcagaatcagtttttggctcaactaatctgctccttcaatttgacatg

SEQ ID NO: 90324 - DNA, 224 bp, Glycine max
  Clone ID: PAT_MRT3847_52573C.1
catattgcacttaaacaacaatgagtgttttttttcctgtatagcccgacaattttattaccctcctggcaatgtaaaggaacaaacggggaatacccaccctgggaagagcaagcccagcctctctggatacaattagcttggactacataaccaccacccgtatcaagaggatacccaaaacattctcctactgtagcccacctagggcaatgctcattcta

SEQ ID NO: 90325 - DNA, 219 bp, Glycine max
  Clone ID: PAT_MRT3847_52574C.1
gtcttacctccggtaatgggcgagccagtgagggtgttcatattcgaagaccccaacacggacacgcatggaaattggtctactctcgcaggtgtggcctggccttctacttctggaaaacattgtgacgcgtaatcgtttgcaatgtcaaccagagctttctaagatactattgtgaatggcctaatgtctggttgcacctctgcaagggaatctggc

SEQ ID NO: 90326 - DNA, 417 bp, Glycine max
  Clone ID: PAT_MRT3847_52575C.1
accttcaatatattcatctaattttataattattctttttaaataaattataatttaattatttttttattttttatttttaagctacttcaacaataataccaaagcacttataatttaataagtcaatttttaacttctaactaatttttcaatttcaacttagaatcacgtgtaaccttaatctacagtaatattattaataaaacgcacaagttgtgcttcagttacacgataacaactcggtgtgtacatgacagcgcaacacgtggcctcagtcacccccacagaagacacaaaagatcatccacaccttataaatcgaatttgatactatacacactggtaatgcataatgagatacgaaacctatcctagaacgaatacaaaatcatagcaagcaaagtgctggattta

SEQ ID NO: 90327 - DNA, 351 bp, Glycine max
  Clone ID: PAT_MRT3847_52576C.1
ctcggaattcggacgaggctacgccacgctcatacctcatcaggggtgctctgcaagccacctccttatgactcgaaggatgggcggttatcgaagaccgacgttcggctcgtggcgaaggctgatgctactatgtgtcatgcctgctgcggccttgattttgccccatccgagacagcgttcagctagacagccaactcgtggtcctttgggttccgaatagctatcagcgagcgtgacagattacattaagcgcatgctgatgaccgaaagccttacacaaagcattctcctcattggcatcggctgctgctgtcgagaagacagaacacctaggtctatgaacatggg

SEQ ID NO: 90328 - DNA, 1438 bp, Glycine max
  unsure (1)..(1438): unsure at all n locations
  Clone ID: PAT_MRT3847_52577C.1
ttctcggctgcgagaagacgaccactcgagccgatacggcttgagtttgggcatgtgtgagctgtggctttgcagggaagaagagtgtcagtagaaaataaatgtcctcttcccagggacactctctatttcacagatctatatctaagtgtcggtgatcccctttctccttccttctctgagagacaatgacaatgacgtgggcgcgattcgattcgtggaagcagcaatactacaccacaagcggcgtggtggtaggttacgcagtatgctccagcctcctggccatcatcaacaaatacgccatcaccaaattcaactacccaggcctcttaaccgcgctccagtacctcacctccgcactcggcgtctacgtctttgggaaattagggtttctccaccacgaccccttcaccctccccaccgccaaaaaattcttccccgccgccctcgtcttctacctcgccatcttcaccaacaccaatcttctccgccatgccaacgtcgacaccttcatcgtcttccgatccctcacccctctcctcgtcgccctcgccgacaccgtcttccgcagccagccctgcccctccaacctcaccttcctctccctcctcgtcatcctcgccggcgccttcggctacgtcgccaccgactccgccttcaccctcaccgcctactcctgggccttcgcctacctcatcaccatcaccaccgagatggtctacatcaagcacatggtcatgagcctcggcctcaacacatggggcttcgtcttctacaacaacctcctctctcttatgatggctccctttttctccttcgtcaccggcgagaacgtcgagattatcgccgcggttagatccggcggccttttcgaccccgccgccttctacgccgtctccctgtcttgcctcttcggcttgctcattagtttcttcgggttcgcggccaggagggccgtttccgccaccgcgttcaccgtcaccggcgtggtgaacaagtttctcactgtggcgatcaatgtacttatttgggataagcatgctagccccattggtttggtttgcttgttttttaccattgttggtgggattctttaccagcagtctgtgactgggcttgggagtgctccggcccagcccaaacagttggatactgaaagcaacaaaggtggtggcgaagatgatgacgatggtgatttgacaggtgagagtgatggcttgattaaagctacttctatataagcatttgtactatttattttcacgtttaagctgtaatgcctgtataattattgtcttatttcagcaacattaggaaagaaattatatgcaatgtgaggtgtattgttttcagaaggatatctatggaattttaattttgcttccaaaaaaaaaaaaaaaaaaaaaaaannanagcggccgctctccaggatcca

SEQ ID NO: 90329 - DNA, 580 bp, Glycine max
  Clone ID: PAT_MRT3847_52578C.1
tacggctgcggaagacgacagaaggggaaggggttccagcattaagaaatggatagaatttagacaactaagaaagaaaaagaagaaacaaagccaaggcgttgctgaatcgcgactatgatcattccttactttgttccttgttctgtgttcttcatgtgaccgtcggttagttttgttttttagatttaaatgtgatctatgtacccttaggggtcccccttgttattatgtgcacatccatcttccccatctatcatcggcgatctcctttttctttgtaaagttcaatcttaaccgatcactagtgttgtaaagttgtctttaaagagattgaaagttaataagcaacaccaagatataagcaactcacaactaacttctttttatcaaatatcacttgagatcgtttcaaggtccaacgccttaaacaactttttgttcgcaattaaaataaatctttcaaaaacataaaatcaatttaacacacaaacttgcagacttaaaaaattacgtaggtttgaatttttcatcgcacctgatgatacataggagtaagggcaacacccatgtcgccccc

SEQ ID NO: 90330 - DNA, 442 bp, Glycine max
  Clone ID: PAT_MRT3847_52579C.1
tacggctgcgagaagacgacagaaggggggcaaaggcggaggcgttaaaagggggggggaggggggaaaagcaaaatcgttttcaagcatacagtagagaagaaagagtgtgtgtgtgtgtcaacgtgctaacataaatacaactgcgtctctttctctttctctttctctttctcttttcattcaggtgagatcaatgcgcttccatttccacctcttctacctctaggggttctcactttcttccacgcatccttctaacttattcaattccccttacattcaactctcctatggcgaatctgcgacaattacactaaatgaattgctaacaacacgcacacggggtcggcggctttttttctttttcttctctctttctctaagaagagggcgctttcttgtgtctcctcggtttaacagggagcgcatcgcattcgat

SEQ ID NO: 90331 - DNA, 409 bp, Glycine max
  Clone ID: PAT_MRT3847_5257C.1
ggctcgtgcgagaacaccgccgtttgtgataagacaccttgtcatacagtgcacagggtgctctcacaggtccatctggggggcatagggggcatttctcatatcctgagttgagctagtctaccaggaccgatgggcctcagggacccggatcaaggcaatgccattggaggaacaactccacctgagactgatacacaggcgacttccacagttgggtactaacccactaacacgcatgcctattacattacggtgggctctattgtgaaggctatcaaacctgggcactgacgtactgtaaggagggccacacaacgagtaactactacgtaggatgggactgcacaatggtgccctgtggaacgccatggagagaaacccgctggagcatcagaaggaaccgaca

SEQ ID NO: 90332 - DNA, 250 bp, Glycine max
  Clone ID: PAT_MRT3847_52580C.1
ccgctcgagcggatcgagcagatcaagactgttgttaaaagactacagaacggaaatttagtattttttcttatcaaaattatggggatatatttgtatcatccattaatgcacaacaaataatgtctcattaataatgcttttaaatgattcattaatactactacattatgcctccatccattaatgctcggaatagaatttttattttcagtgtataaaaaaacactattatattaattttaatcat

SEQ ID NO: 90333 - DNA, 904 bp, Glycine max
  unsure (1)..(904): unsure at all n locations
  Clone ID: PAT_MRT3847_52581C.1
ttcccggggtcgacgcccacgccgtccnngcgaagtagtttacaagggtatcaagggccttcgtatataccattttgggggactgcaagaattgagaggcgtgtacctctttctctggtgattgatattattatcgaacaaggttgcctgcagtctatatatggtatccatacttttcgagttgaaagtattgcacatggaaaagctgctcctgtagatgaactacaagttcagggagtttctgatccttctcttttgagaaagatgattataacagaggcttcaaagatcacacaagatgtgagtacaagtgggaaccatgctggtccaagcacagatgtggaaaacatcgctcttatgccaagagcaactgagggatcagttgttttgagatcaccatcaaaaagtttgaagatggcaggctcaccacatacttcgtcacttgagcgcagagtagccggaggattgctgcttaataaacttgaagaagtcaacaaatcagtgaagagacttgagttgcttattgagaagtcgcatgcttcttcctccatcagctgaaggtaccatagtttagcagtgcaagaattgaattgaaaggagtttccaaattaatagtaccttatttatcactatggagatagtgaataatgatttcattatcttagtgctactgtgtcactgctatggctgaccccatagaactctgcctgaggattgtagatgtttagaacctcaaattttgattacataattgtttttactagtttcttccatttttagtcctttttttaattttaattgtatatagcccacttggtatatctctataccataacaaaagcctccactgttttttttttccttcatatattataaccaaatcagcttaatcannnnnnnnnna

SEQ ID NO: 90334 - DNA, 332 bp, Glycine max
  Clone ID: PAT_MRT3847_52582C.1
ctggtggaactgtcgcacccccaacagcacaggcagctatagtgcagtttggcagtgtgcagattgctgaacctaatactatagttaagccagtatggcaagatacccctccaggaccgagcttggatagttcttcggccagagaagagggtgaagtgcctgaatcagaattagacctagataccaggcgtaggcttctcatattgcaacatgggcaagatacaggggagcacacgtcaagtgaacccccacttcccgtcagacaccccacacaagttgatgctcccagagtcccatcacgtaggggatggttttctgtagaagaggagatg

SEQ ID NO: 90335 - DNA, 220 bp, Glycine max
  Clone ID: PAT_MRT3847_52583C.1
cgagtacatgtcagagcacaacaatgagatataccggttgctgttgcgtgacccaaaggtctaatgtatatgcctttgctcccatagtaagttggtgacacgtttcaaggaagattttgctccaaggtagaagttgcgagtttcttcaagttgaaatgaagccatcaccaaatgtagcttcgtgtgccatctgttactcagtagtcatgatgatcagttg

SEQ ID NO: 90336 - DNA, 1066 bp, Glycine max
  Clone ID: PAT_MRT3847_52584C.1
ggctcgagctcaaaacaaagagttcttacaacgcataattaatttgtagaaaaaacgtagagagagagagaggctcgagaaaaaaggaggaacaacagaactacggagagggagagggagagggagagagagaaaaagagagtggttcttcacactctcgcattccgcagatcagatccaaacattctgaattcctagatctatttccgctctccacccgcgcttgaatttccgattcgcgatttcagtttcgtgttttcggcgcaattaggttttctgagatcgaatggcgtgcatcaaaggggtgaatcgatcggcgtcggtagcgctggcgccggacgccccgtacctggccgccgggaccatggccggcgctgttgatctgtctttcagctcttccgcgaatctcgagatattcaagctcgatttccagtccgacgatcaggaactgcctcttgtcgcggagtgcccgagctccgaccgtttcaaccgtctctcgtgggggaagaacggttccggctccgaagacttcgctctcggcctcgttgccggtggaatggttgatggcaacattgacatctggaatcctcttactctgattcgctcggagtcaaatcaaagttctcttgttggacaccttgtaaggcataaagggccagttcgtggtcttgagtttaatgccattgcaccaaatcttcttgcatctggggctgaggatggtgaaatttgcatatgggatttggtcaatccttcagaacctacacatttgccaccgctatagagtactgggtctggcgtgaattgagaaatttcattcttatcttggatcagtggaggtagtcacatattagtatcttggataatacgatcttgatgcaaatcaaactcaatttcgagttgctgatttgatttctcatttttattattattattatttggtgtatacaattttcatatggtgcttaacgattgttttgagttagaatagaaattttgtttgatatgaatgcatcatattgctgttcgttatacaatttagatttcataatatatttacttaatgaaa

SEQ ID NO: 90337 - DNA, 456 bp, Glycine max
  Clone ID: PAT_MRT3847_52585C.1
cccacgcgtccgcggacgcgtgggttttatcaatacatatgcaagttaatttccagtggataaaaaaaaaaaaaaaaaaaaaaaaaaaaaaaaaaaaaaaaaaaaaaaaaggaaaaacggtctaacggtttaaaggttacaaactcacgcatgcgaacatgaaaactttatatatagtgttatagtaaaaccaaaaaattggccgctggcttacaactttacaaactgggaaaagggaaaagttacccaatttaaacgttttgcagcatataccactttcgccatttggcggaataggtaaaaggcaagaagcgatcgccgttcgcactatttaacaattctgaatgctgaatgggaaatgccatgcagccgtgtaattaagcattaagggcgtggggggtacaggcaacgcgaacggtaaactttacagtggccaagggcccagtgcttgctctt

SEQ ID NO: 90338 - DNA, 276 bp, Glycine max
  unsure (1)..(276): unsure at all n locations
  Clone ID: PAT_MRT3847_52586C.1
tgtcagcaaaaaggttgcctgcatngtgacnagttgagactgttctggtngtnnaaacagtctcttctatcttggagtatggattcacacattngacttacncccacatcnctgcaatgttgggagnttaaaccttgtcactggtccaccctttatgganttntggctgaaattaaatgttaaagttttntatgaggctaccaattctgtagtgcttgaatacttgaatactttgccgcatgtggtngatttgtaaactgttgggttancatgatc

SEQ ID NO: 90339 - DNA, 453 bp, Glycine max
  unsure (1)..(453): unsure at all n locations
  Clone ID: PAT_MRT3847_52587C.1
gcagcctacgaaacaagattgtgttgtgttattttttttcccagttgacctctagattgtgtgtgtgtaacttcatgaatttccataccatatgtttagaagttagaaccatagatgacacagactagttgatcagggattaaaaacagaaattacacgtgattatcctgtcaaactccttgatgatgtgacaagtcacttggttatcaatgctactataatgccatcaattaattttattacttgatatgttaagagagcttgacaactgaatgacactcatacactttattttagattaacaagaaaaacttttcttaaccctcaagtcttcccttaaaactgtatgtatgttagtccttattaactgtaatcttatatggttgtgtgtgtgtgtacacaatatctttaacaaaatattntatcagttgagcaagatcaagttactcaaac

SEQ ID NO: 90340 - DNA, 378 bp, Glycine max
  Clone ID: PAT_MRT3847_52588C.1
ggcatctttagtacgtggttggaatgtgcaggaacacatagtttttttcatcataaatatgctttcacctccagttcctcctaaatattccgggacagaaagttatttgattagccatgctccttttttgaatgtctttctggtgggaatttcatctgtagacagtgttcagatattctccctacatggcgtggttccactacttgcagctgtcttaatgccaatatgcgaagcttttggatcatctgttcctaatgtctcatggactgctgtaactggtgaaaaactcacttgtcatgcagtgttctctaatgcatttattctcctgctgaaattatggcgggttgatcgtccaccttgtggacatgtgatgggggg

SEQ ID NO: 90341 - DNA, 258 bp, Glycine max
  unsure (1)..(258): unsure at all n locations
  Clone ID: PAT_MRT3847_52589C.1
gcgnacgttatgctcgtaattcggctcgaggttatcacattcaatacattaatcactaactgaatttcgattttaatgcctgccgtcgcctagggaatctatctctcccgccgagaaaaagacgattcaagaggttaaggctccgatccccgttaaggataataaacctatggctcctaattaatagaagccaaaacaggccataacagcttcacatcctccatatttacataagattaaagatgctttaatcttttt

SEQ ID NO: 90342 - DNA, 329 bp, Glycine max
  Clone ID: PAT_MRT3847_5258C.1
cctcccaggtgggcccccggggggccccccggacacccccgcccggcccggggagcccacccccgtgcccaataaccgaacaaaacaaagccccccaaaaaaccggccaggagcaatccctgtaccaaaaggcgacccaccggaggtcccaaacaaaaaacaaacccgaccccaaagggggacacccacgaggtccgatcctgggggggaacccatattaaccggtgaaccaaaaacacccgcaacacccacaaaaaacccgaccaccacaccggtttacacatgtgccaaacccccggcccgggggcgattcccctttggcacccggc

SEQ ID NO: 90343 - DNA, 391 bp, Glycine max
  Clone ID: PAT_MRT3847_52590C.1
attgtatactgttatttccatcatcaatcacatctgcttgcccaattctgtgtagttcgttgagggaatctcacctttggtacttgccgtgcatcatataccctcaagtactgaactgctgataagttacatatagactgctcaaagcactattactcgtcagatggctctcaaagatcattacctatacacttgtacatgtcctacctgttctaaagtgggtcactataatgatatccaacaaagtgcaattctaaatggatacaaatgcaaaactgaaaaatgctttggtttcttgcttagtaaaactgatgggaaaggattccaatgcacaggttgtggactaattacgcacacggaggatataactacaattacacctgaacttaaa

SEQ ID NO: 90344 - DNA, 488 bp, Glycine max
  Clone ID: PAT_MRT3847_52591C.1
aataaaataaaagtgtatgggtcatagaattaaaactgaatgattaatttgaacacaaacgagttttcagggtatttgttttcaccaaaagacaattttccaaaagtagatgcatctgccctagcaaactaggaatggaattatgcttttataagggggaacatatacctgaaaaatattttcatctaaaccaagcaccctttacaattcccttttaataaaactattatttgaccaagatatacccaggctatacaaaggttttaaggtacccaccaaaatattggggattggcccaaaccttcaatccaaatacatttttagggggggcttaattccctccgggttaaaaaattgagggccatcggcccttttaacaaaacctacttttgggggccccaggctatgaccttttttaagccaaaagtcacgcctctccccttttagttaaaagagcatcccccataaaggaagcaattgaacccctg

SEQ ID NO: 90345 - DNA, 314 bp, Glycine max
  unsure (1)..(314): unsure at all n locations
  Clone ID: PAT_MRT3847_52592C.1
gcacgcgtacgtaagctcggaattcggctcgagccctctgttgctgcatcctnaacanggnaanacattannaccannntttgcacttggcncaatttgnnngcactcataatggngacatccataccattcagtggnactggcaagcacnnatacagnntncagantatnaangcnccnctactcccngcgcatntntntgattnngaggngcattgtagtccnntnnncccngnacgagaantacnntcnnntgatagggcagctgntagtnctgcaatgaatgatgatgcgantagcatnatgactgctgn

SEQ ID NO: 90346 - DNA, 518 bp, Glycine max
  unsure (1)..(518): unsure at all n locations
  Clone ID: PAT_MRT3847_52593C.1
atcttgtacaaacattttaaagcagcgtattaatccatctcgggaagtggaagttcctatctgcttnccgaatttgggacgggtacagatataccagcaaatggccgtgattgtgcttcgactgacacgtattttttgtgttttccactacgatattgacgtagcataacagacggcgtttgaagcgactaaacccatgaatgtgttgataatcagagccgtttattagaaaccaagatgcatagtctcttaacgaccgggccaaccgctaaataccccagaaaaagaaccccctaatatccggatgatgaaagaggtctcagcgaaaatcccatgaccttcccaatgggtgcgaaaggcagagcacttccatttgcacatgtcacaacagcggagaaaatgacaggccccgatagcccatcccgaatgaaagggattttctctggccttatcgagtggatgatgagggtgcgcaatgggagaccttgcatgaaccaagcagactggaaaatcttctg

SEQ ID NO: 90347 - DNA, 112 bp, Glycine max
  Clone ID: PAT_MRT3847_52594C.1
atgtgatagtaatgatggatatggtgactgttggaagagtcactcaaaggaatttgattccaattccgggttggttgaattcaatggtgtccattactataagtttacaact

SEQ ID NO: 90348 - DNA, 906 bp, Glycine max
  Clone ID: PAT_MRT3847_52595C.1
caagtctcatactatatatactctttgttatatttgttacttatattttcttcgttcagcatggactcgccgaagcggcaggggcagaagtttctggtggcggtgacggcggtggcggcggtggtggtaaagcgggtgagccggctgcagcggaggctggcggtgagggagcagtggaggatggagctgcggtcgccgaagaagcttctgagcaacataagcagcaaaacgctgccgtttaggaagaagaagaggggtgaggaggattgggggaagggtggggtgtggcagaaggcgatcctgatgggggacaagtgtgaaccgttggatttctcgggcgtcatttattacgatagtaacgggaagcaggtgaacgagatgcccctcaggtcgccacgtgccagtcccgtgccgcctggacactattttatccaccatagccatcactactatcaccaccaatgaatcaaatcattgatgatgatgatgatgatgcaccctacgattataagccaggacacgcgcttacatttgttgttgcacatgcgtcttttattttatttttgtggttgttagacagagatataaagtgagtccgaatcccatgagttattccgacttatcacaagttctaatggatcggattaagaaaagttgaatgaaaaaaatctgtataggatatgtgaaagtgggggagacttgttcctttaatgagttcttagtgtttagataaataatctagtttgtgttacagtatgtttagattttaaatttctctttgcttttcttctctttgtattaagggagtgtggtgggagaaattgttatatgattactacgtgatgattctgaatttatctgggtaacaaaaaaaaaaaaaaaaaaactcgagactagttctctctc

SEQ ID NO: 90349 - DNA, 923 bp, Glycine max
  Clone ID: PAT_MRT3847_52596C.1
gaagaatacacctggttgtcagccagatgtacagacttattcaatcctcctaaaatcttgcttacaggtttttgcctttgacaagattcagagtcttttatctgatatgaccaatcgtggaatcaaacctaacacagttacctacaatacccttattgatgcttatgggaaggcaagaaagttttcagaaatggaatctatacttgtggaaatgcttgctgaccggtattgccaacccgatgtatggactatgaattcaacactcagggcatttggcaacattggacaaattgaaacaatggagaagtgttatgagaagttccaaaatgctggaatccaacctaatgttcagactttcaacattctcttggattcctatggcaaggctcaggattacaagaaaatgagtgctgtgatggaatacatgcagaagtaccattactcttggacaattgtgacctttaatattgtcattgatgcttttgggaaggctggggatctcaaacagatggagtacttgtttagactaatgcggtcagagagaataaaacctagttgtgttacactgtgctcacttgtgagggcttatgcacgtgcaggtaaacctgaaaaaatcagtggtgtccttcgttttgtcgagaattcagatgtattactggacactgtattcttcaactgcttagtggatgcttatgcgaggttagggtgtttggctgagatgaagggagtgcttgagatgatgaaacagaatggttgtaaacccgatattgttacttacagaaccatgattaaaacctatacatacaagggcatggatagccatgctaaggaacttagagagctccttccaacagtgaataggcctccattgaaaagggataagcctgacttttgatgagaaaatctactcgtattttagctcc

SEQ ID NO: 90350 - DNA, 151 bp, Glycine max
  Clone ID: PAT_MRT3847_52597C.1
acctaacctactaaacataatgtttcagattgattaatatttaattcaggtctatatttaatcccgagctacaccaaacatttatgtaaacaaaagatacataaaatgtgaagaagggggttacatactccccttgccctcgggtgttttt

SEQ ID NO: 90351 - DNA, 272 bp, Glycine max
  unsure (1)..(272): unsure at all n locations
  Clone ID: PAT_MRT3847_52598C.1
gcagtatgatggcacactgccaaaattgaatgaatattcaatgaagtaattgcctttgcntctcaataatggcaatcttatgatgatacaatttatgatccaagaattagctttctgctttgctgtttagtgtttaatagtaatttcatttgatcacgtttnattntcanagtttttatgctgtntgtcgccaatttagatgcattggaaattaattgtatgatgtctcgttccacanancaaaaaagntaaaaaannananngggacaang

SEQ ID NO: 90352 - DNA, 156 bp, Glycine max
  Clone ID: PAT_MRT3847_52599C.1
cgaacaagcaacatagaaagtggaatacattagcaatgatagagcaacaatggcggcgaagatgttttccatcctgatgctacctgctctatctgcatgtgttgctaacgcgaccatatttcctcaatactcacaagctcctaagctgcccttctt

SEQ ID NO: 90353 - DNA, 873 bp, Glycine max
  Clone ID: PAT_MRT3847_5259C.1
aaaaagtagtttgctttaagagagcatgtgagtagttgggataaggaagccatctttgaaacctttgacattttgaaattttgataaaacgttacatcgttgcaacttcctagatgggttaattgaaagatgtagtgggcaaagtgtctgtgtccaaagattgtatcagccaactagatgttgctagctaatgcaagatttgttagctgatatatagcactttgaagaacttttcagttagcagtcacccgtggaaggcttgggttatcaaacaagtttcttggaagcttcctgattatccttttggataaaatgtaatacagactgtgcagctagggggaatcctggtttggcaggttgtagcgaattgttcatataatgccaggggaaattttgcatacagtatagcaattaattcagctttctttgctgaggtaatggcggcaattattgcaattgaaaaagctgtggaaaatagatggaatttcctttggctgaaaactgattcaagctttcaactttcaagtgccaaatataatcccgttatcaaaggtttgatcattttgcaagaacgcaatgatagattgatgattttggaatccagattccctgcattggcttttcaacacattcacatattcagtaattcagaatggttggatgcagatcagattactcatattttattggtaaatcaacttaaaacacacatttgtcagttgtctaatgttcatctaacgattatgtatgtgtttagatttgcatcgagcgcatgtttgtctctagattcactcaattcttagcagaagcaaatattactaacttcacggtttagacacgtccatttctctctgatatctaatcaaacacccg

SEQ ID NO: 90354 - DNA, 1193 bp, Glycine max
  Clone ID: PAT_MRT3847_525C.1
gatgtcaccatcggtaacattctattggacggcgggagtcttagggctgggtcgattggaagcggagggaacacaagcacgggtgtggagtggcacgtgcgacctccaaaccctaagaaccccatcgtcttcttcgatgtcaccatcggtaacattcccgccggtcgaatcaagatggaactcttcgccgatattgcccccaaaactgccgagaatttcaggcagttctgcactggggagtacaggaaagcaggactgcctgttggttacaagggttgtcaatttcatagagttattagggatttcatgattcaggcgggtgaattgtagaagtgaaatggctggttcaattggaagcggagggaacacaagcacgggtgtggagtggcacgtgcgacctccaaaccctaagaatcccatcgtcttcttcgatgtcaccatcggtaacattcccgccggtcgaatcaagatggaactcttcgccgatattgcccccaaaactgccgagaatttcaggcagttctgcactggggaatacaggaaagcaggactgcctgttggttacaagggttgtcaatttcatagagttattaaggattttatgattcaggctggtgattttgtaaagggagatggtagtggatgtgtttccatctatggactcaagtttgatgatgaaaactttacagccaaacacactggtcctggccttctgtcgatggcaaatagcggacaaaataccaatggctgtcagttctttataacatgtgcaaaatgtgactggcttgacaacaagcatgttgtctttgggaagctgaactaattgaataatcatgcttgggaatgacagaatgataatactatgatgcatcttttttgcccaaaaaaaaaaaaaaaaaaaaaaaaaaaaaaaaaaaaaaaataaaaaaccaacttggctaacaaacaatagttctcttagcaaagttgattgaatcctcagcagcaactgcacctcctatactgatgtgggctttctacacatatttctgtggcttgaaactaaatattcttgtcatgggatttttttttcaacgagacagttgagtagctcaactaattgaataatcatgcttgggaatgacagaatgataatactatgatgcatcttttttgcccaaaatcatccaatgcacgtgtgctaatatattgtc

SEQ ID NO: 90355 - DNA, 854 bp, Glycine max
  unsure (1)..(854): unsure at all n locations
  Clone ID: PAT_MRT3847_52600C.1
ctgcgacccaccccggccgcacaaaattccaatagaaaaaataaacgtccgcaaacccaaaattccacagcggcccccagccaaagcaaactcaagactctagcctctttattaaggaccgtctcgtcttctcgatagtccgttagtatgctctgcggttgttgaatcttttttagattattcctgaacccttcaaaaccctcttatctctcttctatcgcttggcctgatattctttttggctgagagatcaagcaaaaatgagcgtggttggatttgattttggtaatgagagctgcattgttgctgtcgcaagacaaagggggatcgacgttgtgctcaatgatgagtcaaagcgtgaaacacctgcaattgtatgctttggtgacaaacagcggttccttgggacagctggggctgcttctacaatgatgaaccctaagaattccatctctcagataaagaggttaattggtagacagttttctgatccagaattgcagcgagacctgaagacattcccttttgttgtcactgaaggacctgatggatatccattaattcatgcacggtacttgggtgaagctagaacatttacacccacccaagtatttggaatgatgttatcaaaccttaaagaaatagccgagaaaaatctgaatgctgccgttgttgattgctgcattggaattccactttattttactgatcttcagaggagggcggtcttggatgctgctactattgctggtttgcatccacttcgtctgtttcatgaaacaactgcaactgcattggcttatggaatttantagaccgatctttcctganatgatcaactgaatgttgccttt

SEQ ID NO: 90356 - DNA, 3284 bp, Glycine max
  unsure (1)..(3284): unsure at all n locations
  Clone ID: PAT_MRT3847_52601C.1
cggctcgtagccaaagcaaactcaagactctagcccctttattaaggaccgtctcgtcttctcgatagtccgttaatattccgctgcggtttttgaatctttcaagattgttccagaacccttcaaaaccctctcttctctctttcttcgatcgcttcgcctgatattctttttggctgagatcaagcaaaaatgagcgtggttggatttgattttggtaatgagagctgcattgttgctgtcgcaagacaaagggggattgacgttgtgctcaacgatgagtcaaagcgtgaaacacctgcaattgtatgctttggtgacaaacagcggttccttgggacagccggggctgcttctactatgatgaacccaaagaattccatctcacagataaagaggttaattggtagacaatttgcggatccggaattgcagcaagatatcaagacgttcccctttgttgtcactgaaggacctgatggatatccattaattcatgcacggtacttgggtgaatctagaacatttacacctacccaagtatttggaatgatgttatcaaaccttaaagaaatagctgagaaaaatctgaatgctgccgttgttgattgctgcattggaattccactttattttactgatcttcagaggagggcggtcttggatgctgctactattgctggtttgcacccacttcgtctgtttcatgaaacaactgcaactgcattggcttatggaatttataagaccgatcttcctgaaaatgatcagctgaatgttgcctttgttgatgttggacatgctagcatgcaagtatgcattgctggatttaaaaaggggcagctgaaagtgttgtcccaatcatatgataggtccctaggtgggagggactttgacgaggttctgttcaatcattttgctgcaaagtttaaggaggagtacaagattgatgtattccaaaatgccagggcttgtctgaggttgagggctgcctgcgagaagctgaagaaggtgcttagtgctaatcctgaggcccctttgaacattgagtgcttaatggatgagaaggatgtcaggggctttatcaagcgtgatgagtttgagcaactaagtcttccaattttggaacgtgtgaagggacctttggagaaggcacttgctgaagcaggtcttacagttgaaaatgtgcacatggttgaggtggttggttcaggatctcgtgtgccggcacattaacaaaatattgacagagtttttcaaaaaggagcctaggcggacaatgaatgctagtgagtgtgttgccaggggttgtgcattgcaatgtgcaattctcagtccaacgtttaaagtacgggaatttcaggtcaacgaaagctttcctttctcgatttctctttcatggaaaggtccaagtccagatgcacaggaaaatggaccagataatcagcagagtacccttgttttccccaagggaaatcccataccaagtgtcaaggcactgaccatctacaggtcaggaaccttttctattgatgttcagtatgatgatgtgagtgggctgcaaacacctgcaaagatcagcacatatactattggtcctttccaatctacaaatggtgaaaaggcaaaagttaaagtgaaagttcgtctgaatctgcatggaattatatctcttgagtctgcaacactactggaagaggaagaagaaattgaggttccagtttccaaagaatctgcaggggaaaatactaagatggacattgatgaagtccctgctgaggctgctgctggttccagacctccaagcaccaatgacactggtgctaatatggaagatgcaaaaagctaatttgctgcactcctagcaccaatgacaatgatgttaacatgcaagatgctaattccaaggctagtactgatgcctctggggttgaaaatggcatccctgagggtggagataagcctttgcaaaaggatactgataccaaggttcaggctccaaagaaaaaggttaagaaaacaaacattcctgtagcagagttagtttatggagcaatggtgcctgtggatgtccagaaagcactagaaaaggagtttgaaatggctttgcaagatcgtgtgatggaagaaacaaaagacaagaaaaatgcagttgaggcttatgtttatgacatgagaaacaagcttaatgacaaataccaagagtttgtcactgcttcagagagagatgattttactgctaaacttcaggaagtggaagattggctttatgatgagggtgaagatgaaactaaaggtgtatatattgccaagcttgaagaactcaaaaagcaaggtgatccaattgatgagcgttacaaggaatacatggagaggggtactataattgaacaacttgtctattgtataaatagttatagagaagctgcaatgtcaaatgatcccaagtttgatcacattgacatcaatgagaaacaaaaggtcttaaatgaatgtgtggaagctgagaactggctcagggagaaaaaacagcatcaggactcgcttccaaaatatgccacccctgtacttttgtcagctgacgtaagaaagaaagctgaagctgtggacaggttttgtaagccaattatgacgaaaccaaagccactgccacccaagccagctacaccagaagcaccagcaaccccacctcctcagggtggtgagcagcagcaacaaccacctcaggagaatcctaatgccagtactaatgaaaatgctggggacaatgctaatccagccccgccaccagcatctgctgaaccaatggagactgacaaaccagagaacacaggctctgcttaatttttgttaattttgtctggtctctacattttgcataactatttgaattgtgcttggaaaaatagttgtgggtgagagttgatgctgaaattctgctggaaaaattggtaatgggtgaattatggtccctgagattcggattatttttagtcaaatctacgttctctaggtttttagattattatatgtgtaccattttctataagtggaattacgatgcttgttttcatttgagttaaatgacctgattttccttttgcgtggcatttggtttttttaaaaaattaaatttatattggtgggtaccccatttttttcctattaaagggggggaaattaaccgcaaatggccttgggttttcccatttttgggaggttaaaaaatggaccccctgattttctttcccctttttgcgcggggggcgccaaaaaaaaanaaa

SEQ ID NO: 90357 - DNA, 300 bp, Glycine max
  Clone ID: PAT_MRT3847_52602C.1
acgcgacgaagctcgaattcgcttagcttggtatcatttttcgggagggaactgaaatccgggggagggaagttaaatgggggagacggcaaatggccctggtgagccaagaacctgtgctgtttaatgacaccatccgagccaattttgcatatggaaagggcggcgatgcaccagaggcagaaattatagctgcagcagaactcgcatatgctcacaactttacttgtagtttgcaggaaggttatgacacaatagtaggggaaagagggattcaactatctggagggcagaagcagc

SEQ ID NO: 90358 - DNA, 278 bp, Glycine max
  unsure (1)..(278): unsure at all n locations
  Clone ID: PAT_MRT3847_52603C.1
cttcaatcactttttctttacaccacaaaagnncccgcaaaagataaaatttatataatcacggagacccccccccccccctaagaagcaaccacagcaagaaccccttccaacctcccacacacagcttgaacagacacaatcaaagcaaaccattaagacccccccaacttcacaaaataagctccacttaccaccaaacattcattaccaagggggacaccctacaccaacaaccgcttcaaccacaatagttctgaaagatcaattcatcacct

SEQ ID NO: 90359 - DNA, 222 bp, Glycine max
  Clone ID: PAT_MRT3847_52604C.1
tctttataaaatagcatttccaatagattttccgacagaaatggtttgtcaggaatttccgacggatagcaaaaattcatcggttaaaatttcttacgatcattttttcgacaaatttcgacagtcgaaaatacgctttttttttttgtagagttgcaaaccatcaaatttcacaacactattgtaatcgtttttgcttaattgttcccttcacttgttttt

SEQ ID NO: 90360 - DNA, 387 bp, Glycine max
  Clone ID: PAT_MRT3847_52605C.1
ggctcgagctctaggcaaaccagtggcccttacacattttgaagcggataggggatacccatgggcattgttgctaccatgaggatgacgaagacccatggaggaagggcctggatgattatcgcacgcgttgagactgccacggagtcactgccaccactgatggttaccataggcgatgcctctagattacgagtggtgacggccactgctgactgctaactaaaggagaacgtgatcccgggcccctagaccagacctgtgactatggatcgcgatcaacgacagactactgggaaggcaaaagtaacatgctactgaaactcagccctggtatctatgcagacaccgacaccggtgatggtgtacctcttcttggcgaatact

SEQ ID NO: 90361 - DNA, 1178 bp, Glycine max
  Clone ID: PAT_MRT3847_52606C.1
ggaatttggccccaaggaaatttcgggcaaggttgactgactttgcttgatatgggtgctatggctagattggcacaatagcagttcgactgattgcagggagatcccgtctccacaatctgtcactagtggtcgaacaggttacgcgtcttctcgccactgtaccgtgtcgtggtgccctggcccttctccgctcagagcccatgattgaatttcctccccggcttgtgcaatcgtccaaggtgggtcatagtgtaaggtcgtgggggatgactggcagggaatcaaatcctgcatctttatttcagctttatgttagctatgatcgatatgcagaagctacttatcttttgcttgactgcatagactcatttgcttcgatgagaccagcagatataattagaaggaaaagaccattagctgtttggttcccgtacacaactattgagcggttactataccaactcgatgaattaatcagaatgggtcgcatggtagatcactgtgacaagctcaaaaaaatgttacatgattctttacagaatcatctgaagatgttgaaggtggactcagatgatgctgtttctgtatcttcttgattgctacttaaactgaccactggaggttgtagatagtagcatgttcacagtgctcttaattactcactgtgttaactgcatactatccggtaaaaaggccttgacaagttggtacggaatgttgaaattttagaacaaaagccatggcataggaggatatttccccttctcttacaacaggaactggacaaaataacctaatgatagatctgtcaagaattggagatgcagtccttataatccatgtccatgaataaccatataaaatttgtatatgatttatccacaggaaatttcgggcaacggttgactgactctgtttgatatgggtgctatggctagattggcacacaatagcagttcaattgattgcagggagatatagaatgactaggggatgaatatgttacactcgttttttctctactgaaggttgacgaacagtattctggcataaatccagttagagaacatgatctcatttgatgcccatagtttgtaatctatagtttgaaaattgtttaatgtgcaacttaaccagggatacaaaaccctacttgcttactaaactgccagttc

SEQ ID NO: 90362 - DNA, 263 bp, Glycine max
  Clone ID: PAT_MRT3847_52607C.1
ggctgggcctggtctcttaaccagttccgctccttcctttgaaaccttaccatcagctcttcaaggcccaggcctcagggctcataccactactttcaaattaacatcacccacaccatcaattacgtcttcacccgaagcaagatctgctgcattctactttactcactcaacggtgtctcccacttctacccttaaacctctctcaagctcgccaagtactacagtttctcctacattttctacaaatacaaccttatctt

SEQ ID NO: 90363 - DNA, 423 bp, Glycine max
  unsure (1)..(423): unsure at all n locations
  Clone ID: PAT_MRT3847_52608C.1
naaaacccccccttttattttgttacacacccanncacaagccaaaattttttttgtgttgatggaggccaataaaagtgcctaccactaaaagtctcccacaatttggacagcccaccaatgggaataagatgatgaacaaccaaactgcgggagcgagacacaatatgttttctatggaaaagaaaacttcgacatattttgtgggagggttaaaagtttacacaaacttgactgtggaaggagaataattcgaggctcccgattaagcttgcccattgaaaaaggatgaattttctctaatacgtaaaaggagggaacatgccacgactaccatactgatggccaagctatccgtgcttaaactctaacataggacctatcctttatattcactgatcctcctaacataaagcctaaggt

SEQ ID NO: 90364 - DNA, 616 bp, Glycine max
  Clone ID: PAT_MRT3847_52609C.1
cttaaactcactgatacacgagccagaaacaacaagatgactcttatgcattatctttgtaaggtgcttgctgaaaagcttccagaacttctagatttccacaaagacctagggagtttggaggctgcaaccaagatacaattaaaatatttggcagaggaaatgcaagctcctggtaaaggactggagaaagtagttcaggaattgactgcatcagagaatgatggacctgtgtcagaaaatttctgccaggtttggtaggtagctcgtccccttgctggggctgtcgggaggtcctgggcccgacttcttgccaatgtgggtcgatatgcagtggcgttgcctggcctcggcggtgcaggccccgcacgtctcccttttgctcggcttgctgcttctctcctcgccttgggcacagggtgcattttcccgcatgaggatatgtccatgcagattgtttttgtatgttggcctgcagattaggacgccggaactgcgtagccgcagctgcctccggctaatgcggagccgggtcagttgtgcagcatcatccataggatgaagtgattaacagtgatgtgaagtatctcatgcgcatagacatagttaccgttct

SEQ ID NO: 90365 - DNA, 740 bp, Glycine max
  unsure (1)..(740): unsure at all n locations
  Clone ID: PAT_MRT3847_5260C.1
aaaaagtagtttgctttaagagagcatgtgagtagttgggataaggaagccatctttgaaacctttgacattttgaaattttgataaaacgttacatcgttgcaacttcctagatgggttaattgaaagatgtagtgggcaaagtgtctgtgtccaaagattgtatcagccaactagatgttgctagctaatgcaagatttgttagctgatatatagcactttgaagaacttttcagttagcagtcacccgtggaaggcttgggttatcaaacaagtttcttggaagcttcctgattatccttttggataaaatgtaatacagacggtgcagctaaggggagtcctggtttggcaggttgttgcggattgttcatacagtaaaggagtgaattcagctttctttgctgaggtaatggcagcaattattgcaattgataagcctgtggaaaatagatgggatttcttttggctgaaaacttattcaagcttactcaagtgcccagtattacacacatttatcgcgaaggaaatgcttgtgctgataagctagcaacttctaggcaaataattttggtaaaccttctttccttttacagagctccataagtatagctgtataggcaggagcttcctttttatagattcagataattttgtttccttgggttgggtttggtcccccaagntgttttgttcactttttgcttatcatcaatatatcttcaagtttgtgtggcaa

SEQ ID NO: 90366 - DNA, 266 bp, Glycine max
  unsure (1)..(266): unsure at all n locations
  Clone ID: PAT_MRT3847_52610C.1
gttgaagaggcctacaacaagctaatagttgaacttgananaagtgttcctacattggtnggcattgaatgtcccaaggatgagaaacttcctcgtcgcnaaatttttgncaaacctaagacgcgctgcttcactattctccctatggngtttaatcttgtggttcgtcagaagtttttnnnttttgtgaggttcattatgnagaaaagggacaagcttagttgccagttggaancaacccnaacccngggantgganngttnggc

SEQ ID NO: 90367 - DNA, 287 bp, Glycine max
  Clone ID: PAT_MRT3847_52611C.1
ggagttgatgcatcaactacagccgtggctagtattggacagaacatcaatactaagggtgctcattgaatgaatgaaggcctggacttacaagactgattgaattcatggtgccataaatgaaagggaaggagcggataccacttgcaagacaagtacggaactaatcgttaaccatacagtacactataccacacctaagactgatctttacacccctatgtataacatcgcggaccgactggcacgcgtatatggccatggactctactcgaccgtcttgcttt

SEQ ID NO: 90368 - DNA, 368 bp, Glycine max
  Clone ID: PAT_MRT3847_52612C.1
cccacaacaaataaagaaaggggtgaattcatagagaacactggtccgcaactttcacaagctgaacaaacatcacactaaaagaaaattttacgagacccccccccatttttttacaaaatggcattttataacatcaccacttaacaccttgggttcctatgacgtattttgaacaattaataaaatatctaaaagtatctttacaagactacatctaacacgtaaaaacaagtggaaattcagataattccataaaacaggggctgttctcgaacattgaaacaatgcattttcaacccgaacatcatttttcttttcagacctcaagcttggtggattgatagctctgaaaatcaattccatat

SEQ ID NO: 90369 - DNA, 433 bp, Glycine max
  Clone ID: PAT_MRT3847_52613C.1
atttgaagatcctaggttttccaaattatgcatgcatgtaggaagaacatatataatgatacaagagcaatcttacttgtccttggattttgagtgcacttcaatgtgtgatttggtggacctcaatgatatgaaatcatacacatctcagatctacacacctgaagatctcattaaatttatagacaatggtgttgcagaactgggtgactgtttcattgaggagcaacctatactccatgttgcttgaatgtccttttgaaattcatgtttgacaacagattgcgcttgaacttgggaccagcaactgcagtcttacaatttttaactctttccttctgatcttatgagacaagaatgttattacccaactggcacttgtcctagttttttgggtagcgaaaaatttaccaaggggatggtgctttagctc

SEQ ID NO: 90370 - DNA, 904 bp, Glycine max
  Clone ID: PAT_MRT3847_52614C.1
tttttgattgaaagtgtaataattattaattaatcagaatcctctttaaaaaaaatccggaagggaaaggaaagtaactctgaccattaagcccaattcacctccaacgaaaagcccattcatacaaagagcagcaaaaagtgaaaacctaacctaataattacataagtaaaacaacaaaacaaaagagagaaaggaggctatggaggaaactccattgctcatggtaccttgaatggaagcgcaacttggtaattattggtcatttgtgacagacagtgagttggcaaggctgatggtgttgatttctgcgagtgtgtctgtttaattttaacttacactatttataaaaccatcacaaaaggactaggaaagacaccttagacattaatatgataagaataaatatatagataaatacatataacaacaattaatcatacatatcttcatatatcattgcctcactagttaactagtaaacattaatcaatcatatcaggcgttgaataactagtaaacattaatcaatcatatctggcgttgaaaatcttggaaagggcttgcaacacattgagttgcaacctcaattgcaagatgtgctccgccgtcttgatgaagagccggtccgggttcattcgggtgccgcccgaaaccagccgctgcagcttctttatcctcctctccacaccctcttgcctcctcctcctcctcccccacttcacctttgccatgtccttgcaacccataattagcccaaaatatctcaaattaattaaacttaaaaggaacaaaatataagtatataactaataaaaatattatgatatacttatgtgagaagagagaagaggaagaaaggaaagaagaaaataatatgagaggggaaggaagcggacgcgtg

SEQ ID NO: 90371 - DNA, 165 bp, Glycine max
  Clone ID: PAT_MRT3847_52615C.1
gctttgcgtatgtttaatatacaacgtttaagagcgcggattgggggtgggcattcgcattagtgtggagaccgtttatgtgtgaggtctgaagaaggctggggagaattaaggagaacggcgagctggaggatgcaagggggtgcaccatgggggcaaagaaga

SEQ ID NO: 90372 - DNA, 453 bp, Glycine max
  Clone ID: PAT_MRT3847_52616C.1
ttttaacattgttggttttttggcgactaatgatgatgttgaatcaactgtcctcttttattctctgcttcctctttgtgttgggaaaacatcacatttttgtgtttgtctcttttgctagacttgtccattttgccatcagtcttggacactataagatttgtgttgggttggttcattatgctttttatagcatgtctttggaagcctttcacgatagaatcatcttgtcgtcgatttgtctcgacaatgtagattttgtgttgaggaagcctttcttggaaggtgttgctattatggcggcatgacaccataatccacacctgtgtcctcctactaatgaattccccttatcagagttgattggcattcgctggttcttactttggctttctttggtatttgacacagtatatgtgtcataggtcggtttaaggcagtgatgaccgatca

SEQ ID NO: 90373 - DNA, 526 bp, Glycine max
  Clone ID: PAT_MRT3847_52617C.1
gagagtgaacagtatgctacatatagcttctatatatatgttactttgttttaggagctatagttgcatggacagatagattaacagtcgttatttgcggatgtagcatcatcaagattcacatgcaagcgcaggtggtgggtgggacttgatgcaatctaagtgctgtgccagccaagccataggtcttttggaactgagaatcttgatgatgctgcatcagccataaacgacttcactttaaaaagttagataaggactattctaacctcaacaagtgggcaaaaaaaaaaaacataatgaaaaaaccaaaaactgttgttgggggatacacacatgagcatggcacagccaaaaccttgagacatgatctgatctgtgcatttaaaccaagagaggtggtgacctttcccactttgctttttgttggtgtcaggtgggtttgtgtttttttgccctttgtttttcaatttatggtgtactaattttttatttgtactttaatggatataggtatggccttgca

SEQ ID NO: 90374 - DNA, 570 bp, Glycine max
  Clone ID: PAT_MRT3847_52618C.1
ggaattacacaaaagcttctaaaccagcgagcaaacaaaatggaacgtgccatggctatccaactctttgcttacagttttttcatagtgattgttttgctctttccgccggcaatgtgtgcggagtttaattatgacctttcaagccctaatgggccacttaactggggaaataatccccagtggcagttgtgtaaaaatggaaaaaaccaatcccctatcaacctgcaaaaacttagtgctgatgtagagtttatctcggggattcaaaggaattatcaacccgccaatgccacccttattagtagcgaacatgacataatggtaaattggactgagaatgcagggcatattacaattaacggaacacaataccaactcgcacaaggtcattggcattctccctctgaacacagaatcaacggcataaggtatgatctagagttacacatggtgcatataagttcagccggaagacttgcagtgactggagttctatataagtttgggaggccagatgatgagtttatatcaaagatagaagatgatttacagttgatggccgaaaac

SEQ ID NO: 90375 - DNA, 1265 bp, Glycine max
  Clone ID: PAT_MRT3847_52619C.1
gtaaggttctttacctgcttccactttctactttttcatcactttcattttcgttctctcttttgctatctaattttctgttcaagattcctaacttcccttctttaaaggaacgaactttgcattcaatttgttatgggtcgattcaatttctgttcgttgttactacgttgttttcatcataaaaatcgtgctcaatcatattaaagctgtctttttttaattttttttcaaatttaggaataaaacaattcatgtgaagtagtaattaatatgtttgatgtcgtcaggagttagttacaagtacaatggagttaagatcattgattttgcaaccaaacttgacacacttgtttccaacattcacatgctgtgtcaaactcaaaccttctttccagcatttacagaataatagtaataataaggaattatcactgaaaatccgtagtagaagggtaggggttttggctgccataacttccttgattttgggtggaaatggaatttttaggactcaaagtgcaaatgcatttgagtttacggctgcgagaagacgacagaagggggaagaggcattgagtggagtgaggggtcatgcacaagatttgttacatgttagagatttgttagagttagagtcatggagagcagcacaaaagacattgagacagagctcagcaattctgaagaaggatatttatatcataatccaaagcaagcctggaattgagagggcacaattaaggaagctctattctactctcttcaacaatgtaactagactagattatgcagcaagggataaagatggaccccaagtctggcagtgttacaagaacattgttgtggctgtcaacgacattctatccagaatataatgatcccttgtcttttgataatgggagattgaactgttcttgataagtttatgcgaacagctgactaacttgcttgttgcaagaagtggagttgtgaaggatatgcactcaaaagtaggctgcacaaaggaaaaaccctgttatataaaattatagactaagagtttgatcattaagagttagataatattggaggtttaatcatatttgacagaaaaatgatgcccagattctgtgtcatcattgatcaggagcttaaaaagagaacgattgtaagcatatcaattttgataaagagaaatctaagcttaattttttaaaagctaaaaaaaaaaaaaaaaaaaaaaaacacgccagacgccgccgccccccccccccccgcccccc

SEQ ID NO: 90376 - DNA, 199 bp, Glycine max
  Clone ID: PAT_MRT3847_5261C.1
gtgctatatggaaaaatgatactagaacagagaacaggtgagttaaaacaaaaatcttaggggattagtttactcaatgtgactgattctggatgatggataaaagtagggctgtttttactaattactgaaagatttataccagctcatctatgaacctgttgtgtatcattgtaacgagggtacaattttttcctat

SEQ ID NO: 90377 - DNA, 901 bp, Glycine max
  Clone ID: PAT_MRT3847_52620C.1
ccacgcgtccgacaaaaccctaaaccaccaccatcaacgaaaccttcctatctcattttccctccaatttccttctgggttttgcaatttggccaattgggtccccaaagctgtgaccttttcctctgatcaacgcgaagcggaagagaaacacccagagagagaaagagaaaaagaaaagttgttgttttcttttgttctttgggggtgttggtttaaaacccggggttgaagcattgcagacatcacggctattcaaggagttcgccactctctttctcatgcccgttgtgtccgacgcaagggtagtgtgacggagagaaatccttcaacgcacggcgggcgtggcgctctgccttccgaaggtggcagcccctctgacctcctctttcttgccggcggtggttcttcttattaggattctgaagtagtattagccattaacataacaatagaagacagcaccttctaaagttctctattaggggtttcttgttccttttttgttcttcttctttggtagttgttaggtttggtgagggctaacatgttgagcattaagagggttcctactgtggtttcaaattatcaaaaagaagagacaggggaggctgctgctgccggtggatgtggtcgtaactgcctcaaaagttgttgcattcaagatgcgaggctgcctttgtatgctttcaagaggggtgagaaggttggtggaaaggagttgcctttgcttggatgcaagaagcaccctgtggactttctggactcgcttgtccttggagagtgggaagatcgcatgcagagagggcttttccgctatgatgttacaacatgtgaaaccaaggtgattcctgggaagtatggtttcattgctcagctgaatgagggtcgccacctcaaa

SEQ ID NO: 90378 - DNA, 862 bp, Glycine max
  unsure (1)..(862): unsure at all n locations
  Clone ID: PAT_MRT3847_52621C.1
cccatgcgtttgtcggntaatctcaacaccccaccaaattgaatttgaaaaccaaaatcgaaatcaaaatcatttggctcctttgattcattcatcaaatcaaaaaatccattttccatgggcacttctcagagccgcgaaggcctcgaagtcaccgactcagactccgactacgaaaacgaagaagaaacagagcactacgaagacgcgaaaaccacccactccaccgagctcgatgacgtggacgcgaaactcaaagccttaaaactcaaataccaaacgccgtcttcctccgccaaaccgcttccccaaaacgccgttaagctctatctccacatcggcggcaacactcccaacgccaaatggatcctctccgacaaacacacctcctacgctttccacaaagacaccgacgaaaacgaaaacgacgatgtttggctcctcactgtaggttccaaggtccgcgctagggtttcctccgaaatgcaattgaagatgttcggcgaccagcgccgcgtcgatttcgtcgccgacggcgtctgggccctcaagttcccctccgatgacacctaccgccgattcgtcacggaatttcagagctgcatgttcgagaacgtgtacggaatcgagtgcacggaagaaaacaaggtcaaaatctacggtaaagagttcatcggctgggtgaagccggaagccgccgacgattccgtctgggaggacgccgtctccggagaaccgtctccttcgccgtcgccgtcgcggcggagaaacgatttaatggaggaattcgaagaggccgcgaatggcggggtccaaaccctaaccctaggcgctttggataatagttntatggtgaacgaca

SEQ ID NO: 90379 - DNA, 398 bp, Glycine max
  unsure (1)..(398): unsure at all n locations
  Clone ID: PAT_MRT3847_52623C.1
tctagcagcgcgccgcnnccttttttttttttcttttttatatttttgctagaaagttctgaaatactctgaaaaacgagtagcagtgtaataaatattcacaacttacacctgcctttccctaacatgcaggggtacaaccaccgacattattcgaacaacaactttattcacaagccccatgtctaaacgtagccgagggcagagattgcccgcactaaatgcagcaatgtgagagcgtgattcgggtaaaccattcacaacatgcactgtatgacactatatacgtacaactaagggcttaacttatagaacaaaacaatgcggcacaaattttgccattcatcgcagtcttaacagcaacacgacccaatgtggtaatatcaggcacaaatttg

SEQ ID NO: 90380 - DNA, 253 bp, Glycine max
  Clone ID: PAT_MRT3847_52625C.1
cccacgcgtccgaaaaggcgcaatctttacattatctcgacaaattgctagcaatagcgatggtcacattatgcgagctgtcgctctttacgaaagctgatctgctgaatcaactgttggtcctgaaagcggttctctccttgcttcgtgcagctaaggccacaggcttgccccctaacacgctatccaagatttaggcttcgaggttgaacattgaccatggtatgactgtgatttctcagaatcataatgc

SEQ ID NO: 90381 - DNA, 491 bp, Glycine max
  Clone ID: PAT_MRT3847_52626C.1
ggggttaaaaaggaacaaagcccgggtatggaattccataaaattcaatccttttttttacccatatatagttaattatcccttaattataaggagatcatgtcccctaggaaaaacccaaagcaaaaatgaatgataaatttgataatgactttttttgccatccctaaagtttgttcatccccctccttagggcattggccctcactaacctcccaagggggttaagggccaatttcaaatcctccaatggattgccagcccccactgttttgtacaagtagctataaaaggtcattttttgcacatacttattaacccacatttccacaaacccttcctttgcggggttggacctataaaacaccttttgaaaaatatccaaaaccttgtaagtgggccaaaaagttttgccccatttttccaaaaatttcctaaagccccttttttccaccatttttttcccattttaaaaactcttaaaaattgcc

SEQ ID NO: 90382 - DNA, 813 bp, Glycine max
  Clone ID: PAT_MRT3847_52627C.1
gtagtaatagttcttatctgtgaatcttgtgttctcatgttctgctttcactgatcaagctttttactcaattattgaagccacgtgatagaatttaacataaattgaagtggggtctgttatagtaccatatctgcttttctacacaatgtgacaacaggaactttcacatgtcacaattgtagattaagcactcatgcagtccacctttcccaaatgatagctccctagctagtggcagcatctcaacttaaattcggtcatatagatgttgatatatatggcaactccatcaagtgtagagtctttccatccaaaatcaaatactatgtaacttgtgtttctgcacgagaccaatatttgatctttgaggttgcccaatgagcattagagtaaacaaagtgaaaaaaggttacaacaacaacgccttatcccactagatggggtcagcaaagtgaaaaaaggttaattcggcaaaataagtcgagcagcaagtttgtgggaggcaatagcaactagaggaacaaaatagaaaaacatgaataaaggagaaaaagattagcgactaaaaataccattgaaattcatgtgaaaaatcacttcacaaaacagctacgactttctgcagatactccttcggctaattagtacaatataaataaaagacagatatctattatactatggactaagcactatccattgtaaacctgaaaaaaatggtacaacaaatctctggtcagaattcctgtattaagatttctagaccccttaccatgaatcacttttaaaatatgattcatatgaatcgat

SEQ ID NO: 90383 - DNA, 250 bp, Glycine max
  Clone ID: PAT_MRT3847_52628C.1
tgggggtcgcttatacggcgccgaatggagcgccaagtaactttcagactacatcgatgcctccgacgactccacctactatctccaaaggaagctcgtgcaacccgctctcgccggtgattccaccggtggagtccagaccttcttctctcccgtgtctactacctgcgctgtgttccaagtgatagtgggtggagctgtattcgatggaggcggcggtggtgctgttgcagctgcacctgcaagtgga

SEQ ID NO: 90384 - DNA, 473 bp, Glycine max
  Clone ID: PAT_MRT3847_52629C.1
gggaaaaacacaatttataattttttttccaaaacaaaatttaatcttcacatttttttatcaacaaattcatgcagggggggcatttaatatctttatttggggaggaaccaaggatttaatctgcccatgttatgtttactgggcccacggtggggccccaggataaggggttggcccacaatttctgaacaagcctttattttcaggaccccctttgggataaggaattgcccgatgaaaggggtcccgctttatttttttgggaaaaagggggcctcgacatccatttggatctactgggaacggggttctaaccaattcctcgccttttaaagcaactgtttttgcttttgatgtaacaggagtgccggcttaaaaaaaccttgtttttggaaagctgatcccaaatcggggtaaatgcccaaatctgttttccttgaaaacataacttacaacagttttttttgggg

SEQ ID NO: 90385 - DNA, 227 bp, Glycine max
  unsure (1)..(227): unsure at all n locations
  Clone ID: PAT_MRT3847_5262C.1
aggaantccaangggnggaganggtgaccaaccccgcnaacggccagnnncaanacnaanggnggcganggtggaccccaggacatgatgtcagggcgtaataggggcccatgancatgccaatgcccaacanccccgccgntcaagggcntccggccggccccgncaacggcggtgggtacttncaaggcgcaggncccgaagccangcccgganantccaccagc

SEQ ID NO: 90386 - DNA, 381 bp, Glycine max
  Clone ID: PAT_MRT3847_52630C.1
attgcacaatgtttaacatgggaacgttttgggagcttttttttgttagaattttgggaattgtcttgtctgtgatggaatgctccttaaacccaggcttgggttcttttgattctgatacacttaatggttttagaatttagagtaggggatcatgatccagattagcttcctcatctgaaaatgagtatatgacagatggaaacctaataagaatctccggatactagattgattttgcacgatattgacaagggaagagaggtttaattggtggattttagacataatttgataaagatccaatgctaaatatttatgtttcaaagattgtatttcagtgaagcacaattgttgcaaagttgttgggcaccatacatg

SEQ ID NO: 90387 - DNA, 490 bp, Glycine max
  Clone ID: PAT_MRT3847_52631C.1
gttcgttcatgcgttcgttatataggatattgtctttttttagcagaagcgacctgattttataaattgaaactcaaatgctgggcggaaccaaccaatccttagtagagcaacaggatccgagtctccgattcaaacaaataccggagcaacttcacaaccaagggtggatcctaatggaataagaacacggtattaggttaacttattctaggactaaaatgtttgaaggtttcaacaggccattgatgcctttaaaggggggaaaacgattgtgtttcacgaattccctcaagcaatgcagggggggaagatcaaaaattgaaacccgcggctcattgaagattacaggaacccaaagccctccccaccacatatttcacctttgacgttagggtggaaaaccctcgccataagaaaccaatccttgctttgcatcaaggattctggacaaaaacccggacctgcagagtgtacttggtcttggggg

SEQ ID NO: 90388 - DNA, 567 bp, Glycine max
  Clone ID: PAT_MRT3847_52632C.1
attaaattctttaaattaaaatgataaatttaacacgttaatgaataaaaagaatagtgtgaaactatttcttctttttacaaataaaatacatcaaatttttaaactctgtaaaccaagcaccctgaaaagggtaaaaaggctgcaccaagaagccttgtatagcactataagcgcgagggataatggttgatggggaaataggaaacaacaagtggagctcctcttgatttttgtttctctgaagaaggagatttcagttgagatgatccttcggcatagtcagagacttgacatgatgtggatggagtaaagcaattcaagaaatatgacatcaaagccatatatatcattagtaagtgttttggtaccttcccttagttttcttggtgagtttcacgtaaaatatgtttgggtggaggctagctatcaattgtagttcctctttctaaggaagcaagtagtgaaatttgaaattattgaagaggaattccttttattatgcaaatgttcagcttctaggactatctattcacacatcacaacaaatgaaattgatccaattcc

SEQ ID NO: 90389 - DNA, 420 bp, Glycine max
  Clone ID: PAT_MRT3847_52633C.1
ctcgagccggtggaatgttggagaagacgggatatttgtgagtccgtcaacttgttaataggaattcccattagagggaaaattgattgggttgcttaaaattgaggtggcatagagtgggtttcttatatgaagagcattgaaggtgctcttacacacacacacacacgtgtgtgtgtatttttttttttttaatataggatcatcctatgtgctatcctgcttttcgcatttttggggttggctactacgtaccactctttagaattgataacaaggtaaaagagaatgtttcatgagccatgaactgcaatagagtttaattgattactcatgctctgatttgcagtaattaagattttgttagttatattttttcttaattttgcttttagaactcacactggtttactgatgctt

SEQ ID NO: 90390 - DNA, 258 bp, Glycine max
  Clone ID: PAT_MRT3847_52634C.1
ctcgagccgttcccaaagaactacccccttttcagctgagccctggggactgttccaaagccagtgaaatgtgaaggaaagtggggtccttcggggcgatgctccctcagcctcagaggagctctaccctgctccctgctttggctgaggggcttgggaaaaaaacttggcactttttcgtgggatcttgccacatttctgatcagaggtgtacactaacatttcccccgagctcttggcctttgcatttatttatac

SEQ ID NO: 90391 - DNA, 279 bp, Glycine max
  Clone ID: PAT_MRT3847_52635C.1
aggagaggagaaatgaggacagacgagtagatcatgaaggtctatgcggaggagagagagtccatgttctgacaccgacaacattcatatgtacccaaagctcaccgcttcaatagctgaccagagtacattctttatcttgactttatgacacaatataaagatcttacaccccaattctcagctgtccctcagaacatcttggttactactcattccatgcctccaacggtaaagtcttcactgtaagcaccatgttactacattgtctcataccct

SEQ ID NO: 90392 - DNA, 222 bp, Glycine max
  unsure (1)..(222): unsure at all n locations
  Clone ID: PAT_MRT3847_52636C.1
ttaggcacagaaggtattggtattggctagatgctattgctgtagttcaacttccttttgtaatgcaaatgattgcataacaaatttggcttgattgcattaacaatctttcctttcaaaaaaaaaaaaaaaaaaaaaaaaaaaaaaaaaaaaaaaaaaaaaaaaaaaaaaaaaaaaaaaaaaaaaannannnnnnnnnnnnaaaaaaaaaaaaaaaaaaaa

SEQ ID NO: 90393 - DNA, 1482 bp, Glycine max
  Clone ID: PAT_MRT3847_52637C.1
aattatcaatgctactcttaattggataatttcatctccttttcaagaaccctacatgcctttattgaagaaaacaccttcacattagaagttcccgccatttgtataacatcttttccggcactcacactgttctcaattcaatcgttcatgctcgcattgcattttcgcccttgctttcctcttcccttccatcgctccctaacagttagggtttcctctctcctctcttttcctctttctctctcctccgccgtccctctccgcgccatgtcgaagcccccctccgccttcgatgccctcatgtccggcgcacgcgccgccgccgccgccaagaaaaaatcccaatccctttcccaatcatcaccctcatcccccaagaaacgcaaaaccccaccctcctcttcctcacaaaaccctagcgacctcaaacctccttccccacccaaaaccgttacacctcaagaaggcgccgttaagcccgaaccgctgaaggtccgccacgtgtcatcttcttctttttcgcaggagaagaccgcggagcttaagaagcaagctccgcagctgaagaagaaaccctccgatttcgatcccgcttctataagtgcatgggagaagggccaacccgtgccgtttctatttctctgcttggccttcgacatgatttctcaagaatccggaagaattgtcatcactgatattgtttgcaatcttctgaggactgtgatgtactccacgccggaggatcttgttaaggtcgtttacctctccgcgaaccggattgcgcccgctcacgaagggatggaattgggtattggcgacgcttccatcgtcaaggcgcttgctgaggcgtacggaaggaccgaggtgtggattaagactcagtatcagaaaaaaggggatttgggcttggttgctaaagagagccgttcctcgcagcctatgatgtttaagcccgaagcattgactattacgaaggttttcaacacttttcgtcttattgctaaggaatctgggaaagaaagtcaagagaagaaaaagaatcatatcaaggcacttcttgttgctgcaactgactgtgaacctcaatatctaatccgtttgctacagacaaagttgcgaattggctatgctgagaaaactctcttagctgcattgggccaagctgcagtatacactgaagaacactctaaaccgcctcctgatattcagtctcctttagaagaggcttcagagattgttaaacaagtctattctgtacttcctgactatgacaaaataatatctgcactgcttacagagggtctatggatgcttccaaagaaatgtaattttactcctggtgttccaattggacctatgctatcaaaggcaacaaagggtgtatctgaaattctaaataaattccaggatgtggagtttacctgtgaatacaaatatgacggagagcgtgcccagatacattacctggagaatggatca

SEQ ID NO: 90394 - DNA, 497 bp, Glycine max
  Clone ID: PAT_MRT3847_52638C.1
atcatggtcccagggaagtcgagctcttggaatttgccgaactatgttgatgcatcaccatagctctagattgttcctaagactatctcgtctactttcttttacatgtctctattttcctgatttggaagtccgtgataattcaaggatctacttgcgtatgctggtctgcattccaggaaagaagcttagagacatcttgaatctgggggacacgattcttggaatttcacaatcttcacatccaacctcgtttttcaacgttcagtcacctcgaccttctcagaaattgaagacatttaaaaacttatcatcctgcattcaccttgagcgtctggtcccattgttagtcaaacagttttggtctctgtcgttatcaaatttagttgtaagtaacaccaaacctgcttatctggagagcatcagagacctcaaagctcctgttgaggaaaatgaattttctgatagttccaatacacagatcattcctgaatctg

SEQ ID NO: 90395 - DNA, 270 bp, Glycine max
  Clone ID: PAT_MRT3847_52639C.1
ctcggaacgcggctcgagcttgaggaaactttgtgatccataaataagtctcagaacacgaaattctcatcacaaaattctcataccacaatacaaaagagattgaagctagcagactcatcaaatggcggaaatggcagcatccttcgcacgagacaaattgctttcactgctaagcaatgaagcaaacctgctttccggcatccccaaagaatttgcagacataagacaagtactcagatgtcatgcaagccttactctaggatgcag

SEQ ID NO: 90396 - DNA, 258 bp, Glycine max
  Clone ID: PAT_MRT3847_5263C.1
ctttgcacagcacacggaacagatggcaagtgattacgaaatagcaagcgattcctgactggatgttcctcgcaccagcagagctacatggaatttagaaacaacatggttgtctcatgcagcagcctcaagcatcagatatcctgctgttgcacaagttgtattactactaaggctactaactttgcacaaattatgaaccttagccagagtgttgttggtgatcttagattcttcctgatgggaagtgtctgaggg

SEQ ID NO: 90397 - DNA, 361 bp, Glycine max
  Clone ID: PAT_MRT3847_52640C.1
cgtaacataagcaaacttaaataaggctggctaccacatatgggaaaaataaattctcacggatccacattatccttccactccaaatgcagattcatacaaaacatcagcgagagacaaactaatcaggcagtgatacatcattgttgcgatcattgaagaccaatggagcgatctcctcggaggccacagaggcgaacgcatgacctttaagcttcctaataccctgtactacatatagtagttcctttacctctcaacattctagctagcttctatctatctatatgtaataagatgcgttgatatattggcactagcttcactttatgttgtatcagctgcgtgtcctcaagacatg

SEQ ID NO: 90398 - DNA, 509 bp, Glycine max
  Clone ID: PAT_MRT3847_52641C.1
ggatttgaatgtttgttgaagtaatcttgaaaacaaacttgtttaattattctttggcattatcaaaatcatgttttcatacatttatattcttctccttttttatgatgacaattattatcaagtgaatttttttcagcatcatcaaaacctgcattattcacattctccccctttttgatgatgacaaccattatcaagtgaatttttttcagcatcatcaaaacctgcattattcacattctccccctttttgatgatgacaaccattatcaagtgaatttttttcagtatcatcaaaatctgcattattcacaatgtcacattgttatatatagctacatcaagcaaaatgtcacattgttatatatagctattgttatattatatgtttctatcttaggaccagatctcaattagtgtctcaggttgctttactaagtttacttgttctaaatttctttccatttaaaacaagttgtaagctcatgagtacttttattgtttcg

SEQ ID NO: 90399 - DNA, 157 bp, Glycine max
  Clone ID: PAT_MRT3847_52642C.1
ggatgcctacaataacaagaagtacttgcctctagatctccggcgtaggaagaccagggccattcagaggaggcttactgagcaccagccatgattgagagacgacagggagacgaagagagagttatatatcccgctggagagatatgctgtgaac

SEQ ID NO: 90400 - DNA, 571 bp, Glycine max
  unsure (1)..(571): unsure at all n locations
  Clone ID: PAT_MRT3847_52643C.1
caacggcggaggtcatgtccccacgcgtccgtacggctgcgagctagctcctgtaggggaaggaggtggtgaaccacccaagggttcactgggatgggctattgacacacattttggttcttttgaagcattaatacaaaaagttaacgcagaaggtgctgcactacaggggtctggatgggtgtggcttggtctggacaaagagttgaagaggcttgtagttgaaaccactgccaaccaggacccactggttactaagggaccaaattgggccccaangcnnggnanagangnnngggagcaagcgnacnacnnacagcacaagaatggaagaccagacnatcngaagaacacggggaaaggnanaaannggaaacacgccagngaaggggatgagaaagagagctcnnaggcngaaagggcnacnggananagctccngagangacagannngcagcccgggaagaganggggaanaaaaagangngaggggaggggagaaaaaacacnaacaaanncacgccgncgccccgaaganccncgagcnnngaaaagcngcaaatcngggac

SEQ ID NO: 90401 - DNA, 430 bp, Glycine max
  Clone ID: PAT_MRT3847_52644C.1
atccactttaagcaccttgaggccggggccaaacaagtccacattgggattattaggcgtacaccataaggtttacgtttatccccaccccaaaatgttaccaatatgagcatagtactctgcaatccatggagatagaaacaagtattatttttaattaccaaaattggttatatcaatagaaagatctattatgtttttgacatttttatgaatttgattcaatgtggatgtgtcttcttaaaaaatggatttctttcattattattctttgctaataaggctattgaattgaattttcatttttaaaccatttttctttccttttattcaataaagatacctgaacataaatgagcttatatgttttttccttttttaatatttgcaaattaaacaaattctataatgggaaaaaaaaaaattattt

SEQ ID NO: 90402 - DNA, 411 bp, Glycine max
  unsure (1)..(411): unsure at all n locations
  Clone ID: PAT_MRT3847_52645C.1
gtgcctaatantccctcagattatgataaactagatccacttcatgcaacctcacaaacaaatattaaaggggcacagaaaaaagctaagtccaaaaaacaccctcaaggtgcacgtggaggccatgttgttgctacccttcatggctctttgactaggttgtgtgacacaaagtggtggaacctatgccaacatggggcaagaataaaaaccaagcagatcaagagttcttgtgtgtttcatgacatggagggtgtgcaacttttttccaagattggaagggacagcaacattaatccaaggattttcagctatgctgagctctacataagatcaaggggtttcttttaggaggaggttctaggaagtggagggtttggcaaagtgtacacaggtgtgatgccaagtgat

SEQ ID NO: 90403 - DNA, 2217 bp, Glycine max
  Clone ID: PAT_MRT3847_52646C.1
catactcaagtgttacaacacaattccttttatatagatcaaaacatagatggtggttagttagaactaccactctcaacacttcattatctgttataacaaattttcaactacttaacacctaagaccaaatgatacaaagttgtttaattgaattttatcatatttctacatatatatgcttttgtatttgacatcttgaacgtgattccagtgaatagataaaacagcaattttgatttacttccaatccttgggcagttccagccaaaatagatgtccttgagaacatttacaaaaatgataacactcatttatgctacacaaaattttcactcgttccttattgatccttgtgcattggcactttgttggtttgtgaaaccaagaatgtataccctacatacatcttctaaagaataatactatagggacaacaatcttttagcagttgattccacacagcttggtatcaggtcccttattcttaaggacaaatggatcaattcttacccatagtaaggagaaaatagaggccaataggactgaccaaatcactacaatggtgggtgtgcggttttggcgacccatcaaacctttaaggaatggatagagatggacaatcacccagaaggaaaagaaaagctttccaaatagtggtccccaggattggtacccattgtttatggcatctgagattccagcaacaacaccaacaatgttgatgatcaagatagtggttggaggaatcaagagagtagtccacttaaaggtgtacaattctccaaattcttcatcatctgctgccttggatgtaacagtgaagttggtgtcaattccagccaaaaccttcagaagaccttgtataacagcaaagagatgtgctgatacaccaccaatgacccaaaactgctcatttctccaccattcctcaatgctcactccactccatttcaacccaagaatgccagtgcctccgctctagcgttgttgcattgcagaagcgtctccattttctttcgcgatggccgcgcgagccctgttgaccagaaaaaccctagccaccgttctccgcaacgacgcgaagcccataatcggagctggcatagctgcagctactcattctcgtgggttgcacgtgtacacgctccccgatctggattacgactatggcgctctggagccagccatcagcggcgaaatcatgcagctgcaccaccagaagcaccaccagacttacatcaccaacttcaacaaggccctcgagcagctccaagacgccgtcgccaagaaagattcctccgccgtcgttaagctccagggcgccatcaagttcaacggcggaggtcacgtcaaccattctattttctggaaaaatctagctcctgttcgtgaaggaggtggtgaaccacccaagggttcactgggatgggccattgacacacattttggctcttttgaagcattagtacaaaaagttaatgcagaaggtgctgcactacaggggtctggatgggtgtggcttggtctggacaaagagttgaagaggcttgtagttgaaaccactgccaaccaggacccactggttactaagggaccaaatttggttccattgcttggtattgatgtttgggagcatgcgtactacttacagtacaagaatgttagaccagactatctgaagaacatttggaaagttattaattggaaatatgccagtgaagtgtatgagaaagagagctcttagtctgaaagtgctacttgatatagctcttgagatgacagatttgcagcacggtaagagatgtggaataaaatgatgtgatgtgatgtaataaataacactaactattttatgtagttgtactgaagaacctcgagcattgtatggctgcatttcttgtactaagttcctcttgtcttatggattttctgatgctctgttaagatactattcgtttccagtgatgtatatcttttgcctccagagtttgatccttttactcgaattagtagaattctgaaattcaagcccaatatactttcatttattggatgaaaaaatcatggaaatacgtgattttgatgccctgttaagatacttaaccattccaaggtaatgtatatgttttgctttcagggcgtaatgtttttgcccgcatgaattgtagaatttttgaattcatccaagtcctcatagcaacacttggtttttcc

SEQ ID NO: 90404 - DNA, 164 bp, Glycine max
  Clone ID: PAT_MRT3847_52647C.1
atgtaaagcatggtattggtgggggccattaaaagtatttgtgtgaagaactttgaactttaaaaagataaaaacttagcttttttgtgtgaaagtgttaaggccccctttaaaaaaatctgttggatttcctagcacgcggagaaatagggttttttttgtgc

SEQ ID NO: 90405 - DNA, 987 bp, Glycine max
  Clone ID: PAT_MRT3847_52648C.1
agtatcttaacagggcatcaaaaaatccataagacatgaccaacttggtacaagaaatgcagccatataatatgctcgaggttcttcagtacaactacataaaatagtgctatctattacatcatatcattttattccacatctcttagggggctgcaaatctgtcatctcaattgctatatcaagtagctccttcagactaagagctctctttctcatacacttcactggcatatttccaattaataactttccaaatgttcttaagatagtctggtctaacattcttgtactgtaagtagtacgcatgctcccaaacatcaataccaatcaatggaaccaaatttggtcccttagtaaccagtgggtcctggttggcagtggtttcaactacaagcctcttcaactctttgtccagaccaagccacacccatccagacccctgtagtgcagcaccttctgcgttaactttttgtattaatgcttcaaaagaaccaaaatgtgtgtcaatagcccatcccagtgaacccttgggtggttcaccacctccttcacgaacaggagctagatttttccagaaaatagaatggttgacatgacctccgccgttgaacttgatggcgccctggagcttaacgacggcggaggaatctttcttggcgatggcgtcttggagctgctcgagggccttgttgtagttggtgatgtaagtctggtggtgcttctggtggtgcagctgcatgatgtcgccgctgatggctggctccagtgcgccatagtcgtaatccagatcgggtagcgtgtacacgtgcaacccgcgtgaatgagtagccgctgctgttatgccaactccgattatgggcttcgcgtcgttgcggagcacggtggctagggtttttctggtcaacagagctcgcgcggccatcgccttctacaatgcaacaacgctggagtggattcgatgatgatagaagactggctcgagcc

SEQ ID NO: 90406 - DNA, 169 bp, Glycine max
  unsure (1)..(169): unsure at all n locations
  Clone ID: PAT_MRT3847_52649C.1
cgcangcacgcgtacgtaagctcggaattcggctcgaggnnatntgtttgcnagtgctccganagctgnngctatnngnatgaantgnnnttgccacgattggagtgatcagcacngcatgaagnnttnnnagcnctaccnacgangcactancagacttgngacggtn

SEQ ID NO: 90407 - DNA, 290 bp, Glycine max
  Clone ID: PAT_MRT3847_5264C.1
ggaattaatcattatttttacttatttgtaaataaagataactacccatgagattcatacttcagtccactcattaaatgataagaaaatgttgaaacaaacaattcttgtttcatcaatcctgtgcattaccaaaggaggtttatcattttcggaggattacaaatcaagagaaacacttacctcttgaaggtttgggcaaatcatattttaaaacaccagaattgccccatgtattgtataaaagtgaaagaaaggaatgctaactcttttataaaaattgatatctt

SEQ ID NO: 90408 - DNA, 397 bp, Glycine max
  Clone ID: PAT_MRT3847_52650C.1
tacagtttaacgataacaactgtttactcggatgtccaactgagtcccgtaggatatggggaccctcgaaattcacaacaaaaactctgaacaaaatcaatcgacaataactttctactcggctgtccgattgtctcccgttgtatatcgagacgttcgatattcataatagaagctatgagcaaaatgtaacgacaataatttttactcggatgtccgatcgtgtcccgtagtatatcgagacgctctaaattcaacacataagctcttaataaaatcaatcgacaataactttttactcggttgtccgattgtcctccttcatatatcgagatgcttgaaacccagaatagaacctctgaggaaaatcaaacgattataactttttgctccgata

SEQ ID NO: 90409 - DNA, 2635 bp, Glycine max
  Clone ID: PAT_MRT3847_52651C.1
cccgcgtccgccagggttgcatgatgatgcctgtcattcgacgttgtccttcaagaatagtgagtgtctctggagaccaaggtttcagttctgacagagaatgattgtcaagttttggctgattctgaggtgaatagggtgtcctcttggctaggaatgcaagaaagtgatatggatgcggtgttttccaccgagggtactcaaaagttggactttggttatgggtctgagaagctggactacatgtttgcttctgagagtatagtgccagagggttctgttttgagcgtggacggatcggttggggttggggcagaagatgggataagaagatgatcctgagagccaactgattgtggattgcaatgcactgacagtacatatcgaaaatgaaagtgttattattcacaactttattcgtgataagtatcggttgaaatttccggagcttgagtcactggtgcatcacccgattgattatgctcgttcggctcgagctcgagccgatgaaatggatctcactcttgtggatttagaagggcttttaccctcggctattattatggttgtctctgttacagcatcaactacaactggcaagcctcttccagaagaagtgcttagcaagacagttgaggcctgcgatcgagctcttgatcttgactcagcaaagaagaaagttcttgatttcgttgagagtaggatgggctacattgcacccaatctttctgctatagttgggagtgctgttgcagccaaactcatggggacagctggtggtctagcatctcttgcaaagatgcctgcttgtaatgttcagcttcttggtgccaagaaaaagaatcttgctgggttctccacagcaacatctcaatttcgtgtaggttaccttgagcaaacagaaatatttcagactactcctccttctctaaggatgcgagcatgccgactcctggctgcaaagtctacacttgcagcacgagtagattcaatacgtggggatccatctggaaagactggaagggctttcaaggatgagattcacaaaaaaattgagaagtggcaggagccccctcctgctaagcaaccaaaaccgcttccagttccagattctgagcctaaaaagaagagaggtggtcgtcgtcttaggaagatgaaggaaaggtatgcaataacagacatgaggaagttagccaataggatgcaatttggagtcccagaagagagttcattaggagatggtctgggtgagggctatggaatgcttggtcaggctggcagtggcaagcttcgtgtgtctgttggtcaaagcaaacttgcagcaaaagttgctaaaaaattcaaggaaaagaattatggtagcagtggtgctacctctggtttgacatcaagtcttgcattcacaccagtgcaggggattgagctgtcaaatccacaggctcatgcacaccaacttggtagtggaactcaaagcacgtatttctctgaaactggaacattttcaaagatcaagaggacatgaaaccatacatgaatgcaaattcttgttcagtcccctggattattcttggtggacatgcctagaaattgttgatgctgatggatattacttgatagttttatggtagatttttgaagagtagccatgtttgttgttgattatgatgttgataccttccattgtatatgacttctgcagtgccttattccagtttcctttccgtagtaacaaagaaatgttgatcaatatagtggcaattttcatggcctagcttgagaacaaattgtcaatgtagaattgtaaaccaagctcatgtcaattgagaccaagtttagttgcgagcccgcaatttggagtcccagaagagagttcattaggagatggtctgggtgagggctatggaatgcttggtcaggctggcagtggcaagcttcgtgtgtctgttggtcaaagcaaacttgcagcaaaagttgctaaaaaatttaaggaaaagaattatggtagtagtggtgctacctctggtttgacatcaagtcttgcattcacaccagtgcagggtattgagctgacaaatccacaggctcatgcacaccaacttggtagtggaactcaaagcacttatttctctgaaacaggaacattttcaaagatcaagaggacatgaaaccatgcatgaatgcaaattcttgttcagtccctggattattcttggtgtccaatgcctagaaattgttgattccgatggatattactttatatgtttattgtagatttttgaagagtagccatgtatgttgtttattatgttgttgatacgttcccttgtatatgacttctgcaatgccttataccaggttccttttcgtagtaaccaaagaaatgatgatcaatatagtgaccattttcatgggctagctttagaacaaaaaagcattgtcgatgtagaattgcagaccaagctttttgtgtttatacttttgccacacataataatcatatgagtatacttttgatgagtttaaatgtgcattcaggggaaataattcccctaagtggtgtgtttggtagagatgaaatttttaattcctttttttttattattaatagtattaaaaaaataaaaaaatataaaac

SEQ ID NO: 90410 - DNA, 464 bp, Glycine max
  Clone ID: PAT_MRT3847_52652C.1
gaaagcacaggagtgagttatgtcagactcaggtgcagttaccttgccagctgtagatgacattcccaagcatgggaattgtagcgaactgggtattgttgtggctgaagctgagcatctacagtcactggaacccgaaagttctttttttggagctagacagaacgcataaaaggcaaatatatatagcagcaagttcaggaaattggagtgaggctttatcctatttcaaaattcatcctcattggtggcgaattccattgacttctcgtggagttacagctctacacgttgcagttagcatgagaaaaactagttttgtggaaaagttggtggatcgtgtggatcgtatgaacatgcaagatttggaaattcgcatggcagatgggaacacagccttttgtttggctgcgataacaggaaatgtgaaatgtgctaaaattctgttgggcaagaatccgggg

SEQ ID NO: 90411 - DNA, 376 bp, Glycine max
  Clone ID: PAT_MRT3847_52653C.1
aaaaaaacgaaaacccttcaaaagggccagcaggcctttaggcttttacagaattggtgaacaatgggggattcctttcaccctatggggatactttaagcctaactggggccccccaaaactttccaaaaagaaagaaaaaggttagccccttttcattaggggtctgggctatttgaaaacggggcaggccttaaccccaattccgggggcagttgggcaaggggccaatgggcaatgggccaattaacttccccccccttggggattatggcccgcattttgcgggggaaagaatttttaaacccccctaaaaggggggcctggatccaggggtggtgaaaagccaaaattggacttttgccaccagggtttg

SEQ ID NO: 90412 - DNA, 448 bp, Glycine max
  Clone ID: PAT_MRT3847_52654C.1
gctatggccctgtgttttagggggattattctgacttttctgggttcaaaagggtagaggaaaagaactctcatctttcaatgctttatcctctacaaaggtacactatgaaggcaggaactccatccaaggatgtgcggtaaacaacgtggctatctcacatatattgaataccatagaaaattcattctttgtttgttatccttggatctatcctctaaagaatggcaaactatttcaccccctcgtcatggtcttttatctatagctcatgttatgagtcgcacacgtacaccaaacacttgctaagttataggatatggagattagtcctcttggcttactatctgacacgcctcgaatatttatctgcatatcagaggatacagagcgtatcctcccgtgccaattgctcagtggcaatctgctgggacacccatggataatg

SEQ ID NO: 90413 - DNA, 195 bp, Glycine max
  Clone ID: PAT_MRT3847_52655C.1
cataagaagagtgccaataaaattaacaacgatgttgttgttgatgttgatgttggtgaaggtgatgtcatataaggtgtagaattttatatcaacagagatttttatgagggagagcttcatggatgaaggtgtagtgggagtggagtgtaccactattttgagagtgtgaggtatgagggggaatggctggat

SEQ ID NO: 90414 - DNA, 263 bp, Glycine max
  Clone ID: PAT_MRT3847_52656C.1
gttgcggtgtttctgtcttgtgcactaattcttcgggaaactgaagctttgcaaactctgcctcgtgctgccctggctctgctggtgtctcccaatatttcttcttggtgtccccccgacccttgggggggtggtttcggaatggttacttgcttggaatcctcgtttttcgcccccatggcgttggtggctccccactccctccccgctttgtcggccccctgggctcgtcggtaacggtgggctgaaaggctcgcccaatc

SEQ ID NO: 90415 - DNA, 277 bp, Glycine max
  Clone ID: PAT_MRT3847_52657C.1
aaaattaaaggggcccctttacctaaaatttttagaggaagacggcccattttgaaaaatttagaaaaatcttctaaaactgggctttttttttttgcccctaaaacttggaaatttctaaaaatgttacccccaggtcccataaaaatttttagcattgggatcagcacacccttaaggaacaaaaatttttactggccaagttggtttggcctccatttaaagatgggaaaaaagtccccctgttaatagcatcctggttagcatttccaagggc

SEQ ID NO: 90416 - DNA, 314 bp, Glycine max
  Clone ID: PAT_MRT3847_52658C.1
gctagtccacacactatgttctgaaaaatgtggtccaaagattctcttattctacttaggtgcgtggacactatacgttggaactaatttgacggtggatcctgttacgcataccaaagtcctgactacacatatgggcagcgtaatgcaaatggctcaggtgaacgtaaatattggcgtaaacgctgtggtaaatggcggtccgggtaccatagttaagatcactggctttggccctagcgaacactcatgaggctctgatcgatgctcaccctctcagactaagacggatacttgttcaagctcatatagga

SEQ ID NO: 90417 - DNA, 194 bp, Glycine max
  unsure (1)..(194): unsure at all n locations
  Clone ID: PAT_MRT3847_52659C.1
cnttatgatgcacagatttcantttnnnnacanaagttacagaagaagttagangacgctgaataccaannagttggatctcgtgcattgggatgtnaatttttnaaaaaccttgccctaatnnnagtttcttgnagncanggaaagctcacaantactcatnatgatgtcatnganaanagtaacctaagtag

SEQ ID NO: 90418 - DNA, 388 bp, Glycine max
  Clone ID: PAT_MRT3847_5265C.1
ttggacgcgtgggcggacgcgtgggcaatgtttcatgtatgtttaccaagtacgattgtaatttattagaggactgggaaaacataaaagtttacatttgatggaaaatgtatggactggactagaaaagaggacttgattatcaagctattaaattgacacttgccgagaataaacaataattaaaggagtgttctgtaatagaaggaaagtggaagaatgtaatgatatagagctctggaaaaatatggcttgagaaataaagaatacttacgacgggataattttgaaaagatttttgacaacataactgtagttaggcattgaaaatgtgctttgatatgattagtgtgattataatagaagaaattgtgaattatgactactt

SEQ ID NO: 90419 - DNA, 246 bp, Glycine max
  Clone ID: PAT_MRT3847_52660C.1
gcctatctttcgcacacccttgcgctaaattctaactgatcatcgttaaggtagcacttgagcgcgaggagcatgcttagacagatcctgatgttcggtatatgacttccgtatctaaatcagtcttgcatcatggcttcggtccctcagattttgaagtttaccagcacatgatcattcatatcatgctcgttcttgtcgctagtacttccatttctgactggaattcgatggaaccatctatgc

SEQ ID NO: 90420 - DNA, 226 bp, Glycine max
  Clone ID: PAT_MRT3847_52661C.1
gaagtataactgcttactttccctcattattttactttaatctaagtattttatgtaaattaattgtatagcccgggcaggcacatcaaccaaagtctctaacatatattttaagcattgtagctgatgttcatcgtacgtttttttatgtatgcatttttttataccctgctgacattaaatatttcatatggaatactatcttgttctgtttaaatcttaccaa

SEQ ID NO: 90421 - DNA, 580 bp, Glycine max
  Clone ID: PAT_MRT3847_52662C.1
ggctcgagcacccatcccaagtacatgagtatgcattatgcaatcccctcctgctcttccattgcctgtataatttagctagggtggggctgtggtgctaggaagcactgatgtaacagaaaggctgccatacggttgtcagatatgtcactgtggatcaggatcctctcttgcctctgcagcaggatgttctgtgcagccaaaatctggaccatttatcaatattttctctctgcatgaattaatgtgcaataaccaatcaacggttatgatttggctgcagacaagattggctggagaggatgtgatttgacccacagtttcgagatttggatttgatgggtcttcaccgtttggagttgcattcaatttgttagtgaagtttaccatctgagttttttattcattgctaacaatgtctgcatcaacttatttgaagagttttgttggatgtattctctctccttagtctttctgtctgtctgatatgacaagtgttttagatttgattttgcaactcttgttcgcttatcccggtgtgatagtaattgagcttagacttgagtctggtattctgatg

SEQ ID NO: 90422 - DNA, 1398 bp, Glycine max
  Clone ID: PAT_MRT3847_52663C.1
tacggctgcgagaagacgacagaaggggacacacattagtagttaaagttctcacttgagttctgaactcctctgcattccttagtgaggctaatggaactacagttaatattggtgaaaatgatactagcactagcaatggccatgatgatgatgatgccatgttattcagttgctgtggacattaatcaacaagtgaggcaagtggcagcaaagcataacgtgtcttgcctcctagtttttggagactcaagtgttgattcagggaacaacaatgcccttcacaccactatgaaaagcaactttcctccttatgggaaagacttctttgacagccgcccaactggaaggtttagtaatgggagacttgccacagacttcgttgctgaagcattggggtacagaaaagcgattccaccttttcttgatccaaatttgaaaccagaagatctgcaatatggtgttagttttgcatcagcagccacaggttttgatgattacactgctgaagtttcgaatcatacgtccgtttccaaacagatcgagtattttgcgcattataagatagaataagaaaatgcagagggtgaagaaactggcgaatttattacaagcattgcgttgtatattattagtaatgggtactaatgactttctgcagaactatttcttggaacctactcgccctgaagcattcagcttgcttgaatttgagaatttcttgctctcccgcttctctaaggacgttgaggcaatgcatagactgggtgccaggaggttgatcattgtaggggtcctacctctgggatgcattccactaatcaagacaattaggaacgttgaaggctgtgataaaagtttaaacagcgttgcttactcattcaatgctaaattattacagcaattagacaacttaaagacaaagctgggcttaaagactgctttggttgatgtttatggtatgatccaacgcgcggtcaccaaccctaaaaaatacggttttgtcgatggttcaaaaggatgtgttgggacggggacagtagaatatggagattcatgcaaagggatggatacttgttcagatccagacaaatatgtattctgggatgctgttcatccaacgcaaaagatgtacaagataatagctgatgaggccactgaatcttttattaataacttcttttaacagcgccaccaatttaatatatgatgcctgtatgtcaaaatttctttgtatcaatgtggaaaaagaccccctgcagtttcaaataatataaactgtaggatttgaatctgcaggctgtgcaataactgattttacaaacaaattttgttaaattaaattttagagatatatttattatttgataaaaaaaaaaaaagaaaaaaaaaaaaaaa

SEQ ID NO: 90423 - DNA, 250 bp, Glycine max
  Clone ID: PAT_MRT3847_52664C.1
aatgaataggggtttttttacctgaatatatttaaaaggtcggggcgggggaaccaaccaaaaccaagggaccagcaagcaaacacggaccaaacatcggaaagaagagggtctgtacagattaggactcacagcaaataacgaacatacaagaacaaaacggggacaaaataaaaaagcggaagaaaacgggaaataaagaactaaactttaaggaagcacgagaggaggggaaccttcttaaatagga

SEQ ID NO: 90424 - DNA, 1090 bp, Glycine max
  Clone ID: PAT_MRT3847_52665C.1
gctcggattcggtccttgttggttgattatatgaagtgtggaaagagtaataaacaacaccaataaaatacaactacaaaaaagcaaaaccaaccgaccaacaacctaccatctcttctagcttcattcttttctttctcgccttaaaactacacccttagttcttcattattgtatttgaatagattgtttctataatggaattcagatcaaaatcatgcaggaatgagagtctgcagattgaaaactacagtggtggaagggtggcaccaacaagcatgcaagatctgaggtcttatagttacagtgcaagctatgctggttctgcttatccatacaagataggtaaggaaaaggaagtgaaggtggataaagggaaaagcacagttagcaatagcaaagtatcaaagagttggagcttcaatgaccctgagttgcagaggaagaagagggtggctggctataaaatatattctgcggaagggaaaatgaaaggctcactaaggaagagtttgaggtggatcaagaacacatacactcaagctgtccatggatggtggtgaatggagattaattggtatatagttataaactatatagtaatatactattgttttttaccttttttcttttctgttgtgatttacttgttttgatatggactctaaatccattcaaatcaagttaccttccttaaaaatgttaaaactctactcatgtgttgaactccataacttattggtatcagactcccagttcctctaagcttttagggaggcatgacctataaattttagcaagttgctgctgaatttcctagtagtaatgctattggttttgaactagaatttggtcgattgctccgcaattttattttgatcgtcttaaaagaaaactaaaggggtgctttgggtgagtgactcttcctcgtgagaaattattagatagtttgtgatctatggtaccggtcaatctcaataggacatgtagttggcatttttaatttaaaaaaagaaaataaaaatcaacatatagaaatttgttaaaaatactaccttcagtcctttatatgagaaataaaagataaaat

SEQ ID NO: 90425 - DNA, 251 bp, Glycine max
  Clone ID: PAT_MRT3847_52666C.1
ggctcgagcctaatctacaaccattccatccgacgttatctgaaaaccaactttaatgaatgggtcgcttttgtatgaaaaatgcactcgtcctcataagttatggaatttcactaaagccatgatcaactgcacttctttatatcgcattagagaccatatgacgaattccgagaaaacaagcgctttgataattcattgcatattactagaaattgcttgatgatgcttcttgaatacacacaaacctt

SEQ ID NO: 90426 - DNA, 217 bp, Glycine max
  Clone ID: PAT_MRT3847_52667C.1
ctgaactagggatcccggctgcagaattcggccgagagaaaccctaccttaccctcctgcaccgagcaattcggaaaccctacggtagacatccccttgagggatttctgccctccacgtgaaggccaagatccaggacaaggaaggcatccctccggaccagcacgcctatcttcccgaagcactggagcggccgcaccctcgccgactacaacat

SEQ ID NO: 90427 - DNA, 189 bp, Glycine max
  Clone ID: PAT_MRT3847_52668C.1
attatatatagatgcaaaagtaaaactcttttatttgtctttatctatcacttggtgagatattttcaccaagtgtgtcaagtgaaaagtgaaaatatctcgaccaccactttcgtgtaatatatcacgtacttttgaaataaagaaattatatatatgctttcggtttaaaaaaaaaaaaaaaaaaaa

SEQ ID NO: 90428 - DNA, 1088 bp, Glycine max
  Clone ID: PAT_MRT3847_52669C.1
ccacgcgtccgaccatttccagcatttggttgcaatactctcttgtcctttcttagttcaacattgatattcctctccaatggctaccatcattttgaggtctaatgaagtggttcatgccttgggcttgttttgcatcttgctgttggtgcacaagggtgatgcctatgaatttgtagttggagggcaaaagggttggagtatcccaagtgaccccaattccaacccttacagtcaatgggcacaaaagagccgatttcaagtaggagactccctagtgttcaattacccatctggccaagactcagtgatccaagtaagtagccaagactatgcaagttgcaacactgatgcatacagtcaaaaattctcagacggccacacagtcatcaatctcaaccaatcagggcctcacttcttcatcagtggaaacaaaaacagctgtctcaaaaatgagaagctggtggtgattgtgctggcagacaggaacaacaaaaacacaaaccaaacaagccctccctctcctaattgtccttctccttctccttctccttcactttcaacacagtcattggctccttcaccagcaccttctcagcaagtggctccacctccactttctccagtggcagctcctcctcagcaagaggctccttctccaccatctccagccacaaataaccccactccagctcctgttagtgatcaaccttctcctccttctcctcctcataatgctgcttcttcaatcttggtcaactttgcttgttctgttggagcgttcattgcttcagttctggttttttctttctgagtggagtgtatgtgatatgagtggttcagtataattttttaatttttttccacatttttcttaattttttatggattcttatactttgagttcagtattattaaactggccttttggtccaaagttgggatgctatttgatatttgtttgtgaaaactgagaaataagctgacaatatatgtacccttttgtgtgcttcttacttgatgattgtaatttgtaagaatatattctatacgttgaactttaaataaataaaaccatttttaattgt

SEQ ID NO: 90429 - DNA, 417 bp, Glycine max
  Clone ID: PAT_MRT3847_5266C.1
ctcgagccgaatcggctcgagacggctgcgagaagacgacagaaggggtatggtaattgacaaatagtcatgcatgtccttcaagaatggttagattcttaagtcggtatacatggaataacatctattcagagaattagtaagtctcttgaatgaatattaatagtttgagagattaatctttaaatcttgagaaaaaatatcttcattttaaccaaaataaaaaataataatattttttagaatattattttctttttcatattctatttgatataagtacctcaacatgtatcaagtctatatatgtcttataagaatggtttcgaaagttttggtgttgtagttgtacacttttattcttattctatagaatattattttatttttagaatatttttctttttatattctcta

SEQ ID NO: 90430 - DNA, 310 bp, Glycine max
  Clone ID: PAT_MRT3847_52670C.1
aggctaaagctgaaatgcggaccttcactccgtggtctttttgcctgggctcgaaagtgagcggttgcgcatgaagggacatgggtttccggcaagaacggctcgacgggtgggacaaccacaggcctgagaatgaagacgtgctacagtgcgcactgcaggtggaaacttatatcacacctcgagagacaggtcgactaatggttgagaagcttatcctacacgacacacaggataatggcgagacctcaacctgcactttgaagtccactactatgaatatgaaatacactatcccgtctaagataag

SEQ ID NO: 90431 - DNA, 1895 bp, Glycine max
  Clone ID: PAT_MRT3847_52671C.1
ttccttttttttttttttttttttttttttggaaagaaagcacatgtattatttcaattgttaatatgaaaaaaatatgatcaatcagggtaacaaaaacatgaaatcaaagacaaagaaatttcaaacttttgaattgaaacaccatcacgataaaccctacccctcccagaatggaagacacttatttcctttttctccatttctgccctttgtgccgaactttgagtgacacaattaagtagagagcgttatgattgaacctaatccttgtacttcatttcagataccaggaagccaggcatgtcaaatgtggcagagaacttctcaacatcagctttgagatcttcaatggccttgttgttgacgaggcccttgttgaaatccttgagaagtttgccatgctccttctggatctccagtgtgagagtcacagcacggtgaaggaactcaccaatctgctcaaagtccttttcaaccaaacccctagaagtcatggcaggggccccaattcgcactccaccgggggccaaggcactgctatcaccaaaaactgcgttcttattaacagtaatgttgcagagatcacagagtttctccaccttattcccagtcaatccaagaggtctgagatcccacaagacaagatggttctccgtgcctccagtgacaagactgtaccctttccccatcaagtaattcccaagcgcaacggcgttggccttaacctgcttggcgtaggccttaaacccgggcgacgcggcctgcttcagcgccacggcaagagccccgatctggtggttgtggggcccaccctgcagcgaagggaaacaccgcaaagttgatcttgtcctcgaaatcataaaccgcgttctccggctgccccttcttcggcggcttcgggcccttccggtaaaagatcatccccgcccgtggaccccgcaagctcttatgcgtggtggtggtcacaatgtcgcaatactcgaaggggctgttcacttcctgcgcggccacaaggccgctagtgtgcgccatgtcgcagagaagcaatgccccgcacttatccgcaatttccctgaagcgtttgtagtcccaatcgcgagggtaagcgctgccaccgcagattatcaatttgggcctgaagtctagggctttttcctccaagcggtcgtagtcgatgtagccggtggtggagtttactttgtaagggaggctctcgaagtaaatggaggtggcggagatcttcttgccgccggaggtgtagtagccgtgggtgaggtggccgccggaggggagatccagccccatgatgcggtcgtgggggttgaggacggcggtgtaggcggcgaagttggcaggggagccggagtagggctgcacattgacgccccaggattgggcgtcgaggtggaaggcctggagggcgcgtgagcggcagaggttttcgatctggtcgatgaattcgttgccgccgtagtagcggttgccgggcatgccctcggagtatttgttggtgagggcgctgccgagggcctcgatgactgcgaaggaggtgaagttctcggaggcgatgagctcgatgccgcggcattggcggtgcttctccttctcgatgaggtcatggatctcgggatccaccgtcgccaagggcgtgttaccccacacgctcactggatccatgaatgttcaagagagtgttcttgtgttgctttgaggtggaatgctaatgtgtgtgacacccaggcaggcgtgccctcggcctaatggcttcgggcgcaacttgcgttcaaagactcgatggttcacgggattctgcaattcacaccaagtatcgcatttcgctacgttcttcatcgatgcaagagccgagatatccgttccgagagtcgaagttt

SEQ ID NO: 90432 - DNA, 498 bp, Glycine max
  Clone ID: PAT_MRT3847_52672C.1
caggaagaggtaaagttgaccataccctcaaaaaaaacttgaatcacttgatatgtcttccgatccttgacatcaaattcaaaggggaaaaacttatgctacaaccatcatcaaaagggaattgcttacctcaaaaatctttggggatctgaggaataataataataattttaagagaagattatttggaagtcaaatgaagagcatttaagggaagaggacatccacaaacaggggggttgaattgtatacagaggggaactgaaacaggggggggcatagggataatagcatatatgggtagttaaaggggttgaaattgcatccataaaaagggccattcccatggccctgactcctgagtaaaaacaattcaaaatcatgtctggcctcgttacgaactcctttcgggacacaaatagaatagcaaactgcctagcatcctatgtgcgtagcttaacgtggggcttgcatgtgctgactgctgactgttgaggc

SEQ ID NO: 90433 - DNA, 312 bp, Glycine max
  Clone ID: PAT_MRT3847_52673C.1
cttatgcatacacaggcatcacagctgatggacccgcaatgcgtgctgatgaattggaaaaacatgtggctgacgacagcctcaaggatcaaattgctgctcatgacacgtggtgttctaccagggtgaacaagatggcgaaacacatgagcctcctacaaagtgccggtggcagaactcaaacttgttactgatggtacgattgttgagggttggcgtaatgctatctccaccatcagttcacgggagacttatttagggcatatcccccgactggcaccagaggcaatggtctcttctcgagcaagctgt

SEQ ID NO: 90434 - DNA, 2470 bp, Glycine max
  Clone ID: PAT_MRT3847_52674C.1
cgcgtccgacggctgcgagaagacgacagaaggggattccacctcaacaaacacaacgacactctctcttctcgctcttggcttttcgctcttcactcactctcattcattcatttccaccgttcatggatccagtaagcgtgtggggtaacacgcccttggcgacggtggatcccgagatccatgacctcatcgagaaggagaagcgccgtcaatgccgcggaatcgagctcatcgcctccgagaacttcacctccttcgccgtcatcgaggccctcggcagcgctctcacgaacaaatactccgagggcatgccgggcaaccgctactacggcggcaatgaatacatcgaccagatcgaaaacctctgccgctcacgcgccctccaagccttccacctcgacgcccaatcctggggcgtcaacgtccagccctactccggctccccggccaacttcgccgcctacaccgccgtcctcaacccccacgaccgcatcatggggctagatctcccctccggcggccacctcacccacggctactacacctccggcggaaagaagatctccgccacctccatttacttcgagagtctcccttacaaggtaaactccaccaccggctacatcgactacgaccgcttggaagaaaaagccctagacttcaggccaaaactcataatctgcggtggcagcgcgtaccctcgcgattgggactacaaacgtttcagggaagtcgctgataagtgcggagcattgcttctctgcgacatggcgcacactagcggccttgtggccgcgcaggaagtgaacagccccttcgagtattgcgacattgtgaccaccacgactcacaagagcttgcggggcccacgtgcggggatgatcttttaccggaagggccccaagccgccgaagaaggggcagccggagaacgcggtttatgatttcgaggacaagattaacttcgcggtgttcccttcgctgcagggtgggccccacaaccaccagatcggtgctctcgccgtggcgctgaagcaggccgcgtcgcccgggtttaaggcctacgcgaagcaggttaaggcgaacgccgttgcgcttggaaaatacttgatggggaaagggtacagccttgtcactggcggaacggagaaccatcttgttttgtgggatctgagacctcttggattgactgggaataaggtggagaaactctgtgatctctgtaacattactgttaacaagaacgctgtttttggtgatagcagtgccttggcccctggtggagtgcgaattggtaacgatcttacttctcttttatatgctacaatacaaatcttgctttactaactcaattggaaacaagatctcatttataagattataaaaatgatttccttaggctaggactatatcctctctctctctctctctttttcttttttatcatcgcagaacttagatgaattttcttacgtaattttagtactgttctcttatcagagttcgaaagtaagttataaaatttctattgaaggcttgcatatttatataagtgaaattttaattttggttggagaacaatgtccaaaacaccaaagtgattgcatctaagttttttggattttttaatgtatttgtattttgtacaaggtatcttagtaagttgttgtagattagtattgaaagagatttcattgaggatgtgttttttagtgctttaacaaaggaggtatgttagttcgggctaaagcttgcagactgcctttgttaaagaatttcgagttgttgtcgtgcaatatgattggcaaatcaattataaactaatctgttattttgtttttctgatacttttccctagaaatgaattattttgatgtatcaattaccaaaatggtttttttgtgcccccgtttctgtatttttctctgatgtgttagataaatgtgagtgcccctgactggagtttctgtgaacaggtgcccctgccatgacttctaggggtttggttgaaaaagactttgagcagattggtgagttccttcaccgtgctgtgactctcacactggagatccagaaggagcatggcaaacttctcaaggatttcaacaagggtctcgtcaacaacaaggctattgaagatctcaaagctgatgttgagaagttctctgccttgtttgacatgcctggcttcctggtatctgaaatgaagtacaaggattaggttcaaccataccactttctactaaattgtgtcactcaagttcgacacaaagtgcagaaatggagaaaaaggaaatatgtgtcttcctttcctgggagtgatagggtttatcgccatggtgtttcaattcaaaagtttgaagtttctttgtctttgatttcatgtttaattttgttagcctgattgatatcatattttttttcttatttaacaattgaaataatacgtgctgcctttctttcataaa

SEQ ID NO: 90435 - DNA, 242 bp, Glycine max
  Clone ID: PAT_MRT3847_52675C.1
ctgactcatggcggacatcggactgaaaactggacctgctgaatctcgttttccgacaacggatcacaccagacgttgatccactcgctgcatagagattcacagatgcttgaacgcacagggtggacaactctctgaacgtgaaagattctgtaaatattacccctaactttgaccgattgaatggcttgatcggtggaatgaacagagagagagttggacttagacaagacctcgatgca

SEQ ID NO: 90436 - DNA, 223 bp, Glycine max
  unsure (1)..(223): unsure at all n locations
  Clone ID: PAT_MRT3847_52676C.1
caagcttttctttctctagttctttaattttctgatgttagcaaattaaaatagtagtgttatgcggtaagtgatgacaaagatgttgtcagttccacgggtctcactactcctnaatatangatcatgacattacagaagatgattagtagtctagctgagagtcaatgatctgaacgtcaacaacgtcgctgatctaactatacgacctgttagaggactc

SEQ ID NO: 90437 - DNA, 1510 bp, Glycine max
  Clone ID: PAT_MRT3847_52677C.1
cgcttctgctcaccctcgcgccgcttcaccagatctcactctcactctcactctgttttgctcagtgcagagaagagaagaaaatatggcggtgatggcggttcaccaattcgcgcaatgcatcacttgccacgcttggagccccgatcaatccatggttgctttatgtccaaacaataatgaagtgcacatctataggttggttgaagacaaatgggaaaagttgtatgttcttcaaaagcatgaccaggtaatttctgggatagactggagtgcaagatcaaatagaatagttactgcatcccatgatcggaattcatatgtctggaaccttgaaggatcagaatgggtgccaactcttgtgattcttagactaaaccgtgctgctctttgtgttcaatggagtccaaaagaaaacaaatttgcagtgggaagtggagccaaaactgtttgtatatgctactatgagcaggagaacaactggtgggtcagcaaacttatcaggaaaagacatgattcttctgtgacaagtgtttcttggcatcccgataatattcttcttgctacaacatccacagatgggaaatgcagagtattctccacctttataaaaggcgttgatgcaagggattcgaaaaagggtacttcaccagattcaaaatttggagagcaaattgttcagcttgatctctcatcgtcttggacattcggagtcaagtggtcaccaagtggcaatactctagcgtatgtaggtcataattctatgatatattttgttgatgatgttggtccttctcctttggcccaaaatgttgtgttccgtgatttgccgctccgtgatgtgggtattatttgtttccgagagaaaagtgataggtgtgggatttgattgtaacccaatggtttttgctgcagatgaaaggggaatttggagttttgtcagatatttgggagaacggaaagcagtatcttctggatcaagatatggctcacagttctctgaagcatttggaaagttttatggccaatcgaagcatggagtgagcaatgatacagttgaaacttcaagaactcgtggaactgttcacgaaaactgtataaattgtattatgcctcttggggatcatggcacattgctaaggcgtttcagcacatcaggattggatggaagaattgttgtatgggatttggaaaatgagcaagacctgttggaattataagctcatcttcgtggtaaagtgtctgaaactgattgtctcatgcagcattataccttgtaaattaatttggttatgagtgattgaagtgatctctaatcattataatcaaggcttgaaagtgtcagatatcagccccttgaatgtttataaactgtacctggatattaatgttaatgtattctctttctctatattttggctgttttttttcccatgcaacgactctgtcgggaaaagatatataaccaataatatatattctgacaataaaatagaagtgtttatcttta

SEQ ID NO: 90438 - DNA, 425 bp, Glycine max
  Clone ID: PAT_MRT3847_52678C.1
cccacgcgtccgccagatctcactctcactctcactctgttttgctcagtgcggagaggagaagaaaatatggcggtgatggcggttcaccaattcgcgcaatgcatcacttgccacgcttggagccccgatcaatccatggttgctttatgtccaaacaataatgaagtgcacatctataggttggttgaagacaaatgggaaaagttgtatgttcttcaaaagaaaacaaatttgcagtgggaagtggagccaaaactgtttgtatatgctactatgagcaggagaacaactggtgggtcatcaaacttatcatgaaaagacatgattcttctgtgacaagtgtttcttggcatcccgataatattcttcttgctctacctccacaaattggaaatgcttaatattcatcacctttattaaaa

SEQ ID NO: 90439 - DNA, 673 bp, Glycine max
  Clone ID: PAT_MRT3847_52679C.1
gtcaaattgtgtcttttaatcagttctctgaagcatttggaaagttttatggccaatcgaagcatggagtgagcaatgatacagttgaaacttcaagaactcgtggaactgttcacgaaaactgtataaagtatatatctcctttcatgacctccgtactttttccaaatgttattggttatgttacatatttctaaaatgctgagattttcaattatatggtagcggtttccattgttcggctcaatttattatgctcctacccacaacacaatggatggatattccattaacagtgggattcaggcaacttaaagttcatataaactgttaatggctggttgattttttggcttgtagttgtattatgcctcttggggatcatggcacattgctaaggcgtttcagcacatcaggattggatggaagaattgttgtatgggatttggaaaatgagcaagacctgttggaattataagctcatcttcgtggtaaagtgtctgaaactgattgtctcatgcagcattataccttgtaaattaatttggttatgagtgattgaagtgatctctaatcattataatcaaggcttgaaagtgtcagatatcagccccttgaatgtttataaactgtacctggatattaatgttaatgtattctctttctctaaaaa

SEQ ID NO: 90440 - DNA, 310 bp, Glycine max
  unsure (1)..(310): unsure at all n locations
  Clone ID: PAT_MRT3847_5267C.1
ncngcagcntagtnancncggnattcggctcgagctttcactcnngccntactcantctcnacttngctcatcatngnacatgcancaacacttctagtctcttcttncantatanncatgtacnnantnagtcncctaatgaaaaattagtagcttcttgntntgcntngcatttnggatagtntngagcataaatncgtctgtttgacnggtattgtnttgtgnttnatgaannatgntgatgggngangaaggagaantngtgagagatcnaggncaaaggggtgntngtngagataagnggnactt

SEQ ID NO: 90441 - DNA, 607 bp, Glycine max
  Clone ID: PAT_MRT3847_52680C.1
caataaaaatttctttgattcaagaaaggataaatagtgaattttcctataaggtttcatacagaaaagcatggatggccaaacaaaaggcgattgcaattgaatatgacgattgggaagagtcgtatgcgaaactctcgtcatggctaacacacatgcaaaatcattctcctaactcttacttacaaatactacatgacgattttactgttgtgcgggaaattgacgctctaatgcaggaccatgtggcactggctcagtgactctctcttgctcttcggataaaattgtaattttttccacataaggcacgagatcatcaactgtccatgtattcctcccttgaggagacaccatgtattgtaatgtctccgcaacttcagccaatgtagccgtctttgcattttgtgggtcaacaaacatctttgtctttcgcctataccagaccatgtagtccgagttaaagctcaataggccttcttgtcggggataagcgtcgaccctaaatgcatggcgatttttcatttgatgaatcattggggggaacaattgcccccaattttcgtcatgtttcccttttaatgttatgccatgaatgtttaagggt

SEQ ID NO: 90442 - DNA, 750 bp, Glycine max
  unsure (1)..(750): unsure at all n locations
  Clone ID: PAT_MRT3847_52681C.1
ggcacacccaacccttcaccagatctcactttgttccgttcagtgcagagaagaaaatggcggtgatggccgttcaccaattcgcgcaatgcatcacttgccacgcttggagccccgatcaatccatggtggctttatgtccaaacaataatgaagtgcacatctataggttggttgaagacaaatgggaaaaggtgcatgttcttcaaaagcatgaccaggtaatttctgggatagactggagcacaagatcaaatagaatagttactgcatcccatgatcggaattcatatgtctggaaccttgaaggatcagaatgggtgcctactcttgttatccttagactaaaccgtgctgctctttgtgttcaatggagtccaaaagaaaacaaatttgcagtgggaagtggagccaaaacttgttgtatatgctactatgagcaggagaacaacttgtgggtcagcaaacttatcaggaaaagacatgattcttctgtgacaagtgtttcttggcatcccgataatattcttcttgctacaacatccacagatgggaaatgcagagtattctccacctttataaaaggcgttgatgcaagggattcgaaaaagggtacttcaccagattcaaaatttggagagcaaattgttcaagcttgatctctcatcgtcttggacattcggagtcaagtggtcaccaagtggcatactctagcgtatgtaggtcataantctatgatatatttttgtg

SEQ ID NO: 90443 - DNA, 328 bp, Glycine max
  Clone ID: PAT_MRT3847_52682C.1
attacagtcactttttttttggggtgtgttgtcccaaacatacaacatattttcatttcactagcggtgaaaatacaaggatttttttgtagatttacatcctgacaacccaacatcccatttctacatgattttctataactagccatacgacagataatgggagcccacttaagtcaggttggtagcacggtttttggaaaacaagcctgcccatcatttgtcatggccggccccaataaaaaatcccagggcttttaaaacccaacaaccctttatcctacgcaatttaaaacatgggcccatttatttcttggttttccccggg

SEQ ID NO: 90444 - DNA, 181 bp, Glycine max
  unsure (1)..(181): unsure at all n locations
  Clone ID: PAT_MRT3847_52683C.1
atagctaaacatcatgtttaatgttanggnnnccattantcacanngaccacncanntntaacacngnacaaaaaaanaaacatcanccataacanntaancaaatnctcgngggcatccaagacttacttgaccaaccaaatcctgggggccctgcccagacagaaagctatcatctatt

SEQ ID NO: 90445 - DNA, 495 bp, Glycine max
  Clone ID: PAT_MRT3847_52684C.1
tcggggtgaatcaccaacatgtctaagcaagttgccagtagcactatgccacaggagaagctcctgctgaacccatttgaagtcagtgacgatcagatcttggagagaatatacataacccatttccattgtgttgagaagtatgacgttggagttctttatagtgttgcttcaaatgttatcaaacactcaattgaaattgctgacatgattatcaaggatggccaacaaattgaacaagtcagagaagaaacggatccattaacctctttccaacgactccctgccatgaagcgaattgcttgccagatgatgtgcactgctcgcggcgagcaatatgcgcatcaaacaacaatgttgatacttgaacagctgagagattattcctgggatgccaaagcagtgatagtactagcagcatttgctctggagtttggaaagtttttgcaacttgcgcatattccacgtgacaaacttggacaatcattggcagag

SEQ ID NO: 90446 - DNA, 328 bp, Glycine max
  Clone ID: PAT_MRT3847_52685C.1
gggcgagcctaatggtcttgtaagtgaagcggtgaatgagatgttacatgtttagctggagctgaaccaacactctctctctctatctatctatggagcggggggacgctaccacagtgatagaaacgttaattcggtgaggctgtggcggctcatgcacgtggcgacgtgatcatgatggctgccaattccggtgaagaacataataataatcataatcataaaggaaaattataagacggaggtggataataagatgaaggtgacaataagaccaacaactcatgcggtggaaacagatggccccggcaagaaactatggctctct

SEQ ID NO: 90447 - DNA, 440 bp, Glycine max
  Clone ID: PAT_MRT3847_52686C.1
ccccaaaaaagttttttttttacataaaacagggttttggtctagtacctcactaagttgcaaacaaaagacaacttcaaaattcgatccttttcttttatggaaacaatacccgtttttttttttcctttgttgaaaacaagctgaatgaattttcattttttggattaagagatggcaaatttaattaatcggttttaaaaggaaaattgtttgtttttaaagctgtgctcatccagccaagatttgttgtccccaaaaacttgggtttttttttcatcaggctccccctcaaaaaaaccatggtgggcttccttgtaaagctgaagctttttgtttgaacagtttgctttttaatacaaggttttgctcactgatggatctgccacagtgtcagcctccccgggaaggatgaataatggtaaaaaaacttttttcag

SEQ ID NO: 90448 - DNA, 810 bp, Glycine max
  unsure (1)..(810): unsure at all n locations
  Clone ID: PAT_MRT3847_52687C.1
ggctcgagcattgatggagtcatcctctgatgaaatggtgctaaagggtatttttctgccctttatatcaccgagtcatctggtgcccgtcgtagacatagcgaggatcttcgccatggaaggtgtggatgtgaccataatcaccacaccagcaaacgccgccgttttccaaagctccatcgaccgtgattgtatccgcggtcgctccattcgaacccatgttgtcaagttccctcaagtccctggcttgccacaaggattggagtccttcaacgcttccactcccgcagacatggtcaccaaaatcggccacgcgctctccattctcgaaggtccattccgtcaactcttccgcgatatcaaacccgacttcatagtctccgacatgttctacccttggtccgtcgatgccgcagatgaattgggaattccgaggctcatttatgtcggcggaacttactttgctcattgtgctatggactctctcgaacggtttgaacctcacaccaaggtaggttctgatgatgagagctttttgattcctgggttgccccacgagtttgagatgacacgttcgcagatacccgatcggttcaaagcgccggacaacttgacttatttaatgaagacgattaaagagtcggagaagaggagctatggatcagtgtttaaaagcttttatgcgtttgagggagcctacgaggaccattacaggaaaatcatggggaccaagagttggaacttgggacccatttcgtcgtgggtgaatcaagatgcttcggataaggcttcaaggngatcacgtgacaa

SEQ ID NO: 90449 - DNA, 789 bp, Glycine max
  unsure (1)..(789): unsure at all n locations
  Clone ID: PAT_MRT3847_52688C.1
aattcggctcgagaagattctcaaaaactcttcatagtttacaacatcatttaaatctattgagcacaatggggattcatgattgcctaggatttgtactctttcaagttgagactcttgacaaatgaagagcaacaacaattactgaagttacttcctgtggttgatactgctaaactccctgatagccttgaagtcatgttcagtagctctcaattcaaggagaacttaacttactttcagcagcttcttgcggaaggagtctttgatatctctttgttgggcgcaaaatctgaagactgcaagattttgaaaagacttgcattatccaatctgtcaaagtcaaaatgggtagcgcaccataattttctcaagaaatgtaaaaacaaagctggaaaatctaatactatgggatctactggtacaacatcaactaatgttttgaacaacagggcgtcaactgatgttgcaaacatcaagagaatgcgtgacagcagaaatcaaaacttaccagaaataaagacaataatgagaagccccaaaagaacgatcgcaaaggcgagctgtgagggcaaagaagctgtagaagatggtgcttgctatagtccaaaacacctatttgctttgcctcctgatgctagttttctcttgctggattccttaaactttgctcaggagagtagtgatcaggatctgctgctaaggtgtcatctacacttcttttncacagcagagctcttgcagcaacttaagctggtgctcaagcagcctagtgcagctaatctactc

SEQ ID NO: 90450 - DNA, 182 bp, Glycine max
  Clone ID: PAT_MRT3847_52689C.1
tgtctttattctgtaagtaaattaccttcagaagctggcgttgcaaatgatacatgtggtagcggacgaggaggttcacccagcaatgatgggattaaatcagcagccaacaatctatgatgagacatcaacaaatacttctgcacacaagtagggaaaggtaagaaaatcgttgatatact

SEQ ID NO: 90451 - DNA, 235 bp, Glycine max
  Clone ID: PAT_MRT3847_5268C.1
acaaaagttaaaaattccaccttaaattccatcccccggggaagggccccgaaccttttccctttttttaccaatacccggggttttaaaagaacccaagggaaaagattcccgctttctaccaaaatttcaaatctttaagccgagggggaaatggggctcccttttgaattatggacccaaaaatccactttcggttttccccccccccatttttggggacctgggttttggc

SEQ ID NO: 90452 - DNA, 306 bp, Glycine max
  Clone ID: PAT_MRT3847_52690C.1
gggaaacggaaatatgattccgaatccttatcctgtttgcttcagtgcaaatggtttccgcctcgagcatcaatcccaacgatctcatgtatcgtacatcccgtctacctgatggtggtcgatatctcccattaaaggagggacctcttagaaacatcccactggtacccagattactggctccgcgagagattccatgatccacagtagcagtacgaccacgtttgccacatccaatttgacctagatgttcatgcttaacatgaatttcaaaggaaagaaggcaaataggtggtgtccttgagc

SEQ ID NO: 90453 - DNA, 400 bp, Glycine max
  Clone ID: PAT_MRT3847_52691C.1
cgggctagcagaagaacacgtaggggaaaactaagaatgataagccaatggaccactcattgatctcatgctaagtattaactacattctacactagccgatgccccaatatggggaacatagatcttgctactttgcatgactgtcttagcgatgactatgttaaagcttatttcgaacagttccactcaactctgattatgatgttcactgatgttggatcagccatcacttacaacgagcttacaagagatgcagtcttggatccaacagtgctggtggcagtagctgtggcacatgcatttgcactgtttgtaagtgtctccgtcgccggcaacatctcacgtggccatttgaacccagctgtcacttttggattggccattggaggcaacatcac

SEQ ID NO: 90454 - DNA, 161 bp, Glycine max
  Clone ID: PAT_MRT3847_52692C.1
gcgaggtctgcggtgttcgattcaccaggaacgacaagctgaagatccacatgcggaagcacacgggagagcgcccctactcatgcccgcactgcccagcccgcttcctgcacagctacgaccacaagaaccacatgcacctgcacacaggggtccggccc

SEQ ID NO: 90455 - DNA, 219 bp, Glycine max
  Clone ID: PAT_MRT3847_52693C.1
agcaaatggtaacatcagtaaggattaaaaagttggctgcctaaaagaaaaccaacataaagatgtacccattaagtcacgaacaacaataggaaaaaaaaaaccataagagaggaagctacaccctgattattatagtgattgcatgtacatatattctgttactggatataagactggccagggatatctaaatttttgtccccagttgaaggggga

SEQ ID NO: 90456 - DNA, 526 bp, Glycine max
  Clone ID: PAT_MRT3847_52694C.1
ggttcgaggtatgaatgctcgtcgaagcttgaatactttagatttgagttaccttgagattccaacagctgaatttgaggctgtacagtgtatggagagctacatagaccaatggggctgccatttggagttggttgtgaagcaactgctcgagactgagtgcaggctctcggctattgtctttgagaaaatcggtccagaagcatggatggggtgttttgcaaagattgccatggaatcaggaattctttcttttattcgatttggaaagattatcaccgataggaaaaatgatcccctcaagttgttgaacctgctgtccatattcaaggtcttaaatggtctgaggctaaaattcaaccagcttttcagtgtgaaagcttgtaaagaaattagaactgtgactgaggatcttataaaaaaagtagtcaatggcaccagtgagatattctggcaacttccagcgcaagtgaagttgcaaagaccaacttctcctccccctgatggcagcattcccaagctggta

SEQ ID NO: 90457 - DNA, 427 bp, Glycine max
  Clone ID: PAT_MRT3847_52695C.1
ggctcgaggtggtgtggtgggggttgttgcttttgtaatggctgcagatgcagaagagaagcaagaggcggagataggcatacacgacacctagcggagcacgtactcgccgaattgggctctggatgacttttatcccgagcccaagtatgaagctcgttctaatacactccaggcctaccggcacctacgctgtgggctgacccgcccctggagcctgatgacgacttgcctattggagattccgattagagaaagactggcgccacgagtgctcgaagaccgatttacaacttagcatcaacagatccgccaatgatgtgacagtagaagtggtggaaggcgatcctagaaatgttgtctgtgatgctgacaatgaggaccgcgctgcaatgcaggatgtgggtagtcatggcgatggggctat

SEQ ID NO: 90458 - DNA, 216 bp, Glycine max
  unsure (1)..(216): unsure at all n locations
  Clone ID: PAT_MRT3847_52696C.1
ggaaggggctcgaggacagcccaagagccngaccaccgggcaccccaaccgcacagggaggcnccaaacaagggagcgggacgaagagaccggaggccaggctccagaacgccccacaccccgcattaataatggtggcttctatggaagagcagctaccatgaacatgtgttccaagggttataaggactattctgtgtaagtatcatcaggaca

SEQ ID NO: 90459 - DNA, 454 bp, Glycine max
  Clone ID: PAT_MRT3847_52697C.1
cgaacagtggcgtgaccagttgtgaccattcggttcaccgagattgcttttcggggtacttcgacaacatcagtgacatgtgccccgtttgcaacaaaggaggaccacatcagacccctacaaaggaagtctgttctcagagtagcgctaaagctttttgagagggaagattggatgcccccaaacccagaacgcatgaccatggagcaatttatgataaccaagcccctgccagttgactctgagtcttctgaaatacagtgggtggtcagacaggaagtccaatactaaagcgaagagaatcttgttgatgccatcaaaacaaggaatcgcgagggtatcccagatgcattcgcatgtccgatctgcagaaaatgtatacatgccgcctaactaaaaatggccgctagcggccacgcatttcatgaggaattgcatcgtgaccagatgaaat

SEQ ID NO: 90460 - DNA, 470 bp, Glycine max
  Clone ID: PAT_MRT3847_52698C.1
tttcagaaaaagaactttgccaccctcttttaatttacttttaagagtatatgttacaaaatcaacaatcttttgcctgccagtatacacttcggttggacagcctaacctaagctatgagccaacaattaacctgatatctttacatctcactgttccttgctaatctgtccgattatgttcatgaaaccatgagacgtgtgcaacggatgtgtcagtgaaatgctagttagattagccaaggccctagataacatgcatacaccgccttcctgtttattttcttcctgtgccagatcttgaaaatcttctagactaatggatcttctccatgtttattttcctctatcatatctagaaaatcttctagacctatgtgacttcaggcggattgctggcacctttctagccaatgcttgccagatcatttggaccgcatcatccttctggatgggaattggactcaaaat

SEQ ID NO: 90461 - DNA, 763 bp, Glycine max
  Clone ID: PAT_MRT3847_52699C.1
ctccctctcgcaaaccaattttcacattctttgtattgagttacttgagctagccgcaaccatggaaccatccaaaaactcgcagaagccctcacatttccatgactacctccccgtgatggcgaacaagctcggcggggacggcctcatcgatgagctctgcaacggcttcaacctgctcaaggactccgacagaggggtgataacctttgagagcctcaagaggaacgctgctctgctgggcctgcaaggactcggcgatgaggaccttcggtcgatgcccgggcagggggctcccaccgagaggtgattacctttgagagcctcaagaggaacgctgctcttcttggcctgcaaggactacgcgacgaggaccttcggttgatgctccggcagggcgatttcgatggcgacggtgtgctgagccagctggagttctgtgctttgatgtttaggttgagtcctgagctcatggaggggtccaagttgtggctggaggaggtgcttcagcaagtccgtgaccgtggaacagtgatttttgtattttgttatcagttatgggtttctcttcctcattcgatggtctggtttggatgtttgaattgccatgcatgcatttgatttgtgaggagaaaccgtgggagagagatttttcatttgcttacttattccctgtatattactcgatttaactattgtttaggggtgagtttataagtaaataaaaggttcttacattgtgaattaaaaaaaaaaaaaaaaa

SEQ ID NO: 90462 - DNA, 532 bp, Glycine max
  Clone ID: PAT_MRT3847_5269C.1
ggggggtggggaaaacgacccttgtcaagaatgtgtatgatcgggagaaagtcaacttcgctgatgcacatgcttggattgtggtatcaaaggaatatgatgttactgatttgctggggacattgctcactaagatacgacacacacaagagtcaacggcaccacctcctcttagcgtgggtgccaaatctgatgtgtatgacttaacagaagcaataaacaagatagtacaagagaagaagtgtttgattgtgcttgatgatgtgtggaataaagatgcatataatcaaatgtgcaatgctttccagggtatccatggaagccgtgttatgatcacaacacggatggaagatgttgcggctcttgctcaaccgaagcgtcgccttgtactccagccattgggtagcactgagtcattcaagctattttgctcaagggctttccatagcaacttgaaccgtgagtgccctctagagctcaatacagtggctacaaaagttgttgagaggtgtcgtggcctccccttcgccct

SEQ ID NO: 90463 - DNA, 614 bp, Glycine max
  Clone ID: PAT_MRT3847_526C.1
caaccctcagaatggagcaccaggcccatctctttgttcaggttctccttctctaccactaccaaccatgccctgtagttttggagctttgctatcaaagttaccatctggaatcccaccctataattccgctcaagtccttgatgcagggacacaaagcaccattgagagagtgaagatcctggatcgggtgttccgccctccccggcatgtcggccaccttcgaagcaaggtcggttccctgaacaagtagcatggatttggaattggaagattaattaattaagagacaggaaccactttgaccataatgactcctaaatcatagtcagtatgttaagaaatggttagttatttatttgctcccgccccgcctctttgtgcagggtcgcctgctcttccgtggccgaccacccctcgaaattttggagctttgctatcaaagttaccatctggaatcccttcccataattccactcaagtccctaatgcagggacacaaagcatcattgagagagtgaagattgaagattgtgaatttcatcccacccatgatgatgatcacaaagtaaaggtcggttccttgaacaagtagcatggatttggaattggaa

SEQ ID NO: 90464 - DNA, 310 bp, Glycine max
  Clone ID: PAT_MRT3847_52700C.1
agtgttttcaccttttctgcttaccttttttggaagatcaagatgatcttgtttccatgtttatatgctataaaacacacgggaacaacgcacgttaataattaccatttttgaattcacatgaccaaaaaaaaaaaagatttttttccaatcactttttcagaaggatatgtatctcttataaaaatctcaacaaggggaatgcccctcctgtctaaagaagtaagaattgtcgcaatagctggttatgcagctttccataaaaaatcgcttggcgggaaaacttaaaaaaaaagtattttgaggggaa

SEQ ID NO: 90465 - DNA, 175 bp, Glycine max
  Clone ID: PAT_MRT3847_52701C.1
tttttaggtaaaagaaaaacaaacgttatcgaatagaaattatgccacatctcaaaagatgcaaccttcctaacagaaatccttgggaggctagaaaaagcttaacctcattcaaatgtacaaaaggaaaaattcttaagctacaacagaaagccggatctttcagccaaaattt

SEQ ID NO: 90466 - DNA, 376 bp, Glycine max
  Clone ID: PAT_MRT3847_52702C.1
gcttatcgcatgccgcaggaaaaacgttcctggcctgatgggcctgcggtcgagcgagtttttgctgggaacgcgtctgctgggacgatggcctcttctcacccaacctggatcgcgacatcctctggtgctcagttgcccaggaagaagactaactacaaggaaatacttctgaaaaataaatgtgaacaacaagcttgagtgaatattcttctgagctggcttattgcagaatggcagtgcttttgcagaatagacctttactagcgactgatggtagagggacagagttgtgcctgtccaatagtcatactgacacagcacattctctcttcaaattataagtggttgctaccaggaaatagctacttgaacc

SEQ ID NO: 90467 - DNA, 1555 bp, Glycine max
  Clone ID: PAT_MRT3847_52703C.1
tgcccctgctgacgctgcaataataggcaaaggtggaattgaaggatgggcatggcagcaggcacagcataggcagtgacacaacacaacacagccgcccttggaattaaccatgaaaggcgtgttttcggcgcccggtgattacgtccacttcaagtcccaagtccctcttcacaaaattcctattggcactaagcagtggcggtattacgatttcggtccaaaagccgtgcctccgcttatatgtcttcctggaaccgccggaaccgccgatgtatactataaacagatcatgtcattatctatgaagggttaccgtgtcatatctgttgacatacctcgtgtatggaataatactgagtggattcaagcatttgaaaagttcttggatgctattgatgtacaccatatacatctttatggtacatcacttggtggtttcctagctcaactctttgctcagcatcgtcctagaagagttcgatcgttagttctatcaaacacatttttggagacacgaagtttctctgctgcaatgccatgggcgcccattgttagttggactccttcttttttgctgaagcggtatgtcttaacaggaattcgtgatggtccccatgaaccgtttattgcagattcagtggactttgttgtttctcaggtagaaaccctctctagagaagacttggcctctaggttgtctctgacaactgatgctgcttcagtgggaccacttcttctttcagtttcatttatcactataatggatactaatgactactgtgcaattcctcaacaacttaaagatcaactgggtgaaaggtatcccgaggcaaggcgtgcatatttgaaaacagggggagattttccttttctttcaagaccagatgaagttaacttgcatcttcagttgcaccttaggcgtgttggtgtggaacctcggccagatttggttcacaacatacctaaaggtgatattggaggaagccctagcaaagaaaataacgaagatgactctgacgagtcacataaggataatggaggagggtcagaaaacccacctgctgaatatgagataaatcctactagcccagaaagcttgggatccggtaatttagacaagcagcctctcgatagttcagagtgttgccatttgtttcctggtggattcccaagggaaaagcacattgtgcctccaggaactcctttacatttcgtgtgggaatatattgttttttttcatcttcttcacatccgttcactgtgcattatatggaactattctttggaatttaggcaatttgtgtaagttggaattcttttggatatactatatgcatcatgagaaccaagtgcgtgaaacaaagttattaagatggaccgtattgtggattggatttctgagttccttttggctggatgaagttgagatagctacgttgtaagtgattatttgcattttttaaggtagggtttgaagtttaaactgctaaaccatcaaaatttatatttcatgtcttaagtatttatatgacccgaagtgttatgtgaaaaa

SEQ ID NO: 90468 - DNA, 361 bp, Glycine max
  Clone ID: PAT_MRT3847_52704C.1
tccggggtcaacccacccgtccgttttgaaagaaggaggaaaagttgtgacaatagtaccacctggatttcatccagctatccttttcatactctctactgatggggcgatcttagagaaactaaacccctattttgagagtggtaagctgaagccaatacttgactcgaatacccacttttccacgcgttcttctttgaactagtctgctgaaccaggataagtgctgcgaggctttaattttttaatttcaatttgttctgttgtataatatatcacttttcttccccttagtgtgtcttcccaacaagtgtactgaaccttgatagtattgagaaatttgaagtgtttcttctgcatc

SEQ ID NO: 90469 - DNA, 404 bp, Glycine max
  unsure (1)..(404): unsure at all n locations
  Clone ID: PAT_MRT3847_52705C.1
gaaacaataaaaattaacattacattaaatagatattaaggaaaaattacattacaataaattttggctcccatgagtatgttaacattaacatgtccttattcctatttgcaagttagtgtttccgagaagtgaaatctggttcagctggcttttgaggtaacagaggtagtagtctctgttgcattctattgtgtctgctattttctctcaaatttcgagtgcattggcagcaaattaccttgatgcatatatggttgcaccaaggcttanactagacccttcctcatttgcaaaagcatcttgtagctcatcttctgcttcgcgcaatgacctctcaatcttctttttccagtatcgacgccaagctgcttgtatgaaagtagcagcccatctcctccact

SEQ ID NO: 90470 - DNA, 445 bp, Glycine max
  Clone ID: PAT_MRT3847_52706C.1
aattctacttaatttcaaccttttatttactttggaattattaccaatggattattttctttccaggaccaccttccttccaaaggtcattacccttaccattattattggttccccaccaaacagggggaaaattaaaggtttttaagggggcttcgcatttcgcagggcttactgaaagagctcactccctagagtcacggcaccaatctcctcgttgaattgagaatacattggagcaatttctctttgaatctgctccagctcatgcacaatttgagccattgatggccttctactagtcacatccacacagagcaatgccaatttcatcattcttctagcaccatgcttttcttgctcccccagcgttatgtcaacaaacttgtccaagtcaacgctattttttgcctgaaacactatattttcatctgggtttgacatg

SEQ ID NO: 90471 - DNA, 286 bp, Glycine max
  Clone ID: PAT_MRT3847_52707C.1
ggatagccctggctgttggaattgtgaaagtctagctttagaagcaagtctcttaaggggtccattgtggccctcatggaacaggcttatgttaaaatatacattttacgaacagcatgtctactttgtacattttgcgggtagattttcttttcttcttcttaaaaaaaagaaactagtcttcccatttataaaaactcgctgaaaaaagaaaaaaaaaggttatttattcccaataatatattccaatgggcattttaaaaacaaaaaaaaaaaaaaatttttt

SEQ ID NO: 90472 - DNA, 431 bp, Glycine max
  Clone ID: PAT_MRT3847_52708C.1
ttgattcttttaacaacaatgttgatttattactactacaaatgaagaaaaagccttaaaaaataaagcatgaaatgccattacaaatgaactcattaaaggctcccacaagcagggacatgaacatcatccctccgaccaaactgaacaaacataaatcaaacagacaggaaaaagatgattaaatcttggtctagttgatgattatattatatagtatcatatataattaagcggtaagctgttcctgcttgtgggtctcaataacaacatcactctgagggtaagcaacacaagtgaggacaaaacctgcagcaatctggtcatcatcaaggaaattaccgtcggattgatcgacggagccttgcttaatcattccggcacacgaagaacaagacccagccctacacgagaacggaagatcaatgcct

SEQ ID NO: 90473 - DNA, 296 bp, Glycine max
  Clone ID: PAT_MRT3847_52709C.1
ttaatattccgaataaagtatttttctttttttccttttattttaggcgctatatacagtgccctgcaaggttcagattgtggaagcagtggaaatggcagctacaaaccttgcagcccgtggaatagttctggaatcgcttacaagagacaattacgacaactggagtgctcttgtgaagaactatctaatgggtgaaggtctgtggggcgatgtcaagcttgtcttttattattcttacttaacaattcttatgtttatttatctactattatgtattccttctcttttattct

SEQ ID NO: 90474 - DNA, 463 bp, Glycine max
  unsure (1)..(463): unsure at all n locations
  Clone ID: PAT_MRT3847_5270C.1
acctaaaatttcaaaatcaaattcaatagataaatgttattttaaaataatattcttttatgaaatcaaatgatgttattgatgtcagatatatacaaatatgaatatgtcaaaaaaaattccaagcttgtttttcacgattctccttcaaatcctttgcatcacacccatcctcgccttcttttatctttcctgaatattgagaaataactccaaaacacattatgttggatgaagaaaatttgcttcaaagatatcaatcaagatgttggtaactaggaagttccttaaatattcaaaaacagttatacaaacctaaagaaaatcgtttgtgcaattcttattacactattagaactgcagaaaatctcgagcctttaaaacctgaaagagggtgatgaattccatcttttatgaagagaatttttagccaattaggctagnaacccataaaaatcttcat

SEQ ID NO: 90475 - DNA, 275 bp, Glycine max
  Clone ID: PAT_MRT3847_52710C.1
cgaatactagaggccagggactcggagtgtttggatttgtttatttgagacaccacgtgctgagctgacatgtgtataacacaaagctacaaaatatggctgaagactcatcactgatgatggcaactcctactcttatcaacctcattgggcttgacatacgaccagcacatcaccagtctctttatggtactcttcatgctatgatgtcctggaccgttgtatcactctatgacgctggtgtcacctgtgacactcctttgggagcacaagaa

SEQ ID NO: 90476 - DNA, 392 bp, Glycine max
  Clone ID: PAT_MRT3847_52711C.1
acggctgcgagaagaccacagaaggggatagcaagctctgaaaagaagagagagagagagcgaagtgcatagcgtgctagagttttttgttgtctatacatctgtcttccttgttcgggttcgttcgcctctacttttcgacattaatatcactcatgatagactgtcgcccgagatgaaacggagcatccatgggggacggctcaaggagaggctagccatgctcgattactattgatgcccatgcgcgtcccgcaaatggaggaaaggctgaaatgacttcttgttctactacggcatccgcttccatctctgacactctggcggagactcctattactgctgcgcctgcaacttcttcactcgccttaagacttgtagccacagctccc

SEQ ID NO: 90477 - DNA, 1359 bp, Glycine max
  Clone ID: PAT_MRT3847_52712C.1
cttcggaggggaagaaagaagagttgctatggaagagatcaacaagaacccatcagggacttctcttttggtaccatcagtgctagagttggctaaagagaatttgactactgttccacaaagatacattcagcctcaacatcaagacatggtgctcatctctgaagaagatcatagtacccttgagattccagttattgacatgcacagattgctttctgtagaatctgggagttcagaattggataagcttcacctggcgtgcaaagaatggggattcttccagctggttaaccatggagttaactcttccttggtggagaaagtaaggttggagactcaggatttcttcaaccttccaatgtcagagaagaaaaagttttggcaaactccacagcatatggagggatttggacaagcatttgtaattagtgaagaccaaaaacttgattgggcagacctttactatatgaccacccttccaaaacactctagaatgccccacttatttccacaactccctcttcctttcagagacactctagaggcttactcacaggaaataaaagatctagccatagttattataggccttatgggaaaagctttgaagattcaagaaagggaaataagagaattatttgaagatggaatacaactaatgaggatgaactattaccctccatgccctgaaccagagaaggttattggcctcactcctcattcagacggaattggactcgctattcttctacaactcaatgaagttgaaggtcttcagataaggaaagatggcttgtgggttccggttaaacccttgattaatgctttcattgtcaatgttggtgacatattagagattataactaatggtatataccgaagcattgagcatcgggcaacagtaaatggcgaaaaagaaagactttcatttgcaacattctatagtccaagttcagatggtgtggtaggtcctgcaccaagcttgatcactgaacaaacaccaccacgattcaaaagcataggagtaaaggactacttcaagggcttattttctcgcaaactcgatggaaaggcctacatagaagtcatgagaatatagcatcactgttcaagatcacttcaatccatgcattaaaattagtgtcattatactttgttaattgtatcctcgtgtgccattgcttggttgttatttccatatgttagggcattggtagagtgtgtagaagagtttagagagtctgtttgaacctatatatgtaaaaataaattggggatcacctaaactctttttaaacttttttctaataagtttgtataacttgttgaaaatttatttttaataaattcatgatt

SEQ ID NO: 90478 - DNA, 329 bp, Glycine max
  Clone ID: PAT_MRT3847_52713C.1
aaaaatgagaaaaaattatctattacaacctgtagtgatctgcaacatatacttgtcaactccaaaaaatgccaaaatctcttaactgtttgagtacataattttacagaatataagtgatgttgatcgcaggagtgcattatatctcaaaaatttgttcactctaagaaacttcaaaagaactttgacaccacaattccaacagggtacataaacaggtgtttctcaaaaagatgagatggcgaaggccaactgcatgttgctggaagattattttgttcccagaggtctttagagatcattgtttggctttgaactatttggtgcat

SEQ ID NO: 90479 - DNA, 199 bp, Glycine max
  Clone ID: PAT_MRT3847_52714C.1
tgtatccttatatgatgaatgggttaacaagggcgacgctccgtcattgccagagactcttaagaattactacaagctggtgtctcttggcttcaagattgtattcttggcatgaagatatcttgtcaaaatggcctgaacagaagcgaacctaaatataactaactggcacaggatgaagcatttaattctcaaagag

SEQ ID NO: 90480 - DNA, 456 bp, Glycine max
  unsure (1)..(456): unsure at all n locations
  Clone ID: PAT_MRT3847_52715C.1
tgctgctgggtcttggggtgaaccctgcggtgcacgaggtggaggagagtgataagtggngtgttgttagagaattggaagcaattgtgggtgccaataatggagggaataagatgcaatttccagcagtttttattggtggcaaattgtttgggggattggataaggtaatggctactcatatttcaggggaattggttccaattctcaaagaagcaggagctctatggctttgagtctttggctctctattttttttttccctttttctctagattaattattttcattttcgttcttggttttcttattgtattatataattatatactactcctactatttatttatgtgttaatttccggctatatatgttgatttccttctccttgggaggctgtagagaaagaaagaaaaatgaattaatataataaaaatttattctcgatgtgttca

SEQ ID NO: 90481 - DNA, 402 bp, Glycine max
  Clone ID: PAT_MRT3847_52716C.1
tttttagatgaaaattaaataacaaccaaaggcgtaaaggcctactattatttgacgagcctaaccgcagagagcttgatcatctatccccaaccttggacggctttggtgatccgcaactgaacaaaattaagaaaaagttacttaacaccattgtcactctgaagccaaacggcccttactgcattcaggagaccaattttaactcctattcgaggctagcacccaccaatagctttcccagcgtaaacactataccgagctaacctcttgtgtggagcttgaattgagaacaccctgcatgctgcgcctgctcatcaaaatgaatcctgaccgcttatatggatccacaaacgcagccaatgtgagtatctgtcttctgttgattgtcagacacttttc

SEQ ID NO: 90482 - DNA, 244 bp, Glycine max
  Clone ID: PAT_MRT3847_52717C.1
gcttgggcatgtcatatgtatctaatgcagctgtgcagtggaattgatgaaaatgcaattggagcgtgtgcacagcttgtgtttgcacctattgatgaatcatttgcagatgatgctctcttactgccttctggtttccgtatcataccattggatcctaaaacagatggcttggtttcatctaggatctgggtcttatcatcaacactggacacaggatctggtaatgcctgctcagctggtg

SEQ ID NO: 90483 - DNA, 102 bp, Glycine max
  Clone ID: PAT_MRT3847_52718C.1
ctgatgagagattggcaggcacagaccatgagggaataatcctttccttggaggaatcgaaatgaatgccactcccttgctggccctagatgaataaatttg

SEQ ID NO: 90484 - DNA, 344 bp, Glycine max
  Clone ID: PAT_MRT3847_52719C.1
ggctcgagtacaaattctttgtgttgagttgtgtacttgtgttaattgtgttgctgtagtaggaaatttaagtgaggagagaatgatgatgaagtctgctatgtgtgcattggtgcttgaggcactggttgtggttgaagtggggcccatggctgaggctgcagtgacttgcatcccaacacagttgactccttggattccggcatttaaatcatgttctgcaccttctagcgcttgtagcccgaagctggtggagcaaaatccatgcttttgcggctaccttaaaaaccctaacttgaaacagtatgttaactctcctaatgccatgattgccgttagttctt

SEQ ID NO: 90485 - DNA, 772 bp, Glycine max
  Clone ID: PAT_MRT3847_5271C.1
gacacctatcaatttcgtaggtttgtacatcttttggtttggggcgaaagttcagccttttcagatttgcatcaatttcaacagagaacaacgtgatttgtggattgctgtaaagtgcattatttggccattagctaatggacaagggggtgcctcctagcctcttcgtcaatgatggttctttcatggagaggttcaagcaacttcaacaagagcaggataaagggaagaatgtcaaattggaggattctaaaccaattaagggtggttccagtggaaagctagctttcagtttaaaacaaaagtcaaagctggtgccaccccctgttaagttgagtgctgatgaggatgaagaagaaacagaagctgggtatgtttcaaacgatgcaccactaaaacggcaaaagttaggccaggaggaaggcattgaccaatcatcaagacaacttgatgttgcacctcattccccaagtgatcctacagtgaagaaagttgctgacaaattggcaagttttgtggctaaaaatggaaggcaatttgaggatgtaacacgtcaaaaaaatcctggggatacacctttcaaatttttgtttgatgagagatgtgctgaatacaagtattatgaatatcggcttgctcaagaagaaatgctcttgtgcaatcaaaggaatcacaggtgccctcgtatggggggtacaagcacttcatcttccaacagactaatgtcatcagagatcatctcagcacatacttaccaaattcctgcatctgc

SEQ ID NO: 90486 - DNA, 471 bp, Glycine max
  Clone ID: PAT_MRT3847_52720C.1
cttttttttttttttttttttttttttttttttttttttttttttttttttggaaaaaaaaatcgtttacttgtctattaatcatggggagtatacaacagcccttgtttctactttccatgaaaaggttatatttctttactttgaaagtaacaacaaataatcaaaaaattcgagattaaccaataccagtaatttcttttaaaaaggaaaaaaaaaaaaaaaggaaggaaggaaggaggaaggaaaatgaataaaattgaaaaaaaaaaaaaaattttaatcatttaaaggtttgaccctcatgcttgctaccaaaagaaacaggccttttcctaatgtttccacaaccaaacttttttaaataactttcaaaaagcattatggaaagccccaaatggggttataattggttaaactacaaatcttttactggaacatgactttgaggaagtctgatctttttcaatc

SEQ ID NO: 90487 - DNA, 237 bp, Glycine max
  Clone ID: PAT_MRT3847_52721C.1
cataatagcacctctggttgagctatggtggtcgcagctactaaagggagcgtggctgttgccacaacgattgtacagagcactaacgccacagggcctccaggggaatccctgcagcctcgtgattggggacactaaggaaatgtgcacagtgctcatgcaagctgcccgacctcaacaatccacaagttttcttctctctaaggagaggcgcaggcccatttacaccttaaccat

SEQ ID NO: 90488 - DNA, 323 bp, Glycine max
  Clone ID: PAT_MRT3847_52722C.1
cccatgaaactaaaaaaaataaaaaatttggaataaaagcaaaaataaataaaagaagtaacatcagagcatgaaataaaaaaatctggaataaaagcaaaaataaatatgctatgttctatcatgaaactaaaaaaaagaattatgaaagcagaaaaggaagctatgaagtctgaacgcataaatggaagcacacctcgaacaaacgctggaaacttcgttgaaggatgccgagggaactccaaaaccaaaagaggaaatgctgaaatctgaaggagtgttgacatctcactgctactctggaggagctctaacatctcgct

SEQ ID NO: 90489 - DNA, 296 bp, Glycine max
  Clone ID: PAT_MRT3847_52723C.1
aacagcggccagcctcccaactacgagatgctcaaggaggagcaggaagtggctatgctgggggcgcaccacaaccctgctcccccgacgtccaccgtgatccacatccgcagcgagacctccgtgcctgaccatgtcgtctggtccctgttcaacaccctcttcatgaacacctgctgcctgggcttcatagcattcgcctactccgtgaaggtgcgtatggccctggcggaaatccagggggtgccggtgagcctggggctccacctgcccacatgctgcctggggtggggact

SEQ ID NO: 90490 - DNA, 386 bp, Glycine max
  Clone ID: PAT_MRT3847_52724C.1
gagagtgtgtcagagaaagtgccgctattacctactggggtgacaagtagtgttcatgagttggctttgatgatgaataataatgataataataagaataagtcaattgggatagtgaacaggaatccaaagtggtcggataagttcaatgagatgaccaacttcgatgatgttaatgtggcagcacaatcatcactgcctccaaggccaagggtggcaaggttgattccatcagcacctgctgcagcttctttcaatttcaatgcttatgagtactattggaggaccaagtctgcatcaccaaaaggtacaagtagtgttaaccttaaccaacttgaccaagagaaactgaagagcaggttgttgtgtctggggcatgaatacaa

SEQ ID NO: 90491 - DNA, 111 bp, Glycine max
  Clone ID: PAT_MRT3847_52725C.1
gaggggggaacctttggattgtattaatttaagcgcgagcatgcgtggcttggacgcatacacacaattacttcgtgatggcccgtacactaacaactgttagtctgacaa

SEQ ID NO: 90492 - DNA, 478 bp, Glycine max
  Clone ID: PAT_MRT3847_52726C.1
cttatccagagtttgattaatttgagattcctgcgtggattataggcattcatagaatcgggtgttctattacattctacatggcaccacagacctaaggctaactggagagagggagtacctgacaagctgactggaccatatcagtaatccatgaacgtttctttttttactaatacctaattctcaagatcctcaccaacaagccacaagaccacttgaagctactactattttttgacccaaattgagctgctttactggaacatgaggatccatgcccatacaccaagccacgagaatagcacattctgtgggatccactggatagatggcgcatatggcgaaaactttacaggcttttgcaatttgctaatgtcaccacagagaagggcattgtttgtactttgaagctcatgtctgttattgacctttgggatgacaaccttgacatatgttttttgaacacgtaccttga

SEQ ID NO: 90493 - DNA, 561 bp, Glycine max
  Clone ID: PAT_MRT3847_52727C.1
tgggggagtggaaggtaagctgactgaaataaaggtatagagcggccacctgagagtcctttgttatttgatttgatgtgataggcattgtatttagttatgatgagttaaattagaacagaaagaacccatctatacaacattgacattagaattatgtatactgtaaacaacctgaaaatatcaaatgagctgttttcggacagagagtgtgggtgaagagagtaatgaagataggatgatctctcgaaatactcgatgaggaacgtaccatatataaggcttcacgaccaacagcggaattttcctcctcgcgagacaccaatctttactatattgtgagcaggtcgaagtcgaatattagtatattccagctatagaaatgcaaatatacaacctatcacctttcatgcaccatcagacaaagtgccaaataaatcaaccaagaatttgagaaaaaaaaaaaaaagatcaagcgcctacctggatctgcttcccatgccaacagaacagcccaagacgcccgcgcaaaacgagcaaaacagcagcccttgaaacaag

SEQ ID NO: 90494 - DNA, 234 bp, Glycine max
  Clone ID: PAT_MRT3847_52728C.1
gccaaatcttatcttatcgaccccatcataacagccacgacactaattctcatactctattaagcaactgtaccaccactctcggacaggatccggatcaccctatgaatgacaccgattctgaagcgcgttgaggtagctcccataaaggatgatggatccatccctgtcgtttacgaacgcgacttgcattgcgacggatacgtcatgacgatcatacgcacctgtcgccac

SEQ ID NO: 90495 - DNA, 336 bp, Glycine max
  Clone ID: PAT_MRT3847_52729C.1
caaagggggaaaaaaggacctgaatacaaacgtttttcgatactggccaagcatgctgtatccttagcaaaggcaccagcaaggtcaaggggaaacttaatttaggtagggtacatgcatgatacaagaatggcctttctataaacatactctaatggtgaatggtgatttttttaaccggactagcagaattttgtttatttgccaacccgtgagctccattagcacaccaaaaacttctggggactttgtttttttctataagcctagcaaaaaattggcacagactcagacgggtgattccattgcgcacggaaatcgaaacccctaattttt

SEQ ID NO: 90496 - DNA, 529 bp, Glycine max
  Clone ID: PAT_MRT3847_5272C.1
aagcctggatcctttaaaacgggcggtttttttttttttttttttttttttttttcaatggaaaacttcgattttaaccggattgctggtaaacaaaactgaaattttggattcctaaaaaacctggcagcctttttaagggctcccgttgcccacctaaatgggttaaaccagtttgggtttttggggcccccaaaaaaaaattaaagccctcccccaaagcctgggaaaaccattatggcttggggaatttcccttttttgggccccagttccttttggttcccccccccaattttaagaaaatccgggccaagggcggtcattcttcttctttttccaaatggccacctggaaccggccctttattcccgccattgttttccccaaaaacctccgggcctgttttttgaaaaacctcctggccacccgttggaccaaagggtttttcgaacaatggatcctccctttttggaccggctggacccaaacggttggttttgggcctctcccctctactaaggtcccta

SEQ ID NO: 90497 - DNA, 408 bp, Glycine max
  Clone ID: PAT_MRT3847_52730C.1
ggattttaaaagttttataagataaaaaataataataatttacaaaaataaattatccttatgtgaatgagtaggaaaaatgccttaaattgctaaaatcatttaaaagtatatttattcttcctgattttttttttcatgaatatactaattttaaatgttttattcttctgcttgttttcatgcttcagttatactttttcctcttcgcgtcctctatattgcaaggtatatataacattatttttggcttttaatggttgtcctttgtcctttggtgtgtgattattcttctgcttgttttcatgcttcagttttacttttccctcttcacatcagttactgaagcattgtttgacagctttcattgcacatgatttctagtgtggtattatgtagcaggagagc

SEQ ID NO: 90498 - DNA, 445 bp, Glycine max
  unsure (1)..(445): unsure at all n locations
  Clone ID: PAT_MRT3847_52731C.1
ctacaacattcactccctctctcttgtcttttcctctacgttcctgcattgctcgtctcgaacgctaaccatggccggcggaggtttcaccagcggcggcggcgccggagatttcgaggccaaaatcactcccatcgtcatcatttcatgtatcatggctgccaccggaggtctcatgttcggctacgacgtcggcgtttcagaaagacagtggaagagaaaggactggacagtaattactgcaaatacgacaaccaaggattacagcttttcacgtcgtctctgtatctggctggtttgacttcgacgttctttgcttcatacacgactcgtaggttgggaagaaggctgaccatgttgattgctggggtattcttcatctgtggagttgtccttaatgctgctgctcaagaccttgccatgctcatcgntggcagaatcttac

SEQ ID NO: 90499 - DNA, 1956 bp, Glycine max
  Clone ID: PAT_MRT3847_52732C.1
tggacgcgtgggtcgcccacgcgtccgggccaacattcactccctctctcttgtcttttcctctacgttcctgcattgctcgtctcaaacgctaaccatggccggcggaggtttcaccagcggcggcggcgccggagatttcgaggccaaaatcactcccatcgtcatcatttcatgtatcatggctgccaccggaggtctcatgttcggctacgacgtcggcgtttcaggtggtgtgacgtctatgcccccgttcttgaagaagttttttccgacggtatacagaaagacagtggaagagaaaggactggacagtaattactgcaaatacgacaaccaaggattacagcttttcacgtcgtctctgtatctggctggtttgacttcgacgttctttgcttcatacacgactcgtaggttgggaagaaggctgaccatgttgattgctggggtattcttcatctgtggagttgtccttaatgctgctgctcaagaccttgccatgctcatcgttggcagaatcttacttggctgtggtgttggcttttgctatcaggccgtgccagtgttcctctctgagatagcaccttcaagaatacgagggagcattgatatatttgtccagctcaatgtcacaattggcattctatttgctaaccttgtcaactacggcaccaacaaaatcaaaggtgggtggggttggaggctatctcttgggttggctggtatcccagcagttctgctaactttgggagccttgttcgtggtggacacccccaacagtttgattgaacgtggccgcttggaagaaggaaaaacagtgcttaaaaagattcgtggcactgacaacattgaacttgagttccaggaattgcttgaggccagtcgtgtggctaaagaggtcaagcatccattcaggaatcttctcaagcgcaggaaccgaccccaacttgtcatttccgttgccctacagatattccagcaattcacaggcatcaacgcaatcatgttttatgccccggtgctgttcaacacgttaggattcaagaacgatgcatccctgtattctgctgtgataactggggctgtgaacgtgctctccactgttgtatcgatctactcagtggacaaagtgggacgtcgcattctgttgctggaagctggtgtgcagatgttcttgtctcaagtggtgattgcaatcatactgggaataaaggtgacggaccattctgatgacctttcaaaaggcattgcaattctggtggttgtgatggtctgcactttcgtgtcttcctttgcatggtcttggggtcctcttgggtggcttatccccagtgagactttcccattggagactcgttccgctggtcagagtgtcaccgtttgtgttaacctgctcttcaccttcgtcattgcacaagccttcctctctatgctctgccacttcaagtttggtatcttcttgttcttctctggctgggtcctcgtcatgtctgtcttcgtgcttttcctgttgcccgagactaagaatgtccccatcgaagagatgaccgagagagtgtggaagcagcattggttctggaagaggtttatcgatgatgccgcggatgagaaagtagcccatgtctctaatggtaatggatttgatccaacctccaggttgtaaatcatttgcattgagtattttagactctagagtaagtacagtacatgcttatgtgggttagtaacaaattaagcaagttatttttttatttcccccaccccatccatgttggtggcctaggcctgcaacaacattctaatcagttaatccaacattgattatcctgttttgcaagccatataagatacagttttttccacccacccttttctttttgtaaattgtttctttgaaaggaataatatatattgatttccaatttaaaaaaaaaaaaaaaaaaaaaaaaagaa

SEQ ID NO: 90500 - DNA, 170 bp, Glycine max
  unsure (1)..(170): unsure at all n locations
  Clone ID: PAT_MRT3847_52733C.1
accaanagacccnaggacgaactttttttttctggccgggaactggaagcctcacattggggcccggatttgggaagggaaaccgagaggcaatcaaagacaaaactggagacggggggaacatagtaaagcgcatacaagaccacacaacatactaaccgaaaacataa

SEQ ID NO: 90501 - DNA, 477 bp, Glycine max
  unsure (1)..(477): unsure at all n locations
  Clone ID: PAT_MRT3847_52734C.1
tcgnggncagtgcaaaaggtagtggctggggcctcattggtgcatgcgttttttacaaacatgcacaatccatgagcattatgatgcatgtaagtggacaaaatcaaaaccacattcctaggaaattgatcttcccaataaaggtatgtggtcctaataatggctttgaaatgtgaagatatgaatgggctaatcaaacttcatggaatttgagtcttccttatttgacaatcccctaacattctacactttttgatattttcttgggaatatctcaagattttgaacttgctggttatactcttatgccagctttttctgttccacaggctactgacatatcttctgaaaatcgctaattctctgcatgatctggaatttgggtttactttcgcttgttcgtttgtttaattcaataaaggaaattaggcatgaccctcttgttgagtatgctctgcctatttgaaaatttccaca

SEQ ID NO: 90502 - DNA, 279 bp, Glycine max
  Clone ID: PAT_MRT3847_52735C.1
cctcgagcctattcggctcgaggcgccgcagcacatggatcacaggccgaaatccaaggactcactctcttactccactctcttcactctccagcctttgatgaactttcaacttccaaaacaagatgatgactttgattattacgggagtagtagtcaggatgagagcagagacagcgaaggtggggggattacaaatcacggtaatgggaatgtgcatgacaaggaagtgaatttgttcaagaagaggagatggtctctaaacagtgacaacgagga

SEQ ID NO: 90503 - DNA, 419 bp, Glycine max
  Clone ID: PAT_MRT3847_52736C.1
ggcgcaagtgactttgttgatcgagatgactcgaagcagtgtgatgaaaatgaaggtccgtgttttcttcgttgctacagctttggtagcatggcaatgccgtgcgtacgatatgttccctgtacgaatgaacactggctatggtgcccgtactccggaggtgaaatgcgcaccttggaagcttgctgtggaagcacacaacatctttggctttgagaccattcctgaagagtgcgttgaagcaaagaatgaatacattcatggcgaacaatttagatcagactccaaaacagttgaccaacagacttacttttatgccaaaaaccttaaagtccatctcagggacacatttgagtaaactatacatggtgccgccttttctaatgttccttactccctggcagatccaatgaggaaag

SEQ ID NO: 90504 - DNA, 498 bp, Glycine max
  Clone ID: PAT_MRT3847_52737C.1
ggttttcctctgttctttctctctctctctctctgtacacaccacatctttcagtttcactaacaatgacggtttcttctgagaattgcgtctctagcagccagagttctctcactagacttgctccacttgaagcagtgctctttgatatagatggaactctttgtgattctgatccactccattactatgccttccgcgaaatgcttctagagattggttttaatgaaggtgttcctatatcagaggaattttttattgacactgttgctggcaaacacaatgatgatatagcctcggttctctttcctggtgatctggaacgaggtttaaagtttgtggatgataaggaagccatgttccggagattggccgcagagcaactgaagcctttgaatggtcttgataaagtgaggaaatggattgaaaatcatgggcttgagagagctgcagttaccaatgcttcaagagcaaatgcagaactcatgatctcaatac

SEQ ID NO: 90505 - DNA, 121 bp, Glycine max
  Clone ID: PAT_MRT3847_52738C.1
gacagttgcataatctcaacagtacgttctaagtcgtcgtattctatcctcgcttatggctcgtacagacatacttgttctctcaatggcatcaccagatttagaacaacctcacgcttct

SEQ ID NO: 90506 - DNA, 413 bp, Glycine max
  Clone ID: PAT_MRT3847_52739C.1
caatgatcaatcataaggtaactgatagcatagtatacattttgttggagtagtattatatataatcaaatacaggggggtggactctattgttgggaagttcgtatccgttactttatattgtttcaagattttagtatatctaacaaaaatttatccatttgttttggaaacaatggtcatattgtatgtgactgagtcatgtcaaggcttttggtctggttctagatattattttaggatatgtgttgtggcagagaagtattgggccattttagcaaagttgacttctgtacctgtaatggactttaatggatgtgaatctataggttcattggatggagtcttatactcgttttctccaactggggttattaagaatttcataagaatgtatgctgaaaaatctataa

SEQ ID NO: 90507 - DNA, 1704 bp, Glycine max
  Clone ID: PAT_MRT3847_5273C.1
actcacttcacacaaaccaaagttaattaattaccaacacaaaatggatggaggctgtgtcacagacgaaaccaccacatccagcgactctctttccgttccgccgcccactcatctatctttgcttccccttagtcaaacaaagtaacacaccatccatcctctctctcttctcttcttctgttctctagtttcctgctcttgtttcttagaatccgtacggtctaatcaacacaacaaaatggatgcaattagttgcctggatgagagcaccaccaccgagtcactctccataagtcaggcgaagccttcttcgacgattatgtcgtccgagaaggcttctccttccccgccgccgccgaacaggctgtgccgcgtcggtagcggtgctagcgcagtcgtggattccgacggcggcggcgggggtggcagcaccgaggtggagtcgcggaagctcccctcgtccaagtataagggcgtcgtgccccagcccaacggccgctggggctcgcagatttacgagaagcaccagcgcgtgtggctgggaacgttcaacgaggaagacgaggcggcgcgtgcgtacgacgtcgccgtgcagcgattccgcggcaaggacgccgtcacaaacttcaagccgctctccggcaccgacgacgacgacggggaatcggagtttctcaactcgcattcgaaatccgagatcgtcgacatgctgcgtaagcatacgtacaatgacgagctggaacaaagcaagcgcagccgcggcttcgtacgtcggcgcggctccgccgccggcgccggaaacggaaactcaatctccggcgcgtgtgttatgaaggcgcgtgagcagctattccagaaggccgttacgccgagcgacgttgggaaactgaaccgtttggtgataccgaagcagcacgcggagaagcactttcctttacagagcgctgctaacggcgttagcgcgacggcgacggcggcgaagggcgttttgttgaacttcgaagacgttggagggaaagtgtggcggtttcgttactcgtattggaacagtagccagagttacgtcttgaccaaaggttggagccggttcgttaaggagaagaatctgaaagccggtgacacggtttgttttcaacggtccactggaccggacaggcagctttacatcgattggaagacgaggaatgttgttaacgaggtcgcgttgttcggaccggttgtcgaaccgatccagatggttcggctctttggtgttaacattttgaaactacccggttcagattctatcgccaataacaataatgcaagtgggtgctgcaatggcaagagaagagaaatggaactcttttcattagagtgtagcaagaaacctaagattattggtgctttgtagcgttacgttactttttttgagttttttttttttttgagttttgtgactgatgaaagaaagaaggtacaagaagaacggcggtgtagtggcatagtggcatcgcaagttgctgcaaaaggtgaattgtatattacttaatattagatgctgaaatattaggtgtaatgtaacaaaaaactgtacaaggagaagaaaaaaggttctaagaaggggagaagctagaagaaaaaaaatgatgtcatcatgggataactgtttaattgtatatgttgataatattgttgaatgttgattattatgttcacggc

SEQ ID NO: 90508 - DNA, 325 bp, Glycine max
  Clone ID: PAT_MRT3847_52740C.1
ggccgaccccacctagtgggataaggcgttgttgttgttgttgttgttgtatgcttgccgcaaaactttggcggatagccggccccgggttagaggaaggtttgcaaagaatgatgactttggagagagccataaacaaggaagtagcaatcatgaagatgatgatgaagagataattgtgaaagaagatgatgatatggttgattcctcagatatctttgcacatatcagcggagtgaactctttcaaatgcaactattccatccagtccttgatttgaattaaattattagtttgactagtgaaagcttatttatataattag

SEQ ID NO: 90509 - DNA, 439 bp, Glycine max
  unsure (1)..(439): unsure at all n locations
  Clone ID: PAT_MRT3847_52741C.1
aagcttggaatacgagctggagcaagatcgttccttntcttgtgtttcaggccagagccgacccgacccggcagcggacactatcacagcacccggggaggtgaaaccaagcccactaaagggngnacgcatcagagaagggcaccgaaacaaagcgcgatccctggcggagcccagacagacatctcctatgccgccacgcggaacagaaaacacgggcccactctgtagcagaaaccgccggaataatgatgccgacgctgaagaaagcgcacagactgcagagaccgaaagaagaacagaaccagaaacgaaggctgaaaagcatattcagaaactactactacttggagccggagagccagggaagtccacaacattcaagcagaaaaaacatcaggaccaaaccggccgcgacgaggcagaaccaaaaagccac

SEQ ID NO: 90510 - DNA, 854 bp, Glycine max
  Clone ID: PAT_MRT3847_52742C.1
cctacgcgtccgtgtttttactgctaaaggaactaaaattcaggattacttttaaccgatttgagttttgggaccgtgcttaataattttagatcgttcaacatttttccttgtggctttatctttgtttactttttactttattatcatgttttattaatttgttatttttctttttcaatagactccagaaatatggatgaagccaaacagtgacaaatattacaaatgcgtttctcgacccaggaatgtaatagggctaaaaaagacaaatggctatcttcttgttcatgcaaatggtggattgaatcaaatgagaactgggatatgtgatatggttgcagtggcaaaaataatgaatgccacccttgtgcttccctctcttgaccatgattcattttggactgatccaagtgactttaaagatatctttgactggaggcacttcatgaaagttttgaaagacgacattgagatagttgagtacttgccggtccaatatgcatcattgaaacctcttgtgaaggcccctgtttcctggtcaaaggctagttactacagaggtgagattcttccattgttgaagcaacatactgttgtacagtttactcacacagattcccggctcgccaacaatggccttgcttcctcattgcagaagctgaggtgccgtgccaattaccatgctctcaagtacacggcagaaattgaagagcttggaaaggtcttggtgaataggctaagaaacaataaagaaccatacattgccctttattttagatatgagaaagacatgctttcctttactggctgcattacaatttgtctgttaggaggcggaggaacttagggtt

SEQ ID NO: 90511 - DNA, 303 bp, Glycine max
  Clone ID: PAT_MRT3847_52743C.1
aatacactaatggcccatatgtcacctcttaatttacatataaaaaatgacactttttaacccactatttcaaaagggcactaataaccccaaaatttgaaacttttaggtttttgaagaaggaacgcatgctttgggtattgggggcaaaaacttccaacttcaatattaccggcaaaaggacaaccctgtcaagcaactggaattggggcaactttccaacgagtaaccgaaaacctacttttccaaaagccgggctaattccctcttgcacccaatggcatatcttttcctttgggcaag

SEQ ID NO: 90512 - DNA, 808 bp, Glycine max
  Clone ID: PAT_MRT3847_52744C.1
caggtattggctctttgctgcagtaaaacttaggtgcttgcttgtgacaaatgatgaaatgcgagatcacatatttgaactgataggaagcaacttttttaaccagtggaaagaaagacatcaggttcactacacttttgtgaaaggaaacctaaaacttcagatgccaccatcatattcattggtcatccaggaatcggaaaaaggttattggcatgtacccctagcaccaggcactagctgtgagtctacgagatgttggctctgcattacccggccatgtggtcatgatgttgttgctactgtttctaatggtgttagtagcttggattcccaagtcgatgaaaacaatgccacttctgtcactggtaaaagaaaagagaggtctcctccttcatgataaatttttccatgggcttgccctttgtttggcttgtcctttgattgctttggggttactggtggcaagataaacggcagcaaccttgcggttattaagcttctacaaatgattgtaagctaattaaaagggtacattacttaaccactcccaacagacacacagtaagttatacttattaatctcaatctcattgttatatttatgtcagaggttgtgtggggggtttcagtcatggttccaaagcggggggtagtggttatagtggccggtaccttgccttccgatggactctatccaatgaatgaataatcttcaactagtccaattataaagtttgttattttgttcaagaactaaacgttcaacaactaaacttatttttttaaatgaaattagtaaaactgt

SEQ ID NO: 90513 - DNA, 348 bp, Glycine max
  Clone ID: PAT_MRT3847_52746C.1
gggaaaggttgcatagagtattggtgctaatcaatactttagaatattagttaaaaaacaattttttttattaaaaaatagaaaattattttggggtataactttttttttacatttccttttgatttcgaccctaaatacccatgatggggcctggggctccaaaatccaacgctttatatttgcccccttggctttggggaacaaaacaatacaccttaaactcttggaacctaccactaatcaacgaaagctcttcacggacggtaaaagattcccggggtgctaaaaaaaagggggggacacccccaaatctgccatagaaaatactcttagaccccccccccc

SEQ ID NO: 90514 - DNA, 231 bp, Glycine max
  Clone ID: PAT_MRT3847_52747C.1
ggggggaacaaataccaaagccgcttacatttaaaaaaattgccattgtgtcccccaactatttaccgaattccttttgcaaacccccccatccgggctggtattgtgggctatttacaaaaaattcagctaccgctctttttctggttggggagaacccctcccgggaattttcttttacttttatacccccccggcgggttgggaggaggggaatatgcctaaaagaac

SEQ ID NO: 90515 - DNA, 284 bp, Glycine max
  unsure (1)..(284): unsure at all n locations
  Clone ID: PAT_MRT3847_52748C.1
aaagacccatgaaaatccttcatnccggtgactgaaggttgagatgcacagacagttgcctggaaaataccanaatcctacaaggggaaaagcaaaattgttttgcttcactctttatggggaagggtttgaatagcttttcttagttgctcaatagatggtgtcaacaccgtgtcacaggccggcctgtgggtgtgggcagtgctggggagctgatttccatgaagtataactggggagaggcttgtcaatgccaacactgtgggctcttgtttgacttgggg

SEQ ID NO: 90516 - DNA, 445 bp, Glycine max
  Clone ID: PAT_MRT3847_52749C.1
aaaaaacaaaaaaaacccaaaaaagggaatcccacccccaaattaaggctaaaacccccctttattacccccaaaagggaaattggggaccccaaaaaaacccctggaccggggggtaaaaaacccccccaaagggggggacccaaaaaacatatttgggcaaaaaaaacccccaaaaataaaaaaaaacagggggccgccctgccaaaaaaaaaagcaaaaggggagggggcccccattaaaagggccccaaattttcttcccggggggccccaagcaacccccgccccttgaaaaggccccgggggccctccccaaagggtttcccggccaaaggccccatggaagcttttgggcccgaaaaacccttgcccagctccacaaacgggttttaaacccccaaaaaaaattgtccgccccggaaagggtaaaattcaccccgggg

SEQ ID NO: 90517 - DNA, 3075 bp, Glycine max
  Clone ID: PAT_MRT3847_5274C.1
tcgatctttgcttcccctcagtcaaacaaagtaacacaccagaccggtccaccggggacacctatcaatttcgtaggtttgtacatcttttggtttggggcgaaagttcagccttttcagatttgcatcaatttcaacagagaacaacgtgatttgtggattgctgtaaagtgcattatttggccattagctaatggacaagggggtgcctcctagcctcttcgtcaatgatggttctttcatggagaggttcaagcaacttcaacaagagcaggataaagggaagaatgtcaaattggaggattctaaaccaattaaggttatttcagggtctttgtctcccaatccttcctttaccaaaacgcccgtggacttgaaggttaatgacacaaggaaaatatcccagggtggttccagtggaaagctagctttcagtttaaaacaaaagtcaaagctggtgccaccctattctcaagtttctctctgtttcttcctacttcatgctatagcacttacaatactcaacaataacctaaccaaaccaaaccaaaccaaaacccttatctgcactcacttcacacaaaccaaagttaattaattaccaacacaaaatggatggaggctacagaaaccaccacatgcagcgacctgttccaggatctatctttgcttcccctctctttgctacctcttagacaaacaaagtaataaaccattctcccctctcttctcttcttttgttctctagatttcttctctcttgtttcttagaatccgtacaatctaatcaacataacaaaaatggatgcaattagttgcatggatgagagcaccaccactgagtcactctctataagtctttctccgacgtcatcgtcggagaaagcgaagccttcttcgatgattacatcgtcggagaaggtttctctgtccccgccgccgtcaaacagactatgccgtgttggaagcggcgcgagcgcagtcgtggatcctgatggcggcggcagcggcgctgaggtagagtcgcggaaactcccctcgtcgaagtacaagggcgtggtgccccagcccaacggccgctggggtgcgcagatttacgagaagcaccagcgcgtgtggcttggaacgttcaacgaggaagacgaggcggcgcgtgcgtacgacatcgccgcgcagcggttccgcggcaaggacgccgtcacgaacttcaagccgctcgccggcgccgacgacgacgacggagaatcggagtttctcaactcgcattccaaacccgagatcgtcgacatgctgcgaaagcacacgtacaatgacgagctggagcagagcaagcgcagccgcggcgtcgtccggcggcgaggctccgccgccgtcggcaccgcaagctcaatttccggcgcgtgctttactaaggcacgtgagcagctattcgagaaggctgttacgccgagcgacgttgggaaattgaaccgtttggtgataccgaagcagcacgcggagaagcactttccgttacagagctctaacggcgttagcgcgacgacgatagcggcggtgacggcgacgccgacggcggcgaagggcgttttgttgaacttcgaagacgttggagggaaagtgtggcggtttcgttactcgtattggaacagtagccagagttacgtcttaaccaaaggttggagccggttcgttaaggagaagaatctgaaagctggtgacacggtttgttttcaccggtccactggaccggacaagcagctttacatcgattggaagacgaggaatgttgttaacaacgaggtcgcgttgttcggaccggtcggaccggttgtcgaaccgatccagatggttcggctctttggggttaacattttgaaactacccggttcagatactattgttggcaataacaataatgcaagtgggtgctgcaatggcaagagaagagaaatggaactgttctcgttagagtgtagcaagaaacctaagattattggtgctttgtaacgttacgttaggttttttttttcttttttttttttcgggagtttttgtgactgatgaaagaaagaaggtacaagaacggcggtgtagtggcatggcaagttgctgcaaagtgcaaaaggtgaattgtatattacttaatattattagatgttgaaattaggtgtaatgtaacaaaaactgtacaagaagaagaaaaaaggttttaagaaggggagaagaaaaataaaaataaaagatatcatatgaaaactgtttaatggtatatgttgataatattgttgaatgtatgttcatggcctgatgttgtttttttggcaaatttgatttgcagatttaaaaaaaaaaacccctgtaagttgagtgctgatgaggctgatgaagaaacagaagctgggtatgtttcaaacgatgcaccactaaaacggattgccaagacgaaggcattgacatcattaagacaacttgatgttgcagcacctcattccccaagtgatcctacagtgaaggaaagttgctgacaaattggcaagttttgtggctaaaaatggaaggcaatttgaggatgtaacacgtcaaaaaaatcctggggatacacctttcaaatttttgtttgatgagagatgtgctgaatacaagtattatgaatatcggcttgctcaagaagaaaatgctcttgtgcaatcaagggaatcacaggtgcctcgtaatgggggtacaagcacttcatcttccaaacagactaatggtcatcagagatcatctcagcagcatacataccaaattcctgcatctgctttatatgaaagtgctgacaatccaagagcttctggattttcaattcaaacatcatcagtaggaagcagtggtaattgttatattgttgtatctttgtttgttttgttgttttcgaatttgataaatttgattttttcaaattgctgctctaatggagagctacatgaaaaaagctgggcgggaagagaagtataaacctaagcataagcccttggttcgcctcagtcttctaagcaaaaattgtcatcacatgggtgatttcattcctccaaa

SEQ ID NO: 90518 - DNA, 1250 bp, Glycine max
  Clone ID: PAT_MRT3847_52750C.1
ccacgcgtccggtaagtttgggccaacccaagttgaaccagtggagttgcgaggaactaaacacagaacactaaaccgcgacaccccaaacgagaggaccaaaaccaaagacattccgttgcacacagataaaaacatccaaacctcattaaaacaaaacatcaaagttcaaaacctttttcaaccacctcaaaacgctgctatctctttctccactctccccaacatggccgtcgttggcgtcctcgcgctgcaaggatctttcaacgaacacatagctgctcttagaaggttaggggtgcaaggcgtggagattcgaaagccagagcagcttaacacaattagttccctcattatccctggtggagaaagcaccaccatggctaagctcgccgagtatcacaacctgtttcctgctttgcgagagtttgtacaaatgggaaagcctgtttggggaacctgtgcagggcttatattcttggcaaataaagctataggacagaagactggtggtcaatatttggttggtggacttgattgtacagtgcatagaaatttctttggcagccagattcaaagctttgaggcagagctttcagtgccggagcttgtctccaaggaaggaggtcctgaaacattttgtggaatttttattcgtgcccctgcaattcttgaagcagggccagaagttcaagtgctggctgattatcctgtaccttctagcagattgttgagttctgattcctctattgaagaccaaacggagaatgctgagaaagaaagtaaagttatagttgctgtgagacaagggaacatattagccactgctttccatcctgaattgacagccgatactcgatggcatagttatttcgtaaaaatgtcaaatgaaattagagaagaggcctcttcgagtagccttgttcctgcacaagtcagtagtacaagtcaatatcaacagccccggaatgaccttcctatctatcgataggaccagaatactccccaagcctttcttgaacaattgtggatgatttttttttctttctatatttttctcgaacattttatcatataattgttggatcttagaagatatagctagctgtttattattcttttttctatttggacaaacagtattgtatttagactttgatgttttctgttaagtagtcatctatctgccaaatattcattccagcttttaaagatggtcgatcaaaagtagctattagctaccttttgtt

SEQ ID NO: 90519 - DNA, 271 bp, Glycine max
  Clone ID: PAT_MRT3847_52751C.1
gctcacctcccaaaagacttgacataaacattaatagctatatttaggtagatatctaactcctctgcggccgggacagctaagataggtagtcctatgagtggtatgagaaaacttacaggcattctgcgagagttcgcttttttttttagctgactcctacactcattagtcacaggcctttgaagagagccctggaagtcaaagaaaaataggtcattattatgagttcttttactgtccacaggccggaataattagggatgcgccc

SEQ ID NO: 90520 - DNA, 583 bp, Glycine max
  unsure (1)..(583): unsure at all n locations
  Clone ID: PAT_MRT3847_52752C.1
tgtggcggatggagtgttcttcacctaactgaacaaagttctaacaccttatttttctaatagacattactccaacatataaattaaaattactccaatacacaccaagattatcatcacatccaccagaacccaagccattctcgatgagaaataaagaacaattacaaaacttacctcattaatacacaacaaattcaaatttcccgagaacaccatctagctttatactaatagaatcaacaacacatacctctgtaccattactcaagccaaatcgcttctctacaatcttctcaataacctctctattctcacaacttactataatattttaagatttataatataaactaaaactcaaaaatacgaaatcatgtttaatataaaactaagatctcatagatccaagtccattatattcaaacatatatacataatttcttctagacaacctatcaaagattacatttactcagcantaagacatgtactactaagacaaactattcttattatgcaaattaatatcatgctttattattatcctaataagaaacatagttctcaaactccgcttgct

SEQ ID NO: 90521 - DNA, 529 bp, Glycine max
  Clone ID: PAT_MRT3847_52753C.1
cgacagttgtgggggtaaagaaaatacaaccaattagattaattttgtcttttgcgtataaacaattgataataattgatttatgtatattttaataggaatcaaagagaagacccgcataattacaattttgatcttatcaattctttaaccaataaaaaaaatctctatccaactacataaatattgtcttttaaaataccaataaaaagacatcacgaagatttatagattacttcaattgattttcgtaaatcaattaataaaaatagaattataaaataactttataacaattaataaaaagtagctttataaaaaatttggtacaaaaatacaacaaattatttataattaatttacttataattgggtaaatttattataataatgattaattttcttagtttgaaaatttaaaatcattggcaaactaagcattaatcaattcgtttactgaagataattataaatgacttaattttaatttcaaaattaatttttaaaaaaatggatgcatatttgtttc

SEQ ID NO: 90522 - DNA, 2218 bp, Glycine max
  unsure (1)..(2218): unsure at all n locations
  Clone ID: PAT_MRT3847_52754C.1
cacgcgtccggtgaggtgtttgttcttgctcaccgagctgcgcttaatcttgcctaccagaaccgctcgcgggttccggagaaaccatcttgcttgcttgagctcactggccgtgacttgattggacttccattgaagtctccactttccttcaatgaggtcaattatgcgcttcccatgttgtctattttgatggataagggtactggggttgtcaccagtgtgcccagtgatgctcccgatgactacatggctttgcatgatttgaaggcaaaacccgcgctcagggagaagtttggggttaaggatgagtgggtgttgccgtttgagattgtgcccatcattgaggttccgcagtttgggaataaatgtgccgagacggtttgcttgcagatgaaaatcaaaagccaaaatgataaggaaaaacttgtagaagccaagaagcaaacgtacttgaagggtttcactgaagccacgatgccggttggggaatttactggngagaaaagttcaggaagctaagcccttgattagaaacaagcttttagaaacaggccaggctattatctacagtgaaccagagaaacgggtgatgtcaagatctggcgatgagtgtgttgtagctctcacagatcagtggtacattacatatggagaatcagaatggaagaagctagctgaggagtgcctttctaatatgagcctgtattctgatgagacacgacatggatttgagcacactttaagctggttgaaccagtgggcttgctcacgatcgtttggtcttgggactcgcataccatgggatgaacagttcctagttgagtctttatcagattccaccatttacatggcttattacactgtttcacaccatttgcagaatggtgacatgtatggatccagcgagtctgccatcaaacctcaacaactgacttatgatgtctgggattatattttctgtggtggaccatatcccaagtcaactgatatatcatcatcccttttagaaagaatgaagcgtgagtttgaatattggtatccatttgatcttcgagtctctggtaaggatctcatccagaatcatcttaccttctgcatttacaaccatactgcaattatggccaagcatcactggcctcgtgggtttagatgcaatggacacattatgctcaattctgagaaaatgtccaagtccactggaaatttcaggacactgcgtcaggcatgggaggagtttccttcaaataattaagcagctggttggcctcattcctttgccgaagttggtttacaaccatctcctggtatgatctcatgtcatatttgagtctagatttaccttggcaatgtctgttgaaaaagtccaggtcttcttttattgccatgtatccatagagctgtcgccggccaccagggagaaataatctacggtggtgactaaaccaagcatctcggtcagttccttgttctgcaaagtgcttgtgtagacgctcagcctcaagataacctatagctgatgcttcaaatatcaaaacgctcaacccccgatgaccctgggggccataagcgtgtcgagctttcacagcatcatatgcgctaaaataattaagaagctcctggttacccatacctagccacttatcattttcatcctgttcaagccttgtattctgaatgacaaccatcggaggccaaactatttcatgatctttctcctcatcttttaaacctttccacttaccaaatacttccccaggtggaattactgcagagccccttctgcgcagttcctcttccaaaagctcagcaaactccctatggatcttcaccctttttgacccctttgttttggcatgagtaatcagaggctgcagtcctctgtaccaatcaatagcaccgggaccacctcgacaagctgtacagtgccactgcctttccggttcattgatcttttcgatagataggccatccaagttctcaaagaaatccttaaaccatttgctcttcttacgagtctcgtggttcttttgactagtatcagaatcataatcatcactcattagatcatcatccggtatcttccatagcatcaaacccttcctcttcatccccttcatcatcaacactatcattcttcataggggactcttctgtaatttcacccttcaccaggctatcatcaacactcttggactggcttggagccagatataga

SEQ ID NO: 90523 - DNA, 622 bp, Glycine max
  Clone ID: PAT_MRT3847_52755C.1
gaatgtgagataaccatcaaactctctttccagaacttgttccataactgacaacctgatcttcatgaatttgagaagtattgccacacccactgtttcctgtaaagcgggaagcaacaacaatttccttttctggattttggtttgcttcttgctaccaagttttctgggagctcctgaagtatatgctcatttccaattgataaagctcatttggggtgtgatcttttggcaaggcacacccatttgtggtgtcattttctgaagtttccttgtttttatcaaagaaccatggtttccgcccagttctctatcttgaatgaaaatggttcacagaagcctttcctgaatcagttgcttctaccaaatgggccgcctgatcgtttgccttcttccaattgtgtggattttgaattttctgatgtgtttggaccatctcctgttgaagcctcaaattcaatatcagtaagctctgagaaacatgggaattcagtagctacacgaggctcaagtgaaaatatttacaaggatcccgattgcattcacatccgctctcaatctttattggctcccacaacctgtattggccagttcttgcaacttatcatgctcacctttcatg

SEQ ID NO: 90524 - DNA, 393 bp, Glycine max
  Clone ID: PAT_MRT3847_52756C.1
ctctttccctgtttacttatcttttgcttcagaggccgaacattgctcactagttctccttgatgcagaggcctacattcttgtgcttctggacgggatcgggtatgaatgctagctccaaacgcaccacttatggaccgttgtcctggatgttatttctctgcattcttgctgattgacacagacttatgggcggcaaaggggcgcccgccgatggccgattcgatcatcggaggatgttccacacacccactccttcaagtgaacggccgcccgctcttgcaaggtgaatacactcttcccgatccggttgacattctctgaccctcatctcacttgcaaaccgttcgaccttacacctatgtacggccggtccgccgaatcatttgggcc

SEQ ID NO: 90525 - DNA, 350 bp, Glycine max
  Clone ID: PAT_MRT3847_52757C.1
ggggaaaaaaaaccttgcaatcgatacaattaaatatcaggggggtcattcataattggcataaaaaccctgtaactaaaacagggggtaaaactcctttttaaaaccattattggatttttttttaaaccaaccaaaagaaaacagcaacttcccaaagaaacaaggtttccattttttcacagtaacaactagggaaaatatactaattgaataaattttccaggctggcaatttttaacaaatgggttcgcttgttttaattgaaaaatttgggggccaaaggaaaatgtgggagctacatcaaaagggaccggaatatcccccaaatttttaagggcaactttaaa

SEQ ID NO: 90526 - DNA, 136 bp, Glycine max
  unsure (1)..(136): unsure at all n locations
  Clone ID: PAT_MRT3847_52758C.1
actaaactcatatttccaaaacgcagaannaanaatgtcgttccccttcaaccactctcnccgcanggacgacgangacgacgacaaacgacccgccgtttancctcntncgggtaacnccttcaacaaccctcca

SEQ ID NO: 90527 - DNA, 565 bp, Glycine max
  Clone ID: PAT_MRT3847_52759C.1
aagaagaagaacaacaacaaagagatagagagagaaatagagggagagagagagagagagaaaagggtacattttgatgtttgttaaccatagaggcaaaacccaaaaagcatcttcttcatcttgatcaaagtccaaacctttgtacccttttgtgtttccctcccatttttgtgtcacaacacaatccttaaccacacaaaatccctcccatttgtgtgcaagagggtatttccctctatttgttggggggctaaaaagagaaagtctttgggccaaaaggggtgggttggttcccagaaaaaagcagtgaaaggaagaaccttgtaaaccccgtcattgtgaacaagggtggctttgtgcattgaacaaacagcagaggactagttttgagtagtttcatcgctgttcaacttaaaaagggtgggaaaaatgaagtatgtgttggtgactggtggtgttgtgagtggacttgggaaaggagtcactgccagcagttttgggtaatcctcaaggcctgtggcttagagttaccttatcaagatgaccctacttgacactgatg

SEQ ID NO: 90528 - DNA, 215 bp, Glycine max
  unsure (1)..(215): unsure at all n locations
  Clone ID: PAT_MRT3847_5275C.1
cccacgcgtccgcgatgagtggcttcgttagatactactcgtggtctttttttgcttgatntgtttgcttctgtacccaaaatatatagtaataaataataataataaagtactacgtantttctaaactgacattgctaatcatcatttataaatgttgtccctaataacctttaagttttagcataatttaaaatataattaataatatggtt

SEQ ID NO: 90529 - DNA, 268 bp, Glycine max
  Clone ID: PAT_MRT3847_52760C.1
cgtgtcgccctatttttattgattttattaaaattggtattctaacatccgtatatatgatatacctgttatttgatggtatctctatggtgattgtacattcattatgcattaatgtgtgtaagtattcataaaatcttatctttatgaaaattcattcatactgtttataaaatgtcctatatatctaatgtaactgatattcatacaaatgattaaatgatagatacaaatattataagctttaagggaaaacattcacatcaag

SEQ ID NO: 90530 - DNA, 506 bp, Glycine max
  Clone ID: PAT_MRT3847_52761C.1
agggtatcacaatgcttcaggatccaagacatgcctctcttattcaccaatctaataaaaagggtaatgttaccaatcagaaaggctccatccttcgcaacaagaatatttaccattcaactcaatcctcagcaggaaaggataactctaaagctattggtcattcagtgaagctgaagaagactgcaagcagtgcagaaaagggcactgaaattcagtcatcattgactaggaagcccctctctcctgtttctcccgcagtcttgtctaaagccaacatatcaaattttcaagaagaccatagaaaatcacagaatgtagcaacacagcaaaaaagtcaaatgctaacagcaactccaccctccaggccatatatagctggagatgaagaaaacatgaccccaaagaatatggcacttccagtgcctaccactcctttgacttcagtccctatgctgactgccattaccccagacagtgtgtattctggtcctactgctgcttca

SEQ ID NO: 90531 - DNA, 286 bp, Glycine max
  Clone ID: PAT_MRT3847_52762C.1
aaatccaaactcttttccatatattatccaacatgttacatgaaaggtgaaaatatataaggaaaaaagggccaatcaaaactatgaatcaatggaagtaattgttgttagagactctttttttggcacatataaatgaaaaatatctaagccgcactgtaatttctcctcaaggatttgtggctaaaagggggaggagtggatttattacttatatatagagagagcttttaactccaagcttctttcaggaaatcaatacttttttccttccaagagtcattta

SEQ ID NO: 90532 - DNA, 806 bp, Glycine max
  Clone ID: PAT_MRT3847_52763C.1
ccacgcgtccgcaaaaacgagaagattgtctgcagagagggaaaagaaaaaaaaaaaaaagattcaaccaatacgcttttcccattaaagccactcaagaactcgaacttgttcattatcttttctccctcttacattccctcacaacacttacccattcctcccttgattcagaatccaacccttcaaatttgcgccaccgagaccccatttttctcttcttctgttatctttgcccattaggtaaagggaaccatttttgcgtctaacagaagcaccccctcattgcgaccgaaggagaagaaataaaaaagaggggtttcattagagagagtaaaaatgaagtacctgttggtgacgggtggagttgtgagtggacttgggaaaggagtcactgcaagcagtattggagtactccttcaggcttgtggctttcgggttacttctatcaagattgatccctatctgaacactgatgcagggacaatgtctccttttgagcatggggaagtgtttgttttagatgatggcggtgaggttgaccttgatcttggaaactatgaacgtttcttggacctcaaattaactcgtgacaataatatcacaactgggaaaatatatcagtctgtaattgaaaaggagagaagaggagattatcttggcaagactgtgcaggttgttccacacattactgatgccatccaagaatggatagagcgtgtggcacagataccagttgatggaaaagaaagcccagctgatgtttgtgttattgagttgggtggaactattggagatatcgagtc

SEQ ID NO: 90533 - DNA, 4245 bp, Glycine max
  unsure (1)..(4245): unsure at all n locations
  Clone ID: PAT_MRT3847_52764C.1
ataataataaaaatgagaagaaatccacagtgatcccccaacccaatgactaaatcgaagtacaaaagtaaaattaatagctctttacatagaaaaagtcacacctatatccataagctctcattcttccaatccaacatcaattacatgcgttataggaccaacagatcagctccaatatgcatacataagaagagcgcatcagctttctgtgtcctgtgctgattcacccctccagaatccacccccataaggtactttctcctatccttcagaaccccttggcttgctgttcaataatccctgctaaaactcaagcaaggtttgtatcctaacccattaggcttctccaaatattcactagtaaaaactccctcataaccgcctaccattttcatttttggcgccttgccaagataatctcctcttctctccttttcaataacagactgatattattttcccagttgtgatattattgtcacgagttaatttgaggtccaagaaacgttcatagttcccaagatcaaggtcaacctcatgtccatcatataaaattcaacttaaatgctcataatatagagtttacattaatggccactcaaagaagacaagttgaaagtaaaatcttaaaccttcagcctgtatactaagatgaaaaataaacagcaacttaaaagccacatgatcaagtgaagttttaggctacaaccatattttgatttcattgagaacaagtatcatccacaagcttgggtattatatgattggatggaacttggaaacataaaaagcagttaaataatcaaaattgcttcatatgctggagagacaaatccccttatgagctaaaagtccactagaaactgtacaagctaaccccgtggacaaaactgtcattggagaaaaatcaaacccacatttgtaagcaaaaaaggaaagaacccagatgattgattaacagctcctcccatcaacacaccccattggtagttgtacttgtatatacaccatttaaggaactattggaagatttgaacccattatttccattatgtgctgctgctgctttcaacaatggtgagtgtatcccatttgttaacttgccataaccattgcttgcaggcacaattgtcctctcacatgctgctgatattaatcctaagaataatggagaaggtttccctggtctggacttgaactcaggatgaaactgagcaccaatgaagaaaggatgactaggaaattcaactatctccatgcgcttcccagtttcatctttgccaacaaaagatagaccagcactctcaagttgtgatatcatatcaggattaacctcgtatctatgccgatgtcgctcatcaacaaagcttgcattgccatacaacttggctgatttgcagtcagcaacatgaaagtaagttctccttgagccaagacgcatagttcctcccatatgagtctttgagcttctggcataaatatgacacaagggtttttggttttgggatcaaattctgtgctagtagcatcatgaagacccagaacagatcttgaaaactcaataacagcaatttgcattcccaagcaaatgcccagaaatggaacattatgttctcgagcatacttagcagcaagaatttttccttgcactcctctatcaccaaaacctcctggaactagaaccccattagcaccctttaaaagactccaagcagctttatatgcctcaggatcctcattataagtagcatcttcaagatccccagctggaacccagtccacaataagtttacggtttcgagcaacagaagcatgtaaaagtgccttcagaacagaaagatatgcatctgaaaggccagtgtattttcccaccattgcaattctaacaatttcatgacatctgtcataaacttttgtccttgaagtccactccttcaaattaggctctgcagcaacacctagcaagtttaatgctttcaggatcgcctcatgtgccttctggtctttcaatagcaaaggaatgtgccaaatatttggaacgtcatggagagtaagtatgtttgacaacggcacatgacaaaattgaccaagctttggctagacattgtcatcaaataccttagaactgcgtcaagcaagaagctaaggggtcaatcctaatcctttcagctgacgaactcaacaatggggagagtataacatttgttcacttgcaaaagctagtgccgcgatcaacatgaggcaccacacaccgtatgtgaggttgcccaaaccctagctaaaaaggccacctgtcccttgacatgcagacgatttaaataaccacaataatggagaaagtctctctggattgcgtgagcttgaagtttcagtccagagtcaagtctaaatgctaacagcgatagaacacttggcatgaccttactcttggcaccatgatcgacaaactttgtacccttactcccgcttttaattctcataacagtagagagtcgtccctagttcgatgtcgccaatcaacgaagcttgcaacaacaaagaaactttgataaatccgcagtaagacttctaacattctgtcatacatatgacaaaagggatatcggatttgggattaaagtctctgatatttgcagcatgaaaacccagaacagatcttgaaaagtcaatcacagcaagttgcatccttaaagaaatgcctagagaaagaatgttattttcttgagcatacttggctgcaagaacttttccttccactcctctgtcactaaaacttcctggaactagaatcacattagaaatatttccttcacctcctaggactcaataacctgctggaaccattatccaagtagcaccctgaaaatgcaaactcacaaccatatattcaaaacgctcctcatttgacaaagaataagctagtaaattcgcgtgcagtaaaagcagaacaaaatctaagttgcaagtatattttaccaacatctcttccatcgatataccaataaatgtcttttatacctgtgcagttacctttcccttccaaacacttgcccatgctcaaaaggggacattgtccctgcatcagtgttcagatagggatcaatcttgatagaagtaacccgaaagccgcaagcctgaaggagcactccaatactgcttgcagtgactcctttcccaagtccactcacaactccacctgtcaccaacacgtacttcatttttttgttctctctaacgaaacccctctttcttttgtttcttctccttcagtggcaacgagggggcgcttctctgttacacgcaaaaacggttcttttttttcttacggggataaataacagaggaagagaaaatggggtatcggtggcgcaaatttgaaggattgaaatctgaatcaaggtaggaatggggaagtagtgcgagagaatgtgagagagtggaaagagaaggaagaagtttgaggctttgtgtgggtttgatgccaaatgcgtattggttgaacccgtttcttcttcttctttccctctcccaggtcctcttgtttttgtttcaggccgcgcgtgaacaatgaagctggcttgctcctttttcaacttatataggaagccaaacccataaaataaaatcaaataaattaatagataaaatgtgttttatattttaaatatttgtaaaaaaattgcatttaaatttgtgtttggtaaaatattgaattgaaggtaactcatttttttctcaatttatggatttactttttttttcagttttaaaacgcgcggacgcgtggcccaccctttntaagttgaacagcgatgaaactactcaaaactagtcctctgctgtttgttcaatgcacaaagccacccttgttcacaatgacggggtttacaaggttcttcctttcactgcttttttctgggaaccaacccaccccttttggcccaaagactttctctttttagccccccaacaaatagagggaaataccctcttgcacacaaatgggagggattttgtgtggttaaggattgtgttgtgacacaaaaatgggagggaaacacaaaagggtacaaaggtttggactttgatcaagatgaagaagatgctttttgggttttgcctctatggttaacaaacatcaaaatgtacccttttctctctctctctctctccctctatttctctctctatctctttgttgttgttcttcttcggacatctctgtggtgccctcatactcta

SEQ ID NO: 90534 - DNA, 390 bp, Glycine max
  unsure (1)..(390): unsure at all n locations
  Clone ID: PAT_MRT3847_52765C.1
ggctcgagggggtgttcacngcttgttccgcttttttctcaacctctgatacacctttcgtagcatgggagatttcagtctcggaggaaatggtcgcaacagccttcgaatgcccacacaccgaatttaactgtttcttatggggtccccaaccacggcttactgaaggcgacggacggtgataaactgcaacctattactgttaaggcttctaacagtggttactgtttcagcgccatatcctgctggatactgattaaccgtactatgcacggccacaacggcgtactcctgccacttccacaattatagaacgacgtgggccaagaagtaggggaggccatgccgcaagagggtgcctactgcactgactatgacacgccgctgaga

SEQ ID NO: 90535 - DNA, 238 bp, Glycine max
  Clone ID: PAT_MRT3847_52766C.1
aggggccataatggataaagcttctactcctgcagtaacttagtggaagcatctacatggaacaagtccatgtgaagctaggggaagaattgtacttcactgtttgtacacaacacattcctattggaacaactccacaggatgcgaggactgagactggaagtccccgtggcattcatcacaagcagggagatcaaatggttattcatatcgccacagatcttcggccacggacaat

SEQ ID NO: 90536 - DNA, 1067 bp, Glycine max
  Clone ID: PAT_MRT3847_52767C.1
tgcgggagggcgctgggggggggccactgtctggggggaagtgctggcacagaagggcgccacattcttggtggtaagtacaatcggtgtctcgaaggattctcaactcagagctgccaaggatttaaaggcctccttggagaatcctaagagtgttctacttctatattaaaatcctacccatcaatggcagattatcagaaatcaggcctttacaaatgggctggtgatgcagagaattttgacaaagagggtccttatattgagcttgttacttctcccaataaccctgatggacatagaagggaagctatggtcaaccgaagccaaggactattgattcatgaccttgcctattattggcctcaatacactccaatatcatccccttcagatcatgatctcactcttttcactgtctcaaaatccactggtcatgcaggaatgcgcatagggtgggctcttgtcaaagataaaggggtagcaaagaaaatgactaaattcatagagataagtacaatcggtgtctcgaaggattctcaactcagagctgccaaggttttaaaggcagtgtctgacagctgcgaacaagaaaactcccaagatggggaatcatttttcacgcacagctataacataatggcccaaagatggaagcaactgagagcagtagttgaggccggtgatttgttcactttgccacaattttctcctgcattctgcaccttctttggtcaggagacggagcctcaaccagctttcatatggttgaagtgtgaaggagatatagaggactgcgaaagcttgcttcgagaacacaaaattgtagcaagaagtgggagacactttggggctagcccaaaatacgtaagaattagcatgctggatactgatgaaacttttatacagttaatagatagactatcagccatacaacaaggaaaatgaaaaatttatccctgatgtatatgtataacaaataaaaggtcatagttcatatataatattcggccgtgcaatattttttgttcctacacaaaaaaaaaaaaaaaaaaaaaaaaaaaaaa

SEQ ID NO: 90537 - DNA, 285 bp, Glycine max
  Clone ID: PAT_MRT3847_52768C.1
gatcccgcgcttctggatacatacacaggcacatagaattcgtgttacttctctcttgttctgctggcttccctcagatacttacaacagcaacttgcataaaagaaattctggagggattttccaaacagaaaaataatcaataaatctatcaacaagtatctggtttctgttactctgctggagcggttacccctgtcatagaggttcaaatgggaagatgctccttccagagaggaaaagtgaggattgaaggggaagagtgaatggaggttggggaaatgg

SEQ ID NO: 90538 - DNA, 562 bp, Glycine max
  unsure (1)..(562): unsure at all n locations
  Clone ID: PAT_MRT3847_52769C.1
ttggtaacctagttttagacaagttttgaggtaaatgctatgaaaagtttatatgatagtgagtaagctcttgtaattaatttgcttatttcaatacactcgaagggtcacatttattgttaaaggagaaaatcatgattactttcgcttcttaacatgatgatttttaacttaccatgatgatataaggatgaaaaaactagttagtctgtgagtctgttgtaaaaagaggtttttttatgtagcattgaattgataccaatactgcatgatgatagtggcgttttcaagtgtattatgtattttttacaagtgaannnnnngnntgatacatctatttgattaatcgatagcatttacttaatcagttaaatattttaaaaacttnnntacaaccaattaagtatatatttgataacttatacaaaaccagttacattcgtgacaaattttactgtaatcaatcaactaaatatataatttaaagacatacagaatcatttaaatatttaacacatgttattacaattttnnnaattatcataattagaaattttaactt

SEQ ID NO: 90539 - DNA, 264 bp, Glycine max
  unsure (1)..(264): unsure at all n locations
  Clone ID: PAT_MRT3847_5276C.1
gccgctcgagcgcggcggctacgtaatttgctcgcgcgtgncacctacagataggcggtggccgcgtccgacgccgacgacatcctgatccgtcaggtggtgtcacacgatggagaagccgaagaggaggacaaccgtgctgaacgccgaccaccacatacgcgagcttcaagaccaagtacgacaagacctacgccatcaatgagcagtacaaacaaaactacatgagacaccaatcgaaaaaagacaggaagagaaggaaag

SEQ ID NO: 90540 - DNA, 587 bp, Glycine max
  Clone ID: PAT_MRT3847_52770C.1
tgttgtctctcctgtatcaacaccttctagaagcttcaattggaccaaaggtggagaaccagtttctgcacctccatacaaaacaccaaagccactaccagttatagtacattcccctgctcaagctccttcttctgcacacaaagcaagacaatttcaccatgctcctgagccaccgatttcatctcctgaatctcctttcaacaaagatcatcctcctgcgtcttcaccttcaaccacattttataagcatcaccatacaaggaacacagtcaccagccctgctcctgcatcatcacattctatttctccttccacttcaaaacaccaagatggatcaaatcctcccttgccgcttccaacaagtaggcaaagacatcatgctccaccaccaatgaacacaggttcctcagtttccccatctggcctccctattcagtcaccagtgagccaagtttcacctgctccttctccgctattcaaaatatccccccactcaaccaaaattccattgcctcctcctaaagtgtctccttctcggccttcttccaagacccctaagaagccagttcggcctcgttttcaag

SEQ ID NO: 90541 - DNA, 298 bp, Glycine max
  Clone ID: PAT_MRT3847_52771C.1
taacccccactattgtgaaagctgctgcgcctgctggaaccgccgcggcattactggcgggacccacccctccgcctgtcacatgcttaacaaatttatgttatatatggatggccaaatattactgcaggatctgccaattattcgacgatgaaaggtaaagtaactgtaactagggtacttataaacattaccctagagaaactttcactcggtggactctgtaaagataccccacccacacaacattcgtttgctagatttttaaaaaagcgcggccaggactgctcactaatac

SEQ ID NO: 90542 - DNA, 215 bp, Glycine max
  Clone ID: PAT_MRT3847_52772C.1
ataaagccttcgggcttttttggggaggcgtctgagggccaaaattttattaaccgggcaattttttaaatatccggcgtaaataaacacttaagggggttctattgtcgaattcaccctttaaaatgaaaagtcaaaaatttaaagcggctttggctgtagctcacggaaaagggcttaatttgggcaccttctgttaacctttttttttgggg

SEQ ID NO: 90543 - DNA, 442 bp, Glycine max
  Clone ID: PAT_MRT3847_52773C.1
gcaccagaattggcgcttgatgttcattcatctccttatcttaaaggtggaatgaacttgtcagggtttcatagcttggagacttaccttcatcttattgatgggtacttgagtcatgagacaccgtttaggtcagaagctaggagggatattgcactagttaacaagtcatgtgatatgttagttgatgagcttagaatcccacattgttggtaccaattggccaacaaaggattggtttgtaatgctcatggaagatgggttaagcccaaaagagacaatgatgatattccttcacatgctagcgaagtattcaatgctggtcttggagttgtaatgtgaacatattggatgagtttggtctccccttaaagataaaaatgcagatttaggctagaattatacgagaaagtctgtactgagaatttgttcaagcccaaat

SEQ ID NO: 90544 - DNA, 293 bp, Glycine max
  Clone ID: PAT_MRT3847_52774C.1
gcgtccactcgtgcgcccacgcgttcgggtaccactgagaccatatgtagagccatttgtgcaagctcacagcgctgaaggctacctcgacttcttccctgtggaagatgatacaaaaaacggagctgctcacattggagaatggaaaccaggggcatatggtccagtggcgccaccagctcattggggggaaactcccaacgtacggcgaacgggactaccacgggacagaagtcctagtgacatgcccacaaaccaacatagacagggtcgctcaagacatcacggatatg

SEQ ID NO: 90545 - DNA, 260 bp, Glycine max
  Clone ID: PAT_MRT3847_52775C.1
aaacagagaagaactattagttttcttagacaacatgtgcctaagcagtgagcattaccaaactacttaattagggggcacctattacccttgtttccacacacctgacacatgcacttattaaactctcgatgatttacgctaggtaactagccaatgactagtcactttaacatactcccagctcgacatccatagatgggattagaagaccattggacaagactaccttatgacataaaggcgaacattcgatctct

SEQ ID NO: 90546 - DNA, 563 bp, Glycine max
  Clone ID: PAT_MRT3847_52776C.1
cttgggggggggggggggggccaaacgcggaaaacacacgagtaaaggtgtgggaaataggctagtttcatggtaataggctgagattgggtgtaggccggctggtacataaaatgagaggaataaataacacatagttcaccgggaaaggcaattggacgttggaacaacgatatgaagttaataaggaggcgcagtagagaagtgatatagaaagtataaaccgaactatcacccagcccagtagacccaggacccaacaacaacgtagagataggggaacatttgccccaaaatggacgcctagacatttaactaggcggccttatacccggcgtgaccgccgttaaaaccggtgttaagccattggggttacgcataagactggcaataaacaagttaaatagacacaatagccttaattggttaggtggcagtgttggcatgggcactgtactaaaacgcatgcccgtagtactgacctttacgcccgtaaacgatgcctttttaaccgacaccgtaggctttggggttttttagtaactttaggcagctccgattgg

SEQ ID NO: 90547 - DNA, 284 bp, Glycine max
  Clone ID: PAT_MRT3847_52777C.1
cagcaagcggcacgatattgggccgtacctccatgcttgtagggttgcaacagtggcgctgttgctcctgtaccaatccgcttacggctacagactgttgcgagggtcaaggtctaaatcaaatcggtcagaacaccgcatcggtaccgaactctgcttcttgacctttaccaggattggctaagccaataaggttgggtgcattcacccttttagctttcgctatctgtgctctcaaacagtgcaacgccgacttcctaagcatattaacagatgaggtgaag

SEQ ID NO: 90548 - DNA, 232 bp, Glycine max
  Clone ID: PAT_MRT3847_52778C.1
gacaggcaatataattattatgtcaaatgacattatgaagataccagaagccattaaacttgcaagaaatgctcgtaggaaagtagtagaatacattgttttgtcaatcatgactaaagctgcgatacttgagttggccattgatggtcattcacttgtttggacagcagttgaggctgatgttggaacatgtctattgctcatctctaacagcatgttacttctgcgacta

SEQ ID NO: 90549 - DNA, 338 bp, Glycine max
  Clone ID: PAT_MRT3847_52779C.1
gtactggactcggacaatgtgatgactaagccaaggtaaatctgcactgttatagaattatctgtcacatatataaaatatgctagacttacgtacaaataaagaatatttgagtgcgcgcgtgtgtgaaaagaaaaaaaaacaagccagaaggtgttctgctgcacttgaatgcattgcatgatacagtgggtgctgcttttataatctataatctattgtccttgctgggaaactactactttatggaaaaggaaggagagagacagagacgatgtgaagtgaataatataacattcttgtaactctgacaataacaatggtcggctggctgggta

SEQ ID NO: 90550 - DNA, 490 bp, Glycine max
  Clone ID: PAT_MRT3847_5277C.1
gaattcagctcgagacggctgcgagaagacgacagaagggcagcgcagatagtattgataaatcagatgaattgctcaatcttgctttcgcattattgccacctgaatttttgtattcattgcaaacatcaggtatacctaatcataaattaaaacttaaggtcagaactccaatcatgctaatacgaaatctcgaccagactgatggcctgtgcaatggaactaggctcattatcaccaaactcggatctaatgtgattgaggctgaagtaattactgggcctaatacaggaaatatgacatacatacccagaataaatatgtctccttctgaatctccatggccattcaaacttatcaggaggcagtttccattcatagtttcttatgctatgactataaacaaatctcagggacaatcattacaccacataggactgtatttgccacacccagtttttagtcatggccaactatatgttgcactctc

SEQ ID NO: 90551 - DNA, 459 bp, Glycine max
  unsure (1)..(459): unsure at all n locations
  Clone ID: PAT_MRT3847_52780C.1
ctttttcctgcacgacaggatccgactctgccgcttctccctctctaatttcttcactctctctctttctctctccttatttccaattcatcacaccctctctttctctctcaagtcccattcatggaaatggaagatcatcagcatcagcaccaccatcatcactttggcatgaacgatctaaggcaagtggtgaataacgggccgaggccggcccataccaccttcccctccatgccgccgcaccccacggaggagcttttccccggccaccaccaccgtaatctcactcctttacctactcatcatccccaacaacaacagcacttcgaggttatgatgtttggtcgagacataatgccacctggccttcacgactttgcttccacaccccatgattctgctgttgctaccaccaccatcaccctacccactccaccggttacttgcggctntgat

SEQ ID NO: 90552 - DNA, 713 bp, Glycine max
  Clone ID: PAT_MRT3847_52781C.1
gtacgccctgcaggtacccggtgccgggaatttcccgggtgcgacccacgcgtccggtcctttctcggagacggagactcgccgcggaagaccactcacacaccgctttatcagctgcgaacggtggaagaattgatttgaattgcaacgaacactcacacaacaaccctaaccttctctaattaacttaatcactttcgttgctttttttttaattttttttattgcgctttgctattttaagtctatagtattttgttcaatatattttgctctctctctctctctctctctctctctctctatatatatatatatatatatatatatgtataaatactctttcactgttgagcttatagatagctagtgtttccgcttcaaatggtgattgacggtagtttcagccttcattcttcgcttcggaggttcctcaatcggtgcccgaagctccagtgttttccgcagtttcagtctctagaactgaggggagacttggtgacagaagaggaagcagttaatgtgttagaaggggtgtttcgatctgcaccccacttatacaattccgttgatggggtgtttcctattaattgctggacgcattgcagataaagctgttgctttgcttcgtcttgtgccaaatttgagggctatttctgaggatactggtggtgaagatataatgcaaaatttataacaaatttgtttaaatt

SEQ ID NO: 90553 - DNA, 524 bp, Glycine max
  Clone ID: PAT_MRT3847_52782C.1
aaatacttcaaaaagtatttactaggctgggttaggacatattttggggtagccaatcatgcaaattgacaatatttatttatttatttattttgtaaaagtttggtgttttctcataattttaggtttgttttttttattcttttttaagttgttcaagtttagtcatattacttgatgttgaagtttccaaacatttgattttgatatagtttgagactggagcttggaaaaggcatgaattttcaaacaatttatttagttcacatgtcaaattgggtttaaaagttgacggtgatagcaaatcacctcgatcccatttttttggaaataggatacaaatatacaatgatagttaaaacagaaaatatcttgcataactatctcgggaacatctgctggcaaacatcattatccatttgttgatttgaattataggtgagctcagtgggggtcactggagcccgagcatcagttagtggttctgttcagtctcttttgaaggaaattaaagaggcaactac

SEQ ID NO: 90554 - DNA, 518 bp, Glycine max
  Clone ID: PAT_MRT3847_52783C.1
aaggtaagaaacagggaacgaaacggggacccgcacaacacccaccaccccaccagaccgaatgaaagccattgttgatgtggcagaaggatttgtgtatcttgtgagctcagtgggggtcactggagcccgcgcatctgttagtggttctgttcagtcccttctacaggaaattaaagaggcaactactaaacctgtcgcagttggttttggaatatcaaaacctgagcatgtgaaacaggtagcgggatggggagctgatggtgtgattgttggcagtgctatagtgaaggtgcttggtgaggccaaatctcctcaagagggactgaaagaactggaagttttaacccgctccttaaaagcagcacttccttgaaaaataagcttttaagagctcgaacttataatagttgttgtcatcatagatattggattcaataaaatgtggttcaattatgattggatttctcagttactgaaataaatgtcccatatgaatttcatctcctccaaacccc

SEQ ID NO: 90555 - DNA, 1652 bp, Glycine max
  Clone ID: PAT_MRT3847_52784C.1
aaatacttcaaaaagtatttactaggctgggttaggacatattttggggtagccaatcatgcaaattgacaatatttatttatttatttattttgtaaaagtttggtgttttctcataattttaggtttgttttttttattcttttttaagttgttcaagtttagtcatattacttgatgttgaagtttccaaacatttgattttgatatagtttgagactggagcttggaaaaggcatgaattttcaaacaatttatttagttcacatgtcaaattgggtttaaaagttgacggtgatagcaaatcacctcgatcccatttttttggaaataggatacaaatatacaatgatagttaaaacagaaaatatcttgcataactatctcgggaacatctgctggcaaacatcattatccatttgttgatttgaattcatacttcaagttggacttgcaagttgcaacagagacagaaaaaaggactcaatcacgaagcagaagaaacccaataagtatttctcatttttatggctcttgccctgaagtcaagttgcttattgcaattgaagaaacctgaggctggtttcaatgtttgtttttcatctaagaaagctataatctccgtgaaaagatacactccggtggccgctatcaggatcatggacgcagtgggactctctgcaacattcaccagattgaaaaaagaaggaaaagtggctttcatcccatatatcactgctggtgatcctgacctttcaaccactgcagaagcactgaaattgcttgattcatgcgggtctgacataattgagctaggcattccatactctgatcctttggcagatggtcctgttatccaggctgctgctacaagatctttagcaaaggggaccaattttaatgtgattattgatatgttgaaggaggttgttccgcaactgtcatgtccaattgcactgtttacatattacaatccaatactgaagcgtggtactgagaaatttatgtccaccataagagacactggcgtacatgggcttgtagtgccagatgtccctctggaggagacggaaactttaaggacagaagctaagaaacatggaattgaactggtactcctcacaacacccaccactccaccagaccgaatgaaagccattgttgatgtggcagaaggatttgtgtatcttgtgagctcagtgggggtcactggagcccgcgcatctgttagtggttctgttcagtcccttctacaggaaattaaagaggcaactactaaacctgtcgcagttggttttggaatatcaaaacctgagcatgtgaaacaggtagcgggatggggagctgatggtgtgattgttggcagtgctatagtgaaggtgcttggtgaggccaaatctcctcaagagggactgaaagaactggaagttttaacccgctccttaaaagcagcacttccttgaaaaataagcttttaagagctcgaacttataatagttgttgtcatcatagatattggattcaataaaatgcggttcagttgtttttcttctgttcatgatatagtagttttgacatttttatttccttttcaattatgattggatttcttagttactgaaataaatgtcccatatgaatttcatctcctc

SEQ ID NO: 90556 - DNA, 433 bp, Glycine max
  Clone ID: PAT_MRT3847_52785C.1
acgagaaactatttaacatcaatttacttgttttttcacttctcatatacataaacaatagctcctctttactgtatagtgccattgatcaaaactgaaatgacagattcgtactgcaatttaagcatatttgaatctcctaggatcaaatcaaattgtctgtttttccactcttgtatgaagcacaaagatcatattcttcattgtatgtttgtctttcattaaaactgacatcaggtgattgggatctaaattgtaaatgtaaattgaacacgagcctccagggaaatattttatggaaattctaacgtgtgacttttccttgacaaatcaattgaggtttgattgagtcttaaagttgtctcatttcttgactagatatgaaggaatttacgacttcctggatctgtatgatgttgaaaatagagcctat

SEQ ID NO: 90557 - DNA, 595 bp, Glycine max
  Clone ID: PAT_MRT3847_52786C.1
atggtcttcaaactctgccacaaaggcgtaccttgatacccttcaactgtgtaacaatcacaaaagacaatacggcacatggagaattcaaaatccaggaagcaatgaatttttatcagcattagcagcaggaatgaaagcaaaactcatagtggaagtgacgtcctgcgtatcgctaaccaccttagcccttgcagctgctgcaagacaaaccggaggcagagtggtgtgtattctacccgagtcaatccttaatgattcacaacaagttatcaacaactcagggcttaaagaccaagttgaatttagaactgaagacccctccaagctactacccttctatgagaacattgatttctttcttgttgattgcaaggataatgaaaactatgcaaggttgctcaacttggtagatgttaacctcacaagatcaatagtggtcgcaaagaacatggttggtggtgatggtgacaaaaaaggaataagatggtgcctaagaggaaaggatgagaaattagaagtaagatctctaaagcatcctttagggaatggcatggaagttactaggattagcaagagtgataacactaataat

SEQ ID NO: 90558 - DNA, 435 bp, Glycine max
  Clone ID: PAT_MRT3847_52787C.1
acggctgcgagaagacgacaaaagggggactcaacgtcctttgctttatgttttcataggactcaacatcctcacctttaagtttcacaggacttaacgttctttgctttttagtttcataggattcaacgtcttctgtctttatgtttcataggactcaacgtcctttgtatttatgttgtcataggattcaacgtccttgcttttatgtttcccaggattcaatgtcctttgctttatgttttcataggactcaacatccttgcctttatattttacaagactcaacgtcctttgttttatgtttcataggactcaacgtcctccgcctttatgttttataggactcaatatcctccatctttatgtcttcataggacttaatgtcctcgcctttcagtttcataggactcatcatcctcacctttatgtttc

SEQ ID NO: 90559 - DNA, 1650 bp, Glycine max
  Clone ID: PAT_MRT3847_52788C.1
caaaggaagatttttgtcattgttgaatcagtgtgagcaaccttattccttacaaggaagatagtaaataatataaacatgcagctgagaaaaagagttctaagctgtgtccgtgactggtgagagccaaaagccgaagaaagggaagatggcgctatggatggaaaagggttcagagccattaaccgaaaccgagaaggcagaccttgaagccattgctgcactcaaagagtctgcagcctttgaattcaaggaaaagggtaatcaatatgtgaagatgggcaagaagcattactctgatgccattgattactacacgagggcaattgatcagaaagccttgagtgactctgagacctctattctctttgcaaatagagcccatgtgaatttgcttctagggaatcttagacgtgctctaacagattctaatgaggccctcaagttgtgccactttcatatataaaggcaatttatagagctgcgaaagcttctctttcactaaacatgttggctgaagcaagagagtattgcttgaagggtcttcagtttgatcccaataatgaggacttgaagaagcttgaccggcagatcggtctcaagatatcagagaaggaaaagcatgaggctgaattctccaaggctgtcgcggagacaaaggaacttgtgtctgcgattgaaaatagaggcttgaagattggaaaggcaatgtatctagaacttactggactacggaaacctgtgttggataaaagtaatatccttcattggcctgttcttcttctgtatgcagaggttatgtccagtgacttcattgaggatttctgtgagactgacatgttttcggttcaccttgatatgatatttgcagaagatcagccgttgtcatgggatgttgaaaacaactacaaacgtgaatttattgaattatactatgagactggttctggactttgtctatcaaaggaaaaacttcttcattgtctattagagggaactgcagctgctcacagggaaggtgttggtgatgaagagaaagacacagttgaggattataagcaacacatgggttcccctaaatggatcaaagtgaatgaaaggagaacactccacgatgttctcaaagagcctaatttcatcattcctgggatcccagtcttctatgttgtttctaagcgatccagcttttatggcaagttcaaagctgggaagtgggcacctccaagtatatgaaggaagcaacatgtagctgatgtccaaacagacatgttttgcacaaactagattcaagagttaatgtctcaactcaacttggaagtcttgaagattgctcatagttcttccaactttttggacttccttttaaactagagttacctgctaattgcaattgtgtgtgccagtgatagtgttagaatacaaggaacctagtcaacaaagtataatttgatatagcttgtgattttttggtacatgtataatttgataagttttgttctagacttttatcaagttctaggtgcataatgtttttcaatacgtagaatgtcctattttcttattcacttatacacaccctggctggcaagggataattggtgcattctagtttccatacgttttctttataaatataccttgttataatcc

SEQ ID NO: 90560 - DNA, 270 bp, Glycine max
  Clone ID: PAT_MRT3847_52789C.1
tcgcccattcgaacgcatatctgatcctacctttcccataagtaatgtacctatgccctccgttcatgaaagggcgcccagactaaaaaccaccggtcggtaagaacggcgcccattatgaaaggtttacgtaggatgcttcgacaatgaacacaatgggccaaaaaaaaagaaagtacaagggccgaactggatcgtccatcaaggaccgggtagacgaaagattcaacggtgtacgccccaaggaaatatgggacaacgagtccctaa

SEQ ID NO: 90561 - DNA, 392 bp, Glycine max
  Clone ID: PAT_MRT3847_5278C.1
aggttctaggaagcatgggatcctgctacctattgccactacgatcacccacattcttctgagagacatcagtggatcgcacagacagacactctgacttagctgtcccaggagagaacccaaaaagcctgcttctatcgggacaaggacgagcgcacaaaaggcttctaccacgaatataccaaatgcgagcccattcaatgtgtgttagactgaatctgaagaagtggatggtcgcagaacaaagattactgataacatcattgaaggttccgagaattggtgcatatcacagggagatgagcacggtgaggcccaacaacttgaggccgatatcaaccagctggtccaagaggtatttgctttggcaccagacgagaagctattttttc

SEQ ID NO: 90562 - DNA, 770 bp, Glycine max
  unsure (1)..(770): unsure at all n locations
  Clone ID: PAT_MRT3847_52790C.1
ccaagcgtccgaaataccacaccacaccagttaagcgccgccgtctagccggaagcaccgtatctgtggtgatcgcacgttaaaattctcgaaatctaaaacccttcgttctcttcatttcttagagtagaaagaacaaagaggagaaaatgaacaaggataagatcttcaagctagcgaaggggttcaggggtagagccaagaattgcataaggatagcaagggagagggttgagaaggccttgcaatattcctacagagaccgccgtaacaaaaagagggacatgcgatccctttggatccaaaggatcaatgctggtacccgcattcatggggtcaactatgggaacttcatgcatgggctgatgaaggagaatatccaacttaacagaaaggttctgtcagagatatctatgcacgaaccctatagcttcaagtctttggtagatatatcacgaaatgcatttcccggaaacaagaatgtggtgattcctcctagaaaggtggccttttagagcatgtggcactttagcaaacagttagtggtagtttatgttccaatcttgaactattttttgatttgggtgtagtacactacacattgctatcaatttcaattgcttgttattcacaaactcgtgtactttttaactacatgatcctactcctccgctacccctttcaattgctttggtgtcggaaacattgtacaataataaaccttgataactactacgattggttttatggatctgattannngctgccat

SEQ ID NO: 90563 - DNA, 474 bp, Glycine max
  Clone ID: PAT_MRT3847_52791C.1
tacggctgcgagaagacgacagaaggggatggtaacatagtaacacatagtttcaggtgggttctaaaacaaaagaaaaaccgagaaagagttctaagctttgtctgtgactggtgagagccagtagcgaaagaaagtgaagatggcgctatggatggaaaagggtccagagccattaaccgaaagcgaaaaagcagaccttgaagccattgctgcactcaaagagtctgctgcttttgaattcaaggaaaagggtaaccaatatgtgaagatgggtaagaagcattactctgatgccattgattgctacacaagggcaattgatcagaaagccttgagtgactctgagacctctattctttttgcaaatagagcacatgtgaatttgcttctagggaatcttaaacgtgctctcacagattctagtgaggccctcaagttgtgcccttcaaatattaaggcaatttatagagc

SEQ ID NO: 90564 - DNA, 399 bp, Glycine max
  Clone ID: PAT_MRT3847_52792C.1
agtgtaccccactggcccgcagcctgtcactgcagcccaggacaggaggctctagggaggggccgaagctactcactgacccagatgtcagaccagagcaaggactattcatgaaatagaatctaccaaactggcttcaaagtcaccgaatacaatgaaagaaactcggtgactgtaagctacaactagtagaattttttttaatttaaataagtgctaacgttctaaagacggtgagacccacaagtgggggctccccttgtctcatgtgctgctatggcaccaacccctaagccagcaccagcacatcctggggcaccgccaaggatttcctgaatccattcagacactgctgtggaaagactggaggtcagcagactgtccctttctacctcctgg

SEQ ID NO: 90565 - DNA, 212 bp, Glycine max
  Clone ID: PAT_MRT3847_52793C.1
cacagcgatccgctgcgagacgacgacgaccacagaacagggggaagcacgctcgaaacatcgtgcatcataaggacgacggtgacaagcgacagcattcgacctgacagctcctgaggacaagatgaagtgcgttgagataacggcgtggaccggcttgagcgcacgtgaccttaacagtgactacaggcaatcttcacacaattggacac

SEQ ID NO: 90566 - DNA, 176 bp, Glycine max
  Clone ID: PAT_MRT3847_52794C.1
gtaggaattggggtcgaggttgggaatgcagatgaatcaggggtttgtgaatggtgtttgatggtgagagaaagagtggggaaatcgctgaagtgtaattgatgttgtagagtagggtgatagtaagtatctcataaggtgtaagttaaaggttagtagtcgtgaagttgtaaacg

SEQ ID NO: 90567 - DNA, 297 bp, Glycine max
  Clone ID: PAT_MRT3847_52795C.1
ccggctaatgatatgcttaaactcagcgggtagccccgcctgacctgagggctccccttttggcgtttttttgcaaccgtacccttttggcgtttttttgcaaccgtacccttttggcgtttttttgcaaccgtacccttttggcgtttttttgcaaccgtacccttttggtgtttttttgcaaccgtacccttttgtcgtttttttgcaaccgtacccttttggcgtttttttgcaaccggacccttttggcgtttttttgcaaccgtacccttttggcgtttttttgcaaccgta

SEQ ID NO: 90568 - DNA, 425 bp, Glycine max
  Clone ID: PAT_MRT3847_52796C.1
accagcgaatttttttttttttttttttgtacgaaaacttaaaacccagtcaaatactaggtaaggaatagaaagattacttcatgaatataacagccacaataaagttgtatagtgcaagagtcaaaattcaacgattaaaatctcctcgtgccgaattcggcaccagcttcgtttcgttggaaggaaatcatgggtgcaggtcaagctctgaaaagaatccctcgcatcaagttcccccagagacatcccaaaccttctggttctgcacctgagattcaagcttcgtcttcaacaactgatgccagtctagcgttctttaaaagttcaaatgcctcatcctcagttggagggaaggcctctcttcaacccaaaagaactccagtgtccaaagaggagattgaggcaattttgttgggtggcag

SEQ ID NO: 90569 - DNA, 243 bp, Glycine max
  Clone ID: PAT_MRT3847_52797C.1
gggggcaaattgcccaacacttttgggggccccaaaaaaacggccccttaaaaacgcattttcccaaaaaaaaatttccccacgaaagctttaagggggcccccccggtttaaccccccttaaatttaaccaaggggcacccccttgccgctaaaaacttcccccgggggggaaaaatttccttgcccacccacgttcccggaccctctttaaacaccctatggcccaacggcctggaggctc

SEQ ID NO: 90570 - DNA, 348 bp, Glycine max
  Clone ID: PAT_MRT3847_52798C.1
atatattaaaagagatattattttttgtgatacaatggctaagttgctttcgtaaattataaaagaaagatgagatttattacccataaataattaaatgagtaattatagcatgataattaagtagggtcacgatttcgtgcttggttgagtttattttaataaaactatgtcctatgtaatcttttaaaaatttggatgaaaagttttcattatcaaaataaaatagagatataattagagaaaataagttgtgtattaataatgttaaattattttatattgccatccaattatttactagtatgtatgtaataagtttgtgaaattttaaaaagttatgttaag

SEQ ID NO: 90571 - DNA, 2008 bp, Glycine max
  Clone ID: PAT_MRT3847_52799C.1
cttttcttctcatttttaatctttactttttttcttcttttttttttctcgagccgattcggctcgaggctgcgagaagacgacagaagggggagagagagtgagatactggtgccagctatgtgagtgagtatattgctattgctgctgctatctcttcctctctccgcactctccatcgttttaggaatatcacaccaattcgtgaaatcgaaggattccgacagaatcgtacgaattattgttcattgtttgcctctactgttgtgctccaacttggtaaactagaagtacagatttatttcttcaatgggggatgctgagaatgcccttccaccttcaaagaaaagggctgctggaagggagctcactcgagatactcccattgatgatgaggaagatgcccctgagcttgagactggcactttcaagagggccagccaagaggttatgggcaccagaaggatagtcaaagttcgtcgccaaccaactaattctgctccttctgcaaatccttttgctggaatacgcctggttgctcccactgaatccagtgctaatcctgctgagactactactgaggtaaaatcagctggggaaaacaccgttgcagatgaatcaaaaagtaatgatacagctaaggattctgagaaagcaggagatggggaagctaagcagcctgagagcaaaactaatgaggcagaggataaacttactgaaagtaaggatgctgctgaagaaagcaatgcagacaaggagcatactgcagaaaaggaaagtactgatgatgaatcgaaggtagataaggaacaaaaaaaggatgtcactgaaagtggaaatgaggataagaaggatgctacacacaacgagagtgccagcaagttagataaagaacaaactggggatggcaaggattctgaaaacgatgatgagaacgagaacactgacaatgtggataagaaggacagcaaagctgaaagtgcagagccaagtgctgaaggtggccatttgaagtcatttcaactgctctcaagtagccaaaatgcctttaccggtcttgctggtactggattttctaattcctcattttccttcggttccatttcaaatgaagggtctggttctatttttggactgaaaagtgataagccctatggtcttggtttatctaacaatggaagttctcttttgggggcatctggggcctctgctgtttctaagaatgagggaagtggtttggcaatgcaggaggttgttgttgaaaccggggaagaaaatgaggaagtggtttttaatgcagactcagtgttgtttgagtttgctgatggaagttggaaggaacgtggaaagggagaactgaaggttaatgtttccagtgaaaccaaaaaagccagacttctaatgaggtctaagggaaattttagattgattttgaatgcacgtctctaccctgatatgaagctcacaaatatggacaagaagggtgttacttttgcctgcatcaatagtgccagcgaagggaaaggtggtctttcaacatttgccttgaagttcaaggacggctccatagtggaggagtttaaagccactgtcatggaacacaaaggtgagacatccacagttctcaagacccctgaaaattctccaaaggcttctgatgattgagagacactccttactcatgtctcacaatgtctgtctcgttagatgttccttcacaaagataatttgctattccgagttcgtttgcccttgtgtggcatagtctattatacttaaattagtgtacttgaatttgagtgaagtctccaactgataatggaacttaattttggatttagactgcacagttttaacgcttgaaccctgaaacgttcaatagggctgttatttcttgagcctggaattttgtctaatttcaaaatgacattgaactttgctataaaaaaaaaaaaaaaaaaaaaaaaaaaaaaaataaaaacgaacaaagtttggggcaaattaaaaa

SEQ ID NO: 90572 - DNA, 267 bp, Glycine max
  unsure (1)..(267): unsure at all n locations
  Clone ID: PAT_MRT3847_5279C.1
cttctttcagtttgtattttctaagaagacaaagcaagccatctccntcttgaatcctcccattcagatctccctgcgaatgctgctgcccaagaaaacaacccaaacccaaaacgcacccacagcgcagaaaacggcgtcgtntgnnggncccaantgaagtgcaaganacatanctcagaccttngcagcaccgttggcgtctgcgcctcgtgtctaagggaacgcctnatagccctcgtcgncggggagtcatntcacgcgcnt

SEQ ID NO: 90573 - DNA, 791 bp, Glycine max
  Clone ID: PAT_MRT3847_527C.1
tcgttttgatcagtttgcccaacaactctgaaaaggactcgaattcaacatggaattccaaggtggccatcccgcaagattaataaagtcaatcgatcattgaagaagatacagactgtgcttgactctgtccagggcatggaaggagggttgaagtttgatccttctatgggggcgtttgtggcaggagggtcaatcatccaggaaattgatgcacctaaaagtactataaaagaccccgtgcctgttactcaagatgcattctcagtaccacccgcaccttgtagtgaaggtgagaatttttcaattaagttggagggaaaattgaagaaaaccaatgtttcttcagttgattacagtgaagattcaaaatctatggcaatcaatgatgggtcgtgccagatggcaagcctttgcaccaaggtgcaggattgtcctgaacaagcttgcttgggttctgttcttgcaaaagaacatgataaacgaattctgaacaagggtggtttgagtgtagaaaaatttaaacacaatattgttggccagagttcaaaatctttgattgctgatgagatggacattggtgtagatggggatgatggagttgttgaacgtaaccaccctacttcctcaagcttgacagactcatctaatggctctggctcaatgatgcatagcagttcatcaggctctcggagctttgagaaccaggatcagtccaaagtcaaatcaaccatcattgattgtgggtcgaaactaattgtcaaagctacctatagagaagacaccattcg

SEQ ID NO: 90574 - DNA, 540 bp, Glycine max
  Clone ID: PAT_MRT3847_52800C.1
gattgttttttcaaacaacgcgtcctacggtggaacgagttctacgtgggtgctgctcgtgtttagtatctaatatcgataaatattaattattaatttttatttttataataaaatggattgagcccacaacatttttcttatattttttaatcacccaaaaaaaccttatatctcctgtgtaccattgactgctgcaattaacagacttttatttttgtgtaattgttaacgggctaagaaaaaaaaagttaaagatgtatcaagtaaaagaaaaaaaaaagtagaagtaaaattaaatgtatacaaattgtttcatgttgtatgaaaaccgatttcgtaagccattatttttagctaataattaaaaataaacaatttttttcattatttaaaattcttgtaaatttaatcaaaaagtattttcaattttctaatcattattaaaaaataatgataaataaaaccgttaaaaaaggatacattttgtacttatggaatactaatttctttgtaattattcatcttcatttagtattt

SEQ ID NO: 90575 - DNA, 913 bp, Glycine max
  Clone ID: PAT_MRT3847_52801C.1
agtgataagccttttggtcttggtttatctaacaatggaagttctcttttgggggcatctggggcctctgctatttctaagaatgagggaagtggtttagcaatgcaggaggttatagttgaaaccggggaggaaaatgagaaagtggtttttaatgcagactcagtattgtttgagtttgctgatggaagttggaaggaacgtggaaagggagaactgaaggttaatgttgccagtgaaaccaaaaaagccagacttcttatgaggtcaaagggaaattatagattgattttgaatgcacgactttaccctgatatgaagctcacaaatatggacaagaagggtgttacttttgcctgcctcaatagtgccagcgaagggaaaggtggtctttcaacatttgccttgaagttcaaggatggctccatagtggaggaatttaaagccgctgttatggaacacaaaggtgagacatccacagttcttaagacccctgaaaattctccaaaggcttctgatgattgatagacactccttactcatgcctcataaagtctgtcttcacaaagataatttgctattctgagttcgtttgcccttgtgtggcatagtctattatagtcaaattagtgtacttgaatttgagtcaagtctccaactgataatggaacttaattttggatttagactctacacagttttaacgcttgaaccctgaaacgttcaatagtgctgttatttcttgagcctggaattttgtcaaatttcaaaatgacatatattgaactttgctattgtgatgttaccgtgacaagatcactttttaattgaaataaaaactactttattttagctgagaaaaaaaaaaaaaaaagggaaaaaaaagcaaaaaacataaaaaaaaacccaaaaa

SEQ ID NO: 90576 - DNA, 304 bp, Glycine max
  Clone ID: PAT_MRT3847_52802C.1
gtgtatctaatatgtcattatttatgttcatcccaaaaccattctacgtagttttttgcgccacctaactaacgcgccgtttaccgcctgcataaaaaaccagaaacgaattattttactccggcacgcgccaacatcctatgtttttccgcttccaacaagtgccacgtgagtaacccgggcaccaacataatgggtcgcctctggctcacctggataacgggaggagctacatttgtcgccggcgcacgacgacggagacacgtttttctttttttccctgaggggcatcctcgtaaacgac

SEQ ID NO: 90577 - DNA, 258 bp, Glycine max
  Clone ID: PAT_MRT3847_52803C.1
aaaaaaaaaaaaaagggcagtatacaaggaggatacataaaaaaaaaaagtgcgtaagggacagaagtaagtctgaagattgcgtttatctagttagaaacaactgtctggggggtgtcattgatgggtttgggaattcccttgactgtgccggcgttgctagtgtggtatcccatccccctctcatcttgtggcggggtcgtggttaacgcctgttcggcaggggctttcctaggggtgcgcccgcttaatggggtt

SEQ ID NO: 90578 - DNA, 360 bp, Glycine max
  Clone ID: PAT_MRT3847_52804C.1
ggagataatgattttggatattagtagaatattttgagcaaaaaactttgaaaaaaatttattacgtttaaaaaaccggcgtatgaatacaccacatttggactgcattctaaaggcctgagatggttactgtgcacgtgcttggaaaccaagaatttagatttaatgagactaatctggcggatggtaaataacaaattatatgaatttgtaataagcagctcggttgaagcgtagaccatgattcttgacatagagttgaaggtacaaaggcatggaccgacccatgattgcatgtatcgccctatacttatttgggcgaatgccgaactggccttaggtttattgttctggaataac

SEQ ID NO: 90579 - DNA, 225 bp, Glycine max
  Clone ID: PAT_MRT3847_52805C.1
gtcgtttcagtgagcgatcggtgcccacttgatcctttattagttgtgttggtcatgatcatcatcaccggggtttgaagaagatgcccatcagacacattcccctcagaagggctgaagaggcttctcacccccacacgttgaaagggggggtggctgaactcatctccacctttatcttcgagttagccggttcaagatccgggtacgtcttaacaagctcac

SEQ ID NO: 90580 - DNA, 2813 bp, Glycine max
  Clone ID: PAT_MRT3847_52806C.1
ggctcaagcaagtaataggccctattcctctggttggttctctctttatcaatgttattctctcagcgatccagttgggtaacaacaaactttctctaatcattccttggggaaaatctgcaagcggaaaagattataggtcagtacataacgactctgagatgttgaatgatgtgatgagttatatcacacaggaccttgaagtggcctgtgaagacttcagcaacataattgggtcctcaccggatagtgtggtctacaagggtaccatgaagggtgggcctgagattgctgtgatttccctctgcatcaaggaagataattggacaggataccttgagctctattttcagagagaggtggcagacttggcaaggttaaatcatgataacacaggaaagctgttaggatattgtagagagagcagtccatttacaaggatgctggtttttgaatatgcatcaaatggaacactttatgagcacctacattgttatgaagaagggtgccagttgtcttggacagggcgtatgaaaattatcataggcaaggcccatatcaagttttattcgattggggtacggtggaatcagatccttgtaactggtttggcgtcttatgcactatggttcgagatcatgtcatcaagctaaacatatcaggatcatcattaaaggggtttcttgcaccagagctggggcaaatcacctacttgcaggcactaattttgcatggcaacaatttcattggaacaatacctagagagttgggtcaccaaaggaaacatatatgcttttgctgtacttctattggagataatcagtgggagacctccatactgcaaggacaaagggtacttggtggattgggctagggactatcttgaaatgccagaagtaatgtcatatgtggtggatcctgagttgaaacattttagatatgaagacctcaaagcaatatgtgaggtgataactctttgcatcaatcctgatcactctgtccgtccatcaatgcgtgaattatgcactatgttggagagcaaaatagacacaacaataaatttggagctaaaggcatcatcactggcttgggctgagctggcaggatacccaaatgcttggagtatcttccaaggttaagctttcaagggaattgcctccagggtcaggagttaaagcagcggtcttctatacagtgtgcgggtgcctcacctgccagtgccaagagccagccagtggtgaatccaaatcaccaacctgctgaatatgtgtccaagcatcacagagcatcgaagcctgtttggcttttggctctagaaatagtaactggaactatggtgggctctctctttctggttgctgttcttgctgcttttcagagatgtaacaaaaaatcatctatcattattccttggaaaaaatctggaagccaaaaagatcatacagcagtatatatagaccctgagtttttgaaggatgtgagaaggtatagcagacaggagcttgaagttgcctgtgaagacttcagcaacataattgggtcctcaccagatagtgtggtgtacaagggaacaatgaaaggtgggcctgagattgctgtgatttccctctgcatcaaggaggagcattggacaggatatcttgagctctattttcagagagaggtggcagacttggcaaggttaaatcatgagaatataggaaaactactgggctattgtagagaggacactccatttacaaggatgttggtttttgattatgcttcaaatgggacacttcatgatcacttacattgttatgaagaaggatgtcaattctcttggacacggcgtatgaagattgccataggtattgcacgtggactcaagtatttgcatacagaagtggagcctccattcactatctcagagctgaattctagtgctgtataccttacagaagaattttcccctaagttggttgattttgaaagttggaagacaatccttgaaagatcagaaaagaattctggttccattggcagccaaggtgctatctgtgttcttccaaattcccttgaagcacgccatcttgataccaaaggaaacatatttgcttttggggtacttctgctagagataatcagcgggagacctccatactgtaaggacaaagggtacttggtggactgggccaaggactatcttgaaatgccagatgaaatgttatgtgtagtggatcctgaaatgaaattttttagatatgaagacctcaaagtgatatgcgaggtaataactctttgtgtcaatcctgatacaactgtgcgcccatctatgcgagaattatgtagcatgctggagagcagaattgacacatcagtaagcgtggagctcaagtcatcatctttggcttgggctgaacttgcacttttatcgtaatgtagtcaaaactcaaaattaacagatctacactaaagcagagacatacacagcagttatactttttctgattacttttttttttttttttttcattttactcctcaatttcatttctactgtaaatgattgctcaaaaagggtttctgttaggcttaagcacgacaaggtctcgttgtatagcactagcggactagtggaagtccagaaattgttaaaatagaacaagattgtattggacccgtgttttcttttgtgcattataccgaaaattgtggtgttcgtcccggacccattcacctacgtgtttatcagagaccagggagattacggtacctatattatgatgtaataagggttactttttacgaagctcaaaaaaaaaaaaaaaaaa
